United States Patent Application Publication US 2007/0067865 A1 - sequence listing, part 68

SEQ ID NO: 437627 - DNA, 432 bp, Triticum aestivum
  unsure (1)..(432): unsure at all n locations
cgggtcgaccgggagtcttttgtggactaagttgacaaagcccttcgtacatgtcaacctagtagacccacaagtcagcctccaaatctgtcccaaacagcacacaacccgaaatttctggccagattcaaattaactttaaaactaaacataccttaatttaaatccaatgaaattttacccgcacaaaaacaatgaaatttaaaatatcaaaatccgaaagaaaaaaagtattttggaacaaatgtcatgtttgctatatttttcattttacaacccatttattattacttatagcccatttcttattacttatagcccattttctgggaaaaatgcatccctcctcgtcttgaaagatttccggcccagcagggcatagaaaagcaagtaagcctacgttggttattctgcanaaaaatagctgggcta

SEQ ID NO: 437628 - DNA, 443 bp, Triticum aestivum
gggtcgaccggtatcttaaagtgaccaggcggtggggctctgggccttcttgctatagtgctgcggtgagctgggatggcccgaaccgcttttcccccttcatctcgaatcatctccaaatcctggataaatcaaaccacaaaagaatgtatagcatggggactttggaatataccctcatgtatggcctttctcttagccgcccagattgcccatagcgtgacggatagcttgatgaacagctcatgagataatgactgcatatgtgtaaataaccattgtttcgcattgggttctgaggtggctgcgatttgctgtccaagctcttcatcaaccagcgcccatgtacacctcgacatggtgcaatctactagagagtgcttccatgagtcgggcgccccacatattccacatgcacttgagtcaaacatgtgcctgtgtga

SEQ ID NO: 437629 - DNA, 420 bp, Triticum aestivum
ggtccagaataccgggtcggccaccgaggtattctggcctgtctggatggttacatgaacatcgcaatggagcaaactgaagagtacgtgaacggccaactgaagaacaagtatggagatgctttcataagaggcaacaacgtcctctacatcagcacgtcgaagcggtccctcaccgacggagcataggcggagtggagcattcacatcatcatgtaatttgaaggtcgttaacccgattattggttgtggtgatctgactggtgctgcctttgtcaatctcgtacctcctgtctgctgtattgcctgctgatggagacttatctggaaccattacgattcgatgttatcttgtgtttttagcttggagatgtttgtggccaagattctgcgatcaggatatagataagatttgtgttt

SEQ ID NO: 437630 - DNA, 346 bp, Triticum aestivum
  unsure (1)..(346): unsure at all n locations
acgcctgccatgtacggtccgagattcncgagtcgacgggcctagaagcgcacaagcgagctgttaccctcagactgcaagagatcgaagccactgtaactgtttaaactgttaacatggtctgttgtgccagtctatttgatgcttgggaactgatatttttcttaattcttatcggatgggacttgccagagtttaaggtgaagaatacgaagctgtttcatggaatnnnnnnnnnnnnnnnnnnnnnnnnnnnnnnnnnnnnnnnnnnnnnnnnnnnnnnnnnnnnnnnnnnnnnnnnnnnnnnnnnnnnnnnnnnnnnnnnnnnnnnnnnnnnnnnnnnnnn

SEQ ID NO: 437631 - DNA, 481 bp, Triticum aestivum
cacggggacccaatagcgatctcaaggtccatgccaaagctgaaacaactcgtgctcaggtacgcatagctatctggcgtcggcctcaactcgatcgcagaaggatgcaaggacctggaggtcctggacctgtttggctgcgcgaatttgacgagcaggggcatagagcaggctgctgctaacctgaagaacctggagacgctggtgaagcccaacttttacataccgaggtcggccttccacatggagaggtacgggcactggcagttatacgacgagaggttccagacaaacgtatttcagatatgaaaagaacgaccctcgtgttctcaagggtcgcctccgactgacgacggctcgcatgctcgttactgttatatactgtatgtgtatgacaggtatgtttgtttggagagcagtaacattctgttccagccatctttctgcacaatatatatacatgggaaatggttttgcttcc

SEQ ID NO: 437632 - DNA, 727 bp, Triticum aestivum
agcttatgatagtgatcatgaagttttggatcaagtcactcccgtacctggtagggtgacaaggatgcgtactacttcagagtggtacaataatcctgtcttgaaggtcatgttgctagacaacaatgaacctacgagctatggagaagcgatggtgggcccaaattccgacaaatggttagaagccatgaaatccgagataggatccatgtatcagaatagatcatggactttggtggacttgcccgatgatcggcaagccattgagataaatggatctttaagaagaagacggacgtggacggtaatgtcaccgtctatgaagctcgacttgtggcgaagagttttttcacaagttcaaggagttgactacgatgagatcttctcatccgtagcgatgcttaagtccgtcggaatcatgttagcattagctgcatttatgaaatctggcagatggatgtcaaaacgagtttccttaccagtcttcgtaaggaaaggttgtatgtgatacaatcaaaaaggttttgtcaatcctaaggttgctaaaaggtatgctagctccagcgatccttccatggactggagtaagcatctcggagttggaatatacactttgataagatgatcaaagattttgggtttatacaaagtttatgagaaacttgtatttccaaagaagtgagtgggagcaccatagaattactgatgagtatatgttgttgacata

SEQ ID NO: 437633 - DNA, 390 bp, Triticum aestivum
gggccaactgattttctcctcttgcagttgggttcggtcgatgaagactccaccggctcgctctggcaggacaccctcacaaacggcaccctgtagatgctcgatccttcaatctctggtggatgctccatctgggatcgatactcccaccaccgctccctcacgatcggattcggtgaatctgtttgctccagggcccagaggagcagctctatgtactccggcgcgactccctccgggtgtatcgccgccttttcgctctgttccagacatttcgccatggatgtcgccgtcgccgctagttggtccttgttgtcaaaccaagactgtatctccaacatcctagcttgcttcacagggtcgccgtccgcgatcctcatgtatccgttg

SEQ ID NO: 437634 - DNA, 442 bp, Triticum aestivum
gggcaaacagtggcttaatgaaattgacaggtatgctagtgaaaatgtgaacaagcttttggtggggaacaagtgcgatctagctgagagcagagtggtttcttacgaggctggcaaggcccttgccgatgagattgggataccattcctggaaaccagtgccaaggatgcaacaaatgtggagaaggcatttatgaccatggccgcagagataaagaacaggatggcaagccagccggctggaaatgccagcaagcctgccaccgtgcaaatgcggggtcagcctgttgcccagcagaacggatgctgctcgtcttgatcaacactcaaagatcacagtagtgttcttgcaaaactcagttggttgttcttcccctgtaaattaagtgtactactatcatgccgtctgttggaagaagtgtcatgtcccctaactacaaca

SEQ ID NO: 437635 - DNA, 404 bp, Triticum aestivum
  unsure (1)..(404): unsure at all n locations
ggtccagatattccgggtcgacgggaagctttgtatcgatatcagagccaggtgttccgttttcttttatctttcctctgtagctaccatgccaataaacaaggcgatcgtcaaaacatatgtgcactcacttaaagtagctatttgcgccccagattttcctgctgtaataagaacatgtctgttgaattgttttgctgctcaaaactatgatggatggtctttattggtctttcgnnnnnnnnnnnnnnnnnnnnnnnnnnnnnnnnnnnnnnnnnnnnnnnnnnnnnnnnnnnnnnnnnnnnnnnnnnnnnnnnnnnnnnnnnnnnnnnnnnnnnnnnnnnnnnnnnnnnnnnnnnnnnnnnnnnnnnnnnnnnnnnnnnnnnnnnnnnnnnnnnnnnnnn

SEQ ID NO: 437636 - DNA, 425 bp, Triticum aestivum
gcgacgagccattcgggacttattatggaggtgccctactcctcctaaggtgcctgtgttcgcgtggtgactcatcactgattcccttccaacatgggttaataagaagcgtcgtaatttggaggtatctgacgtgtgcccggtgtgtgcgtctgaacccgaggacacataccacgccttccgcaggtccccacgagcagtaggtctctggcaggccatggcgagcgactggaggctcccggacgtccgcaagctggtgaatcctggaccggagtggctcctgcacatccttggggacagtacagagacggaacggcttcacctgcttatgactctgtggcgcagctggcatgtaaggaatgatatagttcaccataaacggcctcccaccgttgagtcatcgaagcgcttccttcatagctatg

SEQ ID NO: 437637 - DNA, 397 bp, Triticum aestivum
gcttgaaagtcttgcagcaaaatatagatgtgtttataactgcacatgaggaacaacaagagcgggagaagaaggaaagagaggcagcagctgaagaagaagaaggatacagttttagatgctgccgttgagagcgagggcgctgccggacatgctatcgcggaaggaagcaagaagattgtattggtgaagcataagaagaaaattaagcatgccaaagtaacaagctgttgtaccaaggctcataatttggtgactctcaatgaggatgaggcaacacctaagctgaagaagaagaagagcaaaaaacagctaaaggaaagcaaaagtcctgttgaggtacaaagtccattggacagtaatgatgctggaacacttaagctgaagaagaagaaaa

SEQ ID NO: 437638 - DNA, 342 bp, Triticum aestivum
tccgggtcgacgggcctgtaaatcagttatagcggagctatagcgggctacagcggactagttgtgatggccaccatttagcggcaccttgctgaaaaggctatagcgggctatagcggagctatagccggctatttaaaactatgattagacagtgatgttattttcttcctatgttgtacaagccacaaacgtttggtgaacggaaacaccatcatggccttttatagagctacaattgaatctttaccattgtttttctgtaggcatttgtttgctctgctttaaactgttagacgtgtaggttggactgcagttcatttgggctgaggaaatccatgc

SEQ ID NO: 437639 - DNA, 376 bp, Triticum aestivum
cgacggggatttaggtatgtgcagtactttgatcccaacgatgcggcagacgcaaaatactacatggatggacaggtcattcttggtagagaagttgcagttgtttttgcacaggagaacagacagaagcctgctgagatgggaactagagaaagtagcagaggtcggtcttacgatcggcggcactctccttccccaagggggcggccatcttaccgcggccgaagctactcagggtctccatcacctcggcccgcaaggcggaggttcagagacgagtctccctcgcgctcccgctcgcccagcggatcgaggagtgcgagtccattggatgggaagtacggcaggtcctcacgaagagagaggtcgatttcgg

SEQ ID NO: 437640 - DNA, 299 bp, Triticum aestivum
ggtcgaccggggctcaggccgcagaggtggtggaagattcggccggggtgacagaggcggccggagtgacaggggccgtggtcggggtggtgcaccccccaggcagagtgctggcacacctagttcagggaagaagatcactttcggtgatgactgagctcggtgactccgcttgaaatcgcgcagaaactcgaacccacccctagtgaaatgtcgagtatttcctttttgcctggagactcgtacttgctgtttttaatattatcttattattattattattgtggaccgtggtggtt

SEQ ID NO: 437641 - DNA, 495 bp, Triticum aestivum
gggccgacgggcacgccaagaagccgtgaaaagctgagggcggccgttgatagctagatccgctggtgtgtggcaagcactgacggggcgcatggttgatggttcggtagtgctactcgtagcgtgcatgcatgctggttctgtgggcgctatacgccgcgcgtacgtacgtttggagaactcgatttgtttgttgtgtttgtcgcttaattacgtcgttaggtccatctctgtcggtcggtcgtgttaagttcttggttatctgtagtagtggtgcatgttcttgaggcatatgaataatgctagatgtacgtgtcagcttgtgccgtggtatgcaatgatgaaatgaatgaagtattattgtaaaaaaaaaaacataacccaaaatacatcatagaaaatagaccataacagtaataaaaaaaatcagacaaataagtttatagacagacagaaaaaaaaaaacaggccgcataaaaaaaagcgggcccccca

SEQ ID NO: 437642 - DNA, 373 bp, Triticum aestivum
gggcggcttcactcactatggtgtggtgaaggctgactacctgatgatcaaaggatgctgtgtcggccccaagaagcgcgtggtgaccctccgccagtccctgctgaagcagacctctcgtctggccctggaggagatcaagctcaagtttgtcgacacctcttccaagttcggccacggtcgcttccagaccacagacgagaagcagaggttctacggcaagctcaaggcttgagctgccgccgcgcatcatcagttatatcattttgtcaaaacgaacatgtgatacttgattacttcccctgcctaagttttgtactagttgatgttttcagaatctggctcatctatgaattcttcgtgtcatgtgctg

SEQ ID NO: 437643 - DNA, 411 bp, Triticum aestivum
ggtcggtatctagggtcgaccgggccaacattgacctgaggagcaggcaccagcgcaagatcctggagcgcgcaaggaagatgtcagagaagattgggaggctggaggtggaaatgcagaaggtccagcaggccctggtgaagtatgaggaggagcagacgacgtcgaaaaccgtggtccagcggtccaaggtgcagctggtggactatctctacggtcgaaggcgggaaagccggaagccgcggttctcgccctgccgttgcatgagagcgaaaaccattgatgactgactctgccttcgttcgcgccgctccttttttttgaaggcggagtgtggaacggttggggttttcagtttcagatggagcgactcattagttcatgtctttctacgtaaatacagaaaaaaga

SEQ ID NO: 437644 - DNA, 403 bp, Triticum aestivum
gaaaagcacagtgacaatctgtggtgatattcacggacaattccatgattttgttgagcttttccggattggcgggaagtgtccctgatactaattatttgtttatgggggattatgtgggtcgtggatactaacccggttgagaccgtttccgctcttggtagcactgaaggttcgccacccacatcggattacaatcctccgcggaaaccatgagagtcggcagatcacacaagtatatggattctacgatgaatgcctacgaaagtacggcaatgcaaatgtatggaagatattcacagatctttttgattatttcccattaacagccctggtggaatctgaaattttctgcttgcatggtggtttatctccatcgagtgagaatcttgatagtgtgcgt

SEQ ID NO: 437645 - DNA, 437 bp, Triticum aestivum
ccgggtcgactccttctatggatgaacgtattgctggcctagtccagtcatcgctacaaacggctgctacagcagtatgttactttcctatgatatcatgatggcttgcttatattaatgtcaacatttactggaaaaatattcatgctcataacatgctgttcttaagattgactacattaagagcccttttttatttgactccaacttgatatgatgttgtaggccgcctggtgtccctacccttactaatcccagaaactttcacagaaaagcggcctggcagttgcaggtggttcctggctcgatgacacgatggcgaatgattgatgatcgttcgcacgtaccggacgtgttgtttcgcggaatacaatcacaatcactgcaaggtctttgagcaagattccagcttctctgggccttcaagaatttttgac

SEQ ID NO: 437646 - DNA, 370 bp, Triticum aestivum
gggcggccatgcatgcgccatcccgccggccggccaataaatcagggagcgtttgggtggcctacagtgcgtacgtttcggatattgatttcttcgtggagtctagtgttcgtgcgtgtgtggttggtggtagttgtttggttttgttagtgtgagtgcgtcgtgggtgccgtgtactcctgtgtgtgtgtcaagtgttgccacctgcgattccattttcattccgtgcgatgaataaattaagaaggggtcttctggacgcgtctagcgggcgcacggccgcctaggatgcttagcgagcggcccgacacttcagataatttcttgtctctccttttaactagaatagtcatctagtagtccctttttc

SEQ ID NO: 437647 - DNA, 156 bp, Triticum aestivum
tacgggaggtgaacattgatatattggacgaagggtattgcagtccggaattgtttcaggggtaccgggtgatgatcatgtttcctaccgggtgatgatcatggtataggtgatgatcatggtcgggacacctctagacatggccgctaccaggcc

SEQ ID NO: 437648 - DNA, 434 bp, Triticum aestivum
ttccgggtcaacggggccagagatcatcaccaccccgtatgactggcgcatccacgtcggcgatggcgagtcggcgccgcgagaccgcagtgagcgcatctgccaccctgccgctcctcctgtagccggcgtgatgacgacgaagatgaccaccgtcgggaggaccaagaccgagatcgtcggggccgtgacggctccaggaacggcaggggctggggggagagggtgcgtcgcagcctctcccgcgccccccgggacgacaaccgcgaccgtggtcgagagcagcaaggaggtcgtgatggcggtcggcgatgccatgaggaagtggccccttcgctgctgctacgtggctccggctcctccagcgtggtggccgcacacgatgccgagatggtgccagttgctcctccgccgcctggccgtacaatctcccc

SEQ ID NO: 437649 - DNA, 409 bp, Triticum aestivum
tcgacgggacagaggcagagcttgaaggtggttcatagcacggtgctcccctcccttgctctgcgttttcgttgtggtgaagatggcgatatcgatggagcgcaggaagatgaagcccgtccttgctctcgtgctgctgctgtcgtgccatcttcttcttccgctggtctcctccgtgcctgtgtcgagtaagtgtttgacctccaaccccatgcacgcatgcatggaccttactttaatatcagttcatcttctttcttggcatgtgtatgtgcatgcatgcatcttaattttgagccttgctctcggatgtaggaagcgtggccttgggaaatcatctagcctcagcttctagtctaactctggaggcggcgcctgttcaggtcaatctctcactctacctgatgcc

SEQ ID NO: 437650 - DNA, 382 bp, Triticum aestivum
gggctagtgcagatcgggcacgagctcctcaggaagaacgtgtcccgggtggacctggagaccggccgcaacgtggagatgcccggcctgggcaccaacgcggagcagctcgccaggttcgcaaagcacctctccgacgagcgccgccgccgcaaaaaggcgcttcaggttaactagcagctggccggccggctcgctcgactgtgttgagtcctgctcgtttggtggatgttttccattcagttcttttcttcttggtacaccgatgtacagtaatatttgtacagttatgtgagagtactgtgccacggttggaaaatagactaagggtgttccatgttttgccggagcaagtgttgattaaaaaaaaaaaaccaactct

SEQ ID NO: 437651 - DNA, 430 bp, Triticum aestivum
cgggtcgaccggcaatgcaaagtttgtcagcaaaagtcagaagaacctttggtagaccttggatgcagatgtcgtggtgatcgttcacaagctcaccgcacttgtattgatgtctggttccgtactagaggttcaagcaagtgtgagatatgccagcacgttgctgtcaacatacctcctccagagacacaggcaagtggatggcttagcccactcggggttgcatttgcagttctgattggtggtctagcattggctgtgctgagatctgtttctcttggtgtttccgcacctcccgtgaacataataattggtgttctgattgttctcggcttgggcactgcccttcgactagctctcgagtgctgccaggagtttggctcgaggagaagcatgccaaggatggaaaacatggcacccagtggggtac

SEQ ID NO: 437652 - DNA, 773 bp, Triticum aestivum
gggtcgaccggtacggccactacggtcgctcgacgacgaagtcggcgaagaggagcggcggcaagaagcagacgagcaagatcgtcggcttcgtgaagatgcacttcgtcggcacctccttcccgccagctcgagcgagggatcggttggacgccagccgcgcgccctgctattcgtcatacaacgactacgagtacgcggcggagtggaacgctgtggttccggcgacggcggcggccgtggaggaggaggtggtggaggtgtgcgacgacacggcggagtgcgggtacctgtgttggctggaggaggagaggtcgtcgggtggcgtgccggcgggcgaggacgacggcgccgaggctagtccggcggtgaacgagatcgacaggctggcggagaagttcatcgcgaggttccacgcgaagttcttgctggagaagcaggagtcgtaccggaggtaccaggagatgatcgccaggagcatatgaaccacgagatccatgacgacccatcgagggttcatccattgcgccgggcggcttggtgtccggactctgagcatccggagtactacgtgagtacgaatttgatgttgagcagtgagtaattcatggtgcagctcttcgtggccgtgcctcgaaattggagtcgttttcgctgggggcgtgtcgtgtgtcgtgtgtcgtgtgtcgtgtgtgcgtgtgatgatttaatttggtggattcatgtaaggttgggttacggtcgaagcaaaattattcttcgggaggacaaaa

SEQ ID NO: 437653 - DNA, 474 bp, Triticum aestivum
  unsure (1)..(474): unsure at all n locations
gggccgaccgggggtccaactgtatgagttcatccctggaagacgtgattcgtcagtttgtccccgtgaagggcgccttcctgatgctaagaaaggcgcaccacatctgagggacatcttttatcgaatgggcttaacagacaaagatattgtagcactatctgggggccacagtctgggaaaggcgcatcctgaaaggtctgggtttgacggtgcatggactcgtgatcctctgaagtttgacaactcatactttcttgagctactgaaaggggaatcagagggtcttctgaagctccctactgataacgcattgttggatgatcctgaatttagacgctatgtggagctttatgcaaaggacgaggatgctttcttcaaggactacgctgaatcacacaagaaactttctgaacttggcttcacaccacggatcagtggcgcagcatctacannatcagatgtttcaactgc

SEQ ID NO: 437654 - DNA, 448 bp, Triticum aestivum
agcggaagcgttcaagtaaacggggttgatggagtcgtactcgtcgtgattcagatcaccggtgatcctagtgccgaacggacggcacctccgcgttcaacacacgtgcagcccggtgacgtctcccacgccttgatccagcaaggggagagggagaggttggggaagactccgtccagcagcagcacgacggcgtggtggtggtggaggagcgtggcaatcctgcagggcttcgccaagcaccgcgggagaggaggagtagggagagaggcagggctgcgccatggagaggtcagaactcatgtgtatggcagccccaaagtcctcaagtatatataggggagagggaaggggctgccccccctttagggtttcccacccccaaggggtgcggccagccctagatgggaaaggggcggcggccaagggaggattctctccccccccc

SEQ ID NO: 437655 - DNA, 453 bp, Triticum aestivum
  unsure (1)..(453): unsure at all n locations
cgggtcgaccggagacacattggagtacgaacggttctgcaaaatgggcctacggccttctctcaaggacatctgctggaacggtccgtcagaggaaaagcttccatcagtatcggagtcagtacctccaactccgtcctccaagtcgaccaaaagaaatgtcatttaagtgtgatatcttccgagctgcaattacaatctattctcctctctctttcttccctcctcaaagagctgagactttgctcacttgagtatcaagctttagggctctttgttaatcctttttgcagtttcccttttgtggtagcaattgtagtatatggatttcctgttttgttcaccaatagaagcacaaaaagtgacagtaacactcttacagtgttgctttgggacaagcataccatcacctgcaaaaaagatcttgtaagagccanagctattataggatga

SEQ ID NO: 437656 - DNA, 360 bp, Triticum aestivum
agggaagttacaagacctacatgctgaaaaggaagacatcctaaggcagctgaaggagctcgaagagggaatgaccactgaagagaagaagcctgtacagatagtggaagcgagtggcaaggccaagtccaaggaagatgatcttgttactgcaccctgatcttctggaaatctttgacttgttgacacttgctgtgattttatatggttgtaacgcgaataatttctgatctgggtacgtgcacacgtttctgtgtgcagtacagaactccctctatatacatatacagcttgagtgtaagaatataaacgcccagaaaaataaaataaccacataaaccaaaaaaaaatgcgtcggct

SEQ ID NO: 437657 - DNA, 413 bp, Triticum aestivum
gacgggtacatcaagcaccataacgacgccggcgtgggcatgaccgactacggcctcgacaggggcggcggccccgggctctgagtgagtgaggctttgtgttgctttgcttgttgtgaactgggctggggggttgctgtagcttgtgtgtgcctgaagctttatgcttccaggatgtgatggtccgagcgatgcggaaacggtactgtaactgcatcatatgtttatggtgtcgatcgccttgggtgatatcatcttcggggtgtactctagaaacaatggtgcttgagctgtcatggtaaaagtaaaacattgcggtgtaatgctgcatttcacatgctggtttagttatgttactttcttgttcgtgtacgccgtggtgctagtgaggtggctcctatgttggctaagat

SEQ ID NO: 437658 - DNA, 297 bp, Triticum aestivum
ggtcgacggggaggacgccgtggtgtcgccggtgaacaagtgaagccgacgtatccatcagcccatctcacgttcgggttcgtgtaatgcatgcatgcatgcacaaataattcgttcacgttcagggtctatgatctggactagtatttcacgtcgttgtttcgaaatatcccaatgattagtaaactccactacatctacattctattaccctttgattgcgcgattatagcccaaatgatgtttccacgagcacatatgatgctaattattcataaatacaatcctatttgcatg

SEQ ID NO: 437659 - DNA, 379 bp, Triticum aestivum
  unsure (1)..(379): unsure at all n locations
ggctcgacggggcgacatggctcaagttcaccggcatgcccaactacctcggattcaaggtctaaacgcgcatgcatatgcatgcatgcaacgcctgccccctgtacatgagataccgatcgaggtaaacgtaatgtgtgtacggaacgtgtgatgactgatgcttgcaagatcagcaaaccttcgctgctccgttatcaccttctgttcttttctggagttctcttttccctggtaaatgattaagtgtatgttgtgagttgtgacattgattaactggaaaatgtatcattcagatgcccattaactgcgtccgcgttgctaatactactccattattttatgctcnnnnnnnnnnnnnnnnnnnnnnnnnnnnnnn

SEQ ID NO: 437660 - DNA, 450 bp, Triticum aestivum
  unsure (1)..(450): unsure at all n locations
ggtcgacggcgaaggtgaaggaaacagcggagtcagccatggggagggggagggtggagctgaagcggatcgagaacaagatcaaccgccaggtcaccttcgccaagcgcaggaacggcctgctcaagaaggcctacgagctctccgtgctgtgcgacgccgaggtcgcgctcatcgtcttctccaaccgcggcaagctctacgagttctgcagcacccagagcatgacgaagacactcgacaagtatcaaaaatgcagttatgcaggacctgaaactactgtgcagaaccgagaaaatgagcaactgaaaaacagccgcaatgagtacctgaaactaaaggcacgggttgataatttacagcgaacacaaaggaatttgcttggtgaagatcttgattcattangcataaaagagctcgagagccttgagaagcaactccaatcaacct

SEQ ID NO: 437661 - DNA, 412 bp, Triticum aestivum
cgggggatgaaaaccccatttttggaagatatgatggcaaggaatcacacctttgttgacggaagagtgctgtctttgcaggatggagtagccatcgctctgagaatcctgaactctggtgattcacccgttaccataggatcctgtattggtgtgaacgagccaactgcctcactagtaactcagagttttgttaaggctatgtttgagcgagcaatgccccatttgcgttggtcatacacttcccagaacatggagaacatgaagcgcatgtttcacaaggtccatggcatgcccaactgctgtggtgttgtacatacaacgcgcatcacatttggatcacagaaccgtgagcatgtggagaatggaggcagtctcatgcaagccggtccttgatccgggaaggggggtc

SEQ ID NO: 437662 - DNA, 432 bp, Triticum aestivum
ggggcttgctaactaaatggcaattggcacatacaattcgtccagttgcttctcgtgggttttcataaccctgctgcgcaaaaatgggatatgcatttgagatagatgtccgagttagtacgtagagtcggtgatcgatacagaggtcgatcgagttagctgttcctttacccaagaaaaagtatttcgattttccatgtccaatcgcagatcccagaatttctacaagaaattagataggtagctaagctaatctagttccctatacaccaatcggttgtcattctactgcaacagttgtactgcaatgatgaataccttaaagtaggtataaatagaaagaattttgccaaaatggaaaagggctttctttctaaaaaaagatgcttgctaatttgattaatattaatatcgggagatcgaatgaattta

SEQ ID NO: 437663 - DNA, 470 bp, Triticum aestivum
  unsure (1)..(470): unsure at all n locations
cgggtcgacccggggttttatcccgaagcaaaacggaaaggaaaaaaggaagagttaccgagagacagaggagccaggggaggggggtaaaatcaagaataaattataaccgcacggccaagaacaagggagggtaaataaatcgcccatcgcctcaccgcccgggaggggatgatgtccgaaagcgaggagcacgggtcgctcctggaaaagattggcgacaagatcggcgacaagatccatgagttcaagaaggattcatcgtcctcggactcggacgacgacaagaagaagccgcataaatccaagaagaagcacctgtttggcaggaagcatccgctccacaacgtccttggcgggggcaaagctgctgatcttgtgatgtggagggacaagcagaagtccgggagcatcctgngcggggtgaccgtcatctggttgctgttcgagggaatcggctacaacctcct

SEQ ID NO: 437664 - DNA, 435 bp, Triticum aestivum
attcccgggacgacgggggcgccaaaaactgtcagcctgaggagcaagtctgagtgagtgatggatggttcatcagggtgagctatatttgtagggcttgttatacccaggctgtattaccacttgccagaatacactagttagcaggtacaccagttccagctgagctgctgagcaaagctcatcatactactatacattttcttcatctacagggttgtttcatgggtgatgggctgacatgttgttggtgggcattcttgtactttttttttggaccagattctttgatgtattttttcatcttctgcttattcttagatatatatacatgtgtatcctgggtctactttctgatcgaggcagtgaatcaaccttggttttttctactgaggttgtgtgcctatggtatgatgaaagctgcattcagaaaat

SEQ ID NO: 437665 - DNA, 330 bp, Triticum aestivum
attcccgggccgacgggcgaaggaaaatttttgactaaccacaaaagaaattatcataaaatgatgacccaaccacccctccgaaaaggattgaagtggacaaagaaccccccaaggccacaacagaaggaacgcagggaaggaaatgtgtatacctcgatgttccaaaaatgctttggtgaaaatttgtctagcattgtatgtagcttgcgcacagtgcttgttaatctgatagcagctggtgattcttttgtcgactacaaataaaatgtgtcagtgtaatcctatatcctgggagagaaaaagctagttagctgtttgatagtgttc

SEQ ID NO: 437666 - DNA, 404 bp, Triticum aestivum
cggggccacgggaaactgatggtccagttatgctgcgccgaagacttcccagccagagacaccagcggccgaaacaaccgatgcctatgccgcgccgagaccgaggccgtggaacaagaagattggccatctccccccgccgcacgtgtaagtccaacagtttacccagtttctgagcgatcaaccaaaagaacttcccctctcatctcacttggggagctactatgacccgatgaccggcccacactcattttataccccaattttcattgtgtaaccgcttacccacaatgtaccacttatgcaactccgtttccagtgttattgtactgctatgtaaagagaactcatgtacctgtcatgtaagcaaacgggtgacaccaaaaaacaaaaaaaagcggccg

SEQ ID NO: 437667 - DNA, 565 bp, Triticum aestivum
  unsure (1)..(565): unsure at all n locations
ggtacctaggtcagaattcccgggccgacgggttcaggtcgcagtacctgcaggactacatcgaggcgaccctcgaatccagcaggaacgggtccaacgtgcagggctacttcgtgtggtcattcctggacatgttcgagtatatattcggctatcgcatgggttttggcctctatggtgtggacttcgactccgaggagaggtcgaggtaccagaggcactccgccaagtggttcaccggcttcctccgtggcggcgacctcaggccggtggctctccccggccaggcctattcccagtgatcttggcacacttcttcacgcttccgtagcccacggagaggaggatgcacggcgaataagcctgggaagatggttgggtgttgtttttgggtggtaactgagctttgcttgggcagtagggtttatatacaggtctctgcttctttgggtttgattgttcctaaatgtatatgtctgtgttgatgtgtatgcggaaaatattaatatgtcgatatacaaggtgttggatcnnnnnnnnnnnnnnnnnnnnnnnnnnnnnnnnn

SEQ ID NO: 437668 - DNA, 394 bp, Triticum aestivum
ctgcaaactatcaagttatatacatatatacataaatggccgcacgggaggcatcataatactttcaggcaaaagtataaacacagcctttataatttaataaacattgttcttacaatgggaatacatgtcactagaacataatattcttcgagcaccgagcctctgttaaacgagcgccttcaaggacttcttcaaagtagtgcccggccgatactcggcccacggccgaactctgggtcgcaatagcggtggcctccatctctgcccagtatgtcttgacacgggccagagccatccgcgcaccctctaggcacgccgacctcttcatagcgtcgatgcgcggcacagcaccaaggaactgttgcactaaactaaaataactattcggcct

SEQ ID NO: 437669 - DNA, 538 bp, Triticum aestivum
gtacggacaccgaagccttagaagctttcaagcatagcgttcgagacgaatggcttgccatacacctcggtcaagaaaagccgagaacaatggtagcattaacaagcctcatgacccgtttttgcgcgggcgaggacagctggttagcccgatgcggcaccagcgactcaagtacatccgaagtcagggatggaaacgggaaatcatgacgcagcaagaataagcgctagaataaagaagacagcccgaggccccgggcggcaaacgccggatttagaagctctcggccaggccagcagaagccgccctccaaaggcaacagagacgaactgtccagcctaaacaaaattctggaccaaatatgtcagatccatagcaccccggataaacctgcatatcatacccacagagaatgttgggtcttcaaacagtccggcaagctcaacgccgaacacaaggggcaggatacaacaagtgaagacgaaactagtagaaaaggggcctttagtcccggtccaaaaaaaaaggcaggaatccc

SEQ ID NO: 437670 - DNA, 464 bp, Triticum aestivum
  unsure (1)..(464): unsure at all n locations
gtcgatgccactgcctacagtgccccgttctgggacacggcaggccaggagaggtatcgggcaattacaagtgcgtactatcgaggggccgtcggtgcgcttgtcgtgtacgatgtgacacgccatgtgacctttgagaacgtggagaggtggttgaaggagctccgggatcacacagatgcaaacattgtcatcatgcttgtcggcaacaaagctgatctccgccatcttagggctgtatcagtggaggatgccaaggccttcgctgagagggaaagcaccttctttatggaaacatctgcgctggaggccatgaatgttgagaacgccttcactgaggttctgactcagatctaccgtgtggtcagcaagaaggccctcgacataggcgatgaccctgctgctccaccgagagggcannacatcaatgttggtggcaaggatgatgtctctgctgtgaaaaa

SEQ ID NO: 437671 - DNA, 294 bp, Triticum aestivum
  unsure (1)..(294): unsure at all n locations
ttcncgagtccacggggagcgtaagcatcaatctcattgaaagaagcaacatcttgttgaatcgtccctctaccactttccttgtcaaccagagtaatggccccagccaagaacattggggcggcatgaatccttgtcattgtcatggtggcaactgcattattaccgtcgtcaagcgccaccctcaccaagtccggcgagaacctgttcaagtttgccttcgtcgcgctcatcgatacggtcctcgacgatgtcatcgccaccaccccaccagccaaaatacccgaagtacaa

SEQ ID NO: 437672 - DNA, 457 bp, Triticum aestivum
ggtccaagattcccggggccacgatgacacaccttatcgaagactcggacatggaacttcttatggcgatggcatccacacatggccatcaccaccttgctgtcggtgtcgcaacttaccgaacaacaattcctttctccatctctcgtgacgcagctcgacgacgatggagacacgcaccagcagctagcagcatccgcgccgccaccgtacgtcccaccgttgtggccggcgacctccacctcacatggatttcgccgtgccgccgccgtcgccttggatcgacaaggctctgataccaattgttggcgccgcctcctcgcgttgcagcgccgctccttcttctacctcaagctgccttacacaactctcttgaggtttctctcaagaacacaagaatacacacacacacaagaaactctacacacacgcaccaaggaagaagcccaactacctt

SEQ ID NO: 437673 - DNA, 573 bp, Triticum aestivum
  unsure (1)..(573): unsure at all n locations
gggtcaaggattcactaaataaggtatctcanagaaaatccctgtttgcacaagtagagataattgcatattacattaagagtggcatcaaatcagtggcaaaacaattgctcgttccagccatagcaataaattaagatgcaaaactatattattacttgtgtcatcacaattccagtgcttcattacagcaccgggagttgatttttgtttttcttccacttgttcttccccttcatcacttggttcaataacagacaagcttcgccttcaatgtaagatttggcatgtcaattaaggagcacaagtatagcactaaacaacgacgttaattttcagatgaaagtggcaaaatgcaggccaacagttgtgaaatatccttatcttaccttaatgggatattgcgatgcacatacagattggaagtcttgtctccatttgtgcagttccctaaatcaagcaacattagcgtacaagtagcacaacatatgaaagcacaccgcacattcatgtgaaagaaggctattactgacctttcatgacgtggaatttcttcactctcgtggatccact

SEQ ID NO: 437674 - DNA, 414 bp, Triticum aestivum
gacgggaggccggagtcctgtcaggatgggcggcgaggtcgtggcttagaggggagaatgttaggaataagccaagcatgagtatgtgctcatgtgtgtgatctgcatgcatggatggattagttagctagctatggagccggcgcagctgagtcgcgtggcagttctgcgtggaggaagaataggaagcaatagttgaggcttggtcctatacgtgtgtatccaaagattctggagacttggctgttacccaagcgtgtgtagctagcccgtggagtactaatcggatcaagcaaccgtgggcttgaccatgcatgcgtgtgtgcgtggggttagtgggtgtgtgtgagtcttgtacttggctatataagttgagtaaatgaatgagaaaagcggccgtgagggctggataca

SEQ ID NO: 437675 - DNA, 469 bp, Triticum aestivum
attcccgggaacacgggcataaatgatacgtctgcatctatccgcgtggtgacaagtacagcactgattgcctcagcttgtacttatacctggatgcatcggatgagctccgtctcgagtccaagacacgtggttggtgtgactctgtccatcctggaccaagcgaatgggaaacacttgactgcaatttcaggtctcttggtgtttacgggtggatgcggctggggatgggctgatttccttggactcaagaatctgaaggacccggcgggaggctatgttgtgggatcgagctgcgttgtgaaggccgatctcactatcgttggttcatccaatgatggttagatgttcacctcatggcctgatggagagataatgcccttgcatcctacgtatgactagacttctatttgagataatgttgtagtagcactactaaaaacttgtgggatgatttagtagtaatgag

SEQ ID NO: 437676 - DNA, 451 bp, Triticum aestivum
attcccgggaccacgggtgctggtcatgccgtcgccagagcagagcggaggacgccgatgcagggtcgaggaggggcacgagtgagggtcatttggttgtactgcatctgccaaagcactattgagacaacgaatttcagctatattaggagctgaaccatattaagtatgtgcatcctgcgtggaatgctttctgttcatgagctggcctcccagcatgtgctgttgagattcgattcgctgggagctttcaagttcttatgaaaagcaggagagcttctaagttctacacactagagctggcgtacacgcgttctcagcgctcatggccagggcttcatcagagctattttctatgctggaaacctaaaacaacaaagattttcaatccacccagactaaccaagatttgtctaaagtggaacggatggtcgtcacttttgactaagct

SEQ ID NO: 437677 - DNA, 423 bp, Triticum aestivum
  unsure (1)..(423): unsure at all n locations
acggtccgagatatcncgggtcgacaacttttatctagcatccagtcctacaaggtagggggatgcaagaacagagggacaagatccaagtcacggtctgcaaacacttccataaggggggcaatttttgcaactagaagattaggggggaggtacagagagggaaatcaactagttctaaaactaaaagaagttcatggccagaaaattttggaacaacaccttttacctttttgttttcacttgggaaacttgcccaactatgccaatttttttttgcaattctccagatttattgcctggtcagcacggagaattgcagacacatttgcgttttcaaaaaaatattccccacgattttatgtcttgatttctcgtcctttttactatgtttttcattgtgcaaggagagcctcccaacgc

SEQ ID NO: 437678 - DNA, 439 bp, Triticum aestivum
gggcagcggcggcggagtgtgtggtgggtgttccgcgcacacccaccagggatgccacgcgcactatacgatgccgggtactgcgccaccgatgtagcctcccagttggagttgttgtctgatgacagtggtgtggctgagcgaccacgagggaccagcgccattggtgattatgggagaagcagacgagataagctacagggagggaggggaaaatgcgacgcaggactcgcgagccgtgagggtttatatagtaggcctgtaagtattggatttttggtgatttcaccgagtcgggtgggaagctcgcgcaggaacctgcgaggttacgcagggaatgagctcactgacgattcattggcaccaccgtttggccaaaagaacgcccccgcgcgttgcacaagcttgcgttgtacgcctactgcgatagcggtgtgac

SEQ ID NO: 437679 - DNA, 725 bp, Triticum aestivum
cgggtcgacgaaaacccctacttgccagagcaaccaggcaagccccccctttgatcatcccgatatcgcccattccattctctcatgcttgcattagattttgctattgttattgtttgctcctattctgatgcatagcctacttttgtatctgctgttgtaccttacctgcttatccttaactgcttagtataggttggttagtgatccaccagtgacccccaccttgtcccagttgccccgctttatgttcgaagacccgatcaacgggatcgaagaccaggccccggcaccgcacatcactttccccttagttgctcgacactactgggttactatcgagtgccgagggtgagacctcttcagcacttctaatgttaacgttgtagtgtagctattcggtcgtggtcatcgagggtgatttcctccttaaccacttcccaagtctcagaaaggtaacgatgctatctttgtcgtcatcgaccaattctcgaaggttgctcactttctgccagtcaaggagactatcactgctagtcaattagcacacttgtatatctccagaattgtgtcactccacggcattccgaaggagatcagttcagaccgtggaagtattttcactccgaagttctgggatagtttccaagaggcaatgggaactcatattacctggagcactgcttatcatccccaatcccaagcccaagttgagcgagtcaatc

SEQ ID NO: 437680 - DNA, 418 bp, Triticum aestivum
gggagcatcctgggcggggtgaccgtcatctggttgctgttcgagggcatcggctaccacctcctcaccttcctctgccacttgctcgtcgtcttcctcaccgtcagcttcgtctggtccaacgctgcgtccttcatcaacaggtcccccccaaagttccctgaggtcattttatctgaaacccaatccctgttaataccccaggttctgaggaaagaaatcaatgaggctttcatcaccttgcaaagtgttgcttccggaaaagaccttaaaacatacctcaagtcaattggagtcctctggttcatttctataattgggggctgcttcagcttcctgactctgtcttacactattttcctgatggcatacacgctccccatgctctatgagaaatatgaagatgaagtcgatgttg

SEQ ID NO: 437681 - DNA, 459 bp, Triticum aestivum
cctgggtcgacggggatgattcaacggatgaagacgacgacactgacagctgctcgacgcctctgcccccgccgccgccgcccggtatggagtgggagtacacggacccaatcactatgcgccccttggattttcttccatcttcgttggctgatcgggacgataaacaagtggcctcacaagtcagcatggatgacgattgggtggaaacgaacatagaatttgatggacaggatgaaagcgtctctggcaatgctgatggcatacttaggcgtgtggaattgcatccagcatagagtacggttatgggtgatgtaaactcatcaatgatgagcagctgggtaacaaaggactcgaactcttcggtgatggcctgggcgactgacaagtcactggtagaaatagccaaggagattgatgagtacatcgtgaaagcagccgcaagtgggactgatgttg

SEQ ID NO: 437682 - DNA, 502 bp, Triticum aestivum
cgggcatcataaagaacttagtttgcttttgggttatgaagaaatgaaacgtcaaactaagcatattccagcatataaccttgagaaattcctcgatattgatctagaagaaatttatatgtattgtgcggtgaattgcattgaaaacttatattgccaattacataaagaagaggaaccaaatagaagttgaagagaatactaacgaaagggaagagacttcccaatatcctcctattatttcttatgatgaatcaggtaacgaggaggagccttctattcaaccaatctcattaataaggagctccaaaaagagggttgaacccacacatgatgtgaagaagaaaaagaaaagacggagaagcaaaggtggaaaggtatccctcccaaatgatgttgctcctattactcattgtgatgatgataattgctatactattggtgctatccatactattaatgatgagagtgattatgcttatgatatgaaaaggcccaagct

SEQ ID NO: 437683 - DNA, 412 bp, Triticum aestivum
gggcgtgctaaactatatttactaggcgccatgtcggacaacgacttgtcgggaaattgcttcctgtatcactgtatgtaagtctttagccaaccccttacaccttttgcgtgttctacgcacatcgtctagaatttcagtgactttgcgcatcatgacaaaatttcagcagttcacttgcgggaattgccattgtcgcaacttctgagagctcgcgcatggggtgctttccatctgacagccttgtagctgaattcaatccacattcattgtttatgatatcaagttgtaattgttgagttgtaagaaaaaagataagtgtgatgatcatcattaatagagacattgtcacaatgaggaaaagatgatggagactaggagtcacccacaagtcgggacgagactccagaaa

SEQ ID NO: 437684 - DNA, 426 bp, Triticum aestivum
cgggttacgtcaatctattactaacacttattaccaagttgcacttgcgtttcaaaagaaattgaaactagaacgcctgagactatccaatagaagaaagagccacaagcaagccatagcagcatcctttttcctcgcgttcttcaacaatttatctacctcactcctcagcataactcaaatgctcctcttgactctatcatatcttccttgcatatgcatcacatcataatttcaagctttatcagatggagtgaagagtacacttttagtgggcctcttagtgagttggtttatgtcacacaacctcccggttttgaaaaaccccgatcacatttaccaactccatgaggcgctctatggactcaaacaagcatctggtgcttggtatgatcaccttaagacgtatctaaacgagaagggggt

SEQ ID NO: 437685 - DNA, 490 bp, Triticum aestivum
gacgggggagccaatgagggccactctcgacacgctgcccccacacacacacacccacccccgggccgcgatcgtcttcctcgattcaacgagagttggaagcgggatcgttcttgggccaccggaagcgtcgcacgcatggcagatgaggaggtatctgacccaaaggcactcctacaggatcgtaccaaggctaagtgtgtctaccactggtatgaatatcagaaatgcgttaagagaattgaacgtgatgagaccgggcagaagcactgtactggccagtacttcgattactggaaatgcatcgacaagcatgttgctgagaagctctttgatagcttacaatgacaaggaaattgttctctctagctacttttcactcaacactggtaataaatagtatcatttgcacgccttatctgacaattcaggtctttatcatcatatatgtaaaagaaggttttgcctgtcgggtaacacgacagttttt

SEQ ID NO: 437686 - DNA, 388 bp, Triticum aestivum
gggtcgacgggaagcgaggtgagtcatggtcagaagaggagcacaaaaattttctacttggattgaacaaattaggaaaaggtgattggcgtggcatatcccgtaattatgttgtctcgaggacacctactcaagttgctagccatgctcagaagtatttcattcgccaaacaaatgttaataggagaaagagaagatcaagcctcttcgatatggttattgaggatcctggtgaccagccactctcccgttcatcgtcacaagagatgccgctctcccgttcatcttcacaagatgtagaagagttcgtagatgatctacggcctgttactgctcctgtgacaccacccgctcctatgcccgtgataacatctgtttctgtccacca

SEQ ID NO: 437687 - DNA, 374 bp, Triticum aestivum
gggcgtcctttttaccccgtttcatccgttcgttaccggtctcatgtagtttttgctttgtttggtatgttcgttgtcggtccctcagaaaaaaacaatagtgagtgtacatggatttgaaccatggttgcgaggactcatgaaccaactcatccaaccaaagattctgcagaaagagagggagcttaaaccgtctcgccatatacgtggcattcatttacgttttggaaacatccatcatgtacgattcgttttttcaaacctcctccctatatgtatgttgtggaccacagttgcgggcgtgttgcgccaagggttggagctccagcggaaggaacgggagatggggctactagaggccgttatccgggaaa

SEQ ID NO: 437688 - DNA, 434 bp, Triticum aestivum
ggggcttagacgcgccgacgacggcgactcgttcctggccacgacggtgacggcgactcgttcctggccacgacggtgacggcgactcgctcctggccgcgacggcgacgctggccggcagtcgtgacctgaccgtgacggcgaaccgctcatcctcctccgctccgccaagaactgttaagagtgatttggaggattcaagattctgtgaagctcttttgacatttaaagctcagaactgaggttacattgtcataggttcaatatgacgcaaaatagggctaagtggacagcaaggtatgagaaaggtctcgtggaggtacttacagagtacaatctatctcattaccgtggtcaaaatgggtggactaccgaaggatggaatcaagttgtcaaggaactgaacaatttatatccagaggcaaggtttacca

SEQ ID NO: 437689 - DNA, 423 bp, Triticum aestivum
gggctgctatgagcgggagcgactgcgagaggacgcccggttgcttgagcaagtgatggtgcggtggtgttgttgttcacggagttgctcccgacgaaactgggcatcgggaaatcatgtaccgtcttgtctggattttccttcgcccagttgatgatagctggaacgaagttagtagcgaaatcatttctgcaggcagttacggctgcattgactgcctgctcgagcaactcagttttctccgcggctgtttttttcgcgtcctcggctgcttttttctcgaccgcaagcttcaccttctcattgatgtccgcctgactaaacttctttttctgcttcttggcctccgggacctcgttgtaaaacaccttccatgtgacgccgtctccagcgccgtgcacacgaccgtattgcggccgctct

SEQ ID NO: 437690 - DNA, 396 bp, Triticum aestivum
attcccgggacgacgggaaggcagaataaaactttactggaagctcctacattcaacacattctgggaaaaggatgttgcagagtctgtgcgccagggagatgcgcagccatttgtcgaggaagctgtgctgcaagtatctgattggggtttcagcttgtcagatattcaaatgcagaagaaagaggatcagggagtatttgaatttatgaagtctctgttcagtcaggctgaacgagagtgggcgggatttctgggcccaatccacatttggcagggaatggatgaccgggtggtgcccccgtcggtgaccgagtttgccaggaggatggttccaggagccactgtccacaagcttctcgacgaaggccacttctcatacttctgtttctgcgac

SEQ ID NO: 437691 - DNA, 489 bp, Triticum aestivum
  unsure (1)..(489): unsure at all n locations
cgggaatcattatgtatttctacatctgctatcaccgtcgcagccagagtcacaactaatgtcaaccaagccatagcccatacttgacttgcggttgcacaggtgagcttccgggcatgaggtagtcttccctctctttgagtctgggtgaagctttccgcaagatgtcatggcgcctctccatgcatcccggccatccactggtttctccagggtgcccgtcaaccgtccttcacccagtactgtgtattgaattcttgtctcgagtctcgaaatcttgaggagtcctgaagatgaagtccttgcagatgttatcatgaagttgtcgtctttgacataaagcccttcattctcacaccactcccgagcaatcataccaaaccccgtctactacagcgtagcattaanactatatacgtcccgggcttggtaacacggaggtgggttcctacctcatgcattctactcaactacaagaatcaatatcat

SEQ ID NO: 437692 - DNA, 118 bp, Triticum aestivum
cggggacgtcagtgatcagataatttttaggctgcaggtgttggtgagatgagctgttgtgtgttatgaataacaaacagattaaacaaacccagaatgacagtggcaagattacttt

SEQ ID NO: 437693 - DNA, 259 bp, Triticum aestivum
gggctgttgtgtttgttgttgtatgtacatttgtctcttttagccattgctgccgatttgccattcactatttgacagtgagcggtacataggaggggacaatctttatttttggttacatgctgattacagacagtgtactggttctgtcgaccgaactatggagcatgtctttgtcatgttcaattgatttttcttcttcattctgctgtattactgaccttgatattcaacctgaagtgggtgggtttattcctcc

SEQ ID NO: 437694 - DNA, 387 bp, Triticum aestivum
aacagagagtttgcaaccccatctcggtgagaccgagatccctatcggtaggaccgaattgctagggtttggcagtggctaatgacaagtgaaactcggtggcgccggataggaagaatcggtaggaccgagtttggcttagggtttaggtcatatgtggatatgggaaagtagttgagggttttggagcatatcactaagcacatgaagcaagaggctcacctcatccctccttgatagtattggcttttcctaaagactcaatgtgatcttggatcactaaaatataaaatgaagagtcttgagcttttgagcttgagccaatcctttgtccttagcattttgagggttccactttcacatccatgccatgccaatcattaagct

SEQ ID NO: 437695 - DNA, 352 bp, Triticum aestivum
tccacgggttctcctcatcaccttattgtgcatgttttatgccttagatatttgaaaatataatctcagcttgagaagttcatatattactaccctggaaatccagaaacataataccacagagttcacataactgacacctcaccggccacatctccttcatcggccgacgacgagcaactcgtgcggcggatctaggctgtgggatccagggcgcgggcaatctctttggcttttacagtacccgcagtagcagaagttcaaaaatctgatcccgtaacaacataatagtatgctctctaaagctgcttgtgtttatgccctacgtgatgtagggcaatggataaattta

SEQ ID NO: 437696 - DNA, 398 bp, Triticum aestivum
acggactaagcaatttagatataacttagtatattacagccaacttaggtaaaatggagccagcctagctaattatgccatctttgagtgaactaggcatattagagctaacttatagctgacttaggtcattttggtagaagatgaggatgaagaagaagactataagcttagtatgtaaacttggtcattttgtgctaacataagtagttttggggctgacctataggatactagccataggtacagataacttagcatattagagctaacataggtaacgaagcatattagagctagctagatatagatcattttggggatcggacatacctgacattgttcagttctcattgtgtcttctccttctccttcctcagcctgatgcgccaatagcg

SEQ ID NO: 437697 - DNA, 421 bp, Triticum aestivum
ggggaattaaaatactttaccgcgattcaataagagtcaaaataagaatttttttaagaaggattacattatctataaatatagaatttagataaatatacacacacatctggatatattctagatcttcttttttgactatatattatatttttctgttttaacaaattcaatataaaaaaaaccgaactttttctattatctattaatgtgtatctatccgtaccgtaatattttggaatattatgaattagataaatttacatgctttctcattccattcgcgaggagctggatgagaagaaactctcatgtccagttttgcagtagagatggaactaagaaagagaaccatcgactataaccccaaaagaaccagatttcgcaaacaacatagaggaagaatgaaaggaaaatcctg

SEQ ID NO: 437698 - DNA, 424 bp, Triticum aestivum
tcccgggccgacggatccgcgggacccgccactcaccgggccccacaagctggcgggaaggacggcggcctgagagacagacggctgggacccgcgcccagccggattactactgtaccctcggggggtaggcctatacaaacccctcggggcacccatgcaaagggttcggacctagagaggaagatagaccagatagcccagggagaagagagctagccttgctctctcccacctcccaaaacagctccaggagcaccattgtagttaccttgctttagtgctcatgcggagaccccgcagagcagcagtaggggtgttatctcctaggagagccctgaagctgggtaagttccgccagcgtccatgtcttcgcctcatcccgcttccaggcaccggcgacgttctactcgctcccaacatg

SEQ ID NO: 437699 - DNA, 344 bp, Triticum aestivum
ggggaacttcatctggttttctgcagtcgacgattatgaatgttgatcgattctgtacctgatggaacatggccatctgtatatataacaaagtgtacataactgccggttcagggatgggcaattgcacagctctagtagatcaaaacacacacacaacctaccacatcatcccaacccaccaccctccacaccccccaccccaaatgtccaccaacgccccacccacacccaaaccttcaccaccccacacccaacaaaacaaaaaacgcggccccccaaaaggttccaaccttaattccccgttgcaggaaacttcaaacccccccaaaacagtcccccaa

SEQ ID NO: 437700 - DNA, 415 bp, Triticum aestivum
gggcaagcccttgatgtttaagtgggccatcgcaggattttgctctcgaggaaagaggccatcacaaagcaggtatacatttggattatcaagtaacagtgtgggtttactcatactcttggacaagtgccctcggattcagaagactctcatgagaagaaagtaaagcctgtctgaagaagctgctgctgcctaatgtagataacatagccgttggttgggaagtctgcatcaaatcacattttcttattcaagggttgggaggagatggtgttgttttaattctttagttgttgatgatttctctttggccccagcaggggatggggatccttgtgccatgatccagaaattgtcaatgtgggttttggggggttgcttttgcttatattttctcaccagcaaaggctatatg

SEQ ID NO: 437701 - DNA, 478 bp, Triticum aestivum
  unsure (1)..(478): unsure at all n locations
ggcagcggcggaacgggcgatggcccggccttttgatggtggtgtggcggcaacggcggccggcaacagctaccgatgggcaccggcggcgggccgtgtggtgggtgttccgcgcacacccactggggacgccacacgcactacactacgcctgggactgcgccgccgccgcggtgtagccacccagctggagttgtcttcggatgatggcggagtggctgagcgacaacgacggaccagtgccattggcgattgtgggagaagcagacgagataaggtacagggagggaggggaaaatgcgacacaggactcgccggtcgtgagggtttttagagcaggtcggtaagcattgggattttgggggatttcactgagtcagggacaagcttgcgcgggaacctgcgacgttgcgcgggaatgagctcancgacgattcatttggcacaccgtttggcaaaatgaacgcccccgcgcgct

SEQ ID NO: 437702 - DNA, 447 bp, Triticum aestivum
  unsure (1)..(447): unsure at all n locations
ggaagaaaaccgagcgatcacaccatgccgaaagggcagcaaagtcttgttacttgggccactccaaggttgagcgaagataaagtaaagcaatgtgttgatccaaagctcaacagtgactaccctccaaaagccgtcgccaagctagcagcagtggcagcgctgtgcgtgcagtacgaatccgacttcagaccgaacatgacgatcgttgtgaaggcgattcagccccttctcaaccaaaaaccggctggaccagccgccgaagcaccgaaaccctgatcgatcagcgctaggcggcacaaagaagcttgaatgaactcttgcatggttccatgtgttatatctatagatcatctacttgatttgtttaggtcatgggctgaccacctgtggcggtgctaggttcaaaaccttgtcatgtcaaaattttctgaacgaanatcgtgt

SEQ ID NO: 437703 - DNA, 416 bp, Triticum aestivum
cgacggagaccaagggaccggctggagggtgcggtccggcaggtggcgacgagttgtttcctgcagggtctctgctaggattggacggctctatcgggagaggcttatcggagtccaattttcaccttttccgggccagtgtttttggggatatggagggttcagtaagatggatagcatgagtccctagttccacaggaggcttctactcagcacactttgataggtgatcagctatgctgtgttccgcatggggtccgtgctctatttgcactccatcagagtgttcctccaatcttgtcacttccgttgacgtatgcctccatcaatgggctttggtaatctttgttgacttgtctcaccacgagctgtgaatctcctcaaatgatcagcttcttaattcccaattatgcggc

SEQ ID NO: 437704 - DNA, 444 bp, Triticum aestivum
ccgggtcgaccgccgcggctaacaggtgctacgcaaccgtcgcgccccgtgcccgctcctccaccatcgtcgccagcctcggcacccccgcgccctccaactcctcctccttccgccccaagctcatcaggaacaccccagtccaggccgcgcccgtcgcacccgcattgatggacgccgccgtggagcgcctcaagaccgggttcgagaagttcaagaccgaggtctacgacaagaagcccgatttcttcgagcccctcaaggccggccaggcgcccaagtacatggtgttcgcgtgcgccgactcccgtgtgtgcccctcggtcaccctgggcctggagcccggcgaggccttcaccatccgcaacatcgccaacatggtcccgtcctactgcaagaacaagtacgctggtgttggatcggccatcgaatacgccgtctgtg

SEQ ID NO: 437705 - DNA, 427 bp, Triticum aestivum
gggtcgacggcaagatttatgatgtgaccgcgtatttggatgaccatcctgggggtgctgatgtgctgcttgccgtgactggtatggatggcaccgacgaatttgacgatgcgggccacagcatggatgccaaggcgttgatgaacgattacgtcattggggagttggacttggacgaagcacctgacatgcctgagatggaggttttcaggaaagagcaggacaaggacttcgccagcaagctggcggcttacgctgtgcagtactgggccattccggtagcagcagccgggatatcagccgtgcttgccatattgtatgctcggaggaagtgatgaccggctatacgttgattgaaggaccattttggggtaacccacacatttacagccggttatggatggagaaattatgtacttcggtccaa

SEQ ID NO: 437706 - DNA, 423 bp, Triticum aestivum
ggtccggagctaacgggtggacgcactctaccctggaggaagctttgacccgcttggcctggccgacgaccccgaggcatttgcggagctcaaggttaaggagatcaagaatggccgcctcgccatgttctccatgtttggcttctttgtgcaggccattgtcaccggcaagggcccattggcgaaccttgccgaccacattgctgaccctgtcaacaacaacgcgtgggcattcgccaccaacttcgcgccggggaagtaagacatgaatgatggttgggagttgtatgtgagtgtcagttgaattgtaacaccaacatgttaaatatgagaattgtgtgcaaagacattgtttgattggtccaaaacgaggcaacaaaacacatctaaatcggcataaaaccaaaaaaaagcgggcgctct

SEQ ID NO: 437707 - DNA, 679 bp, Triticum aestivum
  unsure (1)..(679): unsure at all n locations
gggtcgacaagaaccttgtcctattcgacatctcgatccccgaccggattcgctacttcgacgctccgccagatctgttcgtctacacggcctctgctcctcnccccccggtgcagcagcttcctcggcgcagcacaaagcagttcctggctcatcagttcaccaccggcattctgcagctcaaagcggagcactgctacatcgttgccgacctcaatgtccacctcaagaaagagggcgctagtgctgaactctgtgtcttcaactccggcgccaccgactggagaatcatcaccgaggtgcttgctgatgagctccctgacctctggtggtccgatgatgtgtttgctttcgacggccgtttcctttgctgggtggactacttctgcggcgtcgtgctatgcgacttctccaaaaatgtggactcccaggtgctccacttcgtgccttttcctggaggaatcaaatacccttttgacgcacggttcccgaggtacttcccagggaggttccgaagtgcgtccatcagccaaggcatgatccgctatatccacattgacaatgactttcatgagactacccactccgactggcaagtgatgattcctcctaagagaagccaacggcggcagcagcagcttccccacaaaatcaccatttggacgttgaactccaagtt

SEQ ID NO: 437708 - DNA, 442 bp, Triticum aestivum
ccaaacatacgttaccaaggtcgagagggggaaccgacttagcagtctcatctatccatttcatattgccttgcacaatgatccccttgagtatgttcgcaaggcaaaaaggtctatgcataggaaaaagagctctttagaagtgaagtttatacaagtggttgttcaatttttggtgaaatactttggcgcaaagacaggagcttttatcttccgcctatttgccacacgtacaagcacactcttatcaaatgttgttgggccatctgaacatataacgctatgtgggcacccaatttccttcatggcaatcaccgcctacgggcaaccacaggcactgatcatgcacttcctagattacggtagcactatccgggtaactctggcagttgatgacgaacagttcccagattgtcataagcttttagatgattttgctgac

SEQ ID NO: 437709 - DNA, 446 bp, Triticum aestivum
cgggtcgacaccttcaaatggatatttgatgagtttgtgaagatgatgggagggaaaagaccaattaccattttgacagaccaagccagggcgatggaggtcgctattgcggacgtatatccggatgcgacacacagatggtgcaagtggcacatcctcaagaaggccaaagagagcctggggtctaattacaccaagaagtctgatttcagggcagaattccacaagctggttcacgaaatgctcactatcgaggagtttgaggacgggtgggcagcgttgcttgagaagtattcactgacgaagaacacgcacctgacgcaaatttacgagacaaggcagaaatgggccaagccatactttgcagggaaattctgcgcgaggcaaaccagcaccgggaggagtgagagcgccaatcacatgttgagacagtatgtgccaacttc

SEQ ID NO: 437710 - DNA, 254 bp, Triticum aestivum
tcaactcaaagctagtccgagacccccggcctgatcaactcgagcccgtacgaggatgggtggatgatcaaggtgaagccaagcagcccggcggagctggagggcctgctggactcggccaagtacaccaagcactgcgaggaggaggacgcccactagtgctccttgctcgcttatcattcctttttgttgcaaccatatcgactactcttgtctacaataattacaccaacttcaccatgcgttcagttcac

SEQ ID NO: 437711 - DNA, 510 bp, Triticum aestivum
gctggggatgccaagcactccaaggtaaattcaaggacaaccaaaagcctaagcttgtggatgcccatgtcacccccaagataatccaaggacaccaaaaattcaaagcttgtacatgggatttatatgaccacgaagaaggttgctcactacgtctctgaccattccatcacagtcgtcagcgacgccccattgtcagagatcctgcacaacagagatgcaactggtcgagtggaaaaatgggcgattgaactcctccctctggatatcaggtttgaggcaaagaaagctatcaagtcccaggcaatggcagatttcctcgccgagtggattgaacagcgactgccgactcaggttcactcggagcattggaccatgttctttgacggttccaaaatgttgaatggttccggtgccggggtagtattggtctccccccgaggagataagctcagatatgtccttcaaatccactttgattcctccaataacgaggcagaatatgaagca

SEQ ID NO: 437712 - DNA, 321 bp, Triticum aestivum
agcttgggttgctggatgttatccaacagatctggtccgatgcctggctggaggttcagtacttgattgacgtccgtccctccgcgggaatccggcatggagggatcgggaatccggacataactggtcttcaacataggggaagagtcgccgcgttgttcctctaccacgacaacgtggtgggtaccctggggagacttaatttctctcagatcggttttaagcccaatctgttcgtagtccgtggcgactcccagggcggcgatgcgatccaagagctcgtttacggaggagagctccatcggatctagctgctcggtg

SEQ ID NO: 437713 - DNA, 450 bp, Triticum aestivum
agcttgccttccacgcaaaggagagtcccatccggacacgggccaggaggcgtgagtcttgtatcttcacgcttcaatagtccgaacattgtacacagttcggctgtctggataccccctaattcaggactccctcagtagccccctaaccaggcttcaaatgacgatgagtccggcgcgcagcattgtcttcggcattgcaaggcgggttcctccttcgaatactccaaagtacctgttacgacaaatagtgtctggcctccaatcaatgttgcgctcctaggcttcagtgcctcaataatgaccatctccacgtgtcgagcaaatgcgaggggccgaggcatttttgcatttgccaccctcaatcctccgggctgaccgtctatttgaagggacggggattctcagatccaaacctcactctcccttctagagctagcattcaacgga

SEQ ID NO: 437714 - DNA, 427 bp, Triticum aestivum
  unsure (1)..(427): unsure at all n locations
agcttgactttcacgccaacgaaaattccattcggacacgggacgaagncggtcatgttgcatttcatagtcttggaggcccgccgaacatgatagttcggctatccggacaccccctaatccaggtctccctcagtagcccctgtaccacgcttcaatgacgacgagtccggcgcgcatattgtcttcggcattgcaaggcgggttccccctccgaataattcatagaagattgtgaacaccaggatagtgtccggctctgcaaaataaattccacataccaccgtagagagaataatatttacacaagttcaatctgctgacgtatttggtggcgtgacgtcacaccacggccaagcctttactcgaatcgcttttttattgtaccacctcagcgcgtttagcgaagcggtttccttggcacgtc

SEQ ID NO: 437715 - DNA, 464 bp, Triticum aestivum
taagcttcacaaagatccggttggaatggcttgagaattaggccgtggcagtaagccttcctgctcaaagcatctgcaatgacattggctttgcctggagtatattcaatactcggattgtactcttgaatcatttcgacccatcgagtttgcctgaggttgaggttgggctgagtgaagatgtacttgagactcttgtgatcggtgaatatgtccacttgtcttcccaacaagagatgtctccatgttattaatgcatggacaactgccgccaactcaagatcgtgagtggggtagttcttttcgttgggcttcaactgacgagaggtataggccacaactttcttctcttgcattaacacaacaccgagaccttggagagaagcatcacagaaaacttcatacggcttagattcatcaggaggagtcaagacaggaactgtgactagtttctctttgagagt

SEQ ID NO: 437716 - DNA, 440 bp, Triticum aestivum
agcttccttgccctgttctgcactcaatctgcttagctgagatggcatgccaaggccgattagttgctaaaatatcctgccatatatttattgtgacgtagattcccatggtctagtagccaatctgttaggtgaaatagctctacaccgttttatactcgacctttgttgctgcgatggccttccatagttcgatggctgtgtgctcggcctcattgactgctgaaacagcctgccataatttggcactcaaatctgtttgctgaattagctttacatatatttcgttacttagatctgctcgtccaaatatcttgccgtagctttagacatcgacctaggtattttttttctggacttcataaaaaagcatatatgtttttcctgtaatatctagttgaagaactaatttgattgctaacaaatggacacgacttggt

SEQ ID NO: 437717 - DNA, 401 bp, Triticum aestivum
agcttgccttccacgcctaggaaagtcccatccggacatgggacaaaggcttcaatcttgtatcttcatagtccaggagtccggccaaaggtcatagttcggccatctgacaccccctaatccgggactccctcagatgtactcttcttcccaatacataaactcgcatccattctactccctccggtgcacaatacatgccttctattcgtcaaaatatatatgtgtatctagacatgtgttagtatataggcacatccatttttggacaaatggaagtcacgtattttggaacggagggagtacacaataaaaattttaagttagcacaagtagtctaatccgagagcacaaccgaagatttggtcgggttcttcctccttttgccgacacgtgggaca

SEQ ID NO: 437718 - DNA, 365 bp, Triticum aestivum
agctttgctagtcttgatacccatggtaatgggagtgctgagtcctcgtggctcacagattactacaacaacagttgcaggtacaggttttgcgatgatcatgacgcgagagccatgcttgcttgcgttgaggtcttcttctgcttcttcgatcaggggataggttctaggtcggcagcctgggttagcagggtatatgtcatttgagtttctgtttgtgtttcatccgtagtcggatgatgctcttatgtattgtgatgttgtattcgtgaggcattgtatgtcttatgtatgtatccccatctattatgtaatgttgatgtaattatatccaccttgcaaaagcgtttcaatatgcggatcta

SEQ ID NO: 437719 - DNA, 360 bp, Triticum aestivum
agcttcaaggctaatcttttcttttgaatgctatcgtgattgcaaactaggagcaggctgtaaatcttcagatacgttcttcttgggggcatccatgtaatctatttgtattcccttagcagaaatgcctttggcaatgacctctgtgtcatctttttgtttttgctggagagtagtattctctcctgggacctccattaggtccacaggtactcccaggtcagatagctgtatgtcctcgactcctaggcgatcaacatcaaatattccatagcggtggttctttaaaaaaatgttttagtgtggagagtattgacagtaaaattatttatacaaactcacaatggtatacttacattg

SEQ ID NO: 437720 - DNA, 372 bp, Triticum aestivum
agcttttgcccggatttaggcattgatcgcaccggttcgagtagcaggtttcttcagctcttcaacccgggcaggaagcaccgacagtttcttcagagtgtcctgaatcaaagcggccgacggattgttgccggatgcagtacagatcatccgttgtgcaccagtgtacagttgttcgatcaacgtctacgcggctttcaatttcttccgcacatgtgaccccaagtgaccaatgtgtgtccctgaaatatcacatacggttaacaaaccggcagctctgctagaccgtcgaatcaattcataattcaaaccggcttaccaaagatcgcattggtcatggcatgcacgtgccgctatatgctggtcagatcg

SEQ ID NO: 437721 - DNA, 424 bp, Triticum aestivum
agcttacaagtaaaccagttatggagatggcgactaaagttgcggttgccatttttatagaatttcaagattacaatggatctacgaatagatcgtgtatttacaactacaacggaatagtatacaaagtcaacaccaatgattaaatagaatttatggctacacatactcgttgaagatagttctaaacctaggccaaaacgaactggtgcacgtagtttactgaaacccttgaattcagggagggtgaagagtttacttaaggcgtattacctcacaacacgtggcacagatgtagcatttttggcggaaaaggcccttcatgattggtcaccattccgatcgactcaacacggacactaatctgttgaaaattgtctgtgcaatccgctataatgttacatgccatttattgttgataaga

SEQ ID NO: 437722 - DNA, 431 bp, Triticum aestivum
agcttgttgtggacttatggataacatctcaaaattatgaggtgatcgccgaccacaagcggaaaagattaaatatctgagaagaacggagaaatgcaaaactccacttcagaagaaaaatgaagaattagttgcacttcgagacgcgagaagaacagatatttgaactccaccaacaaaatcttgatgaactcttgaagaacggattaaatcttgaagaaccaccgtgaagaactccgctaaacaaaaggatgacgagataagattgaaggatgaaagaataaggtgaaagccttgcgatgattcagatggaggtcccgacgaaatgaccgaggaaatttttgaactccggaaaagaaaagacgaaaagacttggaactagaatttattcatcaagaacaaactctgaaggaagggattactcacttgga

SEQ ID NO: 437723 - DNA, 420 bp, Triticum aestivum
agcttttggcgcctaaaattatatttattctgctctcgtacggccgactatgacatcatgtccgacaatttgtttgttttgcacgcaaaaaaatgtgcaagttttgaaaatcaatatcttcaactcgaaacttagattgtccattcaattcaaatatggatcattgagctactacaagcaaataccatcatacggtccaattcaaatgaaattccaaatgtgtttatcctaaatatgatgataaaaacaaaaatgtgtatgtgtatgaataaagtggatgattataaagtttgaaagtgcccgtatgtgtatatctctaggtttgatatgtgaatttgaaatcatgaaatctctatgtaaaaaatgtacctccgtttaaatgaattacaaaagctaatgattgagtctaattcctgcagc

SEQ ID NO: 437724 - DNA, 397 bp, Triticum aestivum
agcttttatcatttagggtttgtcgacgccgaggcaccctaaaagccgaagcgtacatcatttaggttctcatcgacaccgaggcaccctatagaagccaagttaagttttcatcatttagggtttatcaatgccgaggcaccctaggttgggcctaatcacttggcactaatcacttggctctattgccgcctatcttgggtttatcatctagggtttatcgatgctaaggataattctaagttgggcctaatcacttggctctattgccacctatggtttaatgcaacaagaatggtggggcagttgatcctgcttaattaagtactaagataccctggcccatgcattagtcgcaagtaccccatatgtcctatctttagcacagtcatgctaa

SEQ ID NO: 437725 - DNA, 422 bp, Triticum aestivum
agcttgtccacaacatatgtttgagccaggacgaaggtcgtcccctatgcttttgtcataggctctatgcgatatgccatgctgaagtaccgcacctgatgtgtgccttgccacatgtctggcaagagggtacaaaggtgatctaggagtagatcatcagatagcggtcaaaattatccttagaggaataaggaaatggttctcggttatggaggtgataaagagttcgacgtaaagagttacgtcgatgcaagcttcttgacgggtgttgcacgttgctcgtccgtccaaacacacttccctgtttcaaggtccaaagttccccaaccccgaagaactaagtccttgaacggtctggccagttcaatgtctctggttcgacccctttagcaagcaggtcattctcagctttgtcccacaac

SEQ ID NO: 437726 - DNA, 465 bp, Triticum aestivum
gtgaaccgggcattgggtttttttctgaggctgatggcactgacaagtccgccggagatctctccccccaacccgtatgaagccgcacaccctgtctaaagtagtccgccctccacgagtagggaaacacccagtagaaaagcaacaaactacacttcggggatcatatatataattaggactaagagaaccaaattacactccagtactatttcccaacgagaacggaaacaccccgagcacacagaagcaatgtgactctctactaccagcgaatagggtagtcacactacccaatccagcaagacgcgttataatagccctagacctacagttacaaaatggaccagacctaattaaagcaaccacactaggactaacagagaaccttcgtagtttgggggacttatcagcctcagagtggttgttattgtggcggagtcttagtccccgcctttcccagcg

SEQ ID NO: 437727 - DNA, 431 bp, Triticum aestivum
accgggctctgggtttttttctgaggctgatggcactgacaagtcctaatgtcttttaagataatacagtttctacagcggggagggcaaagagtacttaatgtaaagtgattccctacctttccgccctgctgcggtatatttgttttataagtatttttaggtgaaggggagattagaaaatgttccctgccccttttttcctagtggtttcagttgttccttccaataagtttctgagttcttcccgtgttgttccttctacagaagttgtcgggccgattttgaaggttgaacctcgccgtgtgatcgagatatggttgaaccttcgtagtttgggggacttatcagcctcagagtggttgttattgtggcggagtcttagtccccgcctttcccagcgagggccaaccctgagtccggtgcaacta

SEQ ID NO: 437728 - DNA, 459 bp, Triticum aestivum
tgaaccgggcattgggtttttttctgaggctgatggcactgacaagtcctccgtaaatcggatcctctctagtgaggtctgcggccgtgagggggaatgcgctattcacgcgcgtgaaatgatacatacgtatcgttcctctttgttccaaccccccatataggtagaccagactaagcagaagcaccgcgtaaaaccctggaaccaccttgggcctgcccggttcccccacataccaaccgaggcctcgggtacccaacgcgtacaacctaaacccgaatcataagtatacgtcttagcgtattaaagccggccgaaaaactatacgcgtgcttccgggcgaaccttcgtagtttgggggacttatcagcctcagagtggttgttattgtggcggagtcttagtccccgcctttcccagcgagggccaaccctgagtccggtgcaactacggctacag

SEQ ID NO: 437729 - DNA, 468 bp, Triticum aestivum
tgaaccgggcattgggttttttgctgagctgctggcactgacaagtccccgagtgcccgagcccgattcggcgtcctaacgctactgacgaggcccctaatccgtatccaccccgtaatgtgaggacgagtcggccgctgctgaggaacccgaccagtacccctcctagtattacccctcctagtacccctcctaggcgtaccagtcggatgcctcctatgcctcggaacgaaccttcgtagtttgggggacttatcagcctcagagtggttgttattgtggcggagtcttagtccccgcctttcccagcgagggccaaccctgagtccggtgcaactacggctacagtcgcccttcgcgcgaaaccgccacttgtctataaccttatataatacatgagttggaagtacaaagcgcaaagttcggggcgttcaacgagcgagtcaatctataccaaccgtgccgtgt

SEQ ID NO: 437730 - DNA, 461 bp, Triticum aestivum
gtgaaccgggcattgggtttttttctgaggctgatggcactgacaagtcctacggtaccgcataaacccactctgtcgacaaacgatggcatgcgtcacagcagcatccttcttaccttcaaacacaagctcccgcagagaccctattacgaattatacgtggacgcacacagacgtaccccaagcgcagacctacctaccccgccttgcacgcagcggaactctcataaagacccacactcatcagcaacagtccgtttttatcatcaggaaccttcgtagtttgggggacttatcagcctcagagtggttgttattgtggcggagtcttagtccccgcctttcccagcgagggccaaccctgagtccggtgcaactacggctacagtcggccttcgcgcgaaaccgccacttgtctataaccctatataatacatgagttggaagtacaaagcgcaaag

SEQ ID NO: 437731 - DNA, 347 bp, Triticum aestivum
gtgaaccgggcattgggtttttttctgaggctgatggcactgacaagtcccgttggtccgcgtctccgtgttaacgcggcggattatgcgcgttcttacgcactcttgttaatagtcttcgcttcctcctttggggaacatatcctaaccctatcttgccgaactcctcctcgcatagcacgctactgataaaacgacatacatccgaccgttgggtcatctctctagtcctcctccgtctcctaggaagcctcttcgctcgaaggaaatggataactcgtcgtgtttacgttggagttcgtggtctgataataaggatcaaaggtgtaaacgtcgtcgtgggaata

SEQ ID NO: 437732 - DNA, 462 bp, Triticum aestivum
gtgaaccgggcattgggtttttttctgaggctgatggcactgacaagtccactagtggcagccctcggatccgctctgtcacgtcgaagaggataccgtaatcgacgtctgtagataggagaagccttgcgacggttcctaagtcgatactaagtctgtatcctcagcgtacgatcccgtcgaccctgttattccggcgaataaggttactaacgctgaaatcggctcgtaggaacattagagtctctataggtgtaattgcgatatgggtctacacctgggtttgtttctatagaagtgcaagacacggactttgaataatacgcattacttaaacgtactcgttttaaggtagattcacgtcgtattctgctcgctcctattattactcacgttgctaagatccctagtcctattaccttaagtcctcgcctttatccttaacaacggctcgcgtcacaa

SEQ ID NO: 437733 - DNA, 407 bp, Triticum aestivum
caggtgaaccgggcattgggtttttttctgaggctgatggcactgacaagtccaccgccagaggagacctgtaagccgctgctaagtaagctaatagggaccactagattttatcgagggaggttcatgcggacgaagcgaggaagccggaagagcgtcccgatggctcgtaagtagagtacgccttctgagtagataatagcgccgttaacattccggtaaagtgcgtcgttctaagccattcgcggaattaggcattcccgcgtcctagccaatctagttacgaaccgaattaccagtaggatagaataagtgaaggaaagtaggttttggtaagcatcccttaatagagtctttaggagttgttggtaaggaagccgttgggcattttaagcccgtcggggagt

SEQ ID NO: 437734 - DNA, 466 bp, Triticum aestivum
gtgaaccgggcattgggtttttttctgaggctgatggcactgacaagtccggcggagcatgcgcccttattgattccatacctacgcatatacaccctaccagctggcgcctatatccccctaccgcactacttacgtccagacccacccctccttccctcctccgcgcgcccgaaaaatcccggaaaaattaaaaaaaacagccgcagtcagcccatccctcacgtacgtccagcagcagcaccaaaaagaaaacttaatcagacccttccgcctcctccccgtccgccgggagtccctttgcgcaaacagccgccccctgcccccgtcccctttccccacccgtttgcctcagaaaactaaaaatcttaaatacaccctagcgcgccctctcgaaccctcccctcccccacctgagctccattaaggagaagattacgacgaaaacgccgagcggtctctgcac

SEQ ID NO: 437735 - DNA, 161 bp, Triticum aestivum
agcttgccttccacgccaaggaaagtccctttcggacatgggacggaggcttcaatcgtgtatcttcatagtccgggagtccggctgaaggtataggccggctatccgaacaccccctaatccaggactccctcacactcgatgacccatcggaatcttag

SEQ ID NO: 437736 - DNA, 181 bp, Triticum aestivum
agcttatttcctccacactagtcattcatacatatttagagggcaatgggtattgcttgcaccgatgacaacttacttgaaggatcttactgaatccataggtaggtatggtggactctcatggcaaaacttggtttaaggatatttggaagcacaagttgtatctctacttagtgcaaag

SEQ ID NO: 437737 - DNA, 178 bp, Triticum aestivum
ttataagcttctgtttgtaagatcttgtaatatagcttcgcccaagttggactgctatatgtaccatgtagtgacaccctaccaagtttcatgatttcctggtgagttttggatttacagagatttataaaccgagattcgcaatgtttgtggccaaggtaggacggcgagatgattg

SEQ ID NO: 437738 - DNA, 167 bp, Triticum aestivum
ttataagcttctttctttcgccttttgagtttcgttgctccgttgattttgatgctttttgcgaaccggagttcttaatttgaactttctggtcaacctctcttatttgagttttgcttgtgcatcgttgcttgttacttctgtatgttattgtttgcttgcgatag

SEQ ID NO: 437739 - DNA, 335 bp, Triticum aestivum
agcttgttcaaataattgtacatttgagttgaactagctctatagccgggtacaggtaattttacactagagttgaactagctctataagctagttcaaataattttacagtagagttgaactacctctatagcccattacaaataatgttacactagagttgaactagctctataagctagttcaaataatggttacactagagttgaactagctctatagcctagtacaaatatttttacactagagttgaactcgctctataagctagttcacaaaaaattacactatagttgaactagctctataagcctatacaaataattttacactag

SEQ ID NO: 437740 - DNA, 334 bp, Triticum aestivum
tagcttagcgagatttatatgagctttcatggtgttatccccagggagaaagccaaatcactcggccagatcactctcgatgtggttttcggtgattccaagcattttcgtaaagaaaacttgatatttgaagtcgtggatttccagagctcttatcactccatcctggggaggccagcatacgcacgtttcatgcctcaaccatgctatgtgtacctcaagctgaagatgcctggtcccaaaggtgtgatcacagtcactggaaatcggcagaaagcagaagagtgtttctagaaaggttccaaaatcaccgatgcacagatggcggtggttg

SEQ ID NO: 437741 - DNA, 357 bp, Triticum aestivum
agcttgtccaggagaacttcacgaaggcgaaggaggaagcaaaaggtatgtggggtgagaatcttgacgactggccttacttttttttgtccattcttgattctgacctcgttgttactttgtagaaaaactgaagcaggctctgaagaagaaggaacttgaccttgccgaggcgcataaaatggctttagaaaagaccaagctcgcataagaaaagttgacttcagtcggtaaacttgaagaggaaaacgccaatctgaaagctgctcttgacgcggccaacaaagaggccagccgactgaagaatgacaagattgctctgagcgacaaggctagcgaactggcgggaaagaagaa

SEQ ID NO: 437742 - DNA, 351 bp, Triticum aestivum
agcttccacttagacggtcgtggtactctccttcacctccgttggatggaccgtgccaattgacaagtcttggattgcttccgaaggatctttgtctcctacatcaattggcaattgctctacttgcgagccgttagattcatcaaacttcacatctaccatctcttcaacctttcgggtgaaattattgtagacacggttagtgtgagagtttgagccataacctagtaggaaaacttcatgagacttaggagcaaatttagaacgacgatgcttatcaagaatgtagcactttgagccgaatactcgaaagtatccaacttggggtttgttaccggtgagtaactcgta

SEQ ID NO: 437743 - DNA, 371 bp, Triticum aestivum
agcttgctgacgggttttaaggtacgcaaaaaatgacataccttttgacagttttgcacatgaagtgcgccctgtatagatagtagcccctgagacttggtatgctgtcgaaagcgaaagcatgccaaggatcataatctcatatatataatgttgcctttcctatgtaggtggcggaacgttcggtggccagccggactgatggagttgccgaactgaagaggcaactcgatgttgcggatgtggacatctcgttggttaacaaacgacttgatgagttacaaggtatgtggttgctccgcctagtaagggagctgacgcccgttccttacaatttgtatgcttgatgcagatggtgctgctgctgtgga

SEQ ID NO: 437744 - DNA, 340 bp, Triticum aestivum
tcaggtctacagtctacattatctttaacagttatgttgccttgggtgacgttgcggaactcacgcttcttccggtccatgactccttgaggaatgaagcgggcacggaaagctgcttggaagtctagccatgtgatgattgttccagctggcagagtacgcctgtggctgtcccaccattgagctgcgggtcccttcagaaagaaggaagcaaagttgacgtagctggcaggggctacattggcagactccatctcataggtgatgtcacggagccagtcatcagcatccagaggcatgagttgagcttgcggtacaccaattggcattgaggcgcatg

SEQ ID NO: 437745 - DNA, 413 bp, Triticum aestivum
agcttgttcttctcttgcctcaccctcgtcagcacgttctcgccagccttcagttggcgtaggagttgttgctggtccggatttactccggcctcatctgcattattatagtcagggttgcacgcctgccgcatttcaaaacggaggtacctttcgaagcacatattacctgcgagcatcctcttgacattctctgaagtggccaatgcggcctcaagctgagccttgcactcttcgagctcctgggacaattgtgtgttcttctttgtaagacacttcatagcacatgatccttcaaacagttatcttcactgtttcaagtctagagggctactgacatatataaccttcaatgttactcacctgtgcgtctttcacatactgctccatggctctggctagaccattttgag

SEQ ID NO: 437746 - DNA, 413 bp, Triticum aestivum
agcttagttgaaagatgatggtagaaactatacgaactaggtccgtaacttgaggattatcctcattgctgcacagaagaattacgtcctggaagcaccgctaggtgtaccacccgcgctagcaactgtagacattgtgaatgcctggcagacgcgtgttgatgactactcgatagctcagtgtgccatgctttacgacttaaaattgagacgcaaatgagatcgcagagctatctcaagctcttgaacatgaacaaaccacctccaaatctcttgaggagacttttgctctagaattatctagagtgagggaatctcatgatagaactcttgaggtggccaatgatttcaaaactaacaattcgaagcttcagtgacttaactgtggatgcatttgcgtaactaacatgtgg

SEQ ID NO: 437747 - DNA, 322 bp, Triticum aestivum
agcttggattgctggactgttgtccagcgagtccggtccgatgcctgacgttgagtttagtgctcgatcgaagtccgttcctccgcggaaatccggcatggagggttcaggagcccagacatgtttagttcttaatacaggaggagagtcgccgcattgttcctctaccacttcgacgtggtgcgtaacctggggagagttaatctctctcacatcggttttaagcccaatctgattgtcgcccgtagcgactcccagggcggcgatgcgatccaggagtttgttgacagacgagagctctatcggatccagccactcggcg

SEQ ID NO: 437748 - DNA, 290 bp, Triticum aestivum
agcttaatcatttctattgggggcgagagaatactcatggcgagagagggcttcaatgagaaagaagtatcatatcaaagaccccggatgcttggcgttcaagaggtgagaacttacatgtctttaacacgggaaagacatgttcatatttgattgttcgcatttgctttttccgttgctctgattttctgttccctatcttctcccagtatccctagcaagattcacggggagaaagacatcttatgtaaggaaatccttgaatttttcctaacctttttatccactag

SEQ ID NO: 437749 - DNA, 408 bp, Triticum aestivum
agcttggggatgcttgtttcgtctccaatgtatatataactgggtaatggtttcatgctattatattatctgcctgcaattatcggtttagagaacggcattttggcccctaggtgcatatgcacccattatcgaaatacatacttcaagaagttgaaaaattcggacaaaaatctcgcgcgtatatctggacattttatgtgtgtgcataaggctttggtgaaaaacgatgtttttttgtggcttgtgttaaaaagatatataaacgcactcgtgaattgtttagaatgtaagcattcgaaattgtcttttttatacaagccacaaaaaacgtcatttttcaacgaaaccttgtgcacgcacataaaatggccggatatacacgcgggatttttgatctgaattttt

SEQ ID NO: 437750 - DNA, 245 bp, Triticum aestivum
agcttataaaatatttcaggggtatttgaaattatattctaattatatgaatataattcaaattcaaatagctaatgaattaaatccaaagtcccaaaaataattccttaaaaatgttcaatattttggttgggaccagaacccttaccaaaaattatcaaacatttaagaagagcattttggagcaatgaatgagatttctagggtttttgcccctcttttatttaagtttttgaggcttccaa

SEQ ID NO: 437751 - DNA, 422 bp, Triticum aestivum
cagtatccataatctactagaggccacgataacaggctcgtggggcctactaagcaccagggtgcgctagggagcctctgtagcgccctgctggatagtgggccccacaaacaatgccttgacctacctccgactctataaatactctaaaatccccaaaaactaggggagtcgacaacatactttttctgccgccgcaagttccagaaccataacatccaatctagaggcctttttcagcactctgccccagggggcaaccatcacacagggggtcttcatcattcttgctgcccctccgatgatgcgtgagtagtttacaacagacctacgggtccatagttagtagctagacggcttcttctctctttttgatcttcaatacaatgttctccttgatgttcttggagatgtatttgatg

SEQ ID NO: 437752 - DNA, 457 bp, Triticum aestivum
agcttggggataccaaaggcatgcctaattaatatttcaagaagtctcaagcatctaagcttaaataatccacaaacttcatccacatagattaggtgcatatcgggatgcaatgttccatctcctgcacaaggatcagctggcagtttctctaccatacccgaaggaatttcatagtaaacattttcagtaggtgcagtaggttgaggagcaactatttgctcttccggtcggggtgaagataccccgaacaagcccctcaaagggttatgtcccatagtaacaagtgacagtaaatttcagcacactatataaatgtttccttaccaaattccacccaccaaaggcgcttcacttccctggcaacggcgccagaaaagagtcttgatgacccacaagaataggggatctatcatagtcctttcaataagtaagagtgtcaaacccaacaaggaga

SEQ ID NO: 437753 - DNA, 402 bp, Triticum aestivum
agctttccgccatggattcttctggccgactgctttggatgaccccaaggagctagtcaaacattgcaaagggggccaagttttcagttccaagcagcatctgccggcttccgcacttaagaccatccccctcacctggccttttgccatctgggggctggatatggtaggcccattcaagacggcacgcggcggcatgacacatctgctcgtcgctgtggacaaatttaccaagtggatcgaagcaaagtcgatcaagaggctgaatgggccgactgctgtaacgttcatcgcagatttcacaacccggtacggcataccgcacaacatcatcaccgacaatggtacaaattttgcaaagggagcactggcacgtttctgcgcaacacacgacatctggct

SEQ ID NO: 437754 - DNA, 479 bp, Triticum aestivum
aattgggaacgacgaccgatgctcccgtccaccatgtccgtatgattatgcttgctctctacttttgaggttcgttaaaatgacatacctggtgacggttttacacataaagtgcgccctgtatagataggagcccctaagactcggtaggttgtcgagagcgacagtgtgccgaggatcaaaatcgcaggtattgattctcgcctttcctatgcaggtggcggatagtccggtggccagccggactgatggagttgccgaactaaagcggcaactcgacgttgcggatgcagacatcgcgctggttaataagcgacttgacgagtcacaaggtatgttgtttctccgtggtcacctagtaagggtgccgaagcccactccttacaacatgtatgcttaatgcagatggtgccgctgctatggacgatcttcgggcaaaacttgctcgagccaaggagcaggccaaaaggagtgatgtg

SEQ ID NO: 437755 - DNA, 168 bp, Triticum aestivum
agcttgtgaagataaacacgattgattgtatggcatgcagtatcaatggcttcaggccagaattttcttggcgtcttgtattcatctagcatcgttcgggccatctcaatgagtgttctgttcttgcgttcgacgacgccattctgctgtggcgtgtacggggctgag

SEQ ID NO: 437756 - DNA, 238 bp, Triticum aestivum
agcttccggccagccccgaaagatgcctcacaccgccaacactgcagccacttgcagtcggagccacacatcactgccgaggaagcacgcctcaagccaccaccttcagcacactaggaaccgcagcaccgagcttatctaagctgataaacaactttcaaatggctaacattagtcaatccgccaatgtggtggctcatctaatagcaaaatttagttttgacaatagatccgatgg

SEQ ID NO: 437757 - DNA, 357 bp, Triticum aestivum
tagcttaactccaagttttgggctaaagcaactcaacaagatgtgcatacatcaagatgctgtgacgtaaaatggtaaccccattttgagcttaaacgatgagtatgaccaaagatcaagtgatctcacttgactcctaagtcaatatactctaacataggtgactttgtcaccgcccaattctagatgaagttctcttgtgctctttgttgtgctcttacatttgtctcatgcatgacggttccctcttccacttcatctagattccttgtagtttcttctctcttattagctgttctgcatcatctgcattaaattccttgcaaatccttgtgagatattacttgtctagtgagc

SEQ ID NO: 437758 - DNA, 317 bp, Triticum aestivum
agctcagcgacgtcgtgtctatgcaccaagctgtggtgcaattcaagggaggacgttctgctgctcgccacttccgttttgtgggaagggccatgcctacggagaggcatgccatgcacatggctgtccgtgaggcgatagctcggcttcaggacatccttcctacgatgaagactcgtcgttaccgttacctcccatgccatgtgccatacaccagtcactattcatacgcctgacataggggagagctagatgaagccatctagatggttgtggagtatctcaaggctctggaggagtctttcgacaacctctta

SEQ ID NO: 437759 - DNA, 370 bp, Triticum aestivum
agctttgcccattgctttatttaaaggtcatatcttattggggagcgtgggcttgttgcatactgggcgtacacttggtactcaaatgaggcatgcatgttatcactatgttcagcttcaggaccctaacgcctagggtaaattcttttgtgaaaaccgaggctcgtataatatcttacccaaagacatcggcgatagcgtgcttaacacaatgcatagccggatggggtgatgcaaaatccgaaccattcgtttgcttaactccaaatccgttctcacaacataatcagctagaaaataagaagtataccttcaattcaagcatgtgtgatcaaatatttgatttgttggtgaaaagtaattatattag

SEQ ID NO: 437760 - DNA, 330 bp, Triticum aestivum
agcttcaggcccatatctgtttgagaagacaaggagtagatacctgactttgtctcgatgcggtggatgggctgtagttgaagaaaatctggtccgcattgtaatgttgctagtactcatccatggagaagtatcatgcaaccaaagggttaagaccacacacaaggatcggtgttagcagaattgagaaatatttgtacagggtaatgaaaggtgccaatccagtgcaagataatagagcaaatatgtcaaagttattcaaatttggtaatgggtttatcacactaccaaaattcaagattaaccatgatagggaaacaagtgaattac

SEQ ID NO: 437761 - DNA, 340 bp, Triticum aestivum
agcttacgcgtctgtggccacgacggcgacatggtcggcggagccaagctctcggccgtgatggccaacggggttagagggcggctcgaacgacgtggctaggggagaaagaagaggagctcacggggagttggccggtgcagatagagaggccggggaagcgtcagggagggcacacggtcgccggcgatctcggcggccgaagcttctgagctttgggtgctggtgcagcatcctcttcctcttcttcttcagatggatctctcatcatggagggcgttgccaatgactcttgcaaatggcttctttacccccttctttcttttcttttccttaacaa

SEQ ID NO: 437762 - DNA, 196 bp, Triticum aestivum
agcttgtgaaacgattcaatgcaaaacaaatgcaaaaatgcttgtttgattgttacttttagcttccttctctgtggttatttctctgtcgtactttgtacggagtatctcactggtcagaaacatgcaaattcccaaaccgcttcctacaccctgtatcgaattttttgcctaacaagttgtgtcgtgcaattgg

SEQ ID NO: 437763 - DNA, 429 bp, Triticum aestivum
  unsure (1)..(429): unsure at all n locations
agcttataacatcaccaacttgacaaactatcgttgtggttttgatgcggacgtaagaacggttcttgctaagcccagtagcagccacgtcaaatttgcaacaacaaagttgaggatgtctaacttgatttttgcagggcatgttgtgatgtgagatggtcaagacatgatgctgaattttattgtatgagatgatcatgttttgtaaccgagttatcggcaactggcaggagccaaatggttgtcgctttattgtatgtaatacaaatcgcctgtaatgctntactttatcactaagcgggagcgatagtcgtagaagcataagattggcatacgacaacgatgctacgatggagatcaaagtgtcgcgtgggtgaagatggtgatcatgatagtgcttcagagatggagatcacaagcacaagatga

SEQ ID NO: 437764 - DNA, 414 bp, Triticum aestivum
agcttatcggcattagcaaattgagaaatcgaatagatccccggccgttggataggagcactgccgttaccgtgcttagaattgatgaaattggatttcttacaaaacccaggatcttcctattcgtagttttcttacaaaacccaggatcttcctattcgtaggtggtatacaactacccctatccctattgttttgatacatggcgtattggcttttcgtttttctagctaaagatccatctttcctggattagtgattacttcaatccatacccctatggaataacaaaaagcaagggcagagggacctggatccggaaccatacaataattcgtaggaacccacaccggatagagggccgtcccttcctcttaagacgtgtaattctgtttggggatgacattagataat

SEQ ID NO: 437765 - DNA, 429 bp, Triticum aestivum
agctttattcggccacgttcgtgcgtgcggcagtttttgtttttcaaacactaaaagaaggaaaaaaaatttaagaaaaagaaaaaaatattttttttgtgcaaacataaccaaaaaaacaacatgggccggcatgggtgcactgtgcacgtaggcgacggataaaatttgggcggcacgtacaatttttttattagaaacagaaaggaaaactgtataatgaaaacaaaaataaaattgtacataggcatattatatatcagaattttcagaaaaagattttctacagcatgggcattttttagcattaaataaaatccacaaaaaattcaaataaatcaaagagtgctactgctctactaaaatccaatgaaaattattttcaaaataccaaaattaatttatatttatttctctacaaatttctgt

SEQ ID NO: 437766 - DNA, 129 bp, Triticum aestivum
agcttgcatgtatgccctatgatgttatcaagaagaaagtcttccgtgtatctttgaaggaagatgcattgacatgttataggctatgtgatgatatgggatcacggtactacaaacggttgaaagtgg

SEQ ID NO: 437767 - DNA, 412 bp, Triticum aestivum
agctttggtggtcgatccagttgtcgaaggcactcgactgacaaaggtgctgatggatggtggaagcgggctgaatttgttgtatgcagacacactgaaaggaatgggcattccgatgtcccgactgagcactagtaacatgagctttcatggagttattccagggaagaaggccgagtcactcggcgaaatagctttggatgtggtgtttggtgattcgaaacattttcgcaaagaaaagttgacgtttgaggtcgtggattttcagagtgcatatcatgccattttggggagaccagcttacgcaccgttcatggctcgaccatgctacgtgtacctcatattgaagattgccccgccccaaaagagtgatcattgtcacccgtgatcggaaaaaggcagaagagtgctt

SEQ ID NO: 437768 - DNA, 409 bp, Triticum aestivum
agcttacaagtggcgaacactgtaaattctagcagtagtatatgcgtgtgcttgttcagcccttgtcatcagtttaagctgttttctgacgcttttgttttgcctcgtgtttgactcactcactttcaattcaaccaagcgagtattcagagcttccttgctatattgaggccctgttcggagacccgccactccaaaacttcgctcccggagctggagtcaaaaggcacggagctgggaaagagatgctccagctccttgtatttttaggagttggagtgactccaaatagggcctaagtgtccactttaagctgatggcatatacatgacggttcgggctgattttaggtgacccagatgattgtcactaggcatgttcatattcagtgacaatttgagtgtcaccg

SEQ ID NO: 437769 - DNA, 345 bp, Triticum aestivum
agcttgccggagcaaaacttgtcgggagcttctgcttcaacggaacaagccctagggattgccggagcagattgctcctcagcgctcttggaattgatctcggggaccttctttgccaaaggcaaatctgctgctgcgggaacgtccgcttctacggcaagaacctgcggttctgccggagcttgacgttccccggcaagcttcgaggtggccatgagggtcaggggcgtgccctaccccctaggcgctcccccactctcgtgggcccctcgcggctgccctgaccgacttctttcacctatatatatccatataccccgaaaacattcagcggcatgatagatc

SEQ ID NO: 437770 - DNA, 373 bp, Triticum aestivum
agcttgttgtcatagttcaatgactgggcacaacctgtaaatgctatggggattatgtcgatttcgaacacatgagtacatgagggttggacagcgaagggcacacgtgtgtgacgtaggatgtgtgtgtgtgcatgtcttcatacgagggatgccatgcattttacgggaggtttacgcacgaccggccaggccaccaatttttttctcgaatattcacgagtgtgcatatcatactttatagaagggggcaggggggtagagtaaccccaaagtctaccaatgggattacaatgcctagagccttggctccaacttccacccacacgatcctagtacagactactcacatctcgttcacctttgaagcacc

SEQ ID NO: 437771 - DNA, 403 bp, Triticum aestivum
agcttctgatcacacttgcacatactagtggtgaacacatgatactgcggaccattcaactgctttgggtgactctggtaacccgactgctgctgattcccttgattattctgctggttatcaccaccttggttgttctggttgccatgattattctgaaacccagagcttgaaccgccgtcaccatgaaaacctggacctgaaccacccgacggaccctgatcataccggaaaagattagagtttttgaactccatcataatgttacaatccttccagagatgcgttgcgggagcctccttggtcccatgctttggacaaagctgattcaacaagcgctccaaattcatcgccccgccgcgcttgggcggcttacccttacgacgctgcacattagcgttag

SEQ ID NO: 437772 - DNA, 334 bp, Triticum aestivum
agacggtgttgttacaacgaccaactgacaaggtactcgcgatggctctttagaagaatttggcattgtgtgaggtttgtggctcatttcttgtggctaatgatgcagcagaaagaacgcaatctcatgtcactggaaagcaacatgttggctatggcttggctcgggatcttattgctgaacaaaaagtaagtctcagaactaatacttgaatcttgtttcatttgagctgtcattccttataaaatggggatagtgatgctatgattactttttctattctaggctgctaaagataaaggaaaggaagaagaaagactagtcagaggaaaag

SEQ ID NO: 437773 - DNA, 444 bp, Triticum aestivum
ttgtgcattttcatgctcaagcaatctccaacattcaatactcctagcgttgtataacttcttactgtcctttgctcgagttactggtgggacattgctcaagtttcttaattgtttcttcatttttgttcttctgtgtttattttttgcagctttctcgacatgagcccaggggattacacactgttttggtcactggtggtgctgggtctattggttcacatgcagctctaaggcttctaaaggaatcatatcgagtgaccattgtggtatcttctttggcttacatggatttaggttattttgctcaacattattgtaaatgtcgatatcacaaagtaaatctctttctgtttaataggacaatctatcacggggcaatctcgctgcagtcaggattttgcaagaactatttccggaacctggaaggcttcaatttattta

SEQ ID NO: 437774 - DNA, 455 bp, Triticum aestivum
aactcatgataaatcaaaaggtggaaattatgtttacgacggtttatatcttttggaaaagtattggcaacaagtcggatctcacggtatgaatgtcttcaagtttcaacttaggcgcatacctggacaacctgaactttcttgggttgaggtgaagaaatctaagtcaaaataccgggaaggtctatgcaagcttgacatctcagaagggaaagagcagtcacccattagcgctgtgaacgaaatagacgacgagaaaccgcctttgttcacctacactgttaaactgatttacccagattggtgcagaccatttcctccaaagtcatgctgttgcaccacgcgctgcaccgaagctgaagcgagggtgtgcgcttgtgtggagaaaaacggtggagagataccgtacaacttcgatggagccattgttggtgcaaaacctactatctatgaat

SEQ ID NO: 437775 - DNA, 509 bp, Triticum aestivum
aaaaagtaggtcagatttcgcctattcctaatcctaaatggaatgtaacgacgtagggatccctatgtaaacatagtatctatttagatacgctcgaatgaccccttctcataatgagaatgtatataaccttattccggtctggtccggtatggaatgaacttataatcatggaatcgactcgatcatcagattatagattataagttcataaccttagtccattcccattttgggcggaaccgatctactaattctttgattccagttagtattagtaagagggatcttgaactaagaaatagattctagaagctaaaaagggtatcctgagcaatcgcaataatcgggttcattgatattcctggtatagtagatgctatcacacatacaatcatactcaattcgatggaattgtttgatcttaaaggggatattctataatttcgcatgtgaggggttatttcttggtttcgttcagtcattaataacttgattatttttagata

SEQ ID NO: 437776 - DNA, 249 bp, Triticum aestivum
gatcggacggctcctgcgatttcatcagctttcacgatttctccatattttgacacgtattccaaccgcatctccaacgcgaaaccaagctccttcacaatcgtgaacgcgtttagttgttgttccgcgtacattggccacgtggctattggaacttcgaaacgcaaactctccaatatcgagttccaaccgcagtgtgacacgaacccttcaattgctttatggtgccagaatttcaacttgaggagc

SEQ ID NO: 437777 - DNA, 463 bp, Triticum aestivum
cgagcaaggcaacaaatgcgatgacgagaggtgaacaagcgccgatgtttgtgcccacgacttccccacgaaggagaagccgcgggcatgggtgtaaaccgaactcaacaattccttcaaattaggtacgaaacacaggccccggaactcatcatcgagcgtaacatcgcccgtgaattaactgagaaggataggtggtaggtagttcgatgcgcgagcatggagcctacgaacactagctatccgatcaccactcatacgccgaacgttcaattaactcaaaatcatcaatcgttccaactaatctaccgaagtactcggctaagaagaaagaagacggacgaatccgagccaaagccgtacaagcgcgagataccttcgggacagcctaggcggatccatgctttccaacgaagcacgcccatccaacctaggcgagacaagggttcacatttcgttcatc

SEQ ID NO: 437778 - DNA, 565 bp, Triticum aestivum
  unsure (1)..(565): unsure at all n locations
cgtggaagacatgacggatgtcatacttggtttacaaggagagcctccttccaactatttgcacggagttccattcgttggtggcaggtaaggcttttgttaatttggttcggttatgatagccttacaaaagtatgttcggtctttcatgcgtgttattttgatagggataaagttgcagcctgtgccaagcattacgtgggagatggtgggacaacccgcggagtaaacgagaacaacactgtgactgatttacacggtcttcttagcgttcacatgcccgcttatgctgatgcagtttacaaaggtgtttccacagtgatggtttcatattcgagctggaatggtgagaagatgcatgcaaatactgagctgatcacagggtatcttaagggtacccttaagtttaaggtctgcttacttatcacaacttcaacgcacattctctgtgttctggcagtagtctttctgaatgaatatttctctctctccatgtantttatagattcttgaatagaacatatatatagcatgtgtgagttcttagatgaaggagttgattttg

SEQ ID NO: 437779 - DNA, 496 bp, Triticum aestivum
aacgggaagtaataacccgaaaagaaacaaaggaaggtaaatagtcccgcaatgcaagatctgtctatgagagtgtgtatatagaatggttgagacccaaattcttccctgtctagcattctaacgcataggtctgcacctgtggttcaaaatttttccaaggatggaaatcgaaacattcatatgttagttcaaaaagattcgtttgctttcattcatcttttattattatttcaagaagatcaaccttgttaataattctacctcggccaagttctcatcgggagagctatttggtgcagtgagattggacgcagcagctgtgttgtaccggaagatccttagttttccctcctgagataaatattgagcaaatatcaatacaagtcaacattttagcgccgagaagtttttcacattacgatttaggattaattacctttgttccatagacaagacctcccccaggagaaggatgaaagcaagcaacattaac

SEQ ID NO: 437780 - DNA, 569 bp, Triticum aestivum
tttatcttgtttctaatttcctcttgaatctgcatcagtgtccttcgttatgttcctttggaatcactttacccatctctagctctaggattctattgccgcgacaaaggtattgtattactacattctctgaaaccaaaagtttttaaattctgtaacttgaaaaaacctttccctaatcttcaacagatgatttcgacgatttctgtctccgagcattgaaactagctgaggaatcaaacggtgctccattgttcacagtgactcaaacccacacagcgataaaccaaagcaactacgggtttgcggatgacgacagcgaggatgaacgtgaagatgactggcaaatgctctgatcatgatcatcgtcaaacattttaacaatctcaagctacaattctttttttccttttgttaaccagttctttgttttttatatgtgttggtgtatattacatcagatcagaacacaatgttgtactataaaatcttttgggattttcaaacatagattgaagcatgcgaaaatggaagagtagagaaatcacaaggtatatgaacatgatgac

SEQ ID NO: 437781 - DNA, 392 bp, Triticum aestivum
ttgggtttatctcaagaagatgagccacaatgtctgtgatttcttggtctcccattggcaggcgatgtctgaacgatgttctttttggtatcaggtactccaatctgttgctttcctgaacaaacaatttttccagagagaatgttctttattagcatatgtgtcttccattcaacttaagagttgcagagtttttggagttcagggaatgttcctttaaggtctctggaaacactaacctgggtccgatcatagagcattcggctttttgtgaaatatttgtgggaatcacgtaccttggtaagcatttcattatcgaaagatcctacgatttccatatcccttgctagcaaactggccggcgaatcattctggaagagaacctgcaaaag

SEQ ID NO: 437782 - DNA, 567 bp, Triticum aestivum
caaaatgcctctggttcttctgttcgtttgtctctccctttgtctattcctcttctatattttctatcttctctttatcttttctctttaactctatgttcatcactactactcatctcatggactatagcttgccacaagtatagtggaattattaaaagagaaatgattttcacatttcgttaatttaaataaatttaaggaaaactaagcaaaacctaccaatgttgaaagaacaataaaacactccactagtcttattattaaaaagagaaacaaagattcttaaaagaaaccaaataagctcgaccctaaattttctcttcctccggcaagtagtatctattcttcaaccaaatagagtctgcaataacagcttcgtcttctttatttctatgtcaagtgtaatgtgcatgggtcctgttttttatttccaaaagggcgtgtccgaaactcgcctccctaaacgccgagtaacttggttggggatcggtgaaactatatgaaaaataaataatcttaatcaaacaattcacaaaacgaaagctttagtcaaattcactatat

SEQ ID NO: 437783 - DNA, 534 bp, Triticum aestivum
acaacaaataacttgtgattggcagtaaaacaccgattaccctgttgaggtctaattcgatccttatagatttctctagctattttcttacgaagctttgttatagcgtctataacagcctctggtttaggtggacaacccggcaaatagacatctacaggaattagcttatcaactcctcgaacagtactataagaatcggtactgaacatcccccctgtaattgtacaggctcccatagcaataacatacttcggttcaggcatttgttcatataatcgcactaaagaaggagccattttcattgttactgtacctgctgttaaaataaggtccgcctgtctaggactcgatcttggtactaacccataacgatcaaagtcaaatcgggagcctattaatgaggcaaattcaatgaaacaacaactggtaccataaagaagcggccataggctggaaagtctcgaccaatttgaaagatcatttaacgtagttgaaataacggaattttttgttgttcgatcaagtatggga

SEQ ID NO: 437784 - DNA, 368 bp, Triticum aestivum
tgtaatgaccgagagaggaacttccatatcatagacagctaaatccttttagatgttttactttccatcgtcgtatgtaacttcaacaggctcaatctcaaattttctggcacaaaattctgagaaggttgcaacctggaaaacgctaaatgattagttagctattgatcagctagcactgtaggtttgatttggtaacaacataccattgtattcaaaacaatcttggccttcgtcaaatcagttgcagtacattcaatgaagacattctttgtctgtaagggaattgctgaaagtgcaccattgataataggtggcaatgacagcacagttctgcaaaagtgagctttcattatgtgtcagtacgt

SEQ ID NO: 437785 - DNA, 514 bp, Triticum aestivum
caataacactaatacatctcaatacagataaattttttcttaaaaccgcgctttcaacaaaagtgagttttttggacctccatgaaatataacctgaggacttggatttacaagcattggtgcagcttgaacagaatggtactgagcggtgtatctctgaggctgtgctctgttaacagttggcccaatcatctgcaggaaaatgggttgcaagtggaagaatgattcatccatggcaaaacaaacaaaagttggtggcagaaagtatatggaagcattttaacagtacagacaaagccatatcaattcagaatgatcttttaatctggtgttcaatactaacatttatggttgttaaccattcaggcgcttagtggtgagaggaacagtctattctcaattactagttgataaaagccctttgacataacatgcttgaagagagtaagataatacttacgtgttgaggaaattgaaatccaccgacagcatgtccagcggtcacattaccata

SEQ ID NO: 437786 - DNA, 494 bp, Triticum aestivum
gatggattgttcgtgtggacgctttggaagatataattggaggacatgtatggttaggttctcatttgtatatttggtggaatctggcatatcttaaccaagccttttgcatgggctcgccgcgcacttgtatggtctggggaggcttacttgtcttatagtttagctgctttatctgtttgtggtttcattgcttgttgttttgtctggtttaataataccgcttaccctagtgagttttacggacctacggggccagaagcttctcaagctcaagcatttacttttctagttagagaccaacgtcttggagctaacgtggggtctgctcaaggacctacaggtttaggtaaatacttaatgcgttctccgactggagaagttatttttggaggagaaacaatgcgtttttgggatctgcgtgctccctggttagaacctttaaggggtcctaacggtttggacttgagtaggttgaaaaaagacatacaacc

SEQ ID NO: 437787 - DNA, 465 bp, Triticum aestivum
gtaaggtcctgcaattctgcagaaacatattgacatttttacttatgccaaaaccttttgttctattttgaagtttgatgctgttccatggggtctggaaggtgttcttcagcatataaagcatcgctataacaatcctccaatctacattcttgaaaatggtacacttcattctcttttgtcttctggctctgtttttgtctacttgaaagcaaaccttcttgttcttaagattcttcaaatcgcacccgaaaacaaaaacaggttcaccgatgaaacacgattcgatgctacaagacacaccaagagttgaatacattcaagcttacattggtgctgtcctcaacgctatcaagtatggtcatcctttttcaaattttagtcctcacgttaatatatttgactgatcggtggtttagtttcggtttacttgactctctctttgtgacaaataatttgactgat

SEQ ID NO: 437788 - DNA, 447 bp, Triticum aestivum
ttggaaattggaactgatttgggggctcattgtttatttttggataggcatagtacttggtttatttgaagatggtaggtataagtctgaatcaaagaaaccatctttgaaagctgttgatattattggatttggaactggggctgaggtagaaaagaagctgaagtatgctgaagatgtttcttacggtgtaattttcgggagagagctcattaattctcctgccaatgtgcttactcctggtatgaattgttgtcatttatgaaatcaaatattttcgtgtttgtgtggtgttcgctgagttttcctaaactgctttgatttttgtatcgtttcagctgtactagctgaggaagcagcaaaggtggcttctacgtacagtgatgtcttcactgcaaacatcttgaacgaagagcaatgcagagagttgaagatgggttcttacct

SEQ ID NO: 437789 - DNA, 453 bp, Triticum aestivum
acttttataaacaaaatcgggtgttatgcttcctaacctgacagatcgtgttgccaatctggaattgctctgtcataacacgaagagtgctttgagagacattgtaactagaatccatgcatgggtatgcaggagccattattggcatatgatgatagcggtcacgacgattttttcgtgggtcccaaacaggaaagctaaggtcatcttcttctattgcacaaagcacgactggattcggccagcgccattgtgtatatactctaaaaaatcgtgaaaccaacatactaggaatagcatttggataaaactggcaaaggcgtgcaaccagaagtgcccagtttacaccaccaagaaatccagttacctgctcaatataacagagattacaagagctgtaacctaagaatattgtcaacagatgtgatattcagaaagacaccaccttacatt

SEQ ID NO: 437790 - DNA, 477 bp, Triticum aestivum
tttagagcattcttgcctctcagcattctcttatccagaagcataagtgaacactcatggtttatatcaattttttctttaacttgagtacgacgccataaactgtccgttgccatggaaatcagttctgtaccatcatccctttcacacttgatgcgtttgagaaggtctagaatttgattaagttcatcacattccaaaaagcagatactctgaggtgtttccactaaacggcactcggtagtaatagtgttctcggaaacttcaaattgtgcgataagatgcttaacaggaaaccgcatcatccagtctcgaatactacaagagagaattttacgctccaacaacaacacaaggagcaatcggatttccttgagtaacttcctgcgctcttcatctgcagctaaaggccattctttggaccacccattcacatatacaaactcttttacaaactctagccggttcttgatcatt

SEQ ID NO: 437791 - DNA, 437 bp, Triticum aestivum
ttaattggaatttggttattcaccatgtacgaggatccccactaagcatccatggctgtatggttaatgcgcccaactcataattggcgaattcgtaggttcaattcctactggatgcacgccaatcggaccctccaataagtctattggaattggctctgtatcaatggaatcttctcatcatctatacataacgaattggtgtggtatattcatatcataacatatgaacagtaagaactagcattcttattgagactagaactcatagggaagaaaatcgatttatggatggaatcaaatatgcagtatttacagacaaaagtattcggttattggggaaaaatcaatatacttttaatgtcgaatcaggatcaactaggacagaaataaagcattgggtcgaactcttctttggtgtcaaggtaatagctatg

SEQ ID NO: 437792 - DNA, 443 bp, Triticum aestivum
aatttctccaaaacttcataagaatcagctgcactctcaggtttttcaccttttgctttaggatttgctttcttagtatcaccagcaggtccattacttaacttggccttaggcttatcagtgggaagagcagacaaccgagattcagcaacaatgtacacttttccagtgttcttgttacgaaccttcacatagacaaacttcgcatttacacacaaagcaagattgcttggaagagtccacggagtagtagtccatgccacaaaagcagcattatcttgatccccaataaccggaaaagtcaccatgatttcaggatcagggacttcctgtacatacacacattctaccaatatcagagatcaaactatacaacacaaatcaatcacctgaagaacacaataacaacaacattaccttatagttctgaccagcttcaaaat

SEQ ID NO: 437793 - DNA, 478 bp, Triticum aestivum
taaagaaagaaacttgtgtggatcatttttaaatgagatgaaatccagttgtcagttattctcaattacacaattttgtgttgactttagattctgttagttctcaccgtctctttctcgattctacatgttaggccaaggaggtctctctagacaatgcatattcagaccaagaaatagaaaagaggtcatcagttgtattgttcaatgcctcaaagaaagaagtgaaacaagaatcaagcttcaagcaggaaccattattatgtgaaccacaaatagaagcaagggttaaccccagagttttcagatacaacccaaaattcaaatcaccttcgacgaacaacacttctttacatgagttgagaccaatacaaatccaagaatccatctccatgaactccaacagacaaaagtctccagtagaccaagaatcatatgacaaggaaaatgttgacggccatagtactgaaactggatt

SEQ ID NO: 437794 - DNA, 495 bp, Triticum aestivum
gactgttactcataaaaccagccacaaactcaaccaccatatacgccgtattgatcaaaagaaacaacgcaatcttcctcgatttcttgtcgctcaaaatgtgacggataggcttcataaacatagtggaaaacgactcaggcgattccataccaatctcttgataatctgaatacacagactccaactctctaacagcaatgtaaagcaacaaaccacaaagcaacaatccccaaagagatagctcaggaaaatagaagagttccaatactatagtacatagaaacgttacaagaaactccctctctgagtccttcttcgagcttgaaaacttatcatcattataattctcactcaacaacactccaaatacaacagtgttagctaaaggccaacctaaattcccaaaagagacactatcatcaccactaccagagaagaagaaactccaaatagcaagtgggaacaacaacacagtggttagaaacaaagaca

SEQ ID NO: 437795 - DNA, 372 bp, Triticum aestivum
taaaataccaaagtggatgattgactcttttccatactagaaagaatcgcaggaaatggggtgatttgacggattcagcctatttctcaatcgtatcccacgatcaagacaattggctgaatcccgcgaaaccattttagagaagtccatttgatatcttctttttctaaagcaaatcgacttcgattcttgaataatccacatcacttctgtctctattgtaacaaaagattccctttttatgtggaaaaggcccgtctcaataattctgattttacgtttacgtatggacaattcctcactatctcgttcattcacaacaaaacattttcttcgtgcggtggtaaaaaaaaacatgcttttttggagaga

SEQ ID NO: 437796 - DNA, 343 bp, Triticum aestivum
tatatgaaatccatctggaaagcttgaactaattcgatcacaacttaaacttgaacaatttaaaagcatattataccttgtcgtctggggggtcagataaagacccccagggactatgaactgaagcctcaaaaaagtcacgaaggaagcagaaagctgcatatggtttcaaccagccctttcaaagataacaaaaatccgtaagccaatggaacgctgacgtggccttaggaggcataagttctatgcagacaattcttaagagatatcaaggaaacaatatcagattttgaagcataccttgcttttagagaagaatttctggaaggtgcttgagttcaaa

SEQ ID NO: 437797 - DNA, 344 bp, Triticum aestivum
caacgacaatggcagcggtggcaaagtggccttgaagagctattgtttgacagcttttctatatagcacttgatcattgctcctgggttggtgtatatgacatccccaactacacagaaaacatgtaaatgtgaccgccacagttctttacattgtgtgtaaccaagtctttggatttgattctctttcgcaaatatcacaccagtatttgccgcttgccttttcttcaccataacaaagagtgagtggatgatcattatacctgggaagcattaccgttaatggttgagtggcacaacggaaatccaaaaagtaatctgatttggtacaacctatggcgactc

SEQ ID NO: 437798 - DNA, 489 bp, Triticum aestivum
cttttctatcaccaaacgcccggagcccccctcgggaaggatcccttatcgaattgcggccgtctcgatcatctgctcgattcgacgccgccggacgatttgggcgcggaatccggaggggggaatctgtgcgcgcgggcggaggcgatcgtggggagcagccatgagcgaggtattcgagggctacgagcgccagtactgcgaggaatccgcttccctctcccgcaagtgcaccgccgcctccgctctcgatggagagaagaagaagcagaggctctccgagatccagtccggcgtgcaggaagctgaatcgctgattcggaggatggacctggaggccaggaatacgccgcctagcgtgaaagcgggtttgctagctaagctgcgggagtacaaatctgaccttaacaacctcaagagcgagctcaagaggatctcggcgcccaatgccaggcaaactaccaaggaggagcttcttgagtctggcat

SEQ ID NO: 437799 - DNA, 268 bp, Triticum aestivum
cctgacatggagggcattcccccggaccagcagggccggatcttttttggtaagcagcttgaggatggccgcaccttggcggactacaacattcagaaggagtcaacccttcacttggtgctccgtctccgtggaggccagtaagctcctggccatggagctgcttttgtctctgggttcacaagtctcgtcttcggtgtccttaaggagtctggtctatgtctgtcgttgcctgaactgtctttgtttctataccgtactatgatgc

SEQ ID NO: 437800 - DNA, 342 bp, Triticum aestivum
ccctcgcttccgcccacgcgtccggcgttcttgggatcaaggtgaagattatgcttgactgggaccccaagggcaagcttggccctaccactccgctgcctgacctcgtcaccatccaccccccgaaggaggaggacgagctgcgccccccggctttggttgaggtctaaagtcccagtagagcaagcagaccatgaaacgtcacatcattttggtcgtagctagttttctatccctgtgataagcgagggctatgcaacgcttggttacctattttactttttaatggacaaaagtttctgtgtaatgctgctatgttaatttcgtttaaactaagttttg

SEQ ID NO: 437801 - DNA, 383 bp, Triticum aestivum
atctggttattgctcccgccgccgccgccgccggcggggtcacctttgagtcttcgtcggggccgcgacgatgccgtcccacaagaccttccgcatcaagcagaagctggccaagaagcagcgccagaaccgccccatcccctactggatccgcatgcggaccgacaacaccatcaggtacaacgcgaagcgcaggcactggcgccgcaccaagctcgggttctagatccggcccggccgaccgccgcgtgggggagccatggctcaagagttatctgcattttgttttatggacgtttcagtgtttgttatgcaagctaggaagtgatcccaggatgtctctgttatcaatttcttcgtgttatgaggattgcttgtaccct

SEQ ID NO: 437802 - DNA, 340 bp, Triticum aestivum
gccttcgtccactggtacgtcggtgagggcatggaggagggagagttctctgaggcccgtgaggatctcgctgccctggagaaggactatgaagaagttggtgctgagttcgacgagggtgaggacggtgatgagggcgatgagtattaagcctgcctcctggtgctttcccaaggcttgctactgctatcctatgatctgcccgagtggctttatctgttatctgtctgtttgaacgtttgctttgtggtgtttgttttacaacctgttgtgttgtaagaaccttgtatctttgaacctgctttgcaccttggttaatatgcatgctatctggttatct

SEQ ID NO: 437803 - DNA, 500 bp, Triticum aestivum
aagaaagacaaggacaagaagccatccatcgcagtcattcagggtcccaagcccggcaagcccaccgacctctcccggatgcgccaggtcctagtgaagctcaagcatgctccgccgccgcacatgatgcaacctccaccagcccctgctgccaaggaaggcgccaaggaaggcgccaaggaaggtgcagaagacggcgcaccagcaccagcaaacggagccaagcagcccgcagagagcaaagaagcacccgccaacggccctgccgcagagacggagaaggagcagcctgcagcatcagagtagcttcttttctttttacagaaacaccagaaccatgactatgcttagactgaaacttcttatgttttcaatacccagagtgtcgcctgtcctgtagcgatctttttgtagagatccgcaccaaggatggctatgtatcgatcagccctgaacattcagcttagtatcacagcaaacaactgcactcttcactgttt

SEQ ID NO: 437804 - DNA, 451 bp, Triticum aestivum
gattactagtcctccaggcgtgaactattcttattcagtcgaggctggagttggtgccggtattgacatgatcatggttccttatgcctacacggaattcattgatgatctgacataccaagttaagaacaacattatccccatgagcagaatcgacgatgctgtctacaggattcttcgggtcaagttcaccatgggtctttttgagagcccctatgctgacccaagcctcgtcggtgaactcgggaagcaggaacaccgcgatctcgctcgtgaggccgtcaggaagtcattggtgctgctgaaaaatggaaaatctgcctccagcccattgttgcctctcccaaagaaggccggtaagatcctcgtcgccggaagccacgccgatgacttgggcctccagtgcggaggatggaccatcacatggcaaggacagaccggcaacgacaaa

SEQ ID NO: 437805 - DNA, 392 bp, Triticum aestivum
ggcctacaccaaggtggccgccaaggtcttcgagctcgacccggacggaatggtgcaggcgctggccgcggtgctgcgggacaagatcaccatgcccggccagctcatgaccgacggccgcgacgccgacttgttcgagcacttctcggcggtcgcgcagcgcaccggggtgtacacggcaagagactacggcgacatggtggagcacttcgtgcgtaggtggaaggtggcggacctcggcggggggcagctgtccggggaggggcggcgcgcgcaggagtacgtgtgcgggctgccgcgcaagatccggcgggtggaggagctggcccacgaccgcgtgatcaaagccgcaaaagagcccgagttcgcaaggttcagctgggtcttcgaca

SEQ ID NO: 437806 - DNA, 389 bp, Triticum aestivum
gccttctccccctcctgctgctcctcgcgctcctcgacgcgtcgcgcgccaccaacttcgaggtcggcggcgacgccgagtgggtcgtcccgcaggccggcgactcccaaacgtacaaccattgggcgtccaagaaccacttccacgtcggcgacatcgtccatttcaagtacaatgtggactcggtgatggaggtgacggaggaggagtacaacaagtgcgagtcgtcggacccgatcttcttctccaacaacggcaacaccgaggtgcgcctcgaccgccccggccccttctacttcatcagcggcgccacgggccactgccagggcgggcagcggatggtcatcaaggtcaccgacaaggcccggccaccgtcggggccccccagc

SEQ ID NO: 437807 - DNA, 407 bp, Triticum aestivum
cgaacgccacgcggcttattacggtgcagtccccgctcggcggcgacaatttcgggcagttcggcgtggtagacaacgagctgcgagacggtccagatcctctccgctcgtcgctctgtggccggttccaagcccagtttgcgctggcgggtctggtgagcccaccgggcatgcagtcggccgtcaacttcttgttcacggaggggaagttccgcgggagcacggtgtctgtgctgggccccattctggacttcgagaccacctgcgagcgcagcatcgtgggcggcaccggtgtttttcggatggcgcgcgggtacagcttcatgaggcttgtgcctgagatgagcgtacccgataagtacagtgtctacaggcttgacctcttcatccaagtcagctcggaccgt

SEQ ID NO: 437808 - DNA, 440 bp, Triticum aestivum
cttccacgtgattcgagtcgcctcgcctctcccccgtgagcccaaacatggactctagcaggcgcccgagtggaatccagcaattgcttgctgcagagcaagaggctcagcaaattgtaaatgctgctagggctgctaaaacggcaaggcttaggcaagccaaagaagaggctgagagagaaatagctgagtaccgtgcacaaatggaggctgatttccagaggaagctcactgagaccagcggtgactctggcgcaaacgtcaaacgccttgagcaagagacaaacgtaaagattgagcagctcaagcagcaggcagcaaacatctctccagaggtgattcagatgcttctgaggcacgtcacaactgtgaagaactaaaggttgatgagtcagccctgcatatgatggcaactttgtactatctgttcatttctttgg

SEQ ID NO: 437809 - DNA, 410 bp, Triticum aestivum
tgcaggtcgcactctatccatcccgtacctgtccgacgagggaggagaaaaaaaaaatgctgcgccacgccgcccgccgcctcgcgttccgcgccgccgctgccggcagcggctccatgagccgcagggccctcgcgacggcgcaggcgcccgcggaggcgggcgaggaccccgccttcctggaggcgtggaagaaggtgaccacaatcatcgagcccccccagacgcccatgtcgtccatgaagccccgcccgcccacgccggcctccattccctccaagctcaccgtcaacttcgtcctcccctacaagtccgagatcaccaacaaggaggttgacatggtaatggtaccggctacaactggcctgatgggtattttgccaggccatgtttccacaattgcagagctc

SEQ ID NO: 437810 - DNA, 456 bp, Triticum aestivum
cgcctgttcttcttcctgttgttgtctcaccgcagcaaggagcagtcagcatcgagagagcaacaatggcgatggcgtcgtcgagcgggctgaggagctgcagcgccgtgggcgtaccgagcctgcttgcgccttcatcccggtccggccgctccgggctgccgttctgcgcctacgccaccacctccggccgcgtcaccatgtccgccgagtggttccccggccagccccgccccgcccacctcgacggctcctcgccaggggacttcgggttcgaccccctgggcctcgccaccgtgccggagaacttcgagcggttcaaggagtccgagatctaccactgccgctgggccatgctctgcgtgcctggggtactggtgccggaggcgctggggctgggcaactgggtgaaagcgcatgagtgggcggcgctccccgacgggcaggcgacgtacc

SEQ ID NO: 437811 - DNA, 359 bp, Triticum aestivum
cggatgcgtggttgggaatccgccccccgaaaggagttctcttatatggaccacctgggacgggagaagacgttgatggctcgtgcatgtgctgcacaaaccaatgcaacctttctgaaacttgctggtccgcagctagtccagatgttcatcggtgacggggcaaagcttgtccgagatgcctttgagctggcaaaggagaaggccccctgcatcatttttattgatgagattgatgcaattggtacaaagcgttttgacagtgaagtgagtggtgacagagaagtgcaacgaactatgttggagttgctgaatcagctagatggatttagcagtgatgagaggataaaggtgatagc

SEQ ID NO: 437812 - DNA, 377 bp, Triticum aestivum
aagctggctgagcacggcctcctcttgggtttcctgatgctgctgcaggggggcgtgaagcatgcggcggctaagccacgggagtggtacgtcggcgaccagaagggctggaccttcggcgtcgagggctggcctaacttgcctaccttcaagcccttcagggaaggcgacgtgctggttttcaagtacgaccgtgcggcgcagaacgtgatgcaggtggacgacttcgggttcggcacctgcaccaggcaccccgccaacgccacggtgtacgactccggcaacgaccgcatcaggctctctcgcggactcatcaacttcatcagcggtgtctcggataactgctacaagggcggcgtcaagatctcactcaccgt

SEQ ID NO: 437813 - DNA, 336 bp, Triticum aestivum
cccattcgtccgcccgtgacaatgcctgaaaaagagattgacgatgataacagtactctgcccaaggaggtggactggaggaagaaaggggcggtggtgccggtgaagaaccaaggcggctgcggctcgtgctgggcgttcgcggcggtggcggccatggaggggctgaaccacatcaagaatgggaagctggtgtcgctgtcggagcaggagctggtggactgcgacgcggaggcggtggggtgcgccggcgggttcatgagctgggcctacgagttcgtcatggacaaccacgggctcaccaccgaggccagctacccgtacctgggcgtcaac

SEQ ID NO: 437814 - DNA, 429 bp, Triticum aestivum
tcgagaacggcactaccgtccacggcaccatcactggtgttgacataagcatgaatactcatctgaagaccgtaaagctcacaatgaaagggaagaatcctgtaacccttgatcacatcagcgtgagaggaaacaacattcggtactacatcctccctgatagcttaaacctggaaacgttgctggttgaggatacccccagggtcaagtctaagaagccaactacagggaagcctatgggtcggggtcgtggacgcggccgtgggcgtggtcgcggccgggggcgctgagctttattgttccctgctttggaagctcgtgcagtgcaagtccctacagcgtaacctgcttcctctgcgagctatgtcgaagattgtctctgttctgttagaagatgtcaatctaagtacgtgttgatgcggaatcatc

SEQ ID NO: 437815 - DNA, 414 bp, Triticum aestivum
tccatatccatagcttgcatgttcaccatgctgctccttgctccggccatcatggccacggaccctgaccctctccaggacttctgtgtggccgacctcgatgacaacgcggtccgggtgaacggatacccgtgcgtgccccagttggaagccggcgacgacttcctcttctcctccaagctagccaggggcggcaacacgtccaccccgaacggctcggccgtgacgaggctggacgtgacggagttccccggcgagaacacgcagggtatctccatgaaccgcgtggacttcgcgcccgggggcaccaacccgtcgcacatccacccgcgcgccaccgagatcggcctcgtggtgaaaggcgagctcctcgtgggcatcatcggcagcaacgagtccgggaacaggctctac

SEQ ID NO: 437816 - DNA, 286 bp, Triticum aestivum
ggttctgccatcactggaccgatcgggaaggagtgcgccgacctgtggcccaggattgccagcgccgcgaatgccatcgtctgatctgatcgccggagcagctagatgatcaaagcttttgatagcatgtccctcttttcttctagtttacttgtggcccttgaggatgagtttcctggattatgtaatgctgctggattattgtctgttaggtttaagattttgcactgtggtttggctgctaagatttgttcagtttgaacctgaaagagcttttgatcggatt

SEQ ID NO: 437817 - DNA, 432 bp, Triticum aestivum
gtgcccctacacggtgtggccaggagcctacccggtcggcggcgggagcaggctcgacacgggtcaggcggcgaccattcaagtccccccgggcacggcggctggaaggatttggggccgcaccggctgcaacttcgatgctagtggccgcgggtcatgcaccacgggcgactgtggcggcgtgctagcctgcgctgccggcgggaggccacccgcgacgctcgccgagtacacgctgggtaagggcggcagccccgacttctatgacatctccctcgttgacggattcaacgtgccgatgagctttgggcctgccggcggcggctttcacgcgataagctgtgccgcggacatcaacgcaaattgcccgtcggagctgaaggtggacggaggatgcgtgagtgcctgcgtcaagttcggcgccccccagta

SEQ ID NO: 437818 - DNA, 406 bp, Triticum aestivum
gcagttcggtcgagccctccgccgccgccccgccttcagctctctccttccttctccgatccaagatgaagttcattgctgcctatctgcttgcttacctctctggcaacgccagcccctctgcagaggacctgacatccattcttgagtctgttggttgtgaaatcgacaatgagaagatggaactcatgctgtcccaagtgaagggcaaggacatcaccgagctcttggctgctggtagggagaagtttgctgcggttccatctggtggtggtggtgtggctgtttcagctgctgcccctgctgctggaggtgctgctgcccctgcagctgagtcaaagaaagaagagaaggtcgtggagaaggaagagagtgatgatgacatgggcttcagtctgttcgacta

SEQ ID NO: 437819 - DNA, 409 bp, Triticum aestivum
ctccttacagcatcctcctctcggttcttagtttcttttccaccacccacaggccaaggaggatgtcttgctgcggcggcaagtgcgggtgcggcgccggctgccagtgcggcaacggctgcggcgggtgcaagatgttccccgacgtggaggccaccgccggcgccgccgccatggtcatgcccaccgcctcccacaaggggagctccggcgggttcgagacggccggggagaccggcggctgcgactgcaccacctgcaagtgcggcaccgcgtgcggctgctcctgctgcagctgcaactgagccggcgcccatgatgccggcagaggcgagcacgaggatgaggaggaggacaagcaagcaagcaccatcgtcaccagttcacagcatgcgcccgcgcgcgcgct

SEQ ID NO: 437820 - DNA, 370 bp, Triticum aestivum
ccctctcgtccgcccacgcgtccggcgcccgcctgcccgccccgatggcccgcacgaagcagacggcgaggaagtccaccggcggcaaggcgccgcggaagcagctggcgaccaaggcggcgcgcaagtccgccccggccaccggcggcgtgaagaagccgcaccgcttccgccccggcaccgtcgcgctccgcgagatccgcaagtaccagaagagcacggagctgctcatccgcaagctgcccttccagcgcctggtgcgggagatcgcgcaggacttcaagaccgacctccgcttccagagctccgccgtgtccgcgctccaggaggccgccgaggcctacctcgtggggctgttcgaggacaccaa

SEQ ID NO: 437821 - DNA, 436 bp, Triticum aestivum
ttgtccaccaccaccaccaccgcggcacgtacgtttgcgatcaaaagaaagtcgagccatatggcgaaggccgcagcgatgctcgtgctggtggcgctggtggtggcggcgatggcaacgggcggagcggcgcagtgcaacgcggggagcctggcggtgtgcacctccccgatcatcagcgggaccccgccgtccaagacgtgctgcaacaacctaaagagtcagcgggggtgcttctgcaagttcgcgcgcaaccccgcgtactccagctacatcaacagccgcaacgccggcaagaccctcaccagctgcggcatcgccgtaccgaagtgctaggagccgggcctccgccgccggcgccggcgtgctaggcaccgccccgccgcctattgctactactactactacgtaacgtactacttacgagctcctacca

SEQ ID NO: 437822 - DNA, 392 bp, Triticum aestivum; identical to SEQ ID NO: 435588

SEQ ID NO: 437823 - DNA, 430 bp, Triticum aestivum
tgctgcccccctccacacccgtgccgccgccgccgtcgccgcccgcgtccccccatggcgctgccgaaccagaacaccgtcgattaccccagcttcaagctcgtcatcgtcggcgatggcgggactggcaaaaccacttttgtgaagaggcatctcactggagagtttgagaagaaatacgagcccaccattggtgttgaagttcacccattggatttcaccactaactgcggaaagatccgtttctactgctgggacactgctgggcaagagaagtttggtggccttagagatggatactatatccatggtcagtgtgcgattatcatgtttgatgtcacttcaaggctgacctacaagaatgttcctacgtggcacagggacctgtgcagggtttgtgagaacatccccattgtcctgtgcggcaaca

SEQ ID NO: 437824 - DNA, 362 bp, Triticum aestivum
cccacgcgtccgtcaaaccatggcgtccatgaccggcctgtcgcagggcgtgcgtctcccaggcccggccggcaggcgcgccagcaggttcaccgtgagggcgtcgtcggcggaggccgaggccgccggccgccgcgcggtccttggcctcatggccagcggagtcgtcgggagcgcgttcgctcaggtggtgcacgccggcaccgtcgcggccatcaaggttggccccccgccgccgctctccggtggactccccggaacggacaactcggacgaggcaagggacttcgacctgcccctgaagaaccggttctacctgcagccgctgccaccggcggaggcggcggtgcgggccaaggagt

SEQ ID NO: 437825 - DNA, 462 bp, Triticum aestivum
gtcgggcaccgtgctatgtggacgagcactaccttcccaccgtgctctccatcgaggctccggagcgcatcgccaaccggagcatcaccttggtcgactggtcccgcggcggcgcccacccggccaccttcggcgccgccgacgtgactgaggacttcctggggacgctggtggggaagaaggggaatgctgagcggtgcatgtacaacgggcagccggtcgaggtgtgcttcctctttgcgaggaagttcgcccctgccgctttgccgcagttgctcagcctttcctccaagatccttgggtactagctatgccttttactaaatcgattttggtctttttatgtatagctcatactcactggagtggaatagaggaatacaattctttttttcatgtgtcacaaagaacaaaaggatgaatgatcgagtgggtggtttttcttgaccattcatatttctg

SEQ ID NO: 437826 - DNA, 462 bp, Triticum aestivum
cccgctcgcgcccgcagaaggttcaagaggggtctcaagaggaagcccatggcgctcgtcaagaagctgcgcaaggcgaaaaaggatgctcctgctggtgagaagcctgagccagtgaggacacatctccgcaacatgatcattgtccctgagatgattggcagccttatcggtgtctacaatggcaagaccttcaaccaggttgagattaagcctgagatgattggccattaccttgcagagttctctatctcctacaagccagtgaagcacggtaggcccggtatcggtgccacacactcttcccggttcatccctcttaaatgagttgtgccgctttctactttgaaagaaatcagtacggaccatctgatggcatgtccatcgagctgtctcccttgttttgaaccagttatatatctagtatttggttctggttagctatataatttcgttatgcac

SEQ ID NO: 437827 - DNA, 278 bp, Triticum aestivum
ctcatcttcttctccttgaaatctttttgggtccacagatttggaggatgtcttgcaactgcggatcaggctgcagctgcggctcagactgcaagtgcgggaagatgtaccctgatctgacggagcagggcagcgccgccgccgaggtcgccgccgtggtcgtcctcggcgtggcgcctgagaacaaggcgggacagttcgaggtggccgccgggcagtccggcgagggctgcagctgcggcgacaactgcaagtgcaacccctgcaactgttaagct

SEQ ID NO: 437828 - DNA, 431 bp, Triticum aestivum
gcaaccgggtttaaaccacccattgttgaaagaccataaaatccagatgaaaccaagttctatccctgtttggatggataccgaaacatttccttcggattctttttcacaagcggaaccatctatcatcgagtgcccaacaggaacagttccaatactgcgtagtaacggaagtagcaccatagcaacacacaatattgatgggctcaaaaacgatatgcaatgggagagggcaggactcagatacatgggtgatttatatggggcgtgtgcttcattaaatgtttgggagccaaaggttaaaggtagccaggattctagtgcaatttggataagtattgaaaatagaagaggacaacagcctgatcgggtgagcgccggtcttcgggtagctccagcattgagtggtgatgcttttgttagacttcatg

SEQ ID NO: 437829 - DNA, 170 bp, Triticum aestivum
atcttgctcgcgatggtaatgaaattatccgagcagcttgcaaatggagtcctgaactagccgcagcttgtgaagtatggaaggcgatcaaattcgagttcgagccggtagatactattgataagtctataaatctaaagataaagaagagaaggtataaatgaaggtat

SEQ ID NO: 437830 - DNA, 465 bp, Triticum aestivum
caagaagaagggcgtggagacgtacaagatctacatcttcaaggtgctgaagcaggtgcaccccgacatcggcatctcctccaaggccatgtccatcatgaactccttcatcaacgacatcttcgagaagctcgccggggagtcggccaagctcgcccgctacaacaagaagcccaccatcacctccagggagatccagacctccgtccgcctcgtcctccccggggagctcgccaagcacgccgtctccgagggcaccaaggccgtcaccaagttcacatcctcctagactgacggcgtgcagttggtttctgcatctgcatctgtactcttgactctgcttatctatctatctgcaagtagtggtggtggtagtagtacctgtgctgggtgattgccaacgctttgttggcccgttggttgtaagagctgaagttgctgctttggcaaactgaaatctatcta

SEQ ID NO: 437831 - DNA, 382 bp, Triticum aestivum
ctctctctctctccatcgacctaacctacacacccagagaaagagagagaagcagcagtagctcatgtaacctagctagcctgcagatctccacgggaacgcttcttattgttggctgccgaccgttgaacctacccggggtctgaacggataagggggcagcgaggcggcctctccaggggataatcagaaggaagaatgtgctcgtccggccagatcacaccggcagaagaagtctgctacgtgcactgcaacttctgccacaccagactcgcggcgagcgtccctgggaacaacctgctcaacatcgtgacagaccggtgcgggcactgcacaaacctactttcggtgagcctgagagggcagatgcactcaccggtcc

SEQ ID NO: 437832 - DNA, 509 bp, Triticum aestivum
cccacgcgtccggtacgtcgacgtcaaggtgaacggcgccgtgcacaagggtatgccgcacaagttctaccacggccgcaccggacgcgtgtggaacgtcaccaagcgcgccatcggcgtcgagatcaacaagcaggttggaaaccgcattatcaggaaaaggatccatgtccgtgttgagcatgtgcagccatccaggtgtgctgaggagttccgcctgaggaaagtgaagaacgaccagctcaaggcggaagccaaggcgcgcggtgaggtcatcagcaccaagaggcagccactcggccctaaacctgggttcatggtcgagggtaccacaattgagaccgtcactcccattccctacgatgtggtcaatgatctcaagggtggttactagggtgtttgggttatctgcctgcacaaccagttcaaatctatggtgctcttatgagtaggatttgctctctgagcaagagtctgggttgggtctttattcatgtcaagaagatatt

SEQ ID NO: 437833 - DNA, 406 bp, Triticum aestivum
gtacacgctgcgttacaccggaggcatggtccctgatgtcaaccagatcatcgtgaaggagaagggcatctccacgaacgtgacgttcccgacggtcaaggcgaagctgcggctgctgttcgaggtggcgccgctggggttcttgatagagaaggccggggggcacagcagcgacggcaagcagtcggtgctggacaaggtgatctccgtcctggacgagcggacccaggtggcctacggctccaagaacgagataatccgcttcgaggagaccctctacgggtcctccagactcgccgtcagcgccaccgtaggcgccaccgtctgataatcgatccatcttctttttttacgcttttttcaacctgaaaaacaagatgtccgttatagagttcgcctgaagcat

SEQ ID NO: 437834 - DNA, 448 bp, Triticum aestivum
cctaaccacataatatctccgtcgatccaccacaccctgcaatggcgtccgcgctcaccaacgtgagcctgtctaccttcgcgcccacggccaggggcgacgtcctcgccaggcctcaggtggccgccgcccgcgtcaccttcccgacggcgtaccgtggcagcggtgccctctcctgcagggcgggtgggccggccacgccgccgggcatctccgacaagatgtcggacagcatcaaggaggcccaggagacgtgctcggaggacgccgccagcggggagtgcgcggcggcgtgggacgaggtggaggagctcagcgccgccgccagccacgcccgggacaagctcaaggactccgacccgctcgagaactactgcaaggagaaccccgagaccgacgagtgccgcacctacgacagctgagcgtacgtgctaatttgttctggacg

SEQ ID NO: 437835 - DNA, 443 bp, Triticum aestivum
cccaaaccccatactcagcgacagagagcagccagcagcctcctccgccgccgcccatgtcaggaggagggatcgcgcggggccgcctcgcggaggagcgcaaggcctggcgcaagaaccacccccatggattcgtcgcgaagccggagacggtggccgacgggtcggtgaatctcatgatctggaactgcaccatccccggaaagcaggggactgattgggaaagtggatactacccacttactctccatttcagtgaggactaccctagcaaacctcccaagtgcaagttcccgcagggttttttccacccaaatgtctatccttcagggacggtctgcctctcgattcttaatgaggatagtggttggagacctgccatcactgttaagcagattctagttggaatacaggatttgcttgatcaacctaatccagctgat

SEQ ID NO: 437836 - DNA, 497 bp, Triticum aestivum
cccacgcgtccgcccctgcctcccccagagctcgttagggttttctcttttttcgggggagaaatctcaagaggcggcaccatgctcgtgtaccaggacaagctttccggcgacgagcttctgtcggattcgttcccttacagggagctggagaacggcgtgctctgggaagtcgatggccattgggtcgttcaaggagcagttgatgtggacattggagccaatccctctgctgagggtggtggtgatgatgagggtgttgatgaccaggccgtgaaggtggttgacattgttgacaccttccgtcttcaggagcaacctgcttttgacaagaagcagtttatctctcacatgaagcgctacatcaagaacctctctgccaagcttgaaggggatgacctagatgctttcaagaagaatgttgagtccgccacaaagtatcttcttagcaagctcaaggaccttcagttctttgttggcgagagcatgcatgatga

SEQ ID NO: 437837 - DNA, 131 bp, Triticum aestivum
cggttctcgtgggctcatttcttaaaatatcccatatatgtagggggaaaccgaggaagaggacagatctatcctgatggtagcaagagtaacaatacagtctataatgctacgtcaacaggtatagtaag

SEQ ID NO: 437838 - DNA, 431 bp, Triticum aestivum
gtgctcttaaggtagctttggatggtggtcttgatattccgcacagtgacaagagatttgctggcttcaagaaggatgagaagcagctggacgctgagattcaccgcaaatacatctatggaggccatgttgctgactacatgaagtcactggctgatgaggaacctgagaagtaccaatctcacttcagtgagtacatcaagaaggggattgaggctgataacatggaagcactgtacaagaaggttcatgctgccattcgtgctgatcctaccatggcaaagtcaaccaaggaacctccaaagacgcacaagaggtacaatcccaagaagctgacctatgagcagaggaaggccagtctcgtggagcggctcaacgccctcaactcatctgctggtgctgatgtcgatgaggacgacgacgaatgagtg

SEQ ID NO: 437839 - DNA, 434 bp, Triticum aestivum
atgctgcctggtgtatcattgaagcctggtactcctgtggaggatgttttccccctggtggaagcagaaacccctgtagagttggttctcgtgatgacggtcgagcctggctttggtggccagaagttcatgccggagatgatggataaggtgcgtacgctgaggaagaagtacccgtccctcgacattgaggtcgacggtggcctgggtccttccaccatcgacgccgccgcgtcggccggcgccaactgcatcgtcgccgggagctccgtgttcggcgcgcccgaccccggagaggtcatctcggcgctgcgcaagagcgtggaggcgtcgcagatcaagagctgatcatctgtagctctgcgcgctcggacggacgcatgtttctgctgtaaactagaaccactctgcacgaccgacgctcggtcagcagt

SEQ ID NO: 437840 - DNA, 299 bp, Triticum aestivum
cactttccgggagatccagacctccgtccgccttgtcctccccggcgagctcgccaagcatgccgtctctgagggcaccaaggccgtcaccaagttcacctcctcctaggcgtcagtctcgtttctgaacccgttggattctgtatgtagttaggtgcaagattgtcttctgaatttgtgatcttgtgctgcttgttggtctgcagaaatgttcatgggactacttaatgatattcttgctgcttgaagaaaaaaaaaaaaaaaaaaaaaaaaataaaaaaaaataaaaaaaaaaataa

SEQ ID NO: 437841 - DNA, 438 bp, Triticum aestivum
gctgatgaggctgctgctggtggtggctctcgccgtggcggcggcggcggcggagcagcgcgccacgtacatagttcacatggccaagtctgccatgccggccgagtacgccgaccacggcgagtggtacggcgcctccctccgctcggtgtccaccggtcgcgccgccgctgccaagatgctttactcctacgacaccgtcctgcacggcttctcagcgcggctcacggagcaggaggccagcgacatggcgggcatggacggcgtcctggccgtgaaccccgagacgcggtacgagctgcacaccacgcggacgcctgagttcttggggctcgccgggagcgagggcctgttcccgcagtctggcacgggcggcgacgtcgtcgtcggggtgctcgacaccggcgtctggcctgagagcaagagctacaacgacgc

SEQ ID NO: 437842 - DNA, 304 bp, Triticum aestivum
ggcatacttggctgggccattgatgaggattttggttctattgagaaacttataaagaagatgaatgcagagggtgctgctttacaaggatctggatgggtgtggctagctttggataaagaggccaaaaagctttcagttgaaactactcctaatcaggaccctcttgtgaccaaagggtcaaacctgtatcctttgttgggaattgatgtctgggagcatgcgtactacctgcagtacaagaacgtgaggccggactacctgaccaacatctggaaggtggtgaactggaaatatgccggag

SEQ ID NO: 437843 - DNA, 481 bp, Triticum aestivum
gtatactccatttccatcacacacacggacacacctgcaagagcgagagcgtgaaccatggcgggcatgatgaagaagcaggtcgtgacggcgctgatgttggcgctggtggtgctggcggcggcgccgggcggggcgcgcgcggcgtgccaggcgtcgcagctggcggtgtgcgcgtcggcgatcctctccggggccaagccgagcggcgagtgctgcggcaacctgcgggcgcagcaggggtgcttctgccagtacgccaaggaccccacctacgggcagtacatccgcagcccccacgcgcgcgacaccctcacctcctgcggcctcgccgtcccgcactgctaggcgccggcaggcccctggcgcatatggctagctagctgccgccgtgagagtgtcagactatagctagccctagctgagtgcgtacgtgttgcgtccatgaacgcatcttcctgctaaactactatgtggttcg

SEQ ID NO: 437844 - DNA, 330 bp, Triticum aestivum
gcttcaggtggtattcatgtttggcatatgccagctctgaccgaaatctttggggacgattctgtattacaatttggtggaggaactttaggacatccttggggaaatgcacctggtgcagcagctaatcgagtggctttagaagcctgtgtacaagctcgtaacgaagggcgcgatcttgctcgcgaaggtaatgaaattatccgagcagcttgcaaatggagtcctgaactagccgcagcttgtgaagtatggaaggcgatcaaattcgagttcgagccggtagatactattgataagtagataaaactaaagataaagaagagaagg

SEQ ID NO: 437845 - DNA, 447 bp, Triticum aestivum
ctactacttgccttcccctccccgtctctctccgcccccccccgcgtctccattgccttctccgttcccccaccccacgcctcgtcggcgggcggcgacgcgacgagacgagagcggcggcggcgccggcggaggcaggaatgcggatgttctccaaggcctgctcgctcgtcgtctcctccctcccgcgctgctcctcctccgcccccgcgattaggggccagccgtcgttgataccgagggtgagcaggaaatggctcgggaagccgctcatgtacgggatcggcacgctgctggtcatgcccctgaggaccatccacggggtgggccggatgttcggcgccgcgcgctacctctgcaacatgaccagcgtctcctcgtcgctgcaaatcgagctcgtaccctgtcttcaagataactatgcgtacatcttgcatgatgtggata

SEQ ID NO: 437846 - DNA, 472 bp, Triticum aestivum
gccttgctcaagcggcagcaatggagggcaaggaggaggacgtgcgcctgggcgcgaaccgctactcggagcgccagcccatcggcacggcggcgcagggcggcggcgcggacgagaaggactacaaggagccgcccccggcgcccctcttcgaggcggaggagctcacctcctggtccttctaccgggccggcatcgccgagttcctggccaccttcctcttcctctacatctcggtgctcaccgtgatgggcgtggtgggcaacccgtccgggtccaagtgcggcaccgttggcatccagggcatcgcctggagcttcggcggcatgatcttcgtgctcgtctactgcaccgccggcatctccggcggacacatcaaccccgcggtcaccttcgggctgttcctggccaggaagctgtcgctcaccagggcggtattctacatggtcatgcagtgcctgggcgccatatg

SEQ ID NO: 437847 - DNA, 398 bp, Triticum aestivum
gttgtgcttctcctccccactcagtcctcggttcccggtccggttcggttccgttcggttcgttagggtttagtagcggggaagaggaaggcatggcggacgtcgagtaccgctgcttcgtgggcggcctcgcctgggccaccgacgaccagtccctccagaacgccttctccaagtacggcgacgtcatcgactccaagatcatcactgacagggagacgggccgttcccgcgggttcgggttcgtcaccttcgcgtcggacgaggcgatgcgccaggcgatcgaggccatgaacggccaggacctggacggccgcaacatcaccgtcaacgaggcccagtcccgccgctccggcggaggcggcggcggcttctgcggcggcggcggcggcggcggc

SEQ ID NO: 437848 - DNA, 469 bp, Triticum aestivum
gcgtatttgtttacggctaattgcatcgccggtgatgcgcgagatcttgaaagattccatcttgtttggccgctccggccaggggcgagctgcgccctcttgatttcagtgccgccaccacggctactttggcattaaactacggacggcgtcgcggctccgtcggggaatcagatcacgtcgtgatcatcatcagattaaaacaaacaaacgaacacgaattcatctttgccttgtcatctctgtctggactgtgcgctgattggattcgatccgtgtgttgtttgcttgcgtgcgcgcagatggtccgcgattgccgcccggctgccggggaggacggacaacgagatcaagaacgtgtggcacacccacctcaagaagcggctcgaccccggcgcgcaggagcagctcgaggaggccagcgccgctaagaagcgcaagaagccggcggcggcggcgcggaagcgcg

SEQ ID NO: 437849 - DNA, 418 bp, Triticum aestivum
cagggctcgcctgtggcctcgcggggctcgccgccggcatggccattggcattgtcggtgatgctggagtcagggctaatgcgcaacaaccaaagctgttcgtgggcatgatccttatcctcattttcgcagaagcacttgccctttacggtctcatcgtgggcatcatcctctcgtcccgtgccggccagtcccgtgcggattaggcgcctcgctctaccattctgcaattgccacacaggctacattcttgagaagctttctaattttgatgtattaaggagatatttgtagattattaaggaaggtgacacttccagtaccgttttcattctttttgggttgtggtgggcgtttgctgttcgtgcagaggattttggggtaggctggattgctgctcctgggaatatgggtttta

SEQ ID NO: 437850 - DNA, 381 bp, Triticum aestivum
cggacgcgtgggcggacgcgtgggcggacgcgtgggcggacgcgtgggcaatcccctccaatcccaccttcggaacagcagccagcaagcgtcgccagccatgtcgggccgcggcaagggaggcaagggcctgggaaagggcggggcgaagcggcacaggaaggtgctgcgcgacaacatccaggggatcacgaagccggcgatccggcggctggcgcggcggggcggcgtgaagcgcatctccgggctcatctacgaggagacccgcggcgtgctcaagatcttcctcgagaacgtcatccgcgacgccgtcacctacacggagcacgcccgccgcaagaccgtcaccgtcatggacgtcgtctacgcgctcaagcgcca

SEQ ID NO: 437851 - DNA, 315 bp, Triticum aestivum
gttttgcatatgccaactctgaccgaaatctttggggacgattctgtattacaatttggcggaggaactttaggacatccttggggaaatgcacctggtgcagcagctaatctagtgggtttagaagcctgtgtacaagctcgtaacgaagggcgcgatcttgctcgcgacggtaatgaaattatccgggccgatctcaaatggagtcctgaactagccgcaccttgtgaagtatggaaggcgatcaaattcgagttcgagccggtagatactattgataagtagataaaactcaagacaaagaagacaatgtat

SEQ ID NO: 437852 - DNA, 397 bp, Triticum aestivum
cccacgcgtccgcccacgcgtccgggagaacggcgccatcgtgtcggcattgaccggatcatatggtttccctggtagcacgtcgttgcatttggcagctcgcagcggggacttggattgcatccggaagctgcttgcgtggggagctgatcggctccaaagggactctgctgggtgagaactagatccctgccatgggtctgccttacacattgttggtgtatatatagcagcacagtttggttgctctgttggtaatccagtagagtagactagccaattaacaagtgaactcactataaagcatttcctgaatccatatttggaaagttcactggcccctgcttgtactataacaaacttttatgtgctcaattgatgaattaaatcttatgtc

SEQ ID NO: 437853 - DNA, 468 bp, Triticum aestivum
cgcgtgtgttgcgagccatggccggcgagaagaagatgttcggcttcgaggaggtcgccaagcacaacgtcgccaaggactgctggctcgtcatcgccggcaaggtgtatgatgttacccctttcatggatgagcatcctggtggagatgaggtactgctggcagtaaccgggaaagatgcaaccagcgatttcgaagatatcggacacagtgattccgcaagggagatgatggagaagtaccacatcggggaaattgatgcttcaaccatcccagcaaagcgtacatttgtacctcctcagcaagggtcccatgtccaggccaaggatagcgacctcctcatcaagatcctgcagtttcttgttcccattttaatcttggggcttgcatttggtatccggcactacagcaaatctgagtaggctgttgttggcgagttgcttcggagaaatagctttcaagtaatat

SEQ ID NO: 437854 - DNA, 463 bp, Triticum aestivum
agattccaccagcctcctcctcctcttccctcgccgcccgccgcccgccgcccgctgaggttggtcgccggacgccatggcccccaccaagaagtcgaagaagagcacggagaacatcaacaacaagctgcagctggtgatgaagagcggcaagtacacgctcggctacaagaccgtcctcaagacgctccggagctccaaggggaagttgattatcctcgcaaacaactgccctccgctcaggaagtctgagatcgagtactatgctatgctgtccaagatcagcgttcatcatttccatggaaacaacgtggatcttggaactgcgtgtggcaagtactaccgggtgtgctgtttgagcatccttgaccctggtgactcggacatcatcaccaccgttcctcagtgaagacaagcttacctatcctagcctaagatgatgtagtgtggagagtcgtgctta

SEQ ID NO: 437855 - DNA, 432 bp, Triticum aestivum
cccacgcgtccgctcctcggctgcacggacgggaagggagggagaagaaggagcgcgaacgctcagccccatggcctccatctcggtcccggaccccgccccttccccgaccgaggatgcagagagcatcagaaaagcagtgcaagggtgggggacggacgagaacgcgctgatcgagatcctgggccaccggacggcggcgcagcgcgcggagatcgccgtcgcctacgagggcctctacgacaagcccctcctccgcacgctccaggacgagctctccagccacttcaagggcgcgatgacgctgtgggcgatggacccggcggcgcgggacgccaagctggcctacaaggccctcaggaagaagggcggcgaccggcacgcctgggtgctcatcgaggtcgcctgcgcgtcgtcgccggaccacctcgt

SEQ ID NO: 437856 - DNA, 355 bp, Triticum aestivum
cccacgcgtccgcccacgcgtccgcccacgcgtccggccgcaccgcacccgcacccgcacagcccatcggcgacctcgccggagaagagagaagaaggtgagagatggaggcggcggcggcggcggccggcgtgcagctgggcacctcgaagccgcagatcgcgacccaggcggagatggcggaggcgcgcctgccgatcccctaccgcgaccagtgcgcgcacctcctcatcccgctcaacaagtgccgcgtcgccgagttctacctcccctggaagtgcgagcccgagcgccactcctacgagaagtgccagtacgagctcgtcatggagcggatgctccagatgcagaagat

SEQ ID NO: 437857 - DNA, 493 bp, Triticum aestivum
aatttatcggactattgcgagcggaacgagcagggcgagctttggatgaatcgatctattatcgggcaatcttattgggaataacaagggcttccctgaatacccaaagtttcatatctgaagcaagttttcaagaaactgctcgagttttagcaaaagctgccctacgaggtcgcattgattggttgaaaggcttgaaagaaaacgtagttctgggggggattatacctgttggtaccggattccaaaaatttgtgcatcgttccccacaagacaagaacctttatttcgaaataaaaaaaaaaaatctattcgcgtcggaaatgagagattttttgtttctccatacagaattagtttcttcagattctgacgtaacaaacaatttttatgagacataagaacccccaatatgttgtacacacacaaattatgtaaaaacaatcaaccatttactgaacatttggaataagcgtgaatacatttgtggaat

SEQ ID NO: 437858 - DNA, 407 bp, Triticum aestivum
ctcttagcaagctatatacctacatagtacagccatggcccccaccgtgatggcctcgtcggccacctccgtcgctcctttccaggggctcaagtccaccgccggcctccccgtcagccgccgctccaacggcgctagcctcggcagcgtcagcaacggtggaaggatcaggtgcatgcaggtgtggcccattgagggcatcaagaagttcgagaccctgtcctacttgccaccgctcagcacggaggccctcctcaagcaggtcgactacctgatccgctccaagtgggtgccttgcctcgagttcagcaaggttgggttcatcttccgtgagcacaacgcatcccctgggtactatgatggccggtactggacaatgtggaagctgcctatgttcgggtgcaccg

SEQ ID NO: 437859 - DNA, 425 bp, Triticum aestivum
cccacgcgtccgcccacgcgtccgcccacgcgtccgcccacgcgtccgcccacgcgtccgcggacgcgtggggtacagccatggcccccaccgtgatggcctcgtcggccacctccgtcgctcctttccaggggctcaagtccaccgccggcctccccgtcagccgccgctccaacggcgctagcctcggcagcgtcagcaacggtggaaggatcaggtgcatgcaggtgtggcccatcgagggcatcaagaagttcgagaccctgtcctacttgccaccgctcagcacggaggccctccttaagcaggtcgactacctgatccgctccaagtgggtgccttgcctcgagttcagcaaggttgggttcatcttccgtgagcacaacgcatcccctgggtactacgatggccggtactggacaatg

SEQ ID NO: 437860 - DNA, 478 bp, Triticum aestivum
aggcggtggagctgctggccgagaccaacatgccgctgggcctgctgccgctggcagacatcgaggaggtgggctacaaccgcgccaccggcttcgtctggctgcgccagaagaaggcgctcacgcacaccttcaagcagatcgggcggcaggtctcgtacggcaccgaggtgacggccttcgtcgaggaccgcaagatgaagcgcatgaccggggtcaagagcaaggagctcctcatctggatcaccctctgcgacatgtacatcgagaaggacgatccctccaagatcaccttcaagacgcccacagggctggggaggaccttccccgtctccgccttcgagaagcaggacgacggcaaggccaaggccgcggctgccgacggcaaggaggccgtcgtggccaagtaggtgaggacggccggcatactctacaaagtttggatgaagagtcctcgagtccaatattaactatatac

SEQ ID NO: 437861 - DNA, 423 bp, Triticum aestivum
tctccattggcttcggccccgccctcgccagcttccgcctcggcgccgtcgagtacgcgctccgggccatcccgctcggcggctacgtcggcttccccgacgacgaccccgagtccggcttcgcgcccgacgaccccgacctccttcgcaaccgccccgtcccggaccgcctcctcgtcgtctccgcgggggtcatcgccaacctcatcttcgccttcctcatcatctacgcccaggcggtcaccgtcggcgtccccgtccaggcgctgctctccggcgtcctcgtccccgacgtcgtgcccggctccgccgccgcgcgctccgggctgctcgccggcgatgtcatcctcgccgtccccggcgccgcgccggacccatccgtgccggccctggtcgacctcatcaaatccagccccaacaaga

SEQ ID NO: 437862 - DNA, 396 bp, Triticum aestivum
tggacgtatgtacggccgcctgggcccacacctggatggagtcctgaactagctcgcagcgttgtgtatgtcatgggacgcagagcaaaccgccgttctagccggaggatactatttgatcagtgctagccttggcagcgtcagcaacggtggaaggatcaggtgcatgcaggtgtggcccatcgagggcattaagaagttcgagaccctgtcctacctgccaccgctcagcacggaggccctcctcaagcaggtcgactacctgatccgctccaagtgggtgccttgcctcgagttcagcaaggttgggtttatctttcgtgagcacaacgcattctctgggtactacgatggccggtactggacaatgtggaagctgactatgttcgggtgcac

SEQ ID NO: 437863 - DNA, 394 bp, Triticum aestivum
tatacctacatagtacagccatggcccccaccgtgatggcctcgtcggccacctccgtcgctcctttccaggggctcaagtccaccgccggcctccccgtcagccgccgctccaacggcgctagcctcggcagcgtcagcaacggtggaaggatcaggtgcatgcaggtgtggcccatcgagggcattaagaagttcgagaccctgtcctacctgccaccgctcagcacggaggccctcctcaagcaggtcgactacctgatccgctccaagtgggtgccttgcctcgagttcagcaaggttgggtttatcttccgtgagcacaacgcatcccctgggtactacgatggccggtactggacaatgtggaagctgcctatgttcgggtgcaccga

SEQ ID NO: 437864 - DNA, 503 bp, Triticum aestivum
gcaaacttatcttgaggctagccaccatgaagacaatgttcatcctcgctctcctcgcccttgcagcatccaccgccattgcccaattggaaaccatatgtagccagggcttcggacaatgccaacaccaccaacaactagggcaacaacagttgctggatcagatgaagccatgtgtggctatcgtacaacatcagtgtagcccagtgagaacaccattcccccaaacacggggagagcagcatagcagttgccaaaccgtgcaacaccaatgctgtcggcagctagtgcagatcccagaacaagcccggtgcaaggccatacagagcgtggaagaggctatcattcaacaacagccccaacaacaatggaatgagccccaacaggaagcacaccttaagagcatgaggatgtcgcttcagaccctgccgtctatgtgcaacatctacgttccggtacaatgccagcaacagcaacaactggggcgacaacaacaacaacag

SEQ ID NO: 437865 - DNA, 383 bp, Triticum aestivum
cccacgcgtacggtgggttctaggttagcgcgcagttgggcaccgtaacccggcttgcggttcatcccgcgctggattccttttgcagaaggaacttgactacctggatggagctgtttcaaaccctaagcgcccattcgctggcattgagggtggctcaaaggtggcggccaagattggggttatcgaaaccctggtggagaagtgtgatatccttcttttgggtggtggtatgatcttcacattttacaaggcacaaggactctcagttggttcttccttggttgaggaagataaacttgagctggcaacatctgtccttgcaaaggcaaaggcaaagggtgtgtcccttctggtgccatctgacgatatcattgctgata

SEQ ID NO: 437866 - DNA, 388 bp, Triticum aestivum
cctgcaaagcctgctgcagcaccagctgcgaagcccgcacctgctgagaaaccagcaccggcagctgctgatgtagccaagcagattccagctggcattccaggtagccgggcgaacaactattaccgtgcagatggccagaacacgggcaacttccttacggaccgtccttcaaccaaggttcatgctgctcctggcggtggctcgtccctgggctacttgtttggcggaaagtgatgttaatgatggtgcctgcttaatgaacgagcgatgaattggcctgtatctctgttatccatgtggtgaaaactggaagtgtttggtttgagcagtttaccacctgcgtcgatgtactctgtctgtatggttcattgtgtccaagctgacc

SEQ ID NO: 437867 - DNA, 448 bp, Triticum aestivum
gctatatacctacatagtacagccatggcccccaccgtgatggcctcgtcggccacctccgtcgctcctttccaggggctcaagtccaccgccggcctccccgtcagccgccgctccaacggcgctagcctcggcagcgtcagcaacggtggaaggatcaggtgcatgcaggtgtggcccatcgagggcatcaagaagttcgagaccctgtcctacttgccaccgctcagcacggaggccctccttaagcaggtcgactacctgatccgctccaagtgggtgccttgcctcgagttcagcaaggttgggttcatcttccgtgagcacaacgcatcccctgggtactacgatggccggtactggacaatgtggaagctgcctatgttcggatgcaccgacgccacgcaggtgatcaacgaggtggaggaggtcaagaaggagtaccctg

SEQ ID NO: 437868 - DNA, 394 bp, Triticum aestivum
cccgactcaccaccgcgcctcttcctcctcccgctcacccacccatggcgacggctatgatggctgcagccaccacctcctgctccccgcgccgagcgctcctcaagcccgcggcctcctccagctccgcgccgccgcccaggccgcagcctcggtccttcctcaagcagctcccggggctcgccgcgacggcggctgcggcggccgtcgcctccgtgcctctcccggccctggccgtggagatggagaaggcggcgctgttcgacttcaacctgacgctcccggcgatcacgatcgagttcctgctgctgatggtggcgctggacaagctctacttctcgccgctgggcaagttcatggacgagcgggacgccaagatccgcgcggagctcgg

SEQ ID NO: 437869 - DNA, 413 bp, Triticum aestivum
cgtcgtttcatggcgctcgccgacgtggcggacgacgtgcaccggtgggtgcgtgaggccgcgacggacgagcacttccggggcttgatcgactgggtggaggcgctgcggcccaaaccggccgcggccagggcgtacctgggcggcaccggcggcaccaaggcgacggcgtgcatcgtgtcgtcgggcatgggttttccggtccgggagatcaactttgggacgggcctgccggcgttcgcttcgtaccacttcccgtggcccgccggcgcggcatacgtgatgccgatgccgagtgcgcgcgacgacggggaatgggtggtgtacgtgcatgcagcgccggagctggtgaaggtgatggaggaggagccgactgttttcaaagttctcgagaacagctacgtgttcggatg

SEQ ID NO: 437870 - DNA, 475 bp, Triticum aestivum
cccacgtgtctggaggttggatagcttggttgaaaaaagctcagacctgagtgctgcttcacagatgttctataagcaggcgaagaaaacaaacagttgttgtactatactttgaagtttgaagtgtgatcctgcaattatcttggaaggctccaggttaatgctgttttccgacaaagatcctgatactgttatacttgctccttgtaccttcagttacgcctctgctcccgtttctcagaaagaaaatcaaccggatattgttgtgctgtactaagtctggttgcccatgaaagtgtctgtgaggcacgggatcaatactgtaaatctgttattctttggtgacgccttcgaatagcaactaacatcacttagcaatggccaacatcattgtcttccctgcttagattgtcgctatctcatttctcaagtatgttggagcacagctgctgcccttacattatgtactgtatgt

SEQ ID NO: 437871 - DNA, 442 bp, Triticum aestivum
gagttacaatggtctccgaccgcctcagcgccctccgggccttcgacgacaccaaggccggcgtcaagggcctcgtggacgccggcgccaccgccatcccggccattttccaccacccacccgacgccttcgccccgtccactgtcgccaccgacgtcgccgttccaatcgtcgacctctcctgcgagcgctcggccgtggtcggcgcggtgagggccgcggcggagacggtgggcttcttcctgctggcgaaccacggcgtgccggaggcggccatgtcggggatgctggcggcggtgcggcgcttcaacgaggagccggcggaggccaaggcgccgtactacacgcggggcgcggccaggcgcgtgcgctacagctgcaacgcggacctcttccagacgctggtgggcaagtggcgcgacaccgtgtacatggacgacgc

SEQ ID NO: 437872 - DNA, 455 bp, Triticum aestivum
gcccttggattcgggtatgccgcctccaccttgagtgctaccttcatcaatggcgtccttggcccccagaccagaccggaaaatgatacggcgcgcatgtccatctacatcgagaacatccacaagggcatccatgggagcgattcaggcgcgtatgactctcaaggaaggttcgttcccgagaagttcgaggcggcattcgccaagcacgccaagacggtgccggacgccctgacgtccgcggaggtggacgagctgatcaccgcgaatcgggagcccagcgactacgcgggatgggcgggcgcgtcggcggagtggaagttgctgtacagcatcggcaaggacaaggacgggctcctccgcaaggacgccgccaggggcgtctacgacggcagcctcttcgccagggtggtgcaggagcggaggacatctataggagaaacccaggcatgatc

SEQ ID NO: 437873 - DNA, 436 bp, Triticum aestivum
gcgcaatgtctggtacccatgtacgtggcgaccaagatggcctcgatcaggcaggcgtccctgttcgccccgtcgccggagacgtacgcccgcgccgccgtgcgctacattgggtacgagcctcggtgcgcgccctactggccgcacgctctactgtggttcctcttctccgtggtgcccgagcccctcgtcgatgggtacgtcctcggcatgtccctcggtatacgcaaaatgggccgcgccaaggaggccaggaagaaagcggtgtgacacgcgcggtggaagaaagggcacgtacggtcgtaaagatggactcagatgaatgtgttaattctacaatcttcatgaccaattgtaacacgacgaacgactgaatgcagcctcccttgcccttccaaacagttttatctgtattaagacttaattcgtgatattt

SEQ ID NO: 437874 - DNA, 432 bp, Triticum aestivum
cccacgtttctggttcgacgtggcggggtacaccgagggcttcccgcgcctcgtctacttcgaggactcgtggacccgggtcagcaacgtcatcttcctcgacgcgcccgtcggcaccggcttctcctacgcgcgcgaggaggagggcctcgacgtcagcctcaccggtaccggcacgcacctccgggtcttcctgcagcggtggatcgcggatcatcctgagttcgcctacaacccgctctacatggggggcgactcctactccgggtacaccgtccccgtggccgcgctcgagatcgccgaccagccggataagggaggcctgaacctcaagggctacctggtgggcaacgccggcaccgacgacaagtacgactccggcggcaagatccccttcatgcacggcatggggctcatcttccacgagctcta

SEQ ID NO: 437875 - DNA, 402 bp, Triticum aestivum
cccacgcttccgcccacgcgtccgcccacgcgtccggcgctacatcaagaacctctctgccaagcttgaaggggatgacctagatgttttcaagaagaatgttgagtctgccacaaagtatcttcttagcaagctcaaggaccttcagttctttgttggcgagagcatgcatgatgatggcggcgtggtgttcgcctactacaaggagggagctgctgatccaactttcctgtactttgcacatgggctgaaagaggtcaagtgctaatcgcactgtatgctaaaatctatgcggtcgtcagtatttttgctctgctctatggttgtcagtcgactctccaatgttgtgtcggtaactatcagatgttgagtgtcttgaaaactttctgataattgtgggat

SEQ ID NO: 437876 - DNA, 440 bp, Triticum aestivum
gtgtatccgatgacggtggccgccgcacgctgcctcattctcacccccaccgtctcctccacctccttctcctccgccgcgctccggctaccccggatcgcccgccgccgcccgctctcctgctcggcctcgccgctcgccgtgttcgccaccatggactcgccgcccgagggctaccgcaccaacgtcggcatctgcctcgccgacccctccctcaccaagatcttctccgcgtccaggatcgacatccccacggcgtggcagatgcctcagggtgggatagaccaaggggaagagccgcgagcagctgccattagggaactgagggaagaaaccggtgtcagatctgccgagattgtcgccgaggcccccaattggttgacatatgatttccccgcggatgtcaaagacaagctgaatgctaggtggggaaccaactg

SEQ ID NO: 437877 - DNA, 439 bp, Triticum aestivum
cccacgcttccgggagctcatcaaggtagctgattttgggcttgctcgtgagattatttctgaaccaccatacacagaatatgtgtcaactcgctggtatcgtgccccagaggttctacttcaagcttctgtttacagctcagcagttgacatgtgggctatgggtgccattattgcagagctttttttcgcaccgacctcttttcccaggctcaaggtacacatgatcctttttctgctgagcctcatttggttcccctattctcttggttgttgtgcccaatttaattgaagatttttaagttggtcctaatagtttgctgggagctaaatattaggcaaagatgctgttgattatatatgaaataaccatcatcggccactttaataagtgaacccattttttgtatagtctagaaagcaccccataatgtgaaaa

SEQ ID NO: 437878 - DNA, 433 bp, Triticum aestivum
cacgcactttcactctcctgccgcggtgcgccgtacgtgctctctagccaagatgtcgtcggtcagtgcccgcgctcccgtggccgctctccggccggcggcgtcagcgtcgagcccccggttcctgggcgactccggccgcgtcggcctcgccaagtccacgcgccgcgacgtcgccgtccaggccaaggggtcgtggctccccggcctcccctcccctgcctacctcgacggcagcttggcgggtgacaatgggttcgacccgctggcgctggcggaggacccggaggacctgcggtggttcgtgcaggcggagctggtgaacgggcggtgggcgatgctgggggtggcggggatgctgatcccggaggtgctgaccaaggcggtgctgctgaacgcgcccgagtggtacgacgccggcaaggagacctac

SEQ ID NO: 437879 - DNA, 320 bp, Triticum aestivum
gtgtactctttgttcgtgttcgaggactacatgaacctgtacttgctccacaagttcgaggccaaggagccgcgcttccaggccatgaaggcggacgccgcgcccatcgccaccgcgtgattagggacgtggtcgtacgtgccagagtccccgaacaagagtattttgggacgtattgaagtggtgtatcgtagataatttgtgtatgcgtgtgtaatgttttcgctggtggcttcgcagtgcgccagtgcatgccgtgatgcttgttttaccgtacgtgtgagtcaacttctttttatagtatgtgtgttaagtaatgt

SEQ ID NO: 437880 - DNA, 438 bp, Triticum aestivum
ggttttccggccccgaacccgtcggctgtcggcggattgctcgagctgctcacgcggcgagagcgggtcgccgcgtgccggccgggggacggaccgggaatcgcccctttgggggctttccccgagcatgaaacagtcgactcagaactggtggaccatacagtacggatgatgcaataattgaagatatgaagaaggattacatggtcgcgcaagagatcaaggagaataacaaataagctttatgcaatggataatttgcaaggcaaggttctccatgcttgtatgtacgttgctgcttttggaatttggcagttgcttactggtcatgtttggtgattgatgctgaattcctagatacattttgtaaacatttggatttgtccaggcgcatgcctgtatgtactagatgtgtacttgttttcacttatctgcaga

SEQ ID NO: 437881 - DNA, 451 bp, Triticum aestivum
ccctttcgtccgcccacgcgtccggccacacttcttctcgaaacatccatccagcaccgtcgccggcgacctcacccgccgccgccgccgaagatgccggtgagggtggtcgacaccgccaccccttcctcgcagacctcctcaggacaagatgcaaatgctgtgcagccgtctcctcctagctgttcactcttaactgctggaagatgttttgcaggaactcagaatgtttcaagtttacaaaaagatgaggcatggaaagtcaatgttcgtatccatggttgtgatattgaacagggttatttatgtggaacgatggaggcacttaatgttcccttagccgacacacctgtggttacattctgggagggggagatagtagatgctaaaaattatactttttttactggcaagtgggaggcatcagcagaggatgatgtaagacactggt

SEQ ID NO: 437882 - DNA, 391 bp, Triticum aestivum
cccactcgttcgcccacgcgtccgagaaccaggacacgcccacggtatacgcacgtacagctcgatcgcaatggcgtcgctcgtcgccgtccagccggtcgccgtgcggggcctggccggcagctccatctccggccgcaagctcgtcgtccggcccgcctccgccgccgtctcccgctccacccgcagggctcgcggggcggcggtggtggccaagtacggggagaagagcgtctacttcgacctggacgacatcgccaacacgacggggcagtgggacctgtacggcagcgacgcggcgtcgccctacaacggcctgcagagcaagttcttcaacaccttcgccgcgcccttcaccaagcgagggctgctgctcaaggtcctgctgctc

SEQ ID NO: 437883 - DNA, 472 bp, Triticum aestivum
aaattattgaaaggggatatcaccatgttgagttcaattctaaatgttattgcatctacaatgaggttgtctatgaaaaggaagatataccaaccgcattttaccttgtccctccatggcatatttaagttgtgccaagctattgatggcaattcaagaagtatcgaacttaagccatcaatggagcttggtactgatgtcgtccttatgaacggtcctctgccaattttttctgaaatggataagtcaagaactgtgatggttgtttcctgggtaacttccaatatcttctggttgtgtaaacaaaagtctgcagcggaaatgtcatgtgaagagccactaaacaatgagtgtctactatcaaagatattgcgttggttagtggcttctgtaatccttggcagaatctcccgcatctctcctgaaaagaggggaggtcttgccacgagcacaaatagtcccggaactcttc

SEQ ID NO: 437884 - DNA, 442 bp, Triticum aestivum
gttcgtccgacgacatggcggccggagcagctggaggagggagtgacgagctcaagctgctgggggtctgggtgagcccgttcgtgcaccgggtgcaggtcgcgctgcacctcaaggggctcaccggctacgagtacgccgaggaggacctcaccaacaagagcgacctcctcctcgcctccaaccccgtccacaccaaggtccccgtgctcctccacgccggcaagcccgtctgcgagtccatgctcatcgtgcagtacctcgacgaggccttccccggctccggccccgccctcctccccgccgacccccacgaccgcgccgtcgctcgcttctgggccgcctacgccgacgaccagttctttgcctcgtggatcaaggcgttcgtggggacgacggacgaggagagggcggcggcgacggaagccgcggtggcagcgct

SEQ ID NO: 437885 - DNA, 425 bp, Triticum aestivum
cagtggttggcctcccgacccctatcttctcccccactaatccccccattcccctcgccgccgccgccgccgccggcgtcgcctgcccaagatgaatgtcgacaagctgaagaagatggccggtgccgtgcgcaccgggggcaagggcagcgtgcgcaggaagaagaaggccgttcacaagaccacgaccaccgatgacaagaggctccaaagcaccttgaaaagagtaggagtcaacaccattcctggtattgaagaggtcaacattttcaaggatgatgtagtcatccaatttcagaacccgaaagtgcaagcatctattgctgcaaacacatgggttgtcagtggaacaccacagacgaaaaagctgcaagatttactgccgacaattatcaaccaactgggccctgataacttggacaacc

SEQ ID NO: 437886 - DNA, 348 bp, Triticum aestivum
catatacttgagagagcgcacgcgagatggcagcctccatgatcacctcgccgattgtggcgccgacgagcgtgccgtccctctcccgccggggctcctccttcgccgtcgtctgcagcggtggcaagaagatcaaggtcgataagcccctcggactcggaggcggcttgacagtcgacatcgacaccaacggcaggaaggtcggcatgaagggcgtgtaccagtttgttgacaagtacggtgccaacgtcgacggctacagcccaatctacacgccagaggaatggtctgagtctggtgaccgctacgccggcggaacgaccgggcttattatatgggccgtcaccc

SEQ ID NO: 437887 - DNA, 471 bp, Triticum aestivum
cggacgcgtgggccgatgaccagtcgtgtggtgacgctgtggtaccggccaccagagctgctgttgggtgctacggattatggagtaggtgtcgacttgtggagtgccggatgtatccttgccgagttgctggctgggaagcctattatgccgggacggaccgaggtagaacaattgcataaaatatttaagctatgcggatcccccgctgaagaatattggaaaaagtcaaagctgcctcatgcaaccatatttaagccccagcagccgtacaaaaggcgaatagcagagacattcaaagatttcccgcaatcagcacttcggctgattgaaacactcctatcaattgatcccgccgatcgtttaacagcaactgatgcattaaatagtgatttctttaaaacggaacctcgtgcttgcgatccatcaagtctgccacaatacccaccaagcaaagagatggatgcaaaa

SEQ ID NO: 437888 - DNA, 368 bp, Triticum aestivum
ctctcgcctccgattactgcaaagctgcgacggacgccgggaacctcgacgcatgctaccttcttggcatgatccgggtctactgcctggggagccgggggtcgggagcggcgctcatggcggcggcggcggtcggtggccaccgggaggcgctctactcgctggccgtcatccaattcaacggcagtggtggcagtaaggacgaccgcgacctccgagcgggcgctgcgctgtgcgcgcgcgcggtgtcgctcggacacgtagacgccctccgcgagctcggccactgccttcaggacggctacggcgtgcgccgctccttgctcgacgggcgccgtctcctcatccaggcgaacgcgcgggagctc

SEQ ID NO: 437889 - DNA, 467 bp, Triticum aestivum
tggttgaatgctgcttcttctcttgtcaggtggctgtccgagatggaaacaaagggttcctctggtggtttgaaggcacaagaacaggaaataaagttccataatccgaagtttgtttctctgctaaaccatttacggttctacatccctcaaatactccccaatctggagaaggtggtttttcttgatgatgatgttgtggtgcaaaaggacttgacacagcttttttccatagaattgcatggcaatgttataggagcagtggagacttgtttagagtcatttcatcggtatcacaaatatcttaatttctcgcaaccaataatcagctcaaagattgatccacatacttgtgggtgggcttttggaatgaacatatttgacctaattgcttggaggaaagcaaatgcaacatcgctctatcattattggcaggagcaaaatgctgatcaactgctttggagaac

SEQ ID NO: 437890 - DNA, 489 bp, Triticum aestivum
cccacgcgtccgcttttcgggatcacagactatcagatcgatattgctatgcgggagaatgccaaaattctatacgcgttagagctcaagtctattggaagaggtcttgacataggcacgctcattgaagtgaggagagtacaacttgcatataaactttttgatgaggttgctgctgacatgttcaaggagcatgccaagaagttggttcaagaaaacatttcatctgctttatccatattgaagtccaataccagtgcagggaacattcccacagaggtcattagtgaggtgaatagtatccttgcattcaataagttgctaacagttctaagcaagtttcctcaaggcgaccgatttgcacgtgggctaggacctatctcgttagctggagattttgatcatgataaaatggttggtgatctaaagatactctatgcggcctatacaacagaagtactttcagatggacgtcttgatgatgagaag

SEQ ID NO: 437891 - DNA, 426 bp, Triticum aestivum
ccctttcgtccggatgatccgagcggtgcaggtcgtcaccagggttgagagccgccgggctgcgcgggcgtcggtggccggctacgccagccgctgcggctactccacggcctcgagctcccagaggttggctggaaaggtggccgtgattaccggcggggccagcggcatcggcaaggcgacggcggaggagttcgtcaggaacggcgccaaggtcgtcctcgccgacgtccaggacgacctgggccgcgccgtggcggccgagctcgggccggacgcggcatgctacacgcactgcgacgtgaccgaggaggcgcaggtcgccgcggcggtggacctcgccgtggcccgccacggcaagctggacatcatgctcaacaacgccggcatcgtgggctccctggcgcgtccccggctgagcgatct

SEQ ID NO: 437892 - DNA, 473 bp, Triticum aestivum
ctttgcatgtggatatggtgagttcaagtgtgcggaaatcctccttgaggcgggtgctgctgtagatgccatggataagaacaagaacaccccactgcattacgctgctggctatggccggaaagagtgtgtggatcttctgttgaagcacggtgctgctgtcactctccaaaacatggatgggaagacgcccatcgacgtcgccaagctcaacaaccaggacgaggtcctcaagctgctcgagaaggacgtgttcctgtaaatcacttcacttggcccccatgaagagacatcatgttttacatcccttggcattggttttatatagtcatacacgaatcggcattttattcgttgtgtaagaatctactgttagctagcctgcaggccgactggctgaggttagaactgcatgttactgtatatggagacctgtgtatcgtccactttgtttctggtgattccactagagt

SEQ ID NO: 437893 - DNA, 135 bp, Triticum aestivum
gcatcttaccccattgacactgtccgcagaaggatgatgatgacctacggagaggccgttaagtacaagagctacttggatgctttccagcagatcctgaagaaggagggtgccaagtccctcttcaagggggct

SEQ ID NO: 437894 - DNA, 412 bp, Triticum aestivum
cccacgcgtccgcccaaatcccccacccgaaccctcggaatccctctctcgccgccgctgacccctccgccgatctccccgccgccgacgagatgtctcgccgctacgacagccgcaccacgatcttctcgccggagggccggctgtaccaggtggagtacgcgatggaggcgatcgggatcatgtccgacgccaacatcctcatcaacaccgcccgcctccacgcccagcgctacgcgctctcctaccaggagcccatccccgtcgagcagctcgtccagtccctctgcgacaccaagcagggctacacccagttcgggggcctccgccccttcggcgtctccttcctcttcgcggggtgggacaagaaccacggcttccagctctacatgagcgacccctcgggcaacta

SEQ ID NO: 437895 - DNA, 470 bp, Triticum aestivum
ccctttcgtccggtacaatcacagatgacatgcggatccaagaggtcccagcaatgaaggttaccgctctgaggttcacagagacagcgagggcaaggattgtcaatgctggtggggagtgcctcacttttgaccagcttgcactccgtgctccaactggggagaacactatcctgttgaggggacccaagaatgcccgtgaggcggtgaggcacttcggcaaagcacctggtgtgccgcacagccataccaagccctatgtgcgctccaagggtaggaagtttgagaaggctcgtggtaggaggaacagccgtggcttcaaggtttaagtcgccctttcttgttagtcgctgtttgcgtggagcggctgttgttctgtttgagcaattgacagtaattagtaaagtactttgtactgagagtagcaaaatctatcgccccagtgtttgaatgatattttgcaggattct

SEQ ID NO: 437896 - DNA, 485 bp, Triticum aestivum
cgttctcgtgggctgagattgcaaggttgagggagctcaacacactcaagggccacgttgaatccgtggtgaagctcaagggccttgacatcgacaccatcaaccagaactacaccgtgtgaggagtatcgacattggaccaacaaacatgacatccgtattggagcgagattggaatggagctccgctttaagatttttccggtgaatgaatgaaacaaacatggctgatctgaccagcccctagttgtaaagtgctaccaaatatatggtttcggttgtccgtcttctagagaggttttaatgttctagtggagttataccgtgtttggagcacggcgtggttgtaattgttttcgcgttttacccagtttcccctaactagtcggtgatcttgcggaagcaagacgagaaataatcactgcaaattttctgccccatgcttgctatcccttcccttgggtttatacaaagacaattctcgtc

SEQ ID NO: 437897 - DNA, 442 bp, Triticum aestivum
ccctttcgtccggcctcctcctagcaagctatatacctacatagcacagccatggcccccaccgtgatggcctcgtcggccacctccgtcgctcctttccaggggctcaagtccaccgccggcctccccgtcagccgccgctccaacgggcgctagcctcggcagcgtcagcaacggtggaaggatcaggtgcatgcaggtgtggcccatcgagggcatcaagaagttcgagaccctgtcctacctgccaccgctcagcacggaggccctcctcaagcaggtcgactacctgatccgctccaaatgggtgccttgcctcgagttcagcaaggttgggttcatcttccgtgagcacaacgcatcccctgggtactacgatggccggtactggacaatgtggaagctgcctatgttcgggtgcaccgacgccacacaggtgatc

SEQ ID NO: 437898 - DNA, 439 bp, Triticum aestivum
gctcattcctgccagtgaattgtcccagcatatcagtaccgctggaatggaagctagtggaaccagcaacatgaagtttgcaatgaatggttgtattcttattggaactttggatggtgcgaatgtggagatcagagaagaggttggagaggagaactttttcctctttggtgcacatgcacctgaaatcgctggtttgaggcaagagagggctgaaggaaagtttgtgcctgacccgagatttgaagaggttaaggaatacgtccgcagtggcgtctttgggactagcaactatgatgaattgatgggttctttggaaggaaatgaaggttatggacgtgcagattattttcttgttggcaaggattttcccagttacattgaatgccagcaaaaagttgatgaagcataccgagatcagaagctatggacaagaatg

SEQ ID NO: 437899 - DNA, 411 bp, Triticum aestivum
cccacgcgtccggcctaaccacataaaatttcggccgatccaccacaccctgcaatggcgtccgcgctcaccaacgtgagcctgtctaccttcgcgcccacggccaggggcgacgtcctggcgaggccgcaggtggcccccgcccgcgtcaccttcccgacggcgtaccgcggcagcggcgccctctcctgcagggcgggcgggccggccacgccgccgggcatctccgacaagatgtcggacagcatcaaggaggcccaggagacgtgctcggaggacgccgccagcggggagtgcgccgcggcgtgggacgaggtggaggagctcatcgccgcggccagccacgcccgggacaagctcaaggactcggacccgctcgagaactactgcaaggagaaccccgagaccgac

SEQ ID NO: 437900 - DNA, 398 bp, Triticum aestivum
ctgagaggcacccagcagcaacagccggctaggccaccgtactacggactccggagcagcagacatggcatccacgatcatggccgccgcctcccgcgccgttgtcgccaagacgccgttcctcagcggccagggccgcgccgccagcgccagccccctgcgcgacatcgccgccgcggccaacggcagaatcaccatgggcaacgacttgtggtacggcccggaccgcgtcaagtacctgggccccttctccgcgcagacgccgtcctacctgaacggcgagttccccggcgactacggctgggacaccgccgggctttctgccgacccggaggcgttcgctaggaacagggcgctggaggtgatccacgggcggtgggcgatgctcggcgctcttg

SEQ ID NO: 437901 - DNA, 412 bp, Triticum aestivum
cgcaaactagcaagcatgaaagcaggctacacacaaaaaactgcttcacctttcgctgacatgctggcttttcgcaaggtcaaggcaaggctcggtggccgtcttcgcctactaatctccggtggtgcacccttaagtactgaaattgaagagttcatgagagtgaccagctgtgcatactttatccaaggctatggtttaacagaaacattgggacctagcacagtcggttaccctgatgatatgtccctggttggaactgccggtgttgccgccaccttcactgaactgcgactggaagaagtacctgagatgggttatgatccacttggtgttccttctcgtggtgaaattctcattagagggtctactgtcttcactgggtactacaaaaatcctgagctcacaaatg

SEQ ID NO: 437902 - DNA, 441 bp, Triticum aestivum
gatgacttcatgtggttcaagggagacactctcctccggggctactggaaatagttcacctatcagtactgggctgaaggcaggaaatgcgtctgatggttctggttcatcaatctgcattggattctcatcccagggtcatgaggcttctgaccttggattggaagctgggcactgcaaggtatttatggaatcggaggatgttggtcgcaccatcgacttgtctgtctttgggtcatacgacgagttgtatggccgtctggctgacatgtttgggatcgagaaggaagaaatcataagccatcttcgttaccgtgacacagctggtgccgtcatgcacactgggggattaccattcagcgacttcatgaaagtggcacggaggctgacgataataagtggcgaaaagggagggctggcgaaacctctcatcgaatgcat

SEQ ID NO: 437903 - DNA, 415 bp, Triticum aestivum
gctcgttccatggaagctagtcaggctaaatacatctccatacttaacatcattcaaggagaggtggacccaacacaggtccatgagagcctacaaaggatacgtgaaaggaagcttgttaacttcgtagagtggggacctgcaagcattcaggttgcattgtcaagaaaatcaccatatgttcaaaccacccacagggttagtggtttgatgttagcaaatcatactagcatccgtcacttattcagcaaatgtctggggcagtatgaaaagctgaggaaaaagcaagcctttcttgacaactacaggaagttcccgatgtttgcggacaatgatctctctgaatttgatgaatctcgagaaattatagagggtctggttgatgaatacaaggcttgcgaatcacctgactaca

SEQ ID NO: 437904 - DNA, 464 bp, Triticum aestivum
cccacgcttcctaaactgctctttcttctcgagacgtaagaccggtaatcaagagggtgaggcaggaagtactgcagggctgcaaactggttttcagtcgagtgttcccgtccgattgccggccgcagcatcagataatgtggaagatggccgagcagctgggcgccgcttgctgctcggaggtggatcccagcgttacgcatgtggtcgccgtgcatgccggaacggagaaggcccgctgggctgtcaaacacaagaagtttttgctccacccccgctggatcgaggcctgcaattatcgttggcaccgccagcgggaggaagatttccctgtacctggcctcaaggagggcaagggcaaggaaaaagttgcagagaatgcccacctgtaactgagtataactgactcatctagtgttcgtgtactaccatgattgaagatgaatagattgaaagttttttgt

SEQ ID NO: 437905 - DNA, 335 bp, Triticum aestivum
ttcatgtttggcatatgccagctctgaccgaaatctttggggacgattctgtattacaatttggtggaggaactttaggacatccttggggaaatgcacctggtgcagcagctaatcgagtggctttagaagcctgtgtacaagctcgtaacgaagggcgcgatcttgctcgcgaaggtaatgaaattatccgagcagcttgcaaatggagtcctgaactagccgcagcttgtgaagtatggaaggcgatcaaattcgagttcgagccggtagatactattgataagtagataaaactaaagataaagaagagaaggtataaataaaaaagaaac

SEQ ID NO: 437906 - DNA, 442 bp, Triticum aestivum
actaccttcaccccttctaaccatttgagctcctcaatggctgcaatccacgagcctgtgctacaaattcaagcatccgcatcgttaactcaactgcagcatacacacgctgattgtattcctgagctgtccgtaagcactgctgggactactgagaatgaaaaaagcattcagcaagctcctcacagttcgaaagacgtccaaagcaagtcccatggtgcttccacaaggagttgcacaaaggttcacaagcaaggtgttgcacttggtagatcagtggatctgtcaaagtttggtgactatgacgaactcacagctgagctagacaggatgtttgagtttgatggtgaactgatgtcttcaaacaaagattggcagattgtgtatactgatcctgagggtgacatgatgctggtgggagatgatccatgggaggagttct

SEQ ID NO: 437907 - DNA, 417 bp, Triticum aestivum
acactgttagagcctggcacctgagtatgagaaggcggcccaactgttgagcaagcacgacccagcgattgtccttgctaaggttgatgccaacgatgagaagaacaagccgcttgcgggcaagtacgaggtccagggcttccctaccctcaagatcttcaggaacgggggaaagaacatccaggaatacaagggccccagggaggctgagggaattgtcgagtacttgaagaagcaggttggccctgcttccaaggagatcaaggcacctgaagatgccacttaccttgaagacggcaagatccacattgttggtgttttcactgaattcagcggcactgagtttacaaacttccttgaggttgctgagaagctgaggtctgattatgactctggccacaccgtgcatgccaacca

SEQ ID NO: 437908 - DNA, 373 bp, Triticum aestivum
atctccttaaccaggacacgcccacggtatacgcacgtacagctcgatcgcaatggcgtcgctcgtcgccgtccagccggtcgccgtgcggggcctggccggcagctccatctccggccgcaagctcgccgtccggcccgcctccgccgtcgtctcccgctccacccgcagggctcgcggggcggcggtggtggccaagtacggggagaagagcgtctacttcgacctggacgacatcgccaacacgacggggcagtgggacctgtacggcagcgacgcggcgtcgccctacaacggcctgcagagcaagttcttcaacaccttcgccgcgcccttcaccaagcgagggctgctgctcaaggtcctgctgctc

SEQ ID NO: 437909 - DNA, 199 bp, Triticum aestivum
gaccgccggcctgccggtcagacgtcgctccggcagggccggcctcagcaacgtcagctacggcggaaggatcagatgcatgcatgtgcggccgattgcgggcatcaagatgttcgagaccctgtcttacttgccacccctctccagtgaggccctcctaaagcaggtcgactacctgatccgatccaagtgggtgccc

SEQ ID NO: 437910 - DNA, 314 bp, Triticum aestivum
cgcgcggcgggcccagccgcgccatcaacgtggtgctcacggccgacgacgtggccgtcgacggcttctgcatgagccgctgcggctcccacggcgcctccccgcggtcccgcgccgggcggttcgcgtacgtgtgggtgggcaacccggcgacgcagtgcgccgggcagtgtgcgtggccgttccaccagccgcagtacggcccgcagatggcacccctcgcgccgcccaacggcgacgtcggcgtcgacggcatggtggtgtccctcgcgtccatggtcgtcggcaccgtcaccaaccccttcggcaacggc

SEQ ID NO: 437911 - DNA, 417 bp, Triticum aestivum
gttccgtgagtgcgagctcatccacggccgctgggccatgctcgccaccctcggcgccctcaccgtcgagtggctcaccggcgtcacctggcaggacgccggcaaggtggagctggtggacgggtcgtcgtacctggggcagccgctgccgttcacgctcaccacgttgatctggatcgaggtgctggtgatcgggtacatcgagttccagcgcaacgcggagctggacccggagaggaggctctaccccggtggctcctacttcgacccgctgggactcgcggcggacccggtgaagaaggagactctgcagctggcggagatcaagcacgcccgcctcgccatggtcgccttcctcggcttcgccgtgcaggccgccgccaccggcaaggggccactcaacaactgggccaccca

SEQ ID NO: 437912 - DNA, 353 bp, Triticum aestivum
ccctctcttccgcaaaacaatccaatccaatcccccaagagagagaagaggaggaagatgtcgggccgcggcaagggaggcaaggggctcggcaagggcggcgcgaagcgccaccggaaggtgctccgcgacaacatccagggcatcaccaagccggcgatccggcggctggcgcgcaagggcggcgtgaagcgcatctaggggctcatctacgaggagacccgcggcgtgctcaagatcttcctcgagaacgtcatccgcgacgccgtgacctacaccgagcacgcccgccgcaagaccgtcaccgtcatggacgtcgtctacgcgctcaagcgcctgtgccgcaccctcta

SEQ ID NO: 437913 - DNA, 422 bp, Triticum aestivum
ttcgccgtcctcacccaggaggagttcctggctaggtacgcgtcgtcctacgacgctgccggtgatgatacaggcattacgttgcctgtgggcggcggcgacgccgagctgtggtcgtccggcggcgacgatggtagctccttggaggctccgcctcccagctgggactggagatccaagggcgccgtcacaccggtcaagtcccaaggcgcaggatgcgctagctgctgggcgttcgtgacggttgcgacgatcgagactctgaactggatcaggacggggcagttggtgcccctctcggagcagcagctggtggactgtgaccagtacgacggcgggtgtaaccgcgggtcctatcacagggcttacaattggattgtggagaatggcggcctcaccacggcagcggattacccgtacac

SEQ ID NO: 437914 - DNA, 385 bp, Triticum aestivum
ccctcgcttccgcccacgcgtccgcccacgcgtccggtcctactgtcacatacacacacacaagtgctagctagctaatcgatcagccagccatggcggaggagaagcaccaccaccacctgttccaccacaagaaggagggcgaggacttccagcccgccgctgacggcggcgtcgacatgtacgggtactcgaccgagacggtggtgaccgccaccggcaacgagggcgagtacgagcggatcaccaaggaggagaagcaccacaagcacaaggagcacctcggcgagatgggcgccgccgccgccggagccttcgccctctacgagaagcacgaggcgaagaaggacccggagcacgcgcacaagcacaagatcgaggagga

SEQ ID NO: 437915 - DNA, 423 bp, Triticum aestivum
cttcgctgcacacaaccctctccacccccagcaatccatccatccaccccacccccacccccctttgccctcccctacccggcggattccctccccgagctcggcaatggcaaacgcttcatcaggagctgggatccatgatgactgcaagctgaggttcgtggagctcaagtccaagaggatgcaccgcttcataacctacaggctggagaaccagaaggaggtcattgtggaccaaactggggagcgtgaggcaacctatgaggacttcaccaagaccctccctgagaacgactgccgattcgcagtgtttgacttcgacttcaccaccccggaggatgtgccaaagagcaggatcttctatatcttctggtcccccgacacggcaaaggtgaggagcaagatgacgtacgcgagcaccaa

SEQ ID NO: 437916 - DNA, 390 bp, Triticum aestivum
cccacgcttccgctcgtccactgcgccagtctccgggagcgcaacctgctcgccgacgtgtccacgctcgtggagcgccaccgcgcggcgggggcgcgcaagcgcgacctcctccgcctcctcgcggcgtccctccgcgccatgggccacgacgccgcgctctgcctctcccgctgggacaagtcgtcgtcccaccccgccggcgagcacgcctacgtggacgtcctcctccccgccggctcggagcgcggcgaccgcgagcgcgtgctggtggacgtcgacttcaggtcccagttcgaggtggcacggcccaccaaggcctaccgcgccgtgctgcagcggctcccgtcggcgttcgtcggcaaggaggaccggctgcgcctgctggtg

SEQ ID NO: 437917 - DNA, 470 bp, Triticum aestivum
  unsure (1)..(470): unsure at all n locations
gtcatggcggagcggctcgcgtcctcggcctccctcctccccagcgcggcctcgccttcctcgtcgacccgccgcgccgccgtcgcctccgggctccgcctccgcccgtcgccctcgcgcttctcacaggctgcgaggagagtgcgcggtggcgctggcgccgccggggtggtgccacggctgcgggtggtgcgatgcatggcggcgtcggaggccgcgcagctcaagagcgcgcgggaggacatcaaggagatcctcaaaaccacctactgccaccctatcctggtccgtttgggatggcatgattcaggtacatatgacaaaaatatcgacgagtggccgcagagaggcggagccgacggaagcttaagatttgatcctgagttgagtcatggagccaatgctggtcttactaatgctntaaagcttattcaaccaatcaaggacaaatacccaggtatcacttatgc

SEQ ID NO: 437918 - DNA, 416 bp, Triticum aestivum
tcctcgcttccgcgccgccgtctcctcctactcttcgccgctcccgctcccgccgtcgcgccaccgccgtcagccatggcacccaagaaggagaaggccccggcggcgtcgtccaagccggccaagtccggcggcggcaagcagaagaagaagaagtggagcaagggcaagcaaaaggagaaggtgaacaacgcggtgctgttcgaccaggccacctacgacaagctgctcaccgaggtgcccaagtacaagcagatcacgccctccgtcctctccgagcgcctcaggatcaatgggtctctggctcgcagggctatcaaggacctgatggagaggggactcatcaggatggtgtcaatccactcaagccagcagatcttcaccagggcgacaaacacctgatttatcattatcat

SEQ ID NO: 437919 - DNA, 348 bp, Triticum aestivum
caataccatggcccccgccgtgatggcttcgtcggctaccaccgtcgcacccttccaggggctcaagtccacggccggtctgcccgtcagccgccgctccagcggcagcctcggcagcgtcagcaatggcggaaggatcaggtgcatgcaggtgtggccgattgagggcatcaagaagttcgagaccctgtcttacttgccacccctctccacggaggccctcctgaagcaggtcgactacctgatccgctccaagtgggtgccctgcctcgagttcagcaaggttggcttcgtctttcgtgagcacaacagctcccccgggtactacgacggccgatactggacaat

SEQ ID NO: 437920 - DNA, 337 bp, Triticum aestivum
ggggggtggcctccagctccgatgagcccggcggcctgaccctgcacatcgaggactacccgtacgccgtcgacgggctcgaggtgtggcacgccatcgacgggtgggtgcgcagctactgcgcccacttctaccacagcgacaaggaggtggacggcgacgcggagctgcaggcgtggtggcacgacgtgcgcaccgtcggccacggcgaccggcagggcgaccaggcgtgctggctggcgctggacaccgtcgaccacctcgcccagacgctgtcgacgctcgtctggatcgcctccgcgctgcacgcggccgtcaacttcgggcagtacgccta

SEQ ID NO: 437921 - DNA, 419 bp, Triticum aestivum
gcccaccaagttcgtcgccaagatgaagctcattcagggctaccctggcaacgccggcttcaagttcggtgtcgggctcgagagccacttcaccacgcccaacctcccctacgtcaggggcgccctcgacacgctcgcgcagctcaagctgcccatgtggatgaccgaggtcgacgtcgtcaagggccccaaccaggtcaagttcctcgagcaggtgctaagggaagcctacggccacccgggcgtgcagggcatcgtcatgtgggccgcgtggcacccctacggatgctacgtcatgtgcctcaccgacaacagcttcaagaacctacccgtcggcgacctcgtcgacaagctcatcgccgagtggaagacgcacaagacgtccgccgccaccgacgcgaatggaatgctcgagctcg

SEQ ID NO: 437922 - DNA, 418 bp, Triticum aestivum
ggcgtggtcggtgggctgtggctgctgcagctgctgctcctgggctgcctgtggaggcggctcaagtcgaacgggcggcgaggggacgcggtcgcgagcggcgacggcggcaggtctggcaagagcgcgtccggctccggcggcgtgggaggggagagattcctagtgagtgacatatccgagtggctggacaagtacagggtgttcaaggtggaggagctgcagcgcggcaccgacggtttcgacgacgcgcacctcatccagggcagcgtgtacaaggccaacatcggcggcgaggtcttcgctgtgaagaagatgaagtgggatgcctgcgaggagctcaagatcctgcagaaggtgaaccacagcaacctggtgaagctggaggggttctgcatcaacacggcgacgggcgact

SEQ ID NO: 437923 - DNA, 343 bp, Triticum aestivum
cggacgcgtgggcgcacaacgtggtgttcgacgaggacgcggtgccctccggcgtggacgtctccaagatctcccaggaggagtacctcaacgcccccggcgagaccttctccgtcaccctcaccgtccccggcacctacggcttctactgcgagccccacgccggggccggcatggtcggcaaggtcaccgtcaactaataagctgtcttgttgcgaattgttgcgggtgggttgatcgatcgggcgtgtcatgcatgcatgcatattgattaattgtacgaacgtacgctatatgtatatgttttctactattataagatgagatgaggctcttgctgata

SEQ ID NO: 437924 - DNA, 366 bp, Triticum aestivum
cccatcttgtccgttgacgcgtgggcggacgcgtgggagaagaggcacgcatgcgtgagaaagaagcgagagacatggcggaggaggggaaggtgatcgcgatccacaggcaggtgcagtggagcaccaagatcgaggaggctggcagcagcacgtatctggtggtgatcgacttcactgcaacatggtgcggaccatgccgcttcatttctccaatcttagatgagattgccaagaagcttccaagtgttactttcctgaaggtggatgttgatgaaatgaagtcaattgccgaggagttcagtgttgaggccatgccgacgcttgtgctcatgaaagaaggaaaggtggtggacaaggttgtgg

SEQ ID NO: 437925 - DNA, 217 bp, Triticum aestivum
gtctttgaaccgctggactgtgaaccgtccctatggtggagtgctctctggaactgcagtgagggaaaggatcatccgcgccttcttggtggaggagcataagatcgtgaagaaggtgttgaaaatacagaagaccacggacaagacgacctgaatgtaatctgatcgaaacagaagtgcgaagtgagatggtgttctgtaaacaaggaaaatattt

SEQ ID NO: 437926 - DNA, 359 bp, Triticum aestivum
tgatcttccattgcctgggtcaggctatgaaaaggcacagaacgctcggcggttcatgatctatgttcactccaagatgatgatagttgacgacgagtacatcatcgtcggatcagccaacatcaaccagcggtcgatggacggggggagggactcggagattgccatgggcgcattccaaccacaccacctgaacaccaaagggcaggttgccagagggcaggtccatggcttccggatgtcgctgtggtatgagcacctcggcatgctgcacaacgacttcctcaacccgggaagccgggagtgcgtccagagggtgaacacgatggctgacaagtactgggacctctatgccagcg

SEQ ID NO: 437927 - DNA, 344 bp, Triticum aestivum
cagattgtgacacgggacaacccgtccccaagggcctacttccgatgcgccttcgcaccgtcctgccgtgtcaagaagaaggtccagagaagcgcggaggacagctcggtggtggaggcgacgtacgagggcgagcacaaccacccgcaccccacgcgggccggcgagctgccgagctgcgccacgcagggcggcggctcggtgccgtgctccatctccatcaactcctccggtccgaccatcacgctggacctcaccaagaacgggggaggcgtgcaggtcgtcgatgccggggaggcgcaaccggacatgaagaaggtgtgtcgggaggtcgcgtcgccaga

SEQ ID NO: 437928 - DNA, 384 bp, Triticum aestivum
gcggttaagaggaaggagagcagagatgactgcgtccgtctcctacgggctgcgagcacttccgacgtggtccagctctgtgtccggtgacgaccactgctcggcgctggccatgtcggtgtcggcgcgggggccccggtggacgcggccccttcggacgccggcgaggatgggcaatgtaaacgagggcaagggcatcttcgcgcccctggtggtggtggtgcgcaacatcgtcggacgcaagcgcttcaaccagctcaggggcaaggccatcgcgctgcactcccaggtgattaccgagttctgtaagaccatcggcgctgaccccaagcagaggcagggcttgatccgcctcgccaagaagaacggagagaagctcggatt

SEQ ID NO: 437929 - DNA, 335 bp, Triticum aestivum
ctcgtgtctcgtcgagctatctgtctacggagtagtacctcccaagctagctcgccgctccgccgcgatggccaccgtactgagcagcctccgcttgcccttctccatctgccccgccgcccctgcggcgcccatggcggcatcccgcgtcgcgctcccgctgtcgtcgacggccgccaggggcatgaggctccgcgcgcaggcgacgtacaaggtgaagctgatcacgccggagggcgaggtggacctcgaggtccccgacgacgtctacatcctcgaccacgccgaggaggaagggatcgacctgccctactcctgccgcgccggctcctgct

SEQ ID NO: 437930 - DNA, 417 bp, Triticum aestivum
aagatgttcgggaccgaggccatctacggatccgccttcaacatccgcagggatctcgacgcccagatcctctccaggttccaaaggcccccaggtgcattgccatcatctatgctaggatatgaggcgatgacaggttccttggatgattttggatttgaagattaccttaacttgccccaagactctgacagcctccgcataccggacatgcaccacggaatggaggttcgccttggcctgtcgaaggggcccatctgccccagtttcaattgattccacccatgtattagtcttgtgatacgtcgtgctccccgtccagcatctataaccagtcactagactgtatcatggatttgtgaaacgcgagaactaaattggcattgcatcagtttgaaattccttaacttcgattgg

SEQ ID NO: 437931 - DNA, 393 bp, Triticum aestivum
tcgcccactcgtgcgcccacgcgtccgcggcccatctgagcttgctgtcaaggaagctgcctggggtcttgcccgttacgcggccatctcacaggacaatgggctggtgccgattgtggagcctgagatcatgctcgacggtgagcacggcatcgagaggaccttcgaggtcgcacagaaggtgtgggcggagaccttctactatatggcccagaacaacgtcatgtttgagggcatcctcttgaagccaagcatggtgacccctggtgccgagtgcaaggacagggccacccctgaggaagtagccagctacaccctcaagcttctacagagaaggatccccccttccgtccccggcatcatgttcttgtctggtggtcagtcggaggtgga

SEQ ID NO: 437932 - DNA, 366 bp, Triticum aestivum
gagatctcacgcaaggagcacgaggaggaggcaagggaagccgccgccgccgccgccccgtccctcctcgccggccggccgccacaggtttcaagatgtcaacctgcacgtttgcagcttcctgtgccctcttgggcaatgctcgaacaaccgatgccccccagaaagcggtcaagagccgcctgagcttcctcggccgaggcgcgccgcagctgcggagcctgaggtcctccttcccctccaagaagctggtgacatctgcatacaaggggacgagcacgtacaaggtgaagctggtgaccccggaaggggacgagcacgagtttgaggcgccggacgacgcctacatcctggactcggcggaga

SEQ ID NO: 437933 - DNA, 415 bp, Triticum aestivum
gttctctcagcccatggaggccatcaagaagggcctctcccgggcgctcgcccactactacaccatcgccggccgcctcaccgccaccgccgacgaagaaggtgtgctcctccacgtcgcgtgcaccggcgagggtgtgccgttcgtggccgcgtcggcgggatgtgccttgcaggatcacgggctcctggatgcgcccttcacgacgagcctcctggatgatctcgtcgtgtactacccggcacctgagggctgccggagcacggacccgatgctgctgatgcaggtcaccgagttcgcctgcggcgggttcaccctgggcgtgacgtggaaccacacgctagccgacgccacgggcatcgcgcagttcctgcaggcagtgggcgagctcacccgcgctgaagttgatgcgtcg

SEQ ID NO: 437934 - DNA, 432 bp, Triticum aestivum
cccacgcgtccggaaaaaagagaacagcaacgggaataatctcgcctcctttcctcctccccctccccgtccgcgtgcgatcgacgcggaggcgccgcccgtccccctccgctccgccccgacccgaccccatggccttcatgcgcacctcctccaatgcatcctctggcatgggagttgctcctgatatcagggagacattcctggagcttcagatgaagaaggcatttcgctatgtcatcttcaaaatagaagaaaagcaaaagcaggttgttgtggagaagacgggggctacaactgagagttatgatgatttcctggcttgtctcccagaaaacgactgcagatatgccctttatgattttgactctgttactggggagaatgtgcagaaaagcaagattttcttcattgcctggtcccctgacacat

SEQ ID NO: 437935 - DNA, 363 bp, Triticum aestivum
ggaagaatgtcgcatcacttccgtgaaatgaaagttggtgattatatgtctgtaaagggacctaagggtcgtttcaagtaccaagtaggacaagtgagagctttcggaatgctggctggtggatctggcatcactccgatgttccaagttgcaagggcaattctcgagaaccctaatgacaaaacgaaggttcatctagtctatgcaaatgtcacacctgaagacattcttctgaaggaagagctggacagcctggccgaagaatatcctgaccgcttcaagatcttctacgtgttgaatcagcctcctgaagtctggaatggtggtgttggctttgtgtcccaggacatgattaagactcac

SEQ ID NO: 437936 - DNA, 428 bp, Triticum aestivum
cccacgcgtccggctccggccgccagcgacaatgccgctctgcagcttctacgcctccacgtccctcccggtgccgaaaccccactccttgccctcctccgccgcggcggtcaccaccgtgcaggcaaagaagtcgccgccggccgtggctgcggctgcggcggcgaccgtcctgccgacgacggccgagagcacagcgtcgatgatgccggcggaggcgctgtcgctgcacctgccggagctgccgtcggcgatgcgggacaagatcctgagcctggagctgatgggggtggactacgggcgcgcgctgtcgctgaacccggcgctccgggacgcggcgccggagtccatccacgcggtggtgaccttcctccagtcgcgcgggctccacttcaaggacctgggccgcgtcttcggcatgtgcccgt

SEQ ID NO: 437937 - DNA, 384 bp, Triticum aestivum
tttctcctcctagcaagctatatacctacatagcacagccatggcccccaccgtgatggcctcgtcggccacctccgtcgctcctttccaggggctcaagtccaccgccggcctccccgtcagccgccgctccaacggcgctagcctcggcagcgtcagcaacggtggaaggatcaggtgcatgcaggtgtggcccatcgagggcatcaagaagttcgagaccctgtcctacctgccaccgctcagcacggaggccctcctcaagcaggtcgactacctgatccgctccaaatgggtgccttgcctcgagttcagcaaggttgggttcatcttccgtgagcacaacgcatcccctgggtactacgatggccggtactggacaat

SEQ ID NO: 437938 - DNA, 345 bp, Triticum aestivum
ccagttcccgctggacgcgctgaagctgggggtgtgcgcgaacgtgctggggctgctgaacattaccctggggagcccgccggtgcagccgtgctgctcgctgatccaggggctggcggacctggaggcggcgccgtgcctgtgcacgacgctgaacctcaacctcctgggcatcaacctgaccttgcccatcgccctcagcctcgtcctcaacaactgcggcaagaacgtcccctccggcttccagtgccccaactgagcccggccggaccttgcatgctgcatccgccatacctcatgcatgcatgcatgcatgattggctatttgaagtaccaccacgtact

SEQ ID NO: 437939 - DNA, 301 bp, Triticum aestivum
atctgtccactcgtgcgcccacgcgtccggctcctcctagcaagctatatacctacatagtacagccatggcccgcaccgtgatggcctaggaggccacctccgtcgctcctttccaggggctcaagtccaccgacggcctgcccgtcagccgccggttcaacggcgctagcctcggcagcgtcagcaacggtggaaggatcaggtgcatgcaggtgtggcccatcgagggcatcaagaagttcgagaccctgtcctacttgccaccgctcagcacggaggccctccttaagcaggtcgac

SEQ ID NO: 437940 - DNA, 324 bp, Triticum aestivum
ctctctctcccgcagcacatgcgcgtcgcccgccgacacccacacccacagcagcggcagcggcaatggagcatcggggcctgcttctcgtcctcgtcgcggcggcgtgcctctcgggcggcgcccacgccaggcacgccaagaagtcgtacggggccgtcttcagcttcggggattcgctctccgacgccggcaacctcatcgtcgacggcatccccaagtcgctcaccaccgcgcggtcgccctacggcatgaccttcttcggccgccccaccggccgctgctccaacggccgcgtcgtcgtcgacttcctcgccgagcact

SEQ ID NO: 437941 - DNA, 400 bp, Triticum aestivum
agcgatggttcatgcgcttgaagcaaaaccttctgaaatgccttgcgagaaagaagagctgcttaatgccgctgtccgccgcgtggatgcactggaagccgaactcattgtaacaaagaaggccctgcacgaggctcttatcaggcaagaggaactacttgcttatgtggacaggaagacaattgccaaggcccagaaaaagaagaagaagccgatgtcttgctactaggacacaaggagagagagagagagagccccctttggttccagttttcttttctctgagatgccggagatggcgtttgagatgatgtaaacggttgatccgttcgttttcctgacaaatgtgaaaaggacagacatatgggtttgtaaatggacagaaaatcctgacataaat

SEQ ID NO: 437942 - DNA, 358 bp, Triticum aestivum
tcgcggttccggaggagacccgaggaagaaggagaagcggcgcggcgaggcgcggcgaggagaaagatggggaagatgccggtgcggatgaaggcggtggtgtacgcgctgtcgccgttccagcagcaggtgatgccgggcctgtggaaggacatcaccaccaagatccaccacaaggtgtccgagaactggatctccgccacgctcctcatcacccccgtcgtcggcacctaccagtacgcgatgtactacaaggagcaggagaagctgtcccacagatactagatgtgaagctttgtcaaatgtcaaagcagttggaatttccatgttctataatccgccaagagtgatttaacat

SEQ ID NO: 437943 - DNA, 293 bp, Triticum aestivum
tcccactcgtccgacccactcggcggcggcggagcacgcgaagatggtgaagttcctgaagcccggcaaggcggtgatccttctccagggtcggttcgccggccggaaggcggtcattgtgcgcgttttcgaggagggcacacgcgaccgcccctacggtcactgcctagtcgccggcctagccaagtaccccaagaaggtgatccgcaaggactcgtccaagaagacggccaagaagtcgcgcgtgaagtgcttcctgaagctggtcaacttcacccacatgatgcccaccc

SEQ ID NO: 437944 - DNA, 413 bp, Triticum aestivum
tctcagagcaaacacaaagttggcagtaagatctgagtctggacaatccgcaatcagtttcatatatctgatggagatgatgaacaagtttgggatacacaaattaacaggtgatcaggatacatgttacagttggtacggttaattacacataaacagcgcaaacggcataatcaccacacgacacgaaggagaacgaacgacatggtgagcaacatggagaaggaacacggccaacagaaagtacacctggaactctaagtctccttttcctttggttcagggagagacttcctgaaccaggggatcagaacagaggtcctcttctggtacagcctgtaggcctctgcccggtgctcctgcttcagcatgcgccgctcgacgagcacggtgacgtagccgaggcacatgct

SEQ ID NO: 437945 - DNA, 480 bp, Triticum aestivum
cccacgcgtcctcccacgcgtccgcccacgcgtccgagagaagcaaactggaagcatctacgagcactgggatattcttcctcccaaggaaatcaaggacccagaagctaagaagccagaggactgggatgacaaggagtacattcccgatcctgaggacgtcaagccagagggctacgatgacattcccaaggaagtcaccgatcctgatgctaagaagcctgaggattgggatgatgaggaagatggtgaatggactgccccaaccatccccaacccagagtacaagggcccatggaagcaaaagaaaatcaagaaccctaactaccagggcaaatggaaggcacctatgattgccaacccagacttcaaggatgatccttacatctatgctttcgacagcctgaagtacatcggaattgagctgtggcaggttaagtcaggaactttgtttgacaacattctcatcactgacgatgc

SEQ ID NO: 437946 - DNA, 454 bp, Triticum aestivum
gggttctggtgttggtgtttcctttgttgggtcaaaaggattatctcaaggtcttttagttactgtagctatagcagtgcacaacatacctgaaggcctggctgtaagcatggtactatcatctaggggtgtctccccacaaaaagcaatgctatggagtatcataacatctttaccacagccaattgttgctgtgcctgcattcctttgtgccgatgcatttcagaaggtgcttcctttctgtactggttttgctgcagggtgcatgatatggattgttattgcagaggttcttcctgatgcttttaaggaagcaactccatctcaagtagcctctgctggaacacttgctgttgcttttatggaaacattaagtaccgtgcttcagggattcacggatggccacggcttggaagatacatcaggctttttggtatcacttgtatttggtctt

SEQ ID NO: 437947 - DNA, 451 bp, Triticum aestivum
cccacgcgtcctcgcctccaccccacccgtcccgacccctctcctccaaggtaagcccgcggcggcggcgagcgagcgagcggcggcgatgacgacccgcttcaagaagaaccggaagaagcgcggccacgtgtccgccgggcacgggcgtgtgggcaagcaccgcaagcatcccggaggccgcggtaacgccggaggcatgcaccaccaccgcatcctcttcgacaagtaccatcccggctacttcggcaaggtcggtatgcgctacttccacaagctcagcaacaggttctacacaccgacggtcaacgtcgagaggctctggtccatggttccgtccgacaaggcggcggaggccggcggcgacaaggcccccgtggtcgacgtctcgcagttcggctacttcaaggtgctcggcaaggggatgctgccggagaagcccatcgtcgtc

SEQ ID NO: 437948 - DNA, 486 bp, Triticum aestivum
tttggctacatccgtctttctgaaagacttcggaaaacagcaagcgcacccgcaaaggctcctccacgggctgatgtgattaaaagtctgaaaaatggcattgtgctcaatattcttgggatgggcgcagctgttctcggtatgcaggcacttgttggtgctttggtagcaaaagcccttactacctccgcagtcccctattatcaggcaacttccgccggccaaagtcctgttttggctctagatgtattcctggttcaggcctcagcaaacaccatactgtcgcatttcctaggtgtggcgacttccctggagctgctccgttccgtgtcaatcgccccgaccgagcctgctgcgacatgagccaggagcccaagagctgctggattcctttactttgcacttgttttcctttctccctgactgcctaggaatagcatctcgtgtgcgccggtattatgtcttgacatttcggcttaaatgagc

SEQ ID NO: 437949 - DNA, 427 bp, Triticum aestivum
cccactcgtccgtcgccgccagcgccacagcctccaaaccctcgatctcccgcatcggagctccctgcccccaaccccccacccccacccaaccatggcggaccgcggcggcgagcgtggtggcgaccgcggaggcgagcgcggcgggttcggccgcggcttcgggcgcggcgggcgcggggaccgtggcgggcgccgcggcggccgtcgtggccctcgccaggaggaggagaagtgggtgcccgtcaccaaactcggccgcctcgtcaaggagggccgcttcaccaagatggaggagctctacctccactcgctacccatcaaggagcaccagatcgtggagcagctctgcccggggctcaaggacgaggtgatgaagatcacccccgtgcagaagcagacccgcgccggccagcggacccgcttc

SEQ ID NO: 437950 - DNA, 478 bp, Triticum aestivum
cgcgcgcgccccgccgcggcatcgtcgtgtgcagcgccgcggcggcggccgaggcctcggaggcggagcccgtggagaagttccggctcgacaacctgagcccgcagaagggggcgcggcggaagccgaagcggaaggggcgcggtatctcggcggggcagggcgccagctgcgggttcggtatgcgcggccagaagtcgcgctccgggcccggcgtccgccgagggttcgagggcgggcaaatgccgctctaccgccgtcttccgaagctccgcggaatcgccggcggaatgcatatcgggttgccaaagtacgtgccgttcaatttgagggacatagtgcagggtgggttcaaggatggcgatgagatttccttggagtccttgaaatcgaggggcttgatcaatccatccggcagggaaagaaagcttccactcaagattttgggagatggtgatctatcagtcaaattgaacat

SEQ ID NO: 437951 - DNA, 491 bp, Triticum aestivum
tgaggaacaagatccttgccgcggtgagcaggagggacgccttcatgctgcgtctcatcgacaacgagcgccggaggcttgacgatggcggcgccgaaggcgacaagaagagcatgatcgccgtgctgctcactctgcagaagacggagccagaggtgtacaccgataccatgatcatggctctctgcgcgaatttattcggggctggaacggagaccacgtcgacgacgacggagtgggcgatgtcgctgctgctgaaccacccggcggcgctgaggaaggcgcaggacgagatcgacgcggccgtggggacctcccggctggtgaccgccgacgacgtgccccggctggcctacctgcagtgcatcgtgagcgagacgctgcggctgtacccggcggcaccgatgctgctgccgcaccagtcctcggctgactgcaaggtcggcggctacaacgtgccgagcggcacgatgctgatggtgaacgcgtac

SEQ ID NO: 437952 - DNA, 305 bp, Triticum aestivum
ctctgttcgaaatctttggggacgattctgtattacaatttggtggaggaactttaggacatccttggggaaatgcacctggtgcagcagctaatcgagtggctttagaagcctgtgtacaagctcgtaacgaagggcgcgatcttgctcgcgaaggtaatgaaattatccgagcagcttgcaaatggagtcctgaactagccgcagcttgtgaagtatggaaggcgatcaaattcgagttcgagccggtagatactattgataagtagataaaactaaagataaagaagagaaggtattactcc

SEQ ID NO: 437953 - DNA, 317 bp, Triticum aestivum
  unsure (1)..(317): unsure at all n locations
gaccgaaatctttggggacgattctgtattacaatttggtggaggaactttaggacatccttggggaaatgcacctggtgcagcagctaatcgagtggctttagaagcctgtgtacaagcttcgtaacgaagggcgcgatcttgctcgcgaaggtaatgaaattatccgagcagcttgcaaatggagtcctgaactagccgcagcttgtgaagtatggaaggcgatcaaattcgagttcgagccggtagatactattgataagtagataaaactaaagataaagaagagaaggtataaataaaaaagaaacgaanna

SEQ ID NO: 437954 - DNA, 398 bp, Triticum aestivum
cccattcgtccgtggacatcggccgagaaggttccggaaggatgcctcgcgcggggttgtcggcggggtcgagcaaggcggacgtggccatcgacctcgggaacccgctcctcaaccgcaccgtcgacggcttcctcaagatcggcgccgacggcgcctgcagggtggccgccgaggacgccttcgactgcctccaaagtgggagtgtctcgaagcacaagcttgagaagacactggaaaaaatgtgcaaggagggcgcatattggggtgctgttgctggagtgtatgtaggcatggagtatggagtggaaagggtccgcggagagtatgactggaaaaatgcgttgattggaggcatcgtatgcggcgccctgatctctgctgctagcaacaacaaa

SEQ ID NO: 437955 - DNA, 420 bp, Triticum aestivum
gccgtcggcccgccgccgcctttctggcagcttctcgggggcctgcttcctgtgccggagggagctcagtcccgacaaagacgtgtacatgtacaggggtgaccaggggttctgcagcgaggagtgccggggacagcagatcttgtcggacgaggcgagagagcacgaggccatgatcagcaaggagcgtcgaggtctggctcaccgtcgtcaccaccacgggccacgcccggcgccgtcgggggcgatccggggcgtgcggaggagattactggcggcagcctagcctgattatgcataataatgcatgcacgaacatgacatccatgaacaaatcgatcaagaacctatgatgctggaaagttaattacaagtaatcgaggggcaaatcaaggaaaccaatatgcgtatttgcatgta

SEQ ID NO: 437956 - DNA, 447 bp, Triticum aestivum
cggactcgtgggcggacgcgtgggattttcatcccctcgcccgccgccgccgccgctcccgccgctagaccagctcgccagcagcaatggcccggatcaaggtgcacgagctgagggggaagaacaagggcggagctgcagggccagctcaaggacctcaaggcggagctctccctcctccgcgtcgccaaggtcaccggcggcgcccccaacaagctctccaagatcaaggtggtgcgcacctcgattgcgagggtgctcacggtgatctcgcagaagcagaagtcggcgctgagggaggcgtacaagaacaagcgtctcccgctcgacctccgccccaagaagacccgcgccatccgcaggcgtctcaccaagcaccagctctctttgaagacggagagggagaagaagcgcgagaagtacttccccatgaggaagtatgctatc

SEQ ID NO: 437957 - DNA, 459 bp, Triticum aestivum; identical to SEQ ID NO: 435671

SEQ ID NO: 437958 - DNA, 438 bp, Triticum aestivum
cacacaccgcacgcgtttgacattttccgcccaccaccaccggagggagcgagctccagccatggccgccaagtgctacccgacggtcagcgacgagtacctggcggcggtcgccaaggccaagcgcaagctccgcggcttcatcgccgagaagaactgcgcgcccctcatgctccgcctcgcgtggcactcggccgggaccttcgacgtggccaccaagaccggcggccccttcggcaccatgaagtgccccgcggagctcgcgcacggcgccaacgccggcctcgacatcgccgtcaggctgctcgagcccatcaaggagcagttccccatcctctcctacgccgacttctaccagctcgctggagtcgtcgccgtcgaggtgaccggcgggcctgaggtccccttccacccggtgagacaggacaagcccgagcc

SEQ ID NO: 437959 - DNA, 455 bp, Triticum aestivum
ccaccgcgctcaactccaaggtcgtctcccagtactccggcctcctggcccctctcgctgtcgacgccgccctctccgtggtcgatcccgcccacccggagcttcttgatctccgcgacatccgcatcataaagaagctcggcggcaccgtggatgacaccgagcttgtccgcggcctcatctttgacaagaaggccagccatgctgccggggggccatctaggatcgagaatgccaagatcgctgtcatccagtttcagatctcaccgcccaagactgatattgagcagagcgtcatcgtgtcagactatgcgcagatggaccgcattctccgtgaggagcggaattacatcctagggatggtcaagaagatcaaggcgtctggatgcaatgtcctcctcatccagaagagcatcttgcgtgatgcggtgactgagttgtcgctgcactatctc

SEQ ID NO: 437960 - DNA, 324 bp, Triticum aestivum
cccatttcgaggccggcgacgagcgcgccaaggagttcgcgggcatcctcaagtccaacgaccccgtcggcttcaacctcgtcgacgtcctcgcctggggctccatcggccacatcgtcgcctactacatcctcgccaccaccagcaacggatacgacccacccttcttcggctgatccctcccatgtctgcctgcctgcgtgccgaccggaccggcttgctgttgtaatccgccgtgttttcattagttctctatacgctgatgatgtactatcatgtttgtatgtatgtgagatggtgaaagattaatctggacaagtagtg

SEQ ID NO: 437961 - DNA, 487 bp, Triticum aestivum
caagatgaagcctgccccgaagccgaagcccgcccccgtggccacctcgagcgtaggcatcgacgacgagctcgccaagtggtacggccctgacaggaggatctacttgcccaacggactccttgaccggtcggaggtgccggagtacctcaacggagaggttcccggagactacggctatgatccttttggtctgggcaagaagccagaggacttcgccaagtaccaggcctttgagctcatccatgccaggtgggccatgctcggcgccgccggattcatcatccccgaggcgctcaacaagttcggcgcaaactgcggtcccgaggccgtttggttcaagactggcgcccttctccttgacggcaacaccctcaactacttcggcaacagcatccccatcaacctgatcctcgccgtcgtcgccgaggtcgtcctcgtcggaggcgccgagtactacaggatcaccaacggactggaatttgat

SEQ ID NO: 437962 - DNA, 394 bp, Triticum aestivum
cccgttacgcggccatctcacaggacaatgggctggtgccgattgtggagcctgagatcatgctcgacggtgagcacggcatcgagaggaccttcgaggtcgcgcagaaggtgtgggcggagaccttctactacatggcccagaacaacgtcatgtttgagggcatcctcctgaagccaagcatggtgacccctggtgccgagtgcaaggacagggccacccccgaggaagtggccagctacaccctcaagctcctccagagaaggatccccccttccgtccccggcatcatgttcttgtctggcggacagtcggaggtggaggcgacgctgaacctgaacgcgatgaaccaggcgccgaacccgtggcacgtgttcttctcctacgcgcgggc

SEQ ID NO: 437963 - DNA, 441 bp, Triticum aestivum
gccttctcctagcaagctatatacctacatagtacagccatggcccccaccgtgatggcctcgtcggccacctccgtcgctcctttccaggggctcaagtccaccgccggcctccccgtcagccgccgctccaacggcgctagcctcggcagcgtcagcaacggtggaaggatcaggtgcatgcaggtgtggcccatcgagggcatcaagaagttcgagaccctgtcttacctgccaccgctcagcacggaggccctcctcaagcaggtcgactacctgatccgctccaagtgggtgcctcgcctcgagttcagcaaggttgggttcatcttccgtgagcacaacgcatctcctgggtactacgatggccggtattggacaatgtggaagctgcctatgttcgggtgcactgacgccacacaggtgatcaacgaggtggag

SEQ ID NO: 437964 - DNA, 419 bp, Triticum aestivum
aacgcacgcaaaggccgaggaggacaagctaggaggagcgagcagccatggcttcgtcggtggccgccgcggcgagcacgttcctcgggacccggctggcggacccggcgccgcagaacgggcgcatcgtggcgcggttcggcttcggcaagaagaaggccccgccgaagaaggccaaggcgcccccgaccaccgaccggccgctgtggttccccggcgcgcaggcgcccgagtacctcgacggcacgctcgtcggcgactacggcttcgaccccttcggcctcgggaagcccgcggagtacctgcagtacgacgtggactccctggaccagaacctggcccagaacctggcgggcgagatcatcggcacccggttcgaggacgccgacgtcaagtccaccccgttccagccctacgcc

SEQ ID NO: 437965 - DNA, 445 bp, Triticum aestivum
actaattgcccttcccgaatcaataggaggctgcaagtccctggaagaattgcaggctaatggaaatacaatcgaagatgtgccctcatcaatttgcaaccttgcttgcctcaaatctgtatcattgaatggaaacaaaattcgtcagcttcccccaaacttgctgaaggattgcaaggctcttcagaacttgtcactgcacagcaacccaatctcgatggaccagtttcagcaaatggatggattcggggagtttgaagcacgcagaaggaagaagtttgacaagcagattgattcaaatgtgatgatgggctccacagccctggatgaaggcattgatttacgctagttttgcgagtgaacttattttttcctcattagtcggaagtaattgtaatctttgtatatatcagtctccccacaatctgattcggtaaagaagtca

SEQ ID NO: 437966 - DNA, 401 bp, Triticum aestivum
tcgatccttctctcggttcttagtttcttttccaccacccacaggccaaggaggatgtcttgctgcggcggcaagtgcgggtgcggcgccggctgccagtgcggcaacggctgcggcgggtgcaagatgttccccgacgtggaggccaccgccggcgccgccgccatggtcatgcccaccgcctcccacaaggggagctccggcgggttcgagacggccggggagaccggcggctgcgactgcaccacctgcaagtgcggcaccgcgtgcggctgctcctgctgcagctgcaactgagccggcgcccaggaggccggcagaggcgagcacgaggatgaggaggaggacaagcaagcaagcaccatcgtcaccagttcacagcatgcgcccgcgcgcgcgct

SEQ ID NO: 437967 - DNA, 349 bp, Triticum aestivum
ttgcggacgcgtgggcatcgacgaccttgtgtctgtcgacacccttattgaggaagtgctctgtgaggcgcccatcaacgagtatgtccagtcgtgtgacatcgttgccttcaacaagatctagaatctttgttcgcccacctgttgctgctggattcttggtactgggattggttgatctggaaaacattatgtcgtcccatttagttacccctcttacagaaatgctactggttttgtttttgagtgatgccctggtcttgaatgcctgctacctttaaatagttgaattgctgagcggtttgtaatggcgaaacatctatcatgtggagtaaaatcagtctttgat

SEQ ID NO: 437968 - DNA, 447 bp, Triticum aestivum
gccagccatgggaagcaagggcttcaagggtgtgatagtgtgtttactcatactggggttggttctggaacagctgcaggtagaaggcaagagctgctgcaggagcaccctgggaagaaactgctacaacctttgccgcgcccgtggtgctcagaagttatgcgcaggcgtctgtaggtgtaaaatctcaagtggcctaagctgccctaaaggcttccctaaattggcccttgagtccaactcagatgaaccagacaccattgagtactgcaacttgggatgtaggtcttccgtgtgtgactacatggtcaacgcagctgctgacgatgaagagatgaaactctatgtggaaaattgtgctgatgcttgtgtcagtttctgtaacggtgatgctggcctcccatcccttgatgcgtactgatgcgtgtccatggtctgagatttcac

SEQ ID NO: 437969 - DNA, 413 bp, Triticum aestivum
cccactcgtccgcggacgcgtgggctcctcctagcaagctatatacctacatagtacagccatggcccccaccgtgatggcctcgtcggccacctccgtcgctcctttccaggggctcaagtccaccgccggcctccccgtcagccgccgctccaacggcgctagcctcggcagcgtcagcaacggtggaaggatcaggtgcatgcaggtgtggcccatcgagggcatcaagaagttcgagaccctgtcttacctgccaccgctcagcacggaggccctcctcaagcaggtcgactacctgatccgctccaagtgggtgccttgcctcgagttcagcaaggttgggttcatcttccgtgagcacaacgcatctcctgggtactacgatggccggtattggacaatgtggaagc

SEQ ID NO: 437970 - DNA, 462 bp, Triticum aestivum
agaaggtgctctggctgaggagaacatgcgtggcatttgctttgaggtctgtgatgttgttctgcacactgatgctattcacaggggtggtggtcaggtcatcccaacagccaggagggtcatttacgcttctcagctcactgctaagccaaggctgctggagcctgtgtacctggttgagatccaggccccggagaatgcactcggtggtatctatggtgttctgaatcagaagagagggcatgtgtttgaggagatgcagaggcctggtaccccgctgtacaacatcaaggcttacctcccggtcatcgagtcgttcgggttctcaagtaccctcagggcggcgacatccggccaggctttcccccagtgtgtgttcgaccattgggacatcatgtcttctgatcctttggaggccggctcccagtctgccacacttgtcacggagatccgcaagcgcaa

SEQ ID NO: 437971 - DNA, 400 bp, Triticum aestivum
tcggctatttagaagtccagccattagccactcaccaagctgattatatagatagcaccggtcgcctatcccctcgcctcatcttatccccctccgtccccgcttcctcctcctcttcctcccgctcactccccgaagcgaagcctcgagagctcccaatggcttccaccacgttctcctccgccttctccatcctctctctcccctcttcctcaccatccccctccgcctcggcccccaggaccctccccgtcgccaaccgccgccgccgcgccgtcgccgtcgcctccaccgtcactgagtccccgaaggtccttgagctcggcgacgccattgccgggctcacccttgaggaggctcgcaaccttgtcgaccatctccaagaacgtcttggcgtctc

SEQ ID NO: 437972 - DNA, 171 bp, Triticum aestivum
tcggcgcgatcttgctagcgaaggtaatgaaattatccgagcagcttgcaaatggagtcctgaactagccgcagcttgtgaagtatggaaggcgatcaaattcgagttcgagccggtagatactattgatcagtagataaaactaaagataaagaagagaaggtataacat

SEQ ID NO: 437973 - DNA, 412 bp, Triticum aestivum
ctctcacgcgcatcctagcaaccggcggcggcaggcggaaggcgaacaagaaggcggcgacgatggggcactccaacgtctggaactcccaccccaagaactacgggcccggctcccgcgtctgccgggtctgtggaaactcccatggactgatcaggaagtatgggctgatgtgttgcaggcagtgtttccgcagcaacgccaaggacattggcttcatcaagtaccgttaattcacctgttcctggtaccctgaagtgaagctgatcagggatgaaggattggagcacttaatagaatgcttaatttcaattccagtaatgtttgctcgtggttttatgttttgatggatactgaatgatgtaattgttgaacatgagttaattacccatggagaagtcttttatcgttc

SEQ ID NO: 437974 - DNA, 448 bp, Triticum aestivum
  unsure (1)..(448): unsure at all n locations
acctcgccgtttcagtcggttcccatcccccctcgcgtgcgtttcttcttcctccaagtccaggccgggtgggagagaggcggggcgaccgacgatgaaggagtactggacgatgctggcgtccctcatgggcgcgctggcgttcctgcaaggggtgctgcacgccgtgttcccggcggagctgcgggcggcgctggcgcggctgctcgggcgcctcacccgcgccttctcgccctactgctacttcgacgtcacggagacggacgggatgagcaacaacgagatctacgacgccgtgcagctctacctcagcagcacggccgcgccggcatcgggggcccggctcagcctcacgcgcccgcacaacgccacctncttcaccttcgggctcgccgccagcgaccgcgtcgtcgacgccttccgcggcgcggccgtcacgtgggagcac

SEQ ID NO: 437975 - DNA, 264 bp, Triticum aestivum
gctttgcaccgttgctttgtcggccgtgctgcctgtcgccgtaaggggcaggccggcggcgaggaggaggagcgccaccgttgctggcggcggcagaaggaccgtgggtgccggcgtccgggcatcggcggcggcggcgccggaggcggactacagctccagcgtctcggtgttccccatggaggcctgcgacctggtcggcggcgaggcgtgcgaggcgcatatgtacccggagacgaagctcggcgccggtgcaggcgcccc

SEQ ID NO: 437976 - DNA, 479 bp, Triticum aestivum
gcttacaagcaccagcgaggagagtcgaggcgcgcacgtgggtgggtctgcgcgcgccgtccgcctcctccaccaggccgccgtcgcggtcgtcgtcgtcctagatccaacagcctacgtccctgctcggacgcgtgcgccgagcggagggacgagcgatggccgccggccgtgggctcccgctcctcctcgtcatcgccgccctcctggtcgggctcgcctccgcttcccccttcatctccgacggcgtgttccaggcgagcgccggatctaccacggggaggaccttgctgcaggccaagagggattgtcctgtgaacttcgagttccaaaactacaccgtcatcacaagcaggtgcaaagggccgaaatatcctcctaaagactgctgtgattctttcaaggaatttgcatgcccgtttaataactacatcaatgatgaaagcaatgactgtgcatccacaatgttcagctacatc

SEQ ID NO: 437977 - DNA, 442 bp, Triticum aestivum
ctctcctggtcaccggcgagaaaaagcaagatggactacatgaatgggccaggccggaaccacctgttcgtccctgggccggtgaacatcccggaccaggtgatccgcgccatgagccggcagaacgaggactaccgctcgccggcgatccctgccctcaccaagaccctgctggaggacgtgaagaagatcttcaagaccaccaccggcacccccttcctcttccccaccaccggcaccggcgcctgggagagcgcgctcaccaacacgctctccccgggggaccggatcgtgtccttctcgctggggcagttcagcctgctgtggatcgaccagcagcagcgcctcggcttcagcgtggacgtggtggagtccgactggggctacggcgccgacctcggcgccctcgagtccaagctccgcactgactcgcagcacacca

SEQ ID NO: 437978 - DNA, 407 bp, Triticum aestivum
cggtcgcgtgggcgggaagatatcggacatggacatccagcggctggccatcgaggccggcgagcacttcacgctcgacgaggtcagagagatgatccaggccgccgacgaaaacggtgacggcgaggtcgacatggaggagtttatgaggatgatgaagcggacgggcttcggcactggattctagtagaacagagcagaggacaagctgaatgaaccgacataattcgcgggttgtacttacttgtacatgtacctactcgatcgtgctgcatacctacatgtagtcacgcatgttcgcacctgggatttcttttgcgaggtgtttgcgtacatgtaccaaaattacctggcgccgacaagtggtgctgttctgctgccaaaaaaaaaatgggtttgcttatctc

SEQ ID NO: 437979 - DNA, 435 bp, Triticum aestivum
gggttatggccagcctattggtcgctacgatgatatgtgggctggatggtgcaccaaggtgattactgatcatttgagcctgggtattaagactggtctgccctacatctggcacagcaaagcaagcaacccatttgtgaacctaaagaaggaatacaacggcatcttctggcaggaggagctgatccccttcttccagtccgtgactctctcaaaggaggccaccactgtccagaagtgttaccttgagctggccaagcaggtgagggcgaagctgggcaaggtggatggctacttcaacaagcttgctgatgccatggtcacatggatcgaggcttgggatgagctcaacccaccaaagggtgcaattaccaccaccaacggccctgctctgaagagcaagtgagactgtgagaggcagtagcatacatatac

SEQ ID NO: 437980 - DNA, 367 bp, Triticum aestivum
gtggacccaagaaggttaagctgatgtgctcctattgcaagcggcatacggagtctgaagttccagatccttactatggaggcgctaagggatttgaaaaggtactggatctgctggaagatgcatgcgagtcattacttgacagcatcatggcggagaatgaaaacatttctgcttgatctcagaatgaatttccctgagccaatgtaagcgtcacattttaatttgattgtaccagggatcagttgcaaagatgtggattagctttctgtgagccatcatctcttcagcccagataattgtaatgataattaactaaaaatacactctctcatcaccatgcgtatatatgtgttaggctggatac

SEQ ID NO: 437981 - DNA, 438 bp, Triticum aestivum
acctagctccagacgcctcctcctcctcccccgccgccgccgcactctccagagaccgcaggcatgggcgtcttcaccttcgtgtgccgcgactccggcgccgagtggtcggccaagcagcacaagggcgagctcgaggcctccgccgccaccccctacgacctgcagcgccagctcgtgtccgccgcctgcgccgaggacaagtccggtggcgtccagtcctccttcaccatggtctcccccaagtccgccatcttccaggtggtcattggtggcgcctctgctggtccgatcggtggtggtggtgctgcaggtggtgccgctgcatcaggtggagctgccgccgaggcccccaaggctgaggagaagaaggaagaggagaaggaggagagcgaggatgaccttggcttctccctcttcgattagatcttctttacc

SEQ ID NO: 437982 - DNA, 420 bp, Triticum aestivum
cccacgcgtccgcaacaagatgctttcgtgtgccggggctgataggctccagactggtatgaggggtgcttttgggaagccgcagggagtctgtgcccgtgttgccattgggcaggtcctcctttctgtgcggtgcaagcccaacaatgccatccatgccactgaggcccttcgtcgtgccaagttcaagttccctggccgccaaaagatcattgagagcaggaagtggggcttcaccaagttcaaccgcaacgactacctcaagttcaagagtgagggcaggatcttgcctgatggagtcaacgctaagctgctcggatgccatggccgccttgcgaaccgtgcccctggacaagctttcctgtctgccgcataatctagcagaagaagtctatccgttctatcagaacttattttact

SEQ ID NO: 437983 - DNA, 480 bp, Triticum aestivum
  unsure (1)..(480): unsure at all n locations
ggaggatctgggaagcgaggaggctctgagggagaccgtgcagtgcctggcgacgccggagaggtacttcagccaggtgatggcggcggcgctgagggagggcgcggaccaccacgggaaggaggccctgtcgcgggtggcggtgacgcggtcggacgtggacatggacggcatcagggcggcctaccaggagcagttcggggccaagctcgaggacgccgtcgccggcagcgcgcacgggcacttcaaggacgcgctcgtctcgctcatcgtcggcaagtaaaccatatccggagggggttcttcttcgtcttccagtggtgatggcgcgccggccgtgcgtgtgtttttcttcctgcttcatctcgtgtcgtgtgtgcctttgtatgttgaattgttgtcgagcggngcatgtaaacatttgcagctgaggtcgtgtacggctgatcggngatcaaataaagttgaacatttgggtct

SEQ ID NO: 437984 - DNA, 472 bp, Triticum aestivum
cggacgcgtgggcggacgcgtgggtcacaacacccctccatccaccttttgccagcgtgagagcttcttctttcttgcgagggagaggacagcgagcaaccagggagctaggcgtcaatggcgaccatagccacgatgaccatgctcaagcccgccggcctggccgccgcgccggagccggcctccgccgccgtgcaggagctcgccgcgctggcggcggtagcgcccgccgacgacaaccggggcctgctgctgctcttcgtggtggcgcccgccctcggatgggtgctctacaacatcctgcagccggcgctgaaccagctcaacaaaatgcggtccaactgagcgtcgtcgtcgtcgtggcatcgcatgcggtccggccgagtgggttcgtatgtgtgtgttcgtctattaagagtcgtggtagtagcgtggaacgtggtgtgagtgcctgcttgcatactctctaatc

SEQ ID NO: 437985 - DNA, 395 bp, Triticum aestivum
cggacgcgtgggttgcgtgtctactccgtccagctccaggcgctcgacgcgctccgcggctccggcatcagcctcagcctcggcaccaccaacaacgacgtggccgtcctcgccagcagcctgtccgccgccgccgcatgggtgcaggccaacgtcaagccctactaccgcgccgccgtggacgtgcgctacatctccgtcggcaacgagcttgccagcgacaccgcgcagagcatcctggcggcgatgcggaacctcaacgacgcccttgcggccgagggcctcggcggcgccggcgccggcatcaaggtgtccacggcggtgaggctggacgtgatcgccaactccttcccgccctccgccgctgtgtttgcgcagccctacatgggcgacgt

SEQ ID NO: 437986 - DNA, 451 bp, Triticum aestivum
ccatcttctccgtcctggccgccgccgccaccgccaccagtatctacacctgctacgaaggggtgggcctccccgtggacccgctccagggctgccactactacgtgacctcgcagacctgcggcttcgtgccgctgctcccaattgaggtgatgaaggaccggtgctgccgggagctggccgccatctcgtccaactgccgctgcgaggggctgcgcgtcttcatcgaccgggcgttccctcccagccaaagccaaggcggtggccccccgcagccgccgctggcacctaggtgcccgacggaggtgaagagggacttcgccagaacgctcgccctgccggggcagtgcaacctgccgaccatccatggcggcccctactgcgtcttcccatgaacgctagcttgttcatgaaaacattgtgtgaatgaataagctagcagcatgtcaca

SEQ ID NO: 437987 - DNA, 451 bp, Triticum aestivum
accagcctcctcagtcctcacagcatcctctcagtccttagcttccttccctcgccgccacccaccaaggaaaggaggatgtcttgctgcggcggcaactgcgggtgcggcgccggctgcaagtgcggcaacggctgcggcgggtgcaagatgttccccgacgtggaggccaccgccggcgccgccgccatggtcatgcccaccgcctcccacaaggggagctccggcgggttcgagacggccggggagaccggcggctgcgactgcaccacctgcaagtgcggcaccgcgtgcggctgctcctgctgcagctgcaactgagccggcgcccaggaggccggccggcagaggcgagcacgaggatgaggaggacaatgcaagcagcaccatcaccaccagttcaccaccacccagcgtatcatcaccagccgccgcatgcgctcgcgggcgc

SEQ ID NO: 437988 - DNA, 409 bp, Triticum aestivum
atgttggctattttcacgctgtctgacaagcagattaaaaaagtatattgttattttcgaagtttgagtaaaccattgcttcctctggggtctacaatacatataactcactatagtactaatactatttttaccacatcgaaaaattttatgttgagaaggagatccgcaaggactcggccaagaagacggacaaaaagtcgcgcgtcaaggtgttactcaagctcgtcaacttcacccacctcatgcccacccgctacaccctcgacgtcgacctcaaggaggtggcctccggggcgcccgactccctcacctccaaggacaagaaggtgggcgccgacaaggccgccaaggccaagctcgaggagaggttcaagaccggcaagaacaggtggttcttcaccaagct

SEQ ID NO: 437989 - DNA, 335 bp, Triticum aestivum
tcggctttgtctggatattttgttggggagccagatttgttacatggggatccatttgtacctgaagacgctgacagaccaatagcagtgtggataaaggagcataccccgggaaaagcatttgaagaggcaaaacctgtgattgctgctctaaaggaacaaggagcgtctagcgttggggctgcaggttattgctggggtgcaaaggtagttgcagagttagcgaaagctaatgagatccaggcaggcgttatgttgcacccttcatttgttactgccaatgatatagaagaggctaaatgccccatcgctatacttggagctgaaactgacgt

SEQ ID NO: 437990 - DNA, 461 bp, Triticum aestivum
gttttctgaatgttgatgtcaacgagttccagaccaacctggtgccctacccgaggatccacttcatgctttcctcctatgccccagtgatctcagccgagaaggcctaccatgagcagctgtctgttgccgagatcaccaacagcgcctttgagccttcctccatgatggccaagtgcgacccccgccatggcaagtacatggcctgctgcctcatgtaccgtggtgatgttgtgcccaaggatgtcaacgctgctgtggccaccatcaagaccaagcgcactatccagtttgttgactggtgccccactggcttcaagtgtggtatcaactaccagccacctggtgtcgtcccaggcggtgaccttgccaaggtccagagggctgtgtgcatgatctccaactccaccagtgttgtcgaggtcttttcccgcatcgaccacaagtttgacctgatgtac

SEQ ID NO: 437991 - DNA, 280 bp, Triticum aestivum
ggactattctgtattacaatttggtggaggaactttaggacatccttggggaaatgcacctggtgcagcagctaatcgagtggctttagaagcctgtgtacaagctcgtaacgaagggcgcgatcttgctcgcgaaggtaatgaaattatccgagcagcttgcaaatggagtcctgaactagccgcagcttgtgaagtatggaaggcgatcaaattcgagttcgagccggtagatactattgataagtagataaaactaaagataaagaagagaaggtat

SEQ ID NO: 437992 - DNA, 472 bp, Triticum aestivum
gcgctctccacgctcgtcccgggggtctcctacatccacgcgggccccgtgctccgcctccgctccccggccgccgaggcgctcggccccacccacctcctccactcccgctacgccaccaaggccgacctcgccgcctacgcgccgcacccggcccacgtcgccgccgtgcaggcgcacgtcgcccccaacgcgctcgacgccaccgccgtcgactgggtcaacgccgcgggcgccccgtcccccgtcggccccggcgccgccgtgcgcctcaccctcgccaaggtcaaggagggcgtggaggtcgggcagctcgtggagaaggtggccgccgccaccaaggacgccggcgaggccagcggctccaaggtcagcttcggggagaacttctcccccgcgcgggccaaggggtaccagttcgggatggtggccgtgttcggcagcgtcgaggagctggacgccgtggagggcg

SEQ ID NO: 437993 - DNA, 338 bp, Triticum aestivum
cggacgcgtgggcggacgcgtgggttccgatccagcaccgccgccgcaaacaccacacctcgagagccctcttcgccggtgaagtagcaagcaagatggctggaaggaagggaggcgacaggaagaaggcggtgacccgctccgtcaaggccgggctccagttccccgtcggccgcatcgggcgctacctcaagaagggccgctacgcgcagcgcgtcggctccggcgcccccgtctacctcgccgccgtcctcgagtacctcgccgccgaggtcctggagcttgccggcaacgctgccaaggacaacaagaagacccgcatcatcccgcgccacctt

SEQ ID NO: 437994 - DNA, 370 bp, Triticum aestivum
aaacgcacagcatgcgcttgcagagaagccatagagctgcccgtgatcggttccagcaccaggcgccgcaggccgcagaacaagttcgagagctagaaatggcgccggctttgtcgttcccgatcatcgacatggggctgctggccggggaggagcgacccgcggccatggacctgctgcatgacgcatgcgagaactggggattctttcaggtcctggaccacggcatctcgacggagctgatggacgaggtggagaagatgaccaaggggcactacaagagggtgcgcgagcagaggttcctcgagttcgcgagcaagacgctgcatgacggcggcagggcggcggagaacctggactgggagagcac

SEQ ID NO: 437995 - DNA, 311 bp, Triticum aestivum
tcttgaggagcttagggaacttggttctggtacttttggaactgtttaccatgggaaatggagaggaactgatgtggctatcaagcgcatcaagaaaagctgttttacaggacgatcatctgagcaagaaaggctggcacaagaattctggcgagaagctgagattctgtcaaagcttcatcatccaaacgtcgtagccttctatggcgtggtgaaggacgggccgggcggtaccctggcgactctgaccgagttcatggttaatggttctcttcggcatgtcttgcagcggaaggacaagtgtcctgatc

SEQ ID NO: 437996 - DNA, 386 bp, Triticum aestivum
ctcccctctcgctctctccaccaaccaagaacagcaggaactcgacctcggagcagcaacgaatccgccgccgcccggcaaaagggatccaaagctccaatggctggcaagtacatcgtcgccggcctcgtcggctcctgtgtcatctcgtatgcctgtgactacatcgtttctcagaagaagatcttcggtggcaccatcccagggactgtgtccgacaaggagtggttgaaggcgacggagcagaggttccaggcctggccccgggtcgctgggccgccggtcatcatgaaccccatcagccgccagaacttcatcgtcaaggacctcaacccctgaggctcaagatcttaaggtttgcggtcggttggaacctttaccctgat

SEQ ID NO: 437997 - DNA, 241 bp, Triticum aestivum
ctcagcgaggcgcgcgaccgccccgttgcagatcatatggcggctgaagcggttcttcaacgtcggggacgagagaaagctccgggaatccgtgcgcctcgtcgacgggttcgccgcggaggtcacccggcaacgacacaagctcggcggcgccgcgttcggcagcgacctcctgtcgcgggtcatgggctccatcagcgacgagaagtacctcagggacatcgtcgtcagtttcgtgctc

SEQ ID NO: 437998 - DNA, 383 bp, Triticum aestivum
ccctttcgtccgcccacgcgtccgcaaggaagctgcctggggtcttgcccgttacgcggccctcacaggacaatgggctggtgccgattgtggagcctgagatcatgctcgacggtgagcacggcatcgagaggaccttcgaggtcgcgcagaaggtgtgggcggagaccttctactacatggcccagaacaacgtcatgtttgagggcatcctcctgaagccaagcatggtgacccctggtgccgagtgcaaggacagggccacccccgaggaagtggccagctacaccctcaagctcctccagagaaggatccccccttccgtccccggcatcatgttcttgtctggcggtcagtcggaggtggaggcgacgctgaacctg

SEQ ID NO: 437999 - DNA, 323 bp, Triticum aestivum
ggggtcgaccacgtcgaggggacggtcaaggccgtcgtcggccccgtgtacgaccgctaccacgccgtgccgctcgacctcctcaagttcctcgaccgcaaggtcgacgagtctgtccaggagctggatcgtcgtgtcccgccggtcgtgaaagaggtgccgacctatgctcgctctgcagcagctgaggtgcagaagacaggcataatgggcacagcaactggcctggccaagtcggccattgctcgtgctgagccaaaggcccgtgacttgtatacccgctatgagcctgtggcggagcgcaaggctgctgaagcctgggc

SEQ ID NO: 438000 - DNA, 370 bp, Triticum aestivum
tcggtggtaggacattaccaccaagatccaccacaaggtctccgagaactggatctccgccacgctcctcatcacccccgtcgtcggcacctaccagtatgcgatgtggtacaaggagccggagaaagctgtcccacagatactaaaggtggagctttctccaatatcgcagcagttggaatttccatgttctataatccaccaagagtgatttaacattttcggaatcacttctagttgtactcttttgctctttccgttgcatatgcaatgatgcagtaagtgtgacttgcaaacctattttgaggcctcaaatgttgagttgctcatcactggagtgattttgtgcaataaagcaaattaaccagtc

SEQ ID NO: 438001 - DNA, 352 bp, Triticum aestivum
gccgggaagaagatgaacgtccatttcatggccaccccgggcgccggcgagaagttcctgccgcggagcgaggccgacgccatcccgttctcctcggagaaggcccccgagatcctcagccgcttctccgtggcgccggactccgccgaggccgcggagatgaagcagacgctgcgcgagtgcgaggcgacggcggccaagggggagaagaagtcgtgcgccacgtcgctggagtccatggtggacttcgccacgtccagcctcgggaccagccacgtgagggccgcctccacggtggtcggaaaggaggggtcgccggagcaggagtacaccatggccggcgtgaggcgcg

SEQ ID NO: 438002 - DNA, 192 bp, Triticum aestivum
ggccagaactgtcgattgaaatgatcctacaagcagctcagccaaaactagagccattcccctttgaagagcacaccgacctgccggttcaaggcctcggtggcatcggtggtggggaggttgaaggccccactggtggtatgggtggggaggttcaagacctcactggtggcatgggtggggagctcccgg

SEQ ID NO: 438003 - DNA, 250 bp, Triticum aestivum
tcggagaacttcagcgacacggtcaccgccgtcgtcgtgccgccgtacatcgacagctccgagatcgtgaagcacgcgtggaagcggtacaacctcagcctcgggctcgggctgaacaaaggtcgcccggcaaggtcttcaggatcggccacctcggccacctcaacgagctgcaacttctgggctgcctcggcggggtggagatggtgctcaaggacatcgggtacccggtgaagctcggcagcggcgt

SEQ ID NO: 438004 - DNA, 346 bp, Triticum aestivum
tcgcgacgacacggcggagctcaaggacgtgctgggcgacgggtacctggagcgcgtgcaggggcgcgggctggtgaccaaggagtgggtggaccaggaggcggtcctgcggcacccggccgtggggctgtacctgagccactgcgggtggaactcggtgacggagtcggcggcgtacggcgtgccgatgctggcgtggccgacgctgggcgaccagcggctgatcgccaaggtgataaagagcggcgggttcgggctgtgggtggagcactggagctgggacggcggggagggctcgctggtccgcggcgcggagattgcggagaaggtgaaggaggtgatgggc

SEQ ID NO: 438005 - DNA, 159 bp, Triticum aestivum
tcgcgcgaaggtaatgaaattatccgagcagcttgcaaatggagtcctgaactagccgcagcttgtgaagtatggaaggcgatcaaattcgagttcgagccggtagatactattgataagtagattaaactaatgataaagaagagaaggtgtttcttt

SEQ ID NO: 438006 - DNA, 374 bp, Triticum aestivum
cggacgcgtgggcggacgcgtgggtgaagatcacctttgatatcagaaaacagcctggaaagccgcaagagactaccatccatgccacttttacaaatttgacatctagcaattatacagatttcattttcaggcagctgttccaaagttcattcaattgcgactggatccagctagcggtaacattgttccagccaatggaaagggttcagtcacacaaggtttcagtgtcacgaataatcagcatgggcagaaaccgcttgcaatgcgtatccggatgtcttacaaagtgaacggcgaggacaggttggaacaaggccaagtcagcaattttccacctggagtatagtgccatttgtgtgtaacctatgttt

SEQ ID NO: 438007 - DNA, 345 bp, Triticum aestivum
gcggcctcctcctagcaagctatatacctacatagcacagccatggcccccaccgtgatggcctcgtcggccacctccgtcgctcctttccaggggctcaagtccaccgccggcctccccgtcagccgccgctccaacggcgctagcctcggcagcgtcagcaacggtggaaggatcaggtgcatgcaggtgtggcccatcgagggcatcaagaagttcgagaccctgtcctacctgccaccgctcagcacggaggccctcctcaagcaggtggactacctgatccgctccaaatgggtgccttgcctcgagttcagcaaggttgggttcatcttccgtgagcac

SEQ ID NO: 438008 - DNA, 406 bp, Triticum aestivum
tcgcggactcatgggcggacgcgtgggcggacgcatgggctggcggtggcctgggtggtgtcccaaatgttccaactgtgccaccggaagagcgctacgcgacgcagctagctcagcttccagaaatgggtttctttgacccacaggagaacatccgggcgctgctggctaccaatgggaatgtccatgccgcggtggagcggcttcttgggaactttgggcaatagtagactatatatgcagggccagtcacctgtagtagttggcattgtgaggcttgattggctgtataccctacccggtcccggtgagattgaaaggcagcgtctctagattctatgtgttttaagatggatgaataaaccagtctctctgctggctatcctttgcagcttgcatggataca

SEQ ID NO: 438009 - DNA, 352 bp, Triticum aestivum
gccaggtgttataccggtagcttcaggtggtattcatgtttggcatatgccagctctgaccgaaatctttggggacgattctgtattacaatttggtggaggaactttaggacatccttggggaaatgcacctggtgcagcagctaatcgagtggctttagaagcctgtgtacaagctcgtaacgaagggcgcgatcttgctcgcgaaggtaatgaaattatccgagcagcttgcaaatggagtcctgaactagccgcagcttgtgaagtatggaaggcgatcaaattcgagttcgagccggtagatactattgataagtagataaaactaaagataaagaagagaaggtat

SEQ ID NO: 438010 - DNA, 387 bp, Triticum aestivum
tcgctggaaatcaaggaaaccgatgcagaaatctggaaaagatcattctcttctgttgatccttccttctggagtttatcgttatagatttgttgtagatggagagaggagatgttttcctgaccttccatgtgaaactgatgccatgggcaatgctgttaacctacttgatgttcatgattttgttcctgaaagtgttgaaagtgtatcagaatttgaggctcctccatccccagaatctagctacagtttccagtcacccgaggaaaaggactttgcgaaggagccacctgctcttccgtctcagcttcacctcggcgttcttaacttacagaactcggaggaaatatgtgcacggccccaacacattcgtctcaaccacctttt

SEQ ID NO: 438011 - DNA, 418 bp, Triticum aestivum
accacaccctgcaatggcgtccgcgctcaccaacgtgagcctgtctaccttcgcgcccacggccaggggcgacgtcctggcgaggccgcaggtggcccccgcccgcgtcaccttcccgacggcgtaccgcggcagcggcgccctctcctgcagggcgggcgggccggccacgccgccgggcatctccgacaagatgtcggacagcatcaaggaggcccaggagacgtgctcggaggacgccgccagcggggagtgcgccgcggcgtgggacgaggtggaggagctcagcgccgcggccagccacgcccgggacaagctcaaggactcggacccgctcgagaactactgcaaggagaaccccgagaccgacgagtgccgcacctacgacagctgagcgtacgtgctaatttgttctgga

SEQ ID NO: 438012 - DNA, 299 bp, Triticum aestivum
tcgggggtcgtcgctcatgcagctgccggcagggaactgccgtgtcgacccccggtgcgacccgccgggcggcatggactgctcggcgcacgccgtggagttcgattcaacactggcgcggtccggtcttttaagatcttaaccgattcgtggtgctcgtcgggagcgttcgacgtggacggtatgctggtgcaaacgggcggctacttcgaaggggtgaaggttgtgagacgcctgaacccacaaggaaatgccgactgggtcgagtttcccaataccttggccgaaggaagatggta

SEQ ID NO: 438013 - DNA, 218 bp, Triticum aestivum
gagggttccgttactaacatgtttacttccattgtaggtaacgtatttggtttcaaagccctacgtgctctacgtttggaggatctacgaattccccctacttattcaaaaactttccaaggcccgcctcatggtatccaagttgaaagagataagttgaacaagtatggtcgtcctttattgggatgtactattaaaccaaaattgggattatccgc

SEQ ID NO: 438014 - DNA, 368 bp, Triticum aestivum
cccacgcgtccgcattaccactcctcccccaatccaactcgcgcagcagctccaagaggatcgtcagcgaccatgtccgggcgcggcaagggcggcaaggggctcggcaagggcggcgccaagcgccaccggaaggtgctgcgcgacaacatccagggcatcaccaagccggccatccggaggctcgctcggaggggcggcgtgaagcgcatctcggggctcatctacgaggagacccgcggcgtgctcaagatcttcctcgagaacgtcatccgcgacgccgtcacctacaccgagcacgcccgccgcaagaccgtcaccgccatggacgtcgtctacgccctcaagcgccagggccgcaccctcta

SEQ ID NO: 438015 - DNA, 401 bp, Triticum aestivum
cggacgcgtgggcggacgcgtgggggcgggactacccgctgagtttaagcatataaataagcggaggagaagaaacttacaaggaaaccattttccaaattattctctaggacctcttcattattggggctaccaataggcctgaccttcttgattctgcacttctccgccctggccgatttgataagcttctctacattggtgtaaatactgaagcatcatacagggaaaggatactgaaagcacagactcgcaagtacaaactacacgagaatgtatctctcttgtcgattgctcagcactgtcctccaaacttcactggtgccgatatttatgcattatgcgcggatgcatggtttcatgctgctaagcgttccgtcaaaacgcttgaagctgatcct

SEQ ID NO: 438016 - DNA, 396 bp, Triticum aestivum
aagcgcccgatgtttactactgcctcaagcttctggaagccactggaatttccactgttccaggctcaggttttggtcagaaagaaggggtgttccatctgaggacgacgatcctgcccgcggaggaggacatgccggcgatcatgtcgagcttcaagaagttcaacgactcgttcatggagcaataccaggaccactcgaggctgtgaagagagaagaagacaaccgcatctacatataatacaatgctgctcttttctaccagcaattaaagttgattaattagctgtaagctgtaactatggtgaagaaaactggttgctatgcttgatatgtataggggggaagatatatgcggaaatattcggtccatttactacataatatgatgatact

SEQ ID NO: 438017 - DNA, 361 bp, Triticum aestivum
ctacgtactctttcccacttagctagctagcagccatggccgccctctcctctgcagccgtgtccgtcccttccttcgccgccggcgccaaggtggccgctccccggagcagcaggaaggtggtgcgcgcgtccctgggcaagaaggccgccagcgcggccgtggccatggccgcgagcgcgatgctgctgggcgggtcggcgatggcgcaggacgtgctcctgggcgccaacggcggcgtgctggtgttcgagcccaacgacttcagcgtcaaggacggcgagaccatcaccttcaagaacaacgccgggtacccgcacaacgtggtgttcgacgaggacacggtgccctccggcgtcga

SEQ ID NO: 438018 - DNA, 414 bp, Triticum aestivum
cgcacgctcgctgactacaacatccagaaggagtccaccctccacctggttctcaggcttcgtggtggcatgcagatcttcgtcaagaccctcactggcaagaccatcaccctggaggttgagtcctcagacaccattgacaatgtgaaggccaagatccaggacaaggagggcattcccccggaccagcagcgtctcatctttgctggcaagcagcttgaggatggccgcacccttgcggattacaacatccagaaggagtccaccctgcaccttgtcctccgccttcgtggaggcatgcaaatctttgtcaagaccctcactggcaagactatcaccttggaggtggagtcatctgacaccatcgacaacgtgaaggccaagatccaggacaaggagggcatccccccggac

SEQ ID NO: 438019 - DNA, 334 bp, Triticum aestivum
ctctgattttggcactcaaggagctgattctaacaacattctgtacctaagggaaattgacgacgcggacaatctgtatgcagctatccaagcaaagaagggtggaaaggcagtggttgttggaggaggttacattggccttgaactaagcgcagtattgaagatgaacgatcttgatgtgactatggtgttccctgaaccttggtgcatgcctcgtctcttcactgccgagattgcagctttctacgagagttactataccaacaaaggagtcaagatcgtgaagggtacagttgctattggttttgatgctgacgccaatggtgatgtgacc

SEQ ID NO: 438020 - DNA, 362 bp, Triticum aestivum
accttctctcctccaacaccatggcccccactgtgatggcttcctcggccacctccgtcgcacccttccagggtctcaagtcgaccgccggcctgcccgtcagccgccgctccagcagcgccggcctcagcagcgtcagcaacggcggaaggatcaggtgcatgcaggtgtggccgattgagggcatcaagaagttcgagactctgtcttacttgccacccctctccacggaggccctcctgaagcaggtcgactacttgatccgctccaagtgggtgccctgcctcgagttcagcaaggttggcttcgttttccgtgagcacaacagctcccccgggtactacgatggtcgatactggaca

SEQ ID NO: 438021 - DNA, 411 bp, Triticum aestivum
caacaacaacaacaaccgttgagccaggtctccttccaacagcctcaacaacaatatccatcaggccagggctccttccagccatctcagcaaaacccacaggcccagggctctgtccagcctcaacaactgccccagtttgaggaaataaggaacctagcgctagagacgctacctgcaatgtgcaatgtctatatccctccatattgcaccattgctccagttggcttcttcggtactaactgagaagagaagaactctagtagtagacatatgatacaccgttttcttagtccatggtttggtcgttgtagcggtgaaaaaataaagtgacatgcagtatcatgtaagaacccgaactatactagttcaaacatgggaataaaagacaaacacatgtcttgtctacat

SEQ ID NO: 438022 - DNA, 390 bp, Triticum aestivum
tccatggcgaatgttcacagacagctgtaggaggatgaggatcatgaaggggtcagatgcagtgggcctcgctccgagggccgccgagaagagtaagaaccagaagtagcaagaacgatgaacccgatctgtttcctttcctgcgatcgcatcttacaagggtgatggactttatgtgtgatgagaaagggatttacttatatatataacctacgtgtattctctttgttatttccttgtatgttcgttcggaacaagcatgttagattgtgtaagctgatgtgtgtgtatctactactactgcactactttgatttgattcgcgtgtgttgtatgcggtttccgttgtaaattggtgtgctctgtctgtaccgcaaactcttttctttc

SEQ ID NO: 438023 - DNA, 398 bp, Triticum aestivum
gagctaccgaggtgccgatgtcttcctgctcgccttttctcttatcagcaaagcaagctacgagaatgtcactaagaaggcaacccatctcctttgatcctctctgtttccttgctcccactctcgttgacttgttgtagtttcataaattgtttgttatcttgcttatgagatatgacatgtgcttgtaattttccagtggatccctgagctacggcactatgctcctggtgtgcccataattcttgtcgggacaaagcttgatctgcgggatgaccagcagtttttcgtggatcaccctggggctgttcctatttccaccgctcagggtgaagagctgaagaaggtaattggcgcgacggcctacatcgagtgcagctcaaaaacacagcagaaca

SEQ ID NO: 438024 - DNA, 267 bp, Triticum aestivum
gccacccgaccggccggcgacgatgccgatgctcatccccgacgacgttcgcgccaaggcggagatctacaccggcgacgcggcggggcaggagaagacgcggctgatgctggcggagacggagctccccagcggcctcctgccgctcaaggacatcatcgagtgcgggtacgtggaggagactggcttcgtgtggctcaagcagaagaagcgggtggaccactacttcgccaaggccggccgccatgtcttctacgccaccgaggt

SEQ ID NO: 438025 - DNA, 362 bp, Triticum aestivum
gcggagagcctatttggacgccttacaatcgtgcccatgaccatctcccagctagaaaggagtatgtcgacaagattatcaacagaggtgggaaccaaaccgtcgaagctcgttgatggctcctacagtgttcggcagcgagtgagtcttctgtatgtatctacatatcacaccaaaaggttaccgaataagatgtgtgattggctttcgccgtgtacccataccagcatcgatcctgtatcacttgtgtggtagtttgcacaaaacctgcttgaaaatgtttcatggaaacttctttgcctggcgatgatgcctgtattgaataataaatgattcagtgtcaacaacggcgtaatgaaaac

SEQ ID NO: 438026 - DNA, 383 bp, Triticum aestivum
cccacgcgtccggcccacggtctaatccgattcaaacgcaccgcttcctcgtgtccgaactaagccccaatcccaccaccaccgccgctggtgctcggcgcgatggcgcagaaggacgccgccaatggcaacggcgccaccacgcgcccgccgcccactccctcccccatccgcttctccaagttcttccaggccaacatgcggatcctggtgaccggcggagctggcttcatcggctcgcacctcgtcgacaagctcatggagaacgagaagaacgaggtcattgttgctgacaactttttcactgggtcaaaagacaacctgaagaagtggatcggacacccaagatttgaactcatccgtcacgatgtcaccgaaccact

SEQ ID NO: 438027 - DNA, 330 bp, Triticum aestivum
ctcctcccctttcggttcgggttctggttcggttcgggttcggttcgagagagaggccgagtagctagcctagtctagggtttcggtagagaggaagtgagatccatggcggagacggagtaccgctgcttcgtgggcggcctcgcctgggccaccgacgacaacaacctccagcaggccttcagccagtacggcgagatcctcgacgccaagatcatcaacgaccgcgagacggggaggtcccgtgggttcggcttcgtcacgttcggcagcgaggagtcgatgcgccaggccatcgaggagatgaacggcaaggagctcgacgggcgc

SEQ ID NO: 438028 - DNA, 241 bp, Triticum aestivum
gcggccactcgtgcgcccacgcgtgcgcccacgcgtacgggttatccaatacgcacagaaatgcccatctgaaaaccctagccctgatgcccgatcccggcgagcgagatggccaacccgagggtgttctttgacatgaccgtcggcggcgcgccggcggggcgcatcgtgatggagctgtacaaggacgcggtgccgcggacggtggagaacttgcgcgcgctctgcaccggctagaagg

SEQ ID NO: 438029 - DNA, 244 bp, Triticum aestivum
caaaaatggcaaagttgtggagagatatccaccaacaacttcaccattccaaattgagaaggacattcagaaactcactgcggcataagtgcttttgagtccggcttcagttaagcactcctgtatatattgcctttttttttcttccggaaactagagttttacttgtgattatgactcttgtgcgatataatgttttccattcctgtaaagtaattcactgatatgtatagacatttccgaa

SEQ ID NO: 438030 - DNA, 353 bp, Triticum aestivum
ggcggtcagtcggaggtggaggcgacgctgaacctgaacgcgatgaaccaggcgccgaacccgtggcacgtgtgcttctcctacgcgcgggcgctccagaacacctgcctcaagacgtggggtgggcggccggagaacgtggccgcggcgcaggaggcgctgctgctgcgcgccaaggccaactccctggcgcagctcggcaagtacaccagcgacggcgaggccgcggaagccagcgagaacatgttcgtcaagaactacagctactgatccgtcggcgagctatctatctaattatctacctatggagggagagtgctagtagcgccttgagcagcttgagggcaccttag

SEQ ID NO: 438031 - DNA, 401 bp, Triticum aestivum
  unsure (1)..(401): unsure at all n locations
cagtatgtaacttacaattgatggtcggtaccactgatatccctgattggtgctttctggaggtttatggaaaagaagggaaaaactgctttacggaatctcctttggcggacactcttactcagttttaccagaaatcaccaatatcacatatttccaaggttaagacaccaacactctttcttctcggagcaaaagatctccgtgttcctgtttctaatggcctacagtatgcaagggctttgaaggagagggggattgacaccaaaattattgtcttcccagaagatattcatggacttgacaagccacagtccgactttgagagcttcctcaacataggagtttggttcaagaagtacttgagcaaataagcattgngctcttaaacacaatgatct

SEQ ID NO: 438032 - DNA, 421 bp, Triticum aestivum
gatcgaacccaagaatatcatcatccgttagccgtcgccaccaccaccaccagcaccatggcagcgcccccctcctccgtctccgtcagggccggcgcgtccgtctcggcgaagctgacccctcgccaggccgcgagggctgggttcggtggcagggtcagcgtcagctcgggcaggaagtgcggcggccccgtgcgggcgtcgctcttctcgcccaagcccgcggtggccatggacgcgaggccgaccaaggtgcaggagctgcacgtgtacgagctcaacgagcgcgaccgcgagagccccgcctacctccggctcagcgccaagcagagccagaacgcgctcggcgacctcgtccccttcaccaacaaggtgtacaacggcagcctggacaagcggatcgggatcacggcggggatct

SEQ ID NO: 438033 - DNA, 429 bp, Triticum aestivum
ggtatgaaggtttacatatactcaagtggcagtagagaggcacagaagctactatttggacatacatcttatggtgatctgcggcaatttctgtgtggttttttcgacaccacaaccggaaacaaaagagaagcaaggagttattttgagatctcgcaatcacttggggtggacaatccgtctcaaatcttattcatcacagatgtgttgcaagaagccgttgccgcaaagagtgcaggtttcgaggtaataatctccattcgcccggggaacgcaccgcttcctgcgaatcatggcttccggactatcagttccttcagtgagatctgacaaatgtgcaagaaacgaacatgccagggaatctctattgggtgtgtaacatgacagtgcttcgtggccccccggatcatgttcttgtaatagtagtat

SEQ ID NO: 438034 - DNA, 399 bp, Triticum aestivum
caggcatttgctgagatgtacaatcgtccaattcacatatattcatacagtacagagcctattaacatttttcagggaagttataacacagatgttcctccggttaggttaagttaccatcacggtaaccattataattcagttgttgatcctcgtcggctgacagttggggcaggccttggatttagctcccttagagggaccaacagtgttgacagagaccaagtgaaggctgcaataaaagctcagcaagatcagcagattgagaacgcacttttggctgaagggcgactctactctgatctggagttaactgagaaggaaatagagcggatggtgatggaggcctctcgggcagagtatctgaaccagcagcaagttaacttcagagagtcatca

SEQ ID NO: 438035 - DNA, 428 bp, Triticum aestivum
gcgcccacgcgtgcgccagcctcctcagtcctcacagcatcctctcagtccttagcttgcttccctcgccgccacccaccaaggaaaggaggatgtcttgctgcggcggcaactgcgggtgcggcgccggctgcaagtgcggcaacggctgcggcgggtgcaagatgttccccgacgtggaggccaccgccggcgccgccgccatggtcatgcccaccgcctcccacaaggggagctccggcgggttcgagacggccggggagaccggcggctgcgactgcaccacctgcaagtgcggcaccgcgtgcggctgctcctgctgcagctgcaactgagccggcgcccaggaggccggccggcagaggcgagcacgaggatgaggaggacaagcaagcaagcaccatcaccaccagttcaccaccacccag

SEQ ID NO: 438036 - DNA, 382 bp, Triticum aestivum
gcgcccacgcgtgcgatcgacaacgtgaaggcgaagatccaggacaaggagggcatccccccggaccagcagcgcctcatctttgccggcaagcagcttgaggacggccgcaccctcgctgactacaacatgcagaaggagtccaccctgcacctggtgctccgcctgcgtggtgggatgcagatcttcgtcaagaccctcaccggcaagaccatcacgcttgaggttgagtcttcggacaccatcgacaacgtgaaggcgaagatccaggacaaggagggcatgcccccggaccagcagcgcctcatctttgccggcaagcagcttgaggacggccgcaccctcgctgactacaacatgcagaaggagtccaccctccacc

SEQ ID NO: 438037 - DNA, 202 bp, Triticum aestivum
gctaaacagcagcgcgcgagcaatggcgtccacctcctgcttcctccaccagtccaccgcgcgcctggccgcctcggcacgccctgcgcccgccgtcgggcgcacccagctgttcgtctgcaaggcgcagaagagcgacgaggctgcatctgacgctgccgtcgtcaccagccggcgcgccgcgctgtccctcctcgccggt

SEQ ID NO: 438038 - DNA, 246 bp, Triticum aestivum
cttgtcctccccactcagtcctcggttcccggtccggttcggttccgttcggttcgttagggtttagtagcggggaagaggaaggcatggcggacgtcgagtaccgttgcttcgtgggcggtctcgcctgggccaccgacgaccagtccctacagaacgccttttccaaggacggtgacgtcatcgacttcaagatcatcactgacagggagacgggccgttcccgcgggttcgggttcgtcacct

SEQ ID NO: 438039 - DNA, 377 bp, Triticum aestivum
attggagggtcgattcttgcctcccttagtaccttccaacagatgtggatctcgaagggtgagtatgatgagtcaggtccagcgattgtccaccggaagtgcttctaagttgcgagttgtctgggtcttctgaatctattctggctgttcttttctcaagtccttgccatgtaagctactatgtttgagattgctgggattctgttgactgtattaccggattaatttgttgggtcaaaatatgttcagtgggctgctatatttgaccggtgctgaatcatatgccgcatgttctggttttttttttcatgccaaaaagtttggtgctagcgtggggggagtgtcaaactatctaccagagtctttgtaagattttt

SEQ ID NO: 438040 - DNA, 413 bp, Triticum aestivum
ccgagcaatcctctctccgcgcccacgcagcaagccctccactcccgatggcccgcacgaagcagacggcgaggaagtccaccggcggcaaggcgccgcgcaagcagctggccaccaaggcggctcgcaagtccgccccggccaccggcggcgtgaagaagccgcaccgcttccgccccggcaccgtcgcgctccgggagatccgcaagtaccagaagagcaccgagctgctcatccgcaagctgcccttccagcgcctggtgcgggagatcgcgcaggacttcaagaccgacctccgcttccagagctccgccgtctccgcgctgcaggaggccgccgaggcctacctcgtcgggctcttcgaggacaccaacctctgcgccatccacgccaagcgcgtcaccatcatgccc

SEQ ID NO: 438041 - DNA, 344 bp, Triticum aestivum
cggagatcctgtccaagaacggcatcaagttcggcgaggccgtgtggttcaaggccggcgtccagatcttctccgagggcggcctcgactacctgggcaaccccaacctggtgcacgcgcagagcatcctcgccatctgggcggtgcaggtggtgctcatgggcttcatcgagggctaccgtgttggtggcggccccctcggcgagggcctcgacatcatctacccaggaggcgccttcgacccgcttggcctcgccgacgaccccgacaccgccgccgagctcaaggtgaaggagctcaagaacggccgcctcgccatgttctccatgttcggcttcttcgtg

SEQ ID NO: 438042 - DNA, 322 bp, Triticum aestivum
gcgccctctcgtgcggcaaaccatggcgtccatgaccggcctgtcgcagggcgtgcgtctcccaggcccggccggcaggcgcgccagcaggttcatcgtgagggcgtcgtcggcggaggcggaggccgccggccgccgcgcggtccttggcctcatggccagcggagtcgtcggcagcgcgttcgctcaggtggtgcacgccggcaccgtcgcggccatcaaggttggcccgccgccgccgctcttcggtggactccccggaacggacaactccgacgaggcaagggacttcgacctgcccctgaagaaccggttctacctg

SEQ ID NO: 438043 - DNA, 362 bp, Triticum aestivum
gcgtgccggaggcggccatgtcggggatgctggcggcggtgcggcggttcaacgaggagcccgcggaggccaaggcaccctactacacgcgggacgccgggcggcgcgtgcgctacaactgcaacgccgacctcttgcggacgctgctgggcaagtggcgcgacaccatctacatggacgacgtggaccagctggcgccgggcgaggaggaggaggtcctcccgccggcgtgcaggggcgtcgcaccgaagtacacggcgcagatgcggatgctggggcgcgcgctcttcgagctgctgtcggaggccctgggcgtgcggcgcgggtacctggaggaggaggccggctgcctggagacgctc

SEQ ID NO: 438044 - DNA, 407 bp, Triticum aestivum
tcgctcatcggcgcatcgcatcgcatcccatcgcatggcggctgcggcggtggcctccaacgggggtgcggcgcccgtgcccgggcgcctcgcgtccgtctacagcgaggtgcagacgagccgcatcgcgcacgcgctgcccctcccctccgtcctccgctcccacttcaccctcgccgacgggcccgccagcaccgccgtcggaagccccgatgagatcgccaagctgttcccctgcctgtacggccagccgtcggccgccgtggtgccgtccgccgagccggtcgagacgaagccgctcaagatcggcgtcgtgctctccggtggccaggcgccaagcggccacaatgtgatctgcggcatctttgattacctgcaggagcgtgccaaaggcagcaccatgtatg

SEQ ID NO: 438045 - DNA, 296 bp, Triticum aestivum
ctgcggctccgacggcctgccccacctcatcgtcagcggcgaccagcggcactggggcgagttcatcacccccggcgtgctcttcctctacatcgccggctggatcgggtgggtcggccgcagctacctcatcgccgtcagcggcgagaagaagcccgccatgcgggagatcatcatcgacgtcgagctcgccgccaggatcatccccaggggcttcatctggcccgtcgccgcctaccgcgagctcatcaacggcgacctcgtcgtcgacgacgccgacatcggctactaagtag

SEQ ID NO: 438046 - DNA, 345 bp, Triticum aestivum
gcgtcagcttcatcgccttcaagccaccgggctgcgaggagtccggcaaggcctaaacagctgactcacgacaggccatatataaagtgccattgcaggtgtgacaactctgacattgctttgggcattgcttctccatttatctttcttattagctcctaagaatatgcgtatgaccatgttcatgtaccaacatggctcgagacagcatgctcgtatgtgaatgctatcgggggctatgtatatgcacggacgcattgcacctgacgcatgttgtcgaatacgatgatgcggacatacgcgtcagggtactccttattgacctccttcacctcgttgatcacc

SEQ ID NO: 438047 - DNA, 323 bp, Triticum aestivum
cccacgcgtccgcttaatctgtagcggctagatagaagttcatgggctgctgcggtgggggcgccatgtcgtcgtcgtcgtcgtcgaggccgaggggcggcatccgggaggagacgctgctgcgcgtcccgggcgcggcggtgcacctcgtggccggctccgaggggcccctcgagctcggccgcggcgagctttccgtcgtgaggatcttcaaggacgacgtggcggtgaccaccgtggtgcgcgtcggccgcgacctcggctggccgctggcgagggacgagcccgtggtcaaactcgaccgcctgcactacctcttcacg

SEQ ID NO: 438048 - DNA, 332 bp, Triticum aestivum
atcctttccaccttctcagccacacagagaaagagcgtccaagctccagctagctagccaccaatggccgccgcactgagcctacgcgcgcccttctccgtgcgcgccgtggcgccaccggcgccccgcgtggccctggcgcccgtggtcctcagcctcgccgacgtcaagcaggtgcggggagccaggctccgcgcgcaggcgacgtacaaggtgaagctggtgacgcccgagggcgaggtggagctggaggtcccccacgacgtctacatcctcgaccaggccgaggaggaggggatcgacctgccctactactgccgcgccggttcctg

SEQ ID NO: 438049 - DNA, 305 bp, Triticum aestivum
cgcacccactccaccccatcctcctcctctccggcagcccgaccgacgccgcagccggcgcatcgccgcgatgggccgcaagctcgcgctcctggtgggcatcaactaccccggcaccaaggccgagctcaagggatgccacaacgacgttgaccgcatgcacaagtgcctcgtcgaccggttcggcttcgacgaggagaacatcaccgtcctcctcgaccgcggctcctccgggccgcagcccaccggcgccaacatccgccacgcgttggccaagctcgtcggggacgcgccgccgggggact

SEQ ID NO: 438050 - DNA, 371 bp, Triticum aestivum
caacagcaacgaagaagtactctgcttttggatcgaggactgaagaaaatagataggagaatcgatggctaccttcgcgacgtcgacgccggcggtgatggggtctgctcgcacgggccgggtggccgggcctcggcggtgcgtggtggcgcgggcgtccgcgacgatggcggcgccggcggcggtggccgcggggaggacgcactacgaagtgctcggtgtgggtgccggggcgagcaggggcgagatcaaggcggcgtaccggcgtcttgccagggaggtgcacccggacgctgctggcggcggcggcgacgaggggttcattcggctgcacgcggactacaccacgctcgctgaccccgacgagcgcg

SEQ ID NO: 438051 - DNA, 364 bp, Triticum aestivum
ggttgcaggcccagagctctttagctgaagcaggtgctgtctccggcgtggcgctacccaaagggccaatggatgtggcgaggcatgtcatgagggacgctggcatcaaaggtctgttcaagggcattgtcccaacaatgggccgtgagatccccggcaacgccataatgttcggcgtgtacgaggccgtcaagcagtacatggctggtggtcgggacacttcaggcctcggccagggctctctcatcctcgccgggggcctcgccggaggagccctgtggctcacggtgtacccaaccgacgtcgtgaagagcgtgatccaagtggacgactacaagaagccgaggtactcggggtcgatcga

SEQ ID NO: 438052 - DNA, 401 bp, Triticum aestivum
gcttcctacatatccgtatgatcgcttgaggacatcttcaagcaatcctgtcacagacattgatagtaccaggcgtgagacgtatctatcttcggcagagttcagggagaagtttggcatgacaaaggaggcttttgcaaagctaccaaagtggaagcagaataggctcaagatcgctcttcagctcttttaaaatgttatgctgtcaaatatgcactagttatgtcttgcctgttggtgaaagcaaggacgttgagattggttttcaaaggcaaatctcaaacacgaagatctctctcgcactcgtcgcaatgttaagaagagacatcggtaagtgtaagcctatctgggtcaaggggaccctcggtaggcgtcggaggggctggagcagtgagttttga

SEQ ID NO: 438053 - DNA, 352 bp, Triticum aestivum
cggacgcgtgggcggacgcgtgggagaagaagggtgttgatgagttctctcactgtgttcaccttgtctcatgggagaaggagaatgtgtccagtgaggctcttgaggctgcccgtattgcttgcaacaagtacatgaccaagcatgcaggaaaggatgccttccacctcagggtcagggttcacccgttccatgtgctccgtatcaacaagatgctttcgtgcgctggggctgataggctccagactggtatgaggggtgctttcgggaagccgcagggagtctgtgcccgtgttgccattgggcaggtcctcctttctgtgcggtgcaagcccaacaatgccatccatgc

SEQ ID NO: 438054 - DNA, 278 bp, Triticum aestivum
gcgacgggctccgagtgccgacgtacctctacggcgcggcgcaccgggagggccggaagctggcggccatcaggaggcagctaggctacttcaagccccagagcagcgccgagtggcacgggccgctcccggtcgcggccgacacgacggcgctgccagtcgcgcccgacgccggcccggacgcggagtaagcgtccaagggcgtgctggtgctcggggcgacggactgggtggacaactacaacgtcccggtgcgcaccgacgacgtggaggccgtg

SEQ ID NO: 438055 - DNA, 358 bp, Triticum aestivum
gcctggccgagcagctagcgaagaagttcaagggccaggagtgcaccaacaccaccggagccaacaccgtgcccggcaccgagccgcagttccccgactacccccagttcctcgaccgatgccacctcaacgcgtcggtgaccgaggacgggcaggtgatgccggcatgcgtgcccggccttgtggccgacattgtgctgaccaactacaccaagtcccagtacaaccggtttctcaacgacaccaagtactctggcgtcgggatcgccaacgaaggcgactgggtggtcgtcgttcttagcaccagcaccgactccggcgactacttccctgctcccccaggctccaactgggcttc

SEQ ID NO: 438056 - DNA, 355 bp, Triticum aestivum
ggaagaagtcgttctttctgggggagatgggaaatggagcaaagatgaaactggtggtcaacatgatcatgggaagtatgatgaatgctttttctgagggactctgtttggctgacaaaagtgggttgagcccccagacgcttcttgatgtcctggatctcggtgcaatcgcaaatccgatgttcaagatgaaagggccttcaatgctgcagggcagctacaatccagcatttcccctgaaacatcagcagaaggatatgaggctggctctgtcgttgggagatgaaaatgccgtgtccatgccagtggcagctgctgccaatgaggcattcaagaaagcaagaagcttgggact

SEQ ID NO: 438057 - DNA, 468 bp, Triticum aestivum
gcaactaccatttccaccacaacaaccatatccacagccgcaaccatttccatcacaacaaccatatctgcagctgcaaccatttccgcagccgcaactaccatattcgcagccacaaccatttcgaccacaacaaccatatccacaaccgcaaccacaatattcgcaaccacaacatccaatttcacagcagcagcagcagcaacaacaacaacaacaacaacaagaacaacaaatacttcaacaaattttgcaacaacaactgattccatgcatggatgttgtattgcagcaacacaacatagcgcatggaagatcacaagttttgcaacaaagtacttaccagctgttgcaagaattgtgttgtcagcacctatggcagatccctgagcagtcgcagtgccaggccatccacaatgttgttcatgctattattctgcgtcaacaacaaaaacaacaacaacaacc

SEQ ID NO: 438058 - DNA, 400 bp, Triticum aestivum
gcagcgcgtccttgacgatggccatggacacgttctacatctcccacggctcgcccacgctctccatcgacgactcgctgccagcgcgccacttcctcaagtcgtgggagccggccggtctcgccggcccgcagccgcctcgcgccatcctgatcgtgtccggccactgggagacggacaccccggctgtcaacgtcatccgtggcaccaacgacaccatctacgacttctatggcttccccgaccggatgtacaagctggtgtaccctgcgccgggcgcgccggacgtggccatgaggaccaagaagctcctggaggacgccgggttcgggccggtgagcgaggaccacggtcgcgggctcgaccacggcgcgtgggtgccgctgatgctcatgtaccc

SEQ ID NO: 438059 - DNA, 391 bp, Triticum aestivum
cgaagcgaaaggtaatcccaatccccacagaaatccccatctcaaaaccctagccctcatccccgatcccggcgagcgagatggccaacccgagggtgttcttcgacatgaccgtcggcggcgcgccggccgggcgcatcgtgatggagctgtacaaggacgcggtgccgcggacggtggagaacttccgcgcgctgtgcaccggcgagaagggcgtcggcaagagcggcaagccgctgcactacaagggcagcgccttccaccgcgtgatccccgacttcatgtgccagggcggcgacttcacccggggcaacggcaccggcggcgagtccatctacggcgagaagttcgccgacgagaagttcgttcacaagcacaccaagcccgggat

SEQ ID NO: 438060 - DNA, 399 bp, Triticum aestivum
caagctatatacctacatagtacagccatggcccccaccgtgatggcctcgtcggccacctccgtcgctcctttccaggggctcaagtccaccgccggcctccccgtcagccgccgctccaacggcgctagcctcggcagcgtcagcaacggtggaaggatcaggtgcatgcaggtgtggcccatcgagggcatcaagaagttcgagaccctgtcctacttgccaccgctcagcacggaggccctccttaagcaggtcgactacctgatccgctccaagtgggtgccttgcctcgagttcagcaaggttgggttcatcttccgtgagcacaacgcatcccctgggtactacgatggccggtactggacaatgtggaagctgcctatgttcggatgcacc

SEQ ID NO: 438061 - DNA, 318 bp, Triticum aestivum
cggacgcgtgggaccgccgccgccgccactgcgccgctgccgccgccgagatgggtcgcgtgatccgcgctcagcgtaagggtgcgggctccgtcttcaagtcccacacccaccaccgtaagggccccgcccggttcaggtcgctcgacttcggcgagcgcaacgggtacctcaagggcgtcgtcaccgatgtcatccacgacccggggcgtggtgcgccgctggccaaggtgacctttcgccacccgttcaggtacaagcaccagaaggagctcttcgtcgccgccgagggtatgtacaccggccagttcgtctact

SEQ ID NO: 438062 - DNA, 278 bp, Triticum aestivum
cccacgcgtccgcggacgcgtgggcgcgagagatatttcgtcccggacgcgtccgccccgacgaccgaccgacgaacagcgcaaaagtaggagggagaggatgagcaccatggcgatgtcggcgctgaacccggacgcgcccatgttcatcccggcggcgttcaagaaggtggaggactactcgcccgagtggtgggagctcgtcaagaccaccgcctggttccgcgaccactggttccgccagcaccaactctacgaggacctcgccgacaacgtgg

SEQ ID NO: 438063 - DNA, 367 bp, Triticum aestivum
tcggccctctccgttgttggccaggtggtttgtgcctctcaagatccattggagacatggatgttggggagtacattgtgcccgttccacatgtcaagcaagtgaagctctcaagtgtcggaggaaggctgataatggcatctgatggcatatgggatgcgctatccaatgaggcagcggccaagtcatgccgaggattgcccgcagaactcgctgcaaagcttgtggttaagcaagctctgaaaaaatgtgggctgaaagatgataccacctgtgtggtggttgacatcatcccatctgatcatcatttgacatcgccacagttatccccaaagagaaatcagaacaagctcaagtctcttctttt

SEQ ID NO: 438064 - DNA, 445 bp, Triticum aestivum
tcgcccacgcgtccgcggacgcgtgggattgccgctgaaattgccaagcagctacagaaatttcatcaagtagatataccgggatcaaaagaaccacagttgtggaatgacgtattcaagtttttgaaaaaagcttctgtattgaagtttgaagataatgagaagcagaagaggtatgagatgatctcttttagagaaatacaagatgaagttaaagaacttaaggatctctccgatcttttgcatgctcctgttgtgtttgcacacaatgacttgctatcgggtaatctgatgctgaatgatttggaagagaagctatatttcattgattttgagtatgggtcatatagctaccgtggctttgacatcgcgaatcatttcaatgagtacgcaggctttgagtgtgactacaacttgtacccagataaagatgtacaataccatt

SEQ ID NO: 438065 - DNA, 351 bp, Triticum aestivum
ctcctcctagcaagctatatacctacatagtacagccatggcccccaccgtgatggcctcgtgggccacctccgtcgctcctttccaggggctcaagtgcaccgccggcctccccgtcagccgccgctccaacggcgctagcctcggcagcgtcagcaacggtggaaggatcaggtgcatgcaggtgtggcccatcgagggcattaagaagttcgagaccctgtcctacctgccaccgctcagcacggaggccctcctcaagcaggtcgactacctgatccgctccaagtgggtgccttgcctctagttcagcaaggttgggtttatcttccgtgagcacaacgcatcccc

SEQ ID NO: 438066 - DNA, 444 bp, Triticum aestivum
ctccgtcgccgcggagcgatggcagcccgctccccttacttcgcccccgaggaaggcgcccggtgcatccgcccaggggagtcacctgccgcggcgctccgccggatcctggcgacgccaggcgcccaccaggcgccctgctgcttcgacgcgctcggcgcccgccttgtcgagcgcgcggggttcccgatctgcttcatgggcggtttctgtgtttctgcctcacgacttggattgccagatgttggattaatctcctatggagaaatggttgatcaagggcgtctaatcaccgaagcagtttcggttcccgtgattggtgatggagacaatggttaccgaaattctatgaacatcaagagaactgtaaaaggatatattaatgctgggttggctggaatcatgcttgaagatcaggtggcaccaaaagcatgtggacacact

SEQ ID NO: 438067 - DNA, 377 bp, Triticum aestivum
cccacgcgtccgcccacgcgtccgcccacgcgtccggagaccggcgtcttcgtactcgcctctctcgcgcgcttccgagctttggcctccgtcctcccctcctcccccgatctctccaccagcgcagcgtagcgccggcttccgccgctccgacccgccgccatgagggagtgcatctcgatccacatcggccaggccggtatccaggtcgggaacgcgtgctgggagctctactgcctcgagcatggcattcagcctgatggacagatgcccggtgacaagaccgttgggggaggtgatgatgctttcaacaccttcttcagtgagactggtgctgggaagcatgtcccccgcgcggtctttggtgatcttgagcc

SEQ ID NO: 438068 - DNA, 379 bp, Triticum aestivum
cccacgcgtccggtccgtggcagcggccgtgtgcaggtcgttggccctgacggcaagcgcgtgctggagacccgcattgagggtggcagcctcttcattgttccccgcttccacgtcgtgtccaagatcgctgatgcctctggcatggagtggttctccatcatcaccacccccaacccgatcttcagccaccttgctgggaagacctcggtgtggaaggccatctcgccggaggtgctggaggcgtcgttcaacaccacgccggagatggagaagctcttccggtccaagaggctggactccgagattttcttcgcccccaactagagccattcgtcgcgcatcggccggtcgccttaggcaggaataaataaattta

SEQ ID NO: 438069 - DNA, 391 bp, Triticum aestivum
cccacgcgtccgcaggaaatgagcttgcacagctgtccggccgcggccggggacgcgccgaccgggacggcggaggacctgctcgagcgggcgcggggcctggtgccggcggcgctggacgcggcgcgcgcggcgacggggtttggcgcgcggtggaaggccatcgcggcgaggctcgagagggtgccgccgtgcctgtccgacctgtccagccacccctgcttctccaagaacgcgctctgccgggagctgttgcagtccgttgctgccaccctcgccgaggccgccgagctcggcgtgctctgccgcgagccgcccaaggctggcaagctgcagatgcagagcgacctggacgctctcgccgggaagctggaccttaacctccgggact

SEQ ID NO: 438070 - DNA, 318 bp, Triticum aestivum
tcgggcatatgccagctctgaccgaaatctttggggacgattctgtattacaatttggtggaggaactttaggacatccttggggaaatgcacctggtgcagcagctaatcgagtggctttagaagcctgtgtacaagctcgtaacgaagggcgcgatcttgctcgcgaaggtaatgaaattatccgagcagcttgcaaatggagtcctgaactagccgcagcttgtgaagtatggaaggcgatcaaattcgagttcgagccggtagatactattgataagtagataaaactaaagataaagaagagaaggtataaat

SEQ ID NO: 438071 - DNA, 333 bp, Triticum aestivum
tcgcccacgcgtccgccttcctgcactggtacacgggcgagggcatggacgagatggagttcaccgaggccgagagcaacatgaacgacctggtcgccgagtaccagcagtaccaggacgccaccgccgacgaggaggaggagctgtacgaggacgaggacgacgccgacctccaggagtaggggccagcgaggtctgttccgtggatcttccttgatcgttgcccggggctatttctgatggctccatgttgctactagtagtgtgtgtgtttcgcgcttgctggcccccgtcgtcttcggggtgtcgtggactggttgcttgtgtagtttg

SEQ ID NO: 438072 - DNA, 401 bp, Triticum aestivum
cccacgcgtccgctggaggagtgaagaagcctcaccgttaccgccctggaactgttgctcttcgtgagatccgcaagtaccaaaagagcacggagctgctcatcaggaagcttccattccagaggcttgttagggagattgcccaggacttcaagactgacctccgcttccagagccatgcggtgctggcccttcaggaggctgcagaggcctacctggtcggtctcttcgaggacaccaacctgtgcgccatccatgccaagcgggtgaccatcatgcccaaggacattcagctggctaggaggatccgtggcgagagggcttaaggtgctgtgcttgccttgcctgtgggaatcgctctggtgggcatctgtgtctgcttttgctgctgaacacttatc

SEQ ID NO: 438073 - DNA, 359 bp, Triticum aestivum
gatcggtggccgccctgctcttgctactcgccatcgtcgtgccgtttactcagacccggacgcagagcgcacgggacaaggctgccatggcggaagacgcggggccgttggtgggaggcatcaaggactcgccgatgggccaggagaacgacctcgacgtcatcgcgctcgcccgcttcgccgtctccgagcacaacaacaaggccaatgccctgctggagttcgagaatgtggtgaagctgaagaagcaaactgttgctggcacgatgcactacattacaattcgggtcactgaaggtggggccaagaagctctatgaagctaaggtgtgggagaaaccatgggagaactttaagcag

SEQ ID NO: 438074 - DNA, 325 bp, Triticum aestivum
actggatccgcatgcggaccgacaacaccatcaggtacaacgcgaagcgcaggcactggcgccgcaccaagctcgggttctagatccggcccggccgaccgccgcgtgggggagccatggctcaagagttatctgcattttgttttatggacgtttcagtgtttgttatgcaagctaggaagtgatcccaggatgtctctgttatcaatttcttcgtgttatgaggattgcttgtaccctggtgtactgatgttaccgtgctgtgccaagtaaagaacctttgctataatgtcacccttgtttaaaaaaaaaaaaaaaaataaaa

SEQ ID NO: 438075 - DNA, 373 bp, Triticum aestivum
gttagcaggagcgagtgggagtccggccatggcgccgtcgcagcccaagtcagggctcttcgtgggcatcaacaagggccacgtcgtcaccaagcgcgagctgccgccacgcccgtccgaccgcaaggggaaaggtaccaagagggtgcattttgtcaggaacttgattagggaggttgctggattcgctccctatgagaaacgtatcactgagcttcttaaggttggaaaggacaagcgcgcactcaaggtcgccaagagaaagcttggtactcacaagagagctaagaagaagagagaggagatgtcaagtgtccttaggaagatgaggtctgctggtggtggtggtgctggtgacaagaagaaatagagc

SEQ ID NO: 438076 - DNA, 278 bp, Triticum aestivum
gtgtgtttagaccaagtttccaatggctcctcttggtgacgctgttgcccccgcgtgcgccgccgccccaggcctcgtcgtctctttcggcgagatgttgatcgacttcgtgcctgacgttgccggggtctccctcgccgagtccggcggcttcgtcaaggcgcctggaggcgcgcccgccaacgttggttgcgccatctacaagctcggaggctcctctgccttcatcggaaagtttggcgatgacgagttcggccacatgctggtggagatcctga

SEQ ID NO: 438077 - DNA, 425 bp, Triticum aestivum
agggcatcaagaagttcgagaccctgtcttacttgccacccctctccacggaggccctcctaaagcaggtcgactacctgatccgctccaagtgggtgccctgcctcgagttcagcaaggttggcttcgtcttccgtgagcacaacagctcccccggctactacgacggtcgatactggacaatgtggaagctgcctatgttcgggtgcaccgacgcaacgcaggtgctcaacgaggtggaggaggtcaagaaggagtaccctgacgcctatgtccgtgtcatcggcttcgacaacatgcgccaggtgcagtgcgtcagcttcattgccttcaggccaccaggctgcgaggaatctggcaaggcctaaagtgcaagttgaagtaacacatatacatgccatgttagttcacatttgtcggcagct

SEQ ID NO: 438078 - DNA, 412 bp, Triticum aestivum
cacgcacgcgcacagccagcgagcgcaccggtgcagcaacgatggcgctggtctcctcctcctccgccgccaccgccgtcgcggcgctccccagtaatgggctgggcggcgcccgagaggcccatctggttccccgggagcacccctcccccgtggctcgacggcagccttcccggagacttcggctttgacccctggggtcttggatccgacccggagagcttgcggtggaacgtgcaggcggagctggtgcactgccggtgggcgatgctgggcgcggcgggcatcttcatcccggagctgctgaccaagatcggcatcctcaacacaccgtcgtggtacaccgccggggagcaggagtacttcaccgacaccaccaccctcttcatcgtggagctcatcctcatcggct

SEQ ID NO: 438079 - DNA, 267 bp, Triticum aestivum
  unsure (1)..(267): unsure at all n locations
cggacgcgtgggcgcggctcaagaaccgcaccgggccggccaagttcccctacatgctgctctaccccaacacctccgaccacacgggccaggccgaggggctcacggccaggggcatccccaacagcatctccatctgaggacctccatctctgcttgcttgcttgcttgcaccggatactagctactagctactgtgggtgttctgccggtgcatatgcttgccatgatctcaataataataaggcaataatgcgtgcgtgcncg

SEQ ID NO: 438080 - DNA, 367 bp, Triticum aestivum
gttcggcaaggcgaagaagaacacggacttcgtggcgtacagcggcgaggggttcaaactgatgatcccggccaagtggaaccccagcaaggagcgtgagttccctgggcaggtgctccgctacgaggacaacttcgacgccaccagcaacctctccgttataatcaaccccactaccaagaagaccatcaccgactacggttcccctgaggagttcctctcccaggtcggcttcctcctcggccagcagtcctacggtggcaagaccgactccgagggtgggttcgagtcagacgctgtggcgacggcgaacgtgctggagagctcggcgccggtggtggacggtaagcagtactacagcataacg

SEQ ID NO: 438081 - DNA, 404 bp, Triticum aestivum
cactggttccttatgctgccgtgtaatattaacatgtttgcgtttttgtttgactaactcctgttgtttttcccttttcagaacttcaaaaattccaagagcttgggaaagaagaacctataacatcactgcatgatggaggagaaagcagcagttgcatacacgcaggacacgaaggagctagtgaagcaagctcttcttaccggtttgggtctgaaaagatgggagaaatggaattaacttctctagattccgagatactaaacctggtgaacaatgtagagcatctggagatcaaactagaagaagcaaagcgtattcttgaggttaaagaaacacaaatccgcgaactcgaatctaccataaacgtttcagagacgtgtaacggaggaacagagatcggg

SEQ ID NO: 438082 - DNA, 392 bp, Triticum aestivum
ggacaggtcgcgttggcagctctcgatcctggcagatggtgatggcgttagcggttgtttactcttttggattctgaatggatttccctggaagttttgtaacttttggtgcagaggtagatgctgattggccttccaagtatctgagtttggtattcaatgcctccactttggcattcaggtcattgtagctgcagtccagcttatggtgcaattcagataatttcttagccatttccattgagctagatgcttgtccctgtagcagctgctggaccatctgtttcatttcagcatcaggggcagcaggaccttggttttgctgaggtgcaaacccaggtggtggtggttgctggtagttcccctggaattgctgcttaggaacgaaacct

SEQ ID NO: 438083 - DNA, 479 bp, Triticum aestivum
tagctttccacagaacaacactcttaaacaaaattcacactgtaaaattttgcatcgtttattcttgtttagaggcatttcgaaattaaaatatagaactatcatatacgagacattgacaagtggaatggctattgactgtaactagctacaagcgatatcgtggtacattaaccggttaaatcgtatagttcccgttcccggttaagcgtggtttccaccatcacatcattccatgaatcaattggaccaggtaagcaccaatgcagacaatcattctgaacattgctcttattcttaactccagcaaaaggatttggatgcctgtacggtcccggatgcccgtctggacggagaagagacattccagtcgtgtctaatagcctgatgttggaacctaagccaaaacctttcccaaatttctgaaacacctcaagctcaacatcacgcatcacatcatctacagttttcatatttgc

SEQ ID NO: 438084 - DNA, 428 bp, Triticum aestivum
aaacctgttcaatcaccatttgaaaagtacagaatttcacatttattagagcttggagtttctcatatattgaaaagtttaacagcacaaaacacttacccatatggctaacagcaccgagctcttgaatacaatcccacaccatttccatatttggttaagcaagactgaagtcctctttgacttgacatgctcgatagcatacctggccccagatatggtagtccaaaaggcatatgtgccaatgacgaaagcatacaaatctacatatttttagggaatactgttaataatgtgtaacccgtgccaaagaatgactcagaagatcaaaattaacaaacattaccattgcacttgatgccatgagttattggaagaatgggaatggcactgaattagagcacgtcccagcgaaactggcacaacta

SEQ ID NO: 438085 - DNA, 460 bp, Triticum aestivum
atgaaccacaaatgtcataattcattctaatggtctttcgttttgtaccaataggcaagttcgattcgtgaagcgttttgttgaagcgctttcggagggtcgtgttacagcacgaaatccgcagcatttggatctcttactggtctcaggcagacaaatctctgggacagaaactagcaactcgtcttaacgtgaggccaaacttctgaatgatatcatctctaaagactaagtgaaatcctataaactcaatatgctcctcttacggtttggtttctaagtaatctcgtttattgacaatgaaacgcttaaagaagggtactagttcctgtttgtaatcttcttttcaaaatattaacgattattttctaaggcaaataaataaaaagctatgactaatatagcttagtaaacaagtattactatcatccatttggttctactttaaaaatggattttt

SEQ ID NO: 438086 - DNA, 484 bp, Triticum aestivum
ttgctctagctagattgtccaaaggagcaaatatcaggatagtaaagaatctgagaatttgctgagattgttacgctgttatgaagctaacgtcgaaggttgtgtggggtagaaatattggtccgagacagaaatcgctttcattcatttaaggacggttcttgctcatgccgtgactactggtaaaaggttgtggatagatgtacaccacacatatatcattttgtggactaatgcatccactagtgacctcaccaatggaagcttcactcccaacacaaactttcagatctctctactctctacaacttgaggtcttcatttgcgaggtttgtggtttacattgccttgggactgtgggtaactttgatactttgtattcttcttggcctagaacgtaatatacgaaatttgtttggactgttatttgaaatttctaacagattctaccaaactttgaccagaaatatcaagcacgtcttcg

SEQ ID NO: 438087 - DNA, 406 bp, Triticum aestivum
aatactagaagaaaggcaccgacacctaacaaaattaagtgaatacccaaaatggttgtcattttatttttatctttccatacatagccgaaagggggaaaatataattcaagagtgtcgggtcccagaagtgcatgataaataccgccaaagcccaaaactgcagaagaaattaagtgaagtactccagatacaaagtacggaaaggtgtctataacttcttccccaggacctaccccccatcctaaagtggctaggtggggaagtaaaattaatccttggtcatacatgggcttttcaggtacaaaatgggccacttcaaataagttcattgctccggcccagaatacgattaatccggcatgggctacatgagcttccaaaagtttaccagataaattgataa

SEQ ID NO: 438088 - DNA, 463 bp, Triticum aestivum
agacaatcgctacttacaaggagaagcttctagcagcgaacccatttttaactgtttttcctgtctttctctaacctgaaaagaagacatcaatattatactcagctggaatttaaacgttttggctggaacgataaaccggccaaagaactcacctggcaaaacaattactgaccctacgaagacgccataaacgtagcatactgaaaataccatatccctgaatactctcatgaagcaagctcccaaaaatttcgtaaggaaatgtggaaaccacgtcgaaaatcagccaagtcgacgcatatctccaagctattctctttggatcatcgacaagaagataagttaccttgtccagaaggcaacaaagaatgtcaagactatatcaacagcgaaaaacccgttgacaatgttatcgagaatactgagaggtggtcttggcttttgcagaaacccaaattca

SEQ ID NO: 438089 - DNA, 443 bp, Triticum aestivum
agcctataataatgcgacagaagctactgagagtctgagaccacaaaagttgaacatttttgttacctaattataatatgctaagtagagggcactttactttgggtgtaaatgtaacagaaacccctgaaacgaactcaagcgcctcgtatgatgtgtggtttggatccgcatagacctctgtattgagagaaagttgattacagataattagatcatctcataaaaggaactactcaccaggcttttttagtaatcaagagaaaacatacctcctttaaacttagtctgttccacaaaagtattagcctgcatacatagatggtcataacgtgagaagcagcagcttaaaactgcttacgcttacaaaaattgcgtattcaaaatgttgtttacctgatcgatgctttccggtccgatcagaacaagagcaacaccagatg

SEQ ID NO: 438090 - DNA, 465 bp, Triticum aestivum
agtatataacataggtgcgaagttaaaaaatgcaggtgggactattgaacgtggatggattctacgattcactattgacgtttataggggaggcagtggacgaaggcttcgtctcctccaccgctcgccgtatcattgtctcggctccaaacgctcctcaattacttcaacttcttgaggtttttttatttgcctttcattactttttgattattctatttaatactatagactaaatgaacgaatcccaaaataggataattaaattaattgaattcatttgtaatcgcaggagtatgttccaaaacacgacgattttgtattcaaaatggtgtgggacaataccacggatgctttcactttggaaggcgactcgttttagatataggtcatttgtatcttagtctacttttattttattattaaaaatctcggtttttattggccatttcaaatttttgattt

SEQ ID NO: 438091 - DNA, 381 bp, Triticum aestivum
tttttcttcagtacaggactaatgtttgccaagtttcaacaatacctttcccggggccaacattggggatttcaaatttgcgtgggtttgccttaagaagagctctaacatgagcatcaaccaaatcagtgacatcaatgtggatcccgtacgcaagttccatcaccggttttgcagtctggtcctttgatctggggaaaaagaaaagttaaatgaatatcaatgattagagaagcttgaaagcttatagccatgtgcatgtaacaaggagactaatttaaacactgctttaataaaggaaactcaagaattacgtggctcaattatgtattttgctcagctggaaactataactacttatcagctcttttacacgcatgt

SEQ ID NO: 438092 - DNA, 308 bp, Triticum aestivum
caacaacaacaactagttctaccgcaacaacaaataccatttgttcatccatctatcttgcagcagctaaacccatgcaaggtattcctccagcagcaatgcagccctgtggcaatgccacaaagtcttgctaggtcgcaaatgttgcagcagagcagttgccatgtgatgcaacaacaatgttgccagcagttgccgcaaatcccccagcaatcccgctatgaggcaatccgtgctatcatctactccatcatcctgcaagaacaacaacaggttcagggttccatccaaactcctcagcagcaacc

SEQ ID NO: 438093 - DNA, 354 bp, Triticum aestivum
tatcgccctctttataatgcgatgagaactgagagtgctttgaagtttgggtggtttttcctattttacatgattcacataatcttctgcgtgtggtcagctgcgtctcccccattccctttcaaaggaaattctttgactgggattttgcctgccattgatgtcataaccaagagccttattgttgggatattttactttgttggatttggattgttctgccttgaatcactgctgagcataggtgtcattcagcaagtgtacatgtacttccgtggaagtggaaaatcccaggagttgaaacaacaggcagcacgtggtgccctgagctctgcgttctgatgaagaaaacca

SEQ ID NO: 438094 - DNA, 330 bp, Triticum aestivum
cggacgcgtgggcggacgcgtgggcggacgcgtgggcgacggcaagctctacgtctgcaaggcgcaagccggagacaagaggtggttcaagggcgccaagaagttcgtcgagaacgccgcaggatccttcagcgtcgcataaatatacacgaccgaccggcgagtttaatggaaatttcctcagggatgcaccatgtagagaccgatcgagggcatgcatgtgtgtttctttgatttgtacatgaggatggatgaactaagaggtcgatttccctcaaggattcatgtgtgcacaatgattaagaaatcttagtaataatgtttcaaaaa

SEQ ID NO: 438095 - DNA, 292 bp, Triticum aestivum
acgtcaccggcgagggccccttcgagaacctgtgcgcgcacctcagcgaccccttcggcaacaacctgctcaccgtcatctccggcgccgccgagagggtgcccagcctgtgagctggccgttaattgcccgtccgccgccgtcggctgttgatgatcagctgcatgcgcgcgatgcagcatcatgtgctgtgtgaattttaccggggaaaagtatgagagtacgaatgtgccgtacgtgtaaattatcaaggggcagaagaaacatgaccgttctgatttctgatgggaaa

SEQ ID NO: 438096 - DNA, 348 bp, Triticum aestivum
cccacgcgtccgcgcaaagttcgaggagctcaagctcaaggagatcaagaacgggcggctggcgatgctggcgttcgtggggttctgcgtgcagcagtcggcgtaccccggcaccggcccgctggagaacctggccacgcacctcgcggacccgtggcacaacaacatcggcgacatcgccatccccagaaatatctacggcccttgagcggagccgaccgggctgaggggagatcgaggagccggagcacatggttttcattcatgtttctgcgtcgatcgactggttgatcaacttgccacgctggctctgcgcgcgtacgtccgtgcgtgcaggaactgtacaac

SEQ ID NO: 438097 - DNA, 111 bp, Triticum aestivum
gttgatcatcactgacagggagacgggccgatgccgcgggtccgggttagtcaccttcgcgtcggacgaggcgatgcgccaggctatcgaggccatgaacggccaggacct

SEQ ID NO: 438098 - DNA, 250 bp, Triticum aestivum
tcggttatgatgactttgctgcggttataattgatcaaaaaggcaatccaaaaggaactcgagtttttggcgcgattgccgtggaattgagaggattgaattttaccaatgtagtttcattagctcctgaagtattataaatactagtgggcgaaattgagatcaaagaattaatttagtagattgtgttttacgtatatgttttaaaatccaaaatgaaaaaaaaaaaaagaacacatgttgattatag

SEQ ID NO: 438099 - DNA, 263 bp, Triticum aestivum
taacaccctcatcaggcctgatggcaagaagaaggcgtacgtgaagctgacaccagactacgatgctcttgacgtggccaacaagatcggcatcatataagccagagggagggtcctgcagtaggcgcttgtgtcgtggtttcttatgttatcggaattttgtagttgttacttagcaaagggccttagtggctccattgcctaccatatcgctgcacactttcatgaatttgatgcaatcgaagtgacttgtgttgatgcta

SEQ ID NO: 438100 - DNA, 318 bp, Triticum aestivum
catacgtgggcctggtgccccatcgcaggagacagccatgccggcagcaggaaagtccatcaatgtccgcgaattcatcgacgagcgcgcggtcagcccgttccagtggctggtcgggtttctgacgttcgtcgacatctcgctggacggatgggataccgtcatcatcggcttcgtcgtgcccgagctcatcaaggaatggggcgttaccaagagcgcgctggcgccggtactcagcgccgcgctgttcggcctcgcggccggtgcgctgctcggtgggccgatcgccgaccggttcggacgcaagcgcgtgctggt

SEQ ID NO: 438101 - DNA, 339 bp, Triticum aestivum
cgataattaatgcttcaactatttcgactccatttgcttcgttttcattcagcgcaactgcttcttttgaagtccaaactccatcaaggatagaggtccaattcaaagaggggagcttccagcctcctgagatatcatcatcggtaaatctacctgaacagatcgccatattcgggcagaagttcagcctggggactgttaaggagctgctggagcctttgcagcgagcatttgctagcattgcagggtccatctctgggcagccacccctcaaggtaccgattcctggggacaacaaggccaaggtcgtggcttttgacaacctacctggacaaagac

SEQ ID NO: 438102 - DNA, 344 bp, Triticum aestivum
cggacgcgtggtcccacgcgtccgcgaacacacaccatatcaatcaagaaaaccccgagaggatcatggccggcgtgaacaccagtgtggtcggcctcaagcccgccgcggcggtgccgcagtccgcctcgtcggcggaggcaaagcgcgtgcaggtcgccccggtcaaggaccggcggttggcgcttctcggactggcggtggtcttcgccgtcacggccgcctgcgccgggtcggccagggcaagcgtctttgacgagtaccttgagaagcgcaagctcaacacggagctgtccgacaagaagagggcggcgaccagcggggccaacttagcgcgcgcctac

SEQ ID NO: 438103 - DNA, 398 bp, Triticum aestivum
cccacgcgtccgctcctccccactcagtcctcggttcccggtccggtcccgttccgttcgttagggtttagtagtagcggggaagaggaaggaatggcggacgtcgagtaccgctgcttcgtcggcggcctcgcctgggccaccgacgaccagtccctccagaacgccttctccaagtacggcgacgtcatcgactccaagatcatcactgacagggagacgggccgatcccgcgggttcgggttcgtcaccttcgcgtcggacgaggcgatgcgccaggcgatcgaggccatgaacggccaggacctggacggccgcaacatcaccgtcaacgaggcgcagtcccgtcgctccggcggaggaggcggcggcggcttcggcggcggcggtggcggcta

SEQ ID NO: 438104 - DNA, 364 bp, Triticum aestivum
ggctgcatcactcatgcaggagctgagtagggagagatctgataaacaacagttacctatgctgaaagcagagattgagggccttcaactggaacttacccatgcaagttgtattgtttgcaggaatgcatgtgaattggagcagaaggggaatttcgagttggtggaacaaaggaaagcaatggagaagagtatgatttcgatggcacaagaaattcaacaaatgcgggccgaattagctaattttgatggcagaccatggggcacaggtggagcacatgggatgaagctgggcagtcctgaagcgaccttccctactcaatatggagataaatacaatatacatgcggggagtttctgagaa

SEQ ID NO: 438105 - DNA, 401 bp, Triticum aestivum
cccacgcgttcgctcgcggtatctttttcactcaggactgggtatccatgccaggtgttataccggtagcttcaggtggtattcatgtttggcatatgccagctctgaccgaaatctttggggacgattctgtattacaatttggtggaggaactttaggacatccttggggaaatgcacctggtgcagcagctaatcgagtggctttagaagcctgtgtacaagctcgtaacgaagggcgcgatcttgctcgcgaaggtaatgaaattatccgagcagcttgcaaatggagtcctgaactagccgcagcttgtgaagtatggaaggcgatcaaattcgagttcgagccggtagatactattgataagtagataaaactaaagataaagaagagaaggtat

SEQ ID NO: 438106 - DNA, 364 bp, Triticum aestivum
gtcctcatgtacgccaagcgtgccttcgtccactggtacgtcggtgagggcatggaggagggagagttctctgaggcccgtgaggatcttgctgccctggagaaagactatgaagaagttggtgctgagttcgacgagggtgaggacggtgacaagggcgacgagtactacagcctgcctcctggtgctttcgcaaggcgtgctgctgctatcccatgatctgcccgagtggctttatctgttatctgtctgtttgaatctttgctttgtggtgtttgttttacaacctgttgtgttggaagacccttgtatctttgaacctgttatgcaccttggttaatatgcatgctatctggttatctaa

SEQ ID NO: 438107 - DNA, 334 bp, Triticum aestivum
ctcaccctcccttctccccctcccgaagcagcgatggcccccaaggcggagaagaagccggcggcgaagaagcctgcggaggaggagcccgcggcggagaaggccgagaaggcccctgctgggaagaagccgagggccgagaagcgggttccggcgggcaagaccgcctccaaggagggcggcgagaagaggggcaggaagaagggcaagaagagcgtcgagacctacaagatctacatcttcaaggtgctgaagcaggtgcaccctgacatcggcatctcctccaaggccatgtgcatcatgaactccttcatcaacgacatcttcgagaagc

SEQ ID NO: 438108 - DNA, 343 bp, Triticum aestivum
  unsure (1)..(343): unsure at all n locations
attaagtcctccctgngcaaaaagcaaacccccgcatggctgtgaggctagcacactggaaggagccactcgacgaccctgacaataacaacatgaggccccaacaggtatacacgggcgtttggctgaggcattacacccctgtgagggaacgagtgacatctaaccagggcgaggaacttggtcagatcgctacatcgaacgcgacgaggcgtcgccgtgccggttcttccctgtagaacaacagcacgcatggatgcatggtgcagcatccagcccacacaataaaccaagctgctgtccttgccactcacaacgcctcagcggctcgagtatgggggct

SEQ ID NO: 438109 - DNA, 365 bp, Triticum aestivum
cctacgcgttctgcgacgacctgctacaatcactgggcaaagatactgggcggcaagacgccagacgccgtcaccgtgaaccccaggaacgagccgcaagaccgcgcgcctgccgacgccgccgtgccgcgctccgtgaagtcggtcgggcccatcgaggactactggtttgtccccgccggcgtcgacatggcgggctactccttccacgtcaccgagccgatgctcacgaggctgcagcagcaggagccagcggctgccggcggcgccttcgagctcatctcggcgctcctgtggcagacggtggcgaagatcagggccgccaaggaggtgaagacggtgacggtggtgaggaacgacatgtc

SEQ ID NO: 438110 - DNA, 377 bp, Triticum aestivum
tttagattttggtgcctctgctgaagaaggcgatcgtgatgaagagggtgaagcacttcaagagggcgcacagcgaccgctacatcggcctcaagcaaagctggcgtaggccaaagggtatcgactcccgtgtcaggcggaagttcaagggatgcaccttgatgcccaacatcgggtacggttcagacaagaagacaaggcactacctgcccaacaagttcaagaagttcgttgtccacaatgtctctgagctggagctgctcatgatgcacaacaggacctactgtgccgagatcgcacacaacgtgtccacccagaagcgcaaggcgatcgtggagcgtgctgcgcagctcgacgtcgtggtcaccaacaagctt

SEQ ID NO: 438111 - DNA, 316 bp, Triticum aestivum
tgccgcgtcgttgccgcacaatctccggcgagatcccctcccccgttcggcagccatggcctccaccttcagcggcgacgagaccgcccccttcttcggcttcctcggcgccgccgccgccctcgtcttctcctgcatgggggcggcgtacgggacggcgaagagcggggtgggggtggcgtcgatgggggtgatgcggccggagctggtgatgaagtccatcgtgcccgtggtcatggcgggggtgctcgggatctacggcctcatcatcgccgtcatcatctccaccgggatcaaccccaaggccaagccctac

SEQ ID NO: 438112 - DNA, 382 bp, Triticum aestivum
tctgccgcatgatgacaacaagacggaccacctcaatcttggcctgatgaacctggatcttaagatgaatgatctcaagatgaacgaggctgccatgaagtaccctttccgcaacatggcctattacatgaatccgatgtaccccaagggaaacaacggtaatgtcaattcgttcaagatgaatgttggggtcaacaaatatcccaataatcagaatgggaaggaaacaaacggcaaacacaatggtggtaacaacaacaatggaggcaacagcaacaacaactctgttgacaagcgcttcaaaacattgccaacaagcgagatgctaccgaggaatgaagttcttggtggatacatctttgtctgcaacaatgataccatg

SEQ ID NO: 438113 - DNA, 425 bp, Triticum aestivum
tcgttctaccctagcagagaaaaaaaaagcagaggagaggaagcggaggcgacgatgtcggcgatgactgcggcggtgcccttctggcgcgcggcggggatgacctacatcggctactccaacgtctgcgcggcgttggtgcggagctgcctcaaggagcccttcaagaccgaggtctcctcccgcgagaaggtccacttctccctctccaagtggaccgacgagaagcagcagaagcccactgtgcgcacagatgatgaatgaagatcaggtgccatggtgatgttttgagaagttgttggtttatggtcaggggctcagggcttaagaacttgaaaataaattcttgtggtgacaatggatctattccgatactatgttgttatatttactaattgctccttttctacttgatgaaccatgtg

SEQ ID NO: 438114 - DNA, 228 bp, Triticum aestivum
tcgcggacgcgtgggcggacgcgtgggacaagctcgtaacgaagggcgcgatcttgctcgcgaaggtaatgaaattatccgagcagcttgcaaatggagtcctgaactagccgcagcttgtgaagtatggaaggcgatcaaattcgagttcgagccggtagatactattgataagtagataaaactaaagataaagaagagaaggtataaataaaaaagaaacgaaat

SEQ ID NO: 438115 - DNA, 345 bp, Triticum aestivum
ggcaaattacagtgtctgaactgaaatacatggaggagatccagaccatgcaagttgaaacaactgaaaagaatgaagcacttacaagcaagatgcaggagcatgcaaacttagtccatgaaaaagatcagttggagcaacaattgctggaagttaggaaggaactggaggctgcttaccgtaccatagctaaccaggaagagcaagcttcagtgagggagataaagtgggatgcgtttaagacgtattcagcggatcaactagaagctgcacaaaaacacgctgcagagctggaagtacaagtatcagctcttaatcagcagctgcaagaagctgagatccatt

SEQ ID NO: 438116 - DNA, 344 bp, Triticum aestivum
ttgcggacgcgtgggtttgacttcaggcctgggatgatcagcatcaaccttgacttgaagaagggtggcaacaggttcatcaagacggctgcttatggccactttggccgtgaggatgctgacttcacctgggaggttgtgaagcccctcaagtttgacaaggcctctgcttgagaggtgggtatgaaggagtctaatcattcctgctgctgccgctggtggttgtatcttggataattgaattccttctctttagaaggaagcagggtttcaacatcgccgtggacacgctgaattggcgtctagtgattggtattttggtatggaatacaaaaatatgtgct

SEQ ID NO: 438117 - DNA, 220 bp, Triticum aestivum
aggcagggtgggtgctcacctgccacgcctacctcaagtccgacatcgttatcgagacccacaaggaggaggagctcaccgcataagctgccatacctatctctctttgcaagaggatcgagctgatatcatattatctcctacagtatcatgcatgcatggacatcgccagatcgatacaccgattgttttgtgctcgaatgaattgctcgatgcatgg

SEQ ID NO: 438118 - DNA, 403 bp, Triticum aestivum
tttttacgcgtccgcccacgcgtccgctcgcaatgcaagtggtggcatgcccacaggttgaatatgtctcaatggaggacataccagagagtgttgtcagcaaggagaaggagattgagatgcagagggaggacctgcagtcgaaacccgaaaacatcagggagaagatcgtggaagggcggatatcaaagaggcttggagtgatagccctcctggagcagcccttcatcaaggatgacagcaagacggtgaaggatctcgttaaggagacgatcgccggcctgggggagaacatcaaggtacggaggtttgtcaggtataccctcggcgagaactgataaatgagacagtgacctccgttacaatccatggcatcaggagtcgggcacattttgattcatcg

SEQ ID NO: 438119 - DNA, 416 bp, Triticum aestivum
tctgttgaagtacctcggtggctccggcgaccccgcctaccccggcgggcccatcttcaacccgctcgggttcggcaccaagagcgagaaggagatgaaggagctcaagctcaaggagatcaagaacggccgcctcgccatgctcgccttcctcggcatgtccctgcaggccatcttcaccggcgtcgggcccttccagaacctcctcgaccacctctccgaccccgtcaacaacaacatcctcaccagcctcaagttccactaggcgaaatcgatccgatccgatccgagcatcgtcgtcctgtgcatggtacccgtcgtcgtgggaaacgtgagcgtgcgagaggtatacatgcgagggtgggtgtaaaatgtaaatttgtacgcgtgctgcgtgcatgcttgtaatatttata

SEQ ID NO: 438120 - DNA, 381 bp, Triticum aestivum
ttttctttccacgcgtccgccggggtgaaggagcagctgcagaagctgtgcagcatctacgcgctccacctgcttcacaagcacctgggcgacttcctgtcgacggggtgcgtcacagccaggcagggcgtgctggccaatgagctgctcggcaagctgtatgcgcaggtgcggcctaatgcggtggcgctggtggacgcgtttgactacacggaccactacctggggtcggtgctggggcggtacgacggggacgtgtacccggcgctgtacgaggaggcgtggaaggacccgctgaacgagacggtggttcccgacgggtaccaggagcacctccggccgctgctcaagcagcagctcaggctgtccagactatgatac

SEQ ID NO: 438121 - DNA, 413 bp, Triticum aestivum
tctactcgtccggccacgcgtccgaaaaaatctctctcggctccccgctccgagtcgcgtcgcgtgaggagaaaggaagggaagccggaaagggttctcgccgacgcggaaggaggagatggccgggaagggaggcaagggcctgctcgcggccaagacgacggccgccaagaccgccgagaaggacaaggggaagaaggcccctatctcccgctcgtcccgcgcggggctccagttccctgtgggccgtatccatcgtcagctgaagcaaaggactcaggccaatggccgtgttggtgctactgcggcggtctactctgctgctatcctggagtacctgacagctgaggtcctggagctggctggcaacgccagcaaggatctcaaggtgaagcgtatcacccctcgtcacc

SEQ ID NO: 438122 - DNA, 460 bp, Triticum aestivum
ccatttctcaagccaatcaagctctctgctccttcccagctacatttccagcaagcaagccgaagcactagatcctcgatggctcgcgtggcactgctcgccgtgttcaccgtgctcgccgcactggcagtggcggagatggcgtctggggcggtgacctgcagcgacgtgacgtccgccatcgcgccgtgcatgtcctacgcaacggggcaagcgtcgtcaccctcggcggggtgctgcagcggggtgaggaccctgaacggcaaggcgtccacctcggccgaccggcaggcggcgtgccgctgcctcaagaacctggcggggtcgttcaatggcatcagcatgggtaacgccgccaacatccccggcaagtgcggcgtcttcgtctttttccccatcaacaacagcgtcaactgcaacaacctttattaagttatctacgagcatcatcatcacacca

SEQ ID NO: 438123 - DNA, 474 bp, Triticum aestivum
tcatcacacaagccaatcaagctctctgctccttcccagctacatttccagcaagcaagccgaagcactagatcctcgatggctcgcgtggcactgctcgccgtgttcaccgtgctcgccgcactggcagtggcggagatggcgtctggggcggtgacctgcagcgacgtgacgtccgccatcgcgccgtgcatgtcctacgcaacggggcaagcgtcgtcaccctcggcggggtgctgcagcggggtgaggaccctgaacggcaaggcgtccacctcggccgaccggcaggcggcgtgccgctgcctcaagaacctggcggggtcgttcaatggcatcagcatgggtaacgccgccaacatccccggcaagtgcggcgtctccgtctctttccccatcaacaacagcgtcaactgcaacaaccttcattaagttatctacgagcatcatcatcacaccaggctagctagccca

SEQ ID NO: 438124 - DNA, 376 bp, Triticum aestivum
tacataacacacacaatcatttggaacggaccaatgggtgtttttgaatttgacacgtttgcattaggaactgagtctattgcaaagaagttggccgagcttagcaaaaagggtgtgacaactatcattggaggcggagactccgttgcggctgttgagaaggtgggagtggctgatgttatgagccacatctcaactggtggtggcgccagcttggagttgttggaaggaaaggagcttcctggagtcgttgcacttgatgaaggtgtcatgacgaggtcggtgaccgtatgaggctaagcttcatttgttgcatcttaattcctttcatgtaccgttccaaacctgccatgttgtcctccctttttgctcgtct

SEQ ID NO: 438125 - DNA, 422 bp, Triticum aestivum
ccttcttgtccgcaaaaggctttcagttgaaactactcctaatcaggaccctcttgtgaccaaagggtcaaacctgcatcctttgttgggaattgatgtctgggagcatgcgtactacctgcagtacaagaacgtgaggccggactacctgaccaacatctggaaggtggtgaactggaaatatgccggagaagagtatgagaaagtgcttgcatgatttgtccgagtagacagacagtacttcgctcgctcttgagttccccgctgttggatctttgtatatgcagtaataaaagtgggcactattccactgtcgggaccttctgtacatcgcatagaggcggggtaatgtccaacgcatagaacagtgcctgtccattttggtactttttactgtgcctgcgtgactaataaactcattc

SEQ ID NO: 438126 - DNA, 429 bp, Triticum aestivum
ccctcgtgtccgcaaaaggctttcagttgaaactactcctaatcaggaccctcttgtgaccaaagggtcaaacctgcatcctttgttgggaattgatgtctgggagcatgcgtactacctgcagtacaagaacgtgaggccggactacctgaccaacatctggaaggtggtgaactggaaatatgccggagaagagtatgagaaagtgcttgcatgatttgtccgagtagacagacagtacttcgctcgctcttgagttccccgctgttggatctttgtatatgcagtaataaaagtgggcactattccactgtcgggaccttctgtacatcgcatagaggcggggtaatgtccaacgcatagaacagtgcctgtccattttggtactttttactgtgcctgcgtgactaataaactcattcgctagtg

SEQ ID NO: 438127 - DNA, 480 bp, Triticum aestivum
tgcctacgcgtccggtgaagctggtgccgttcaacccggcgttcgaggacgcgtcggtgctgtggacggagagcaaggacgtgggcaagggtttccgctgcatccgcatggtcaacaacacccgcctcaacttcgacgccctcaacggcgacaaggaccacggcggcgtgcacgacggcaccaccgtcgtgctctgggagtggtgcaagggggacaaccagtgctggaagatctggccgtgggccgaggcgcacgccgccgtcgagtccggcgccaccatgggcaacaacgcccacgccatgggcggcgggccccccgtgcacgccgtgcgcatcttctgcaaggccggcgaggactacagcctcaccgcccgcaacggcaccgtctgcctcgcccccaccaaccccagggacgactaccagcactggatcaaggacatgaggcacagcaacaagatcagggacgaggaagggtaccctg

SEQ ID NO: 438128 - DNA, 366 bp, Triticum aestivum
ttgcgcccggttgagtagaacgcggcgaagttcaccggggaacccgccgaccttaaggagcccaccggcaacatgttccagcaggccggcgggcaggtgatgggtgccgctacgggcgccagggacgccgtcatgaacacgctcgggatgggaggagacaaagccgacgtcggcagcgccaaatgaagaccgcaaagcgcacaggagggctagcccacttttcgtttcgttattccctccgtattcctttatttgcgttccaagaaactgatctttacgcatgcgtgggtgtaactttgtccggtgtatgcaaagatgctttgaatctacagacttgctaattctcatctgatgatatttatcttc

SEQ ID NO: 438129 - DNA, 401 bp, Triticum aestivum
  unsure (1)..(401): unsure at all n locations
ctttgatgcactccatggcgacaaggaccatggcggtgtgcgcgatggaaccaccctcattctgtgggagtggactgagggcgacaaccagcgctggaagatcgttgcctggtgaatgatgcacatgctacagtttgttggttcaaacagcgcgcgatcttaataataagcaagtactgtatgtttctggaataaaaaggatggcgccaatgtgagcggtatgtctgttttgtttggggagttatgtatatggatgaacttgtaatgatggatttatttggcctagattatgtgtgatggatgcatgaacaaaccagtgcttattattatgcatgcatatacatgccgtgtgacatgtttgtgaactacactgtataatagaattggtttatcccatcnna

SEQ ID NO: 438130 - DNA, 371 bp, Triticum aestivum
cgctctatcgtgtacgagtgcctcatcaacccgctgatgcgcggcctgccgaccaaccagacggtggtggacgaaagcctggagaagctgaagaaggtgctggaggtctacgaggcgcgcctgtcccagcacgagtacctcgccggggacttcgtcagcttcgccgacctcaaccacttcccctacaccttctacttcatggccacgcctcacgcggcgctcttcgactcgtacccgcacgtcaaggcttggtgggagaggctcatggcgaggccggccgtcaagaagctcgccgcacaaatggttcccaagaagccgtgatttgctaggcgggatttcgcatcgtgggatccgattccgatcactgatct

SEQ ID NO: 438131 - DNA, 343 bp, Triticum aestivum
ttgttgattggtcctgatgggaagacactgagcagcaatattgcagacataatcaatgagcactagtgtaggaagatcactaagctcaaagtaactgacaagcttctgacacatcttgtcgccatggggaatggcgagccaaggcatgcttgaaaaactgttattgaatgattcctcatcactgtccaaggatacagctacaacttcaaacttctcccccactagtgctgattggtcctgatgggaagacactgagcagcaatattgcagacataatcaatgagcatggtttggatgcatgggaggggttccccttcaatgcagagaagctggaaattctagc

SEQ ID NO: 438132 - DNA, 416 bp, Triticum aestivum
ttttacgcgtgggcggacgcgtgggcggctacagaaatttcccccaaatcttcctcccctcctcctcgtcgtcttcttcttcttcttgcccggggaccttccagaagcttctcgaaccgaccgacaggccgtgccgcgggcgggtgggcgagatccggttgcggcggccatggtgaaggagaccgcctactacgaaaccctgggggtcagcgtcgacgcctccccctccgacatcaagaaggcctactacgtccaggccaggctggtgcacccggacaagaatcccggcaaccccgacgcggcgcgcaaattccaggatctcggagaggcctaccaagtcctaagcgatccagcgaagaaggaggcttatgataagcatggaaaggagggtctttcccaggataacatggttgatc

SEQ ID NO: 438133 - DNA, 410 bp, Triticum aestivum
tttcacgcgtccgcccacgcgtccgcccacgcgtccggtggagctcatcctcatcggctgggccgagggccgccggtgggcagacatcatcaagcccggctgcgtcaacaccgaccccatctttcccaacaacaagctcaccggcaccgacgtcgggtaccccggtggtctgtggtttgacccgctcggctacggcaccggctcgcccgagaagctcaaggagctccgcaccaaggagatcaagaatggccgcctcgccatgctcgccgtcatgggcgcgtggtttcaggccgagtacaccggcaccggccccatcgacaatctcttcgctcacctcgccgaccccggccacgccaccatcttccgggccttcgcccccaagtaaggaacacgttgggagttagcaacta

SEQ ID NO: 438134 - DNA, 413 bp, Triticum aestivum
ttttccacgcgtccgcccacgcgtccgcccacgcgtccgcccacgcgtccgcggacgcgtgggcgcggagatgcacgccatcctgcacgaggaccccacgctggcgccctcgctgctccggatgcactaccacgactgcttcgtccagggctgcgacggctccatcctgctcaggtcccgtcggggcacggcggagcgggacgccacccctaaccggagcatgcgcggctacgacgccatcgagcggatcaaggccaggctcgagacgctctgcccgctcaccgtctcctgcgccgacatcatcgccatagccgccagggacgccgtctacctgagcaaggggccgtggtacggcgtggagaccgggcggcgggacggcaacgtgacggtggccgagtacgctgagaacgacc

SEQ ID NO: 438135 - DNA, 388 bp, Triticum aestivum
tttttccgcgacttccacgccgcgcaccccgccgacgccttctccacctccttcggcggcggcgccgccctcgcctgcgtcgccgcgcagccccgctccctcgccgccggcgggtaccagcggtaattaacgatcggcacggcctctcatgaccctcccgaatcgcccccggcaaccgtgtccggacgactaaggatttctgtgcgcgcatgcatgcaggatgttctgcgggctggacgacatctactgcgtgttcatgggcacgctggacaacctgagcagtctgatgcggcagtacggcctcaccggccgctccaccaacgaggcgctgctggtgatcgaggcctaccgcacgctgcgcgaccggggcccctacccggcggaccag

SEQ ID NO: 438136 - DNA, 398 bp, Triticum aestivum
tggcgctcgggttcagctgggcgcacctcatcggcgacgtggccacggcgacgacctgcttcaatcactgggcaaagatactgggcggcaagacgccagacgccgtcaccgtgaaccccaggaacgagccgcaagaccgcgcgcctgccgacgccgccgtgccgcgctccgtgaagtcggtcgggcccatcgaggactactggtttgtccccgccggcgtcgacatggcgggctactccttccacgtcaccgagccgatgctcacgaggctgcagcagcaggagccagcggctgccggcggcgccttcgagctcatctcggcgctcctgtggcagacggtggcgaagatcagggccgccaaggaggtgaagacggtgacggtggtgaggaacgacatg

SEQ ID NO: 438137 - DNA, 477 bp, Triticum aestivum
  unsure (1)..(477): unsure at all n locations
cccatgcgtccgcacaagctaatcaaggtctcagctccttccgagctccacgatttccagcatgcaagccgaagcactagatcctcgatggctcgcatggcactgctcgccgtgttcgccgtgctcgcggcactggctgtggcggagatggcgtctggggcggtgacctgcggcgacgtgacgtccgccatcgcgccgtgcatgtcctacgcgacggggaaggcgtcggcaccgacggcggggtgctgcagcggggtgaggaccctgaacggcaaggcgtccacctcggccgaccggcaggcggcgtgccgctgcctcaagaacctggcggggtcgttcaagggcatcagcatgggcaacgccgccaccatccccggcaagtgcggngtctccgtttctttcccgatcaacaccaacgtcaactgcaataacattcactaagttatcggtcagcatcatcacaccaggctctacatg

SEQ ID NO: 438138 - DNA, 392 bp, Triticum aestivum
gtgcccccaaatcggcgacccctctctctccgatctccaatccccacctcgcacacgcgcaccaaccgggcacgatgcgggcgatctcgtcggcggcgggagggatgctgcgggcgcggctgagcgcggcggcgcgcctccgcggcggacacggcgacggcgggggccggtggacgacgcccggccacgaggtgcggcccaaggggtacccgatgaaccgcacgccgccgccgccgggcgagtcgcgcaagtgggaggactgggagctcccctgctacgtcacctccttcctcaccgtcgtcatcctcggcgtcgggctcaacgccaagcccgacctcaccctcgagacctgggcgcaccacaaggcgcttgagcgcctccagcagcaggag

SEQ ID NO: 438139 - DNA, 432 bp, Triticum aestivum
ctttcgtgtccgggtgcagccagctgctgagaaggagatgactgtggtcctctccacaaccaagtcaaagaagcagaacaagcctgctgcgttcacccacaagactgtcatgcgcaaggagttccgcaagatggccaaggctgtcaagaaccaggtcagtgacaactactacaggcctgacttgaccaagcctgctcttgcaagactgagcgcagtttaccgcagcctccaggttgccaagtccggtgtcaagaagaagaacaggcagtaagcactgaggggccaatgagcttgttttgtggatccgttggtttatgtttccagctttttagatttgttctaagagtatggaggttgaatatgatgaatggtgtgctctgcatactggcccaagttttctcagtaggttctatatctgtacccatgactatg

SEQ ID NO: 438140 - DNA, 423 bp, Triticum aestivum
ccctcgttttcgcccacgcgtccgcccacgcgtccgcccacgcgttcgcccacgcgtccgagatcatgtccggcaggttcacggcgtcggccggcggcctgctggagggctgggcggcgagcttcctccgtggggagaggcagctgagggacgtgatggaccctgacctgagctggaacgcgcccctccatgccgagaccgtcaacaggctggacggtgtgattcggtcctgcaccgaccgggaggcgaggcggcgacccgccatggcagaagtggcgaggcggctgagggagatcacggccatgccgacggacgccgccacccccaaggtgtcgcccctgtggtgggcggagctggagatcatctccaccgaggccacctgaagatggcactggagctgcaccctgatggagcatagcatac

SEQ ID NO: 438141 - DNA, 448 bp, Triticum aestivum
tgtttcagagcagagcggataaactcgagggcagtagatcatcaccaaccatgtcgtgctgcggaggcaactgcgggtgcggatccggctgcaagtgcggcaacggctgcggagggtgcaagatgtaccctgagatggacgagggggtgaccaccacctcccagaccctcatcatgggcgtcgccccctccaagggcaccccgtcgttcgaggccgccgccgagaccggagccgacaacggcgggtgcaagtgcggctccaactgcacctgcaacccgtgcacctgcaagtgatccatcaaatcaggacaaggagatggcatggcatggatggacctaatgaaggagcactagtagtagttatgcatggtgtgtgcgtttgtgttctctttttaattgccgccgagaataagacgagatctatcgtatcgtatcgtatcgtatcgagc

SEQ ID NO: 438142 - DNA, 483 bp, Triticum aestivum
ttcttcctcagtcctcacagcatcctctcagtccttagcttccttccctcgccgccacccaccaaggaaaggaggatgtcttgctgcggcggcaactgcgggtgcggcgccggctgcaagtgcggcaacggctgcggcgggtgcaagatgttccccgacgtggaggccaccgccggcgccgccgccatggtcatgcccaccgcctcccacaaggggagctccggcgggttcgagacggccggggagaccggcggctgcgactgcaccacctgcaagtgcggcaccgcgtgcggctgctcctgctgcagctgcaactgagccggcgcccaggaggccggccggcagaggcgagcacgaggatgaggaggacaagcaagcaagcaccatcaccaccagttcaccaccacccagcgtatcatcaccagccgtcgcatgcgctcgcgcgcgcgcgcgctgaataaaataaaaccaccgttcgtgttc

SEQ ID NO: 438143 - DNA, 397 bp, Triticum aestivum
cgcttagactccgacgatgcactctgtggttgttacagcaggcttgatcattatgtcgactacttcacaaccgaacatccgcatgacaataggccacgctctttctcggtgtacactcctagcagaactgcggtcgtgtatgcccttacagagtaagaaccagcagcggcttgttacaaggcaaagagagaactcgagagagctcgtggattgtgagcgaagcgacgggcaacggcgcgaggctgctctaagcgccatgaccgggaggggatcgtgcctcttcccctgatgccaggaggatcagatggataaggtagctcgttggtgagcgctcgaaagaaaatggacgggcctgggtgtttgtcgtgctgcacttaaccctcctcctatcttgcac

SEQ ID NO: 438144 - DNA, 477 bp, Triticum aestivum
cctacgcgtccgcttagactccgacgatgcactctttggtggattcagcaggcttgatcatgatgtcgactacttcacaaccgaacatccgcatgacaataggccacgctctttctcggtgtacactcctagcagaactgcggtcgtgtatgcccttacagagtaagaaccagcagcggcttgttacaaggcaaagagagaactcgagagagctcgtggattgtgagcgaagcgacgggcaacggcgcgaggctgctctaagcgccatgaccgggaggggatcgtgcctcttcccctgatgccaggaggatcagatggataaggtagcttgttggtgagcgctcgaaagaaaatggacgggcctgggtgtttgtcgtgctgcacttaaccctcctcctatcttgcacattcccggttgtttttgtacatataactaataattgcccgtgcgcttcaacatgaacatataaatattct

SEQ ID NO: 438145 - DNA, 423 bp, Triticum aestivum
gctgtgtgcaaggacagggccacccctgaggaagtagccagctacaccctcaagctcctccagagaaggatccccccttccgtccccggcatcatgttcttgtctggcggccagtcggaggttgaggcaacgctgaacctcaacgcgatgaaccaggcgccgaacccgtggcacgtgtccttctcctacgcgcgggcgctgcagaacacctgcctcaagacgtggggcgggcggccggagaacgtggccgcggcgcaggaggcgctgctgctgcgcgccaaggccaactccctggcgcagctcggcaagtacaccagcgacggcgaggccgcggaagccagcgagaacatgttcgtcaagaactacagctactgatccgtcggcgagctgtctatctaataatctaccgcatcactgtcagcc

SEQ ID NO: 438146 - DNA, 449 bp, Triticum aestivum
gtgtccatggaaaggtgtccaaggacaaggaggagcaggcagagttcaagaagatgtttgatcttattgaacagtacaacctgattggtcacatccgctggatctctgctcagatgaaccgtgtccgcaatggtgagctctaccgctacatctgcgacatgaagggagcctttgtgcagcctgctttctatgaggctttcggtcttaccgtgatagaggccatgacatgtggccttccaacattcgccactgcatatggtggtccagctgagatcattgtcaacggcgtgtccggctaccacatcgatccttaccagaatgacaaggcctccgcactgctcgtggacttctttgggaagtgcaaggaagacccgagccactggaacaagatctcgcagggaggactccagcgcatcgaggagaagtacacctggaagctgtactctgag

SEQ ID NO: 438147 - DNA, 329 bp, Triticum aestivum
cccacgcgtccgcggacgcgtgggtctggagctcgccgggaacgccgccaaggacaacaagaagagccgcatcatcccgcgccacctgctgctcgccgtccggaacgacgaggaagatgaggaccagccaccggccaagaagaagaaatgatctgccttcctgctgtcagtgtttcagtccgttagtttatctgctgtctagatgttgattgagcgggtctggtacacaccgacctatgtagcttctgtgtcttggtggttcggtgtctcatagggtagaacattgaacttctaatgttgtttcctgcgttgtgcaagtagtcttaaca

SEQ ID NO: 438148 - DNA, 354 bp, Triticum aestivum
tcgacgggatggggcctgctcctggttgctcaggcgctgaggcctgcgatcatgagcgtggggctgtgggggtcgatccgggcgctggctcgtgggtacgagatcatcatggggctgctgctcttcaccccgatcgcgttcctggcgtggttcccgttcgtgtctgagttccagacccggatgctcttcaaccaggccttcagccgtgggctgcagatctcgaggatcctgggcgggcacaagaaggaccgggcggcgctgagcaaggacgataggtagatagatcgattgctgtagtagctagtaaggtaggaggatgattgcctgcttgcttgcttgctgtagaatatatat

SEQ ID NO: 438149 - DNA, 280 bp, Triticum aestivum
ccaaggtgaaggtgaaggactgtgcgagcgcgctgagggccaaggcgaagatcgtgtgggccaaactggcagagaaaacggaggccgcgacgtcgaggtcgcacgacgagcggcagctggcgcatgagcgcggcagggccaaggtcgccgccacggaggcgcagcttcaccaggagaaggtcgcgcatcgggaggctgccatggagcaccgcctccacaagcacgccagcgtcggcggtcacaaccacaagcacggcgcccgtggcgtgcactgatatat

SEQ ID NO: 438150 - DNA, 437 bp, Triticum aestivum
gcgtccgggcgcaccttcgactagcaccacgaccacggggctccggtggaatttagataatactcatatgagcttcggtggattgattagcacatcaaacacagttgatgaggaccaggttatggtcacttcagattctgacctgatctggacaatatcgctccggcactgagtttttcgatgcatcttctcgtcagacaatacttctatgagctacgatggattgattagcacgtcgaacatcgttgatgaggaccgggttatggtcgcttcagattctgacctgatttggacaatatctctctggcaccgagcttatgctaggcagaacgttttagctatcgccaattgtctcatctaatttatgtctatgaccactacatccagcagtgacgtgataaattctggcgtgttagaatttcaagccttgtaaattt

SEQ ID NO: 438151 - DNA, 240 bp, Triticum aestivum
gtgcttgttccggagagggtgaagcctaagtacaactacgaggaaatgtacaaggaccctcagaagttccttacgccgcatgtcccagacgatgagatatactaaagctagcttgagctttcgtcaaacaaagatgatgtaatccttagcagtagactttatctgccgttgcatttggtgtgatggtgtagctgttgtgttttggcatttgaccaagcaaatgaaagcacatggaactta

SEQ ID NO: 438152 - DNA, 373 bp, Triticum aestivum
gtgggcccagtctggaccaaaatagcattgaacccaaacaatgtaagtttgagtgagcatggcaagcatctctgaagacagtccgaactccaaaccatacaacaagtgctaaatctcacacattacaaatattaggacacaaaatgcctgattccataagcatcggttttgaccaaacactattaagtactaaaccagaagcaggtaagccaaaatatcactgagacctggcaattggttcaagggcttcaatcatcacaacactatttcctctcagaaccaccatccctatgtcggtcttctcatctccattgacctccacagtgttgtccaccaccaaattcatgaactgatcaaagttgtattgataaat

SEQ ID NO: 438153 - DNA, 433 bp, Triticum aestivum
gggaggtcttgtgctccaagccgctggttggccccttcaacttccgcttcttgtccaagaatggcatgaagaacgtcttcgacgaggtcttctccaccgatttcaagatcggcaaaacctaccaaccggaatattgatccacaccggcactgcacaccggccaagtttcagttgatcaaaatcgtcctaattaattaacacccatgtatgagtcgcgtaggaaatatgtgcctgcatgagtggatagctagtgaataattttaatttttgatgcacatagatatggtaggagaagcaacaacggatgtgtttgctctcccatgcatgcatccactgtcgatgcagcagttttcttttgtgttaccgaatgtgtaaccgaaaatgctcaagtttcttaatgatctatggaagaaaactctattcttttgtcggg

SEQ ID NO: 438154 - DNA, 164 bp, Triticum aestivum
ttcaacaaggcgtacgggatgtcggcgttcgagtaccacggcacggacccgcgcttcaaccgcgtcttcaacgaggggatgaagaaccactccatcatcatcaccaagaagctcctcgaggtctacaagggcttcgagggcctcggcaccatcgccgacgtggg

SEQ ID NO: 438155 - DNA, 423 bp, Triticum aestivum
ctcttccatcgggaaaagacagcggcgcgtagcaaacgaaacacggcgaggccggcgatggatgtcaagtgccggcgtctggaggggaaggtggccgtcgtgacggcttccacgcagggcatcggcctcgccatcgccgagcgcctcggcctggagggcgccgcggtcgtcatctcctcccgcaagcagaaaaacgtggacgaggcggtggagggcctcagggcaaaggggatcaccgttgtcggggccgtctgccacgtctccaacgccgagcagcgcaagcacctcgtcgacacggccgtcaagaatttcggacatattgatattgttgtctccaatgccgctgcaaatccttctgtggatagcatactagagatgaaagagtcagttcttgacaagctatgggatattaatgtcaaagct

SEQ ID NO: 438156 - DNA, 214 bp, Triticum aestivum
gtttttctttatgggcgggtatgcatttctattcttcatccacctggtgatgatcccaacggatacgagctcgcgagtgagcgttggacaccagtccatacggtagtgcttcttatttagtgtctaccacgctaaaattttgcttctgttccatttcttctgcttaatgcctttatctgctacatttgtcgccatacatcatcaaacatcattc

SEQ ID NO: 438157 - DNA, 343 bp, Triticum aestivum
ctcctagcaagctatattcctacatagtacatccatggcccccaccgtgatggcctcgccggccacctccgtcgctcctttccaggggctcaagtgcaccgtcggcctccccgttagccgccgctccaacggcgctagcctcggcagcgtcagcaacggcggaaggatcaggtgcatgcacgtgtggcccatcgagggcatcaagaagttcgagaccctgtcttacctgccaccgctcagcacggaggccctcctcaagcaggtggactacctgatccgctctaagtgggtgccttgcctcgagttcagcaaggtcgggttcatcttccgtgagcacaatgcg

SEQ ID NO: 438158 - DNA, 278 bp, Triticum aestivum
gaaaggcgaggactatgtcggccacgacgggggctgtgccgttctggcgaacggcggggatgacctacatcggttactccaggctctgcgcgtccatggtgcggagctgcctcaaggagccctacaagtccgaggccgccgaggtcgagaaggtccactactcccgcttcaagtggtccgacggaaagcagcccaagcccaccatctgcgaagatgataaatgaaagatccggtgccatggtgacacagtcctttctacggacgttttgaaaagctat

SEQ ID NO: 438159 - DNA, 435 bp, Triticum aestivum
  unsure (1)..(435): unsure at all n locations
cttgcttgctccggccatcgaccatggagggcgaggcgccgcagtcgcaccagctgctcctgcacggcgtcagcctggacctgcgcctcgacacggccacggccacgcaccagctgcgcggcgcccggcgcccggcgtcccctgcgcctactcccgtggccttcgaccaggccggcaaggaggccttctcctgcaactactgccaccgcaagttcctcagctcgcaggcgctcagcggccaccagaacgcccacaagctcgagcgcaccctcgccaagcgcagccgcgacgcctcctccaccgccgccacggcagctcaaactgccacgccttcctctcactggccccacgccggcggcggngagctctgggcgtactctgcttcggccgctgccccggattccacgacgatggcgcccctgatgggcatgggct

SEQ ID NO: 438160 - DNA, 614 bp, Triticum aestivum
tttagatcatgtggctggatttcatcattaaaacctcactgcttgtttcctgaaaccacaggtgttgaacatatggggatactatccactcattctaataggatcatgggcattcggcactattaaccgtatccatgatttcatcgagccagggcataagatcttctggctctcagttcttgacgttgggacagctgcactaatggtagcaaacctatcaaataaataagttataaaattcgccatagatcatctttgctcttcccgagtcgatgttctgaatgttgtattttcagggcttgttcaattcaatagcctatggtttcaacagctcagtgcgtcgagcaatccatgagagactggagctgtaagtcaccaccgatctctttggtttgctatattattcccaataatcaatgaagcttgatttttatgaaacccttggtctgctagattcttgccagaacggctatatcgatggcttccaagcaatttcagaccaaaaaaccatctgattctacatcagcaacaacaacagcgaagcgaaatggtatcactcaagaccgaggaccagcaatgacactaactttcaactaatacattggaccgataac

SEQ ID NO: 438161 - DNA, 412 bp, Triticum aestivum
cttacgcgtgcggcaccttgagcttgaggtcagtggcaggcaggcaagcaagaaagtaagaagaagaagaagataggacatggcatctgctactctcctcaagtcctacttgctccccaagaaggccgaatggggcgtcgcgcgccaggtcgccgccccgagggtgtccatggtcgtccgcgccggcgcctacgacgatgagctcgtcaagaccgcgaaaaccatcgcgtcgccggggcgcgggatcctggccatggacgagtgcaacgccacctgcgggaagcgcctcgactcgatcggcctggagaacacagaggcgaaccggcaggcgttccgcacgctgctggtcttcgtccctggcctcggcaaccacatcttcggcgccatgctcttcgaggagacgctctaccag

SEQ ID NO: 438162 - DNA, 405 bp, Triticum aestivum
gatttaccgatccaaagggtttcaagcttgagttccacttcaataccaatccattcttcaagaatgaagtgcttacgaaaacgtaccacatgatcgatgaagatgaaccaatccttgagaaggccattggtactgaaattgaatggtgccctggaaagagcttgacacaaaaggtgctaaagaagaagccaaagaaggggtcaaagaacactaaacctatcacgaagattgaaaattgcgagagcttctttaatttcttcagtccacctcaagttcctgatgatgatgaggaaattgatgaggatacagctgaacagttgcagaaccaaatggagcaagattatgatattggatctaccatcagagacaagattattccacatgctgtttcatggttcactggag

SEQ ID NO: 438163 - DNA, 479 bp, Triticum aestivum
aacctcactgcttgtttcctgaaaccacaggtgttgaacttatggggatactatccactcattctaataggatcatgggcattcggcactattaaccgtatccatgatttcatcgagccagggcataagatcttctggctctcagttcttgacgttgggacagctgcactaatggtagcaaacctatcaaataaataagttataaaattcgccatagatcatctttgctcttcccgagtcgatgttctgaatgttgtattttcagggcttgttcaattcaatagcctatggtttcaacagctcagtgcgtcgagcaatccatgagagactggagctgtaagtcaccaccgatctctttggtttgctatattattcccaataatcaatgaagcttgatttttatgaaacccttggtctgctagattcttgccagaacggctatatcgatggcttccaagcaatttcagaccaaaaaacca

SEQ ID NO: 438164 - DNA, 436 bp, Triticum aestivum
tagatcatgtggctggatttcatcattaaaacctcactgcttgtttcctgaaaccacaggtgttgaattgatggggatactatccactcattctaataggatcatgggcattcggcactattaaccgtatccatgatttcatcgagccagggcataagatcttctggctctcagttcttgacgttgggacagctgcactaatggtagcaaacctatcaaataaataagttataaaattcgccatagatcatctttgctcttcccgagtcgatgttctgaatgttgtattttcagggcttgttcaattcaatagcctatggtttcaacagctcagtgcgtcgagcaatccatgagagactggagctgtaagtcaccaccgatctctttggtttgctatattattcccaataatcaatgaagcttgatttttatgaaa

SEQ ID NO: 438165 - DNA, 445 bp, Triticum aestivum
ggctggatttcatcattaaaacctcactgcttgtttcctgaaaccacaggtgttgaacttatggtgttactatccactcattctaataggatcatgggcattcggcactattaaccgtatccatgatttcatcgagccagggcataagatcttctggctctcagttcttgacgttgggacagctgcactaatggtagcaaacctatcaaataaataagttataaaattcgccatagatcatctttgctcttcccgcgtcgatgttctgaatgttgtattttcagggcttgttcaattcaatagcctatggtttcaacagcttagtgcgttgagcaatccatgagagactggagctgtaagtcaccaccgatctctttggttcgctatattattcccaataatcaatgaagcttgatttttatgaaaccctcggtctgctagattc

SEQ ID NO: 438166 - DNA, 380 bp, Triticum aestivum
tttcgagcgcctcctcctgtctcgtcctcgtgccccgtcccctcgtcggcgcccgatctaagtcaagatgagtcgtggcgggagtgctggtggtggtcaaagttctctgggttacctgtttggagatggcgagcctgcaaagcctgctgcagcaccagctgcgaagcccgcacctgctgagaaaccagcaccggcagctgctgatgtagccaagcagattccagctggcattccaggtagccgggcgaacaactattaccgtgcagatggccagaacacgggcaacttgcttacggaccgtgcttcaaccaaggttcatgctgctcctggcggtggctcgtccctgggctacttgtttggcggaaagtgatgttaatgat

SEQ ID NO: 438167 - DNA, 535 bp, Triticum aestivum
tttagatcttgtggctggatttcatcattaaaacctcactgcttgtttcctgaaaccacatgtgttgaacagatggggatactatccactcattctaataggatcatgggcattcggcactattaaccgtatccatgatttcatcgagccagggcataagatcttctggctctcagttcttgacgttgggacagctgcactaatggtagcaaacctatcaaataaataagttataaaattcgccatagatcatctttgctcttcccgagtcgatgttctgaatgttgtattttcagggcttgttcaattcaatagcctatggtttcaacagctcagtgcgtcgagcaatccatgagagactggagctgtaagtcaccaccgatctctttggtttgctatattattcccaataatcaatgaagcttgatttttatgaaacccttggtctgctagattcttgccagaacggctatatcgatggcttccaagcaatttcagaccaaaaaaccatctgattctacatcagcaacaacaa

SEQ ID NO: 438168 - DNA, 388 bp, Triticum aestivum
acaacccactctttaacaaatttcacacgctccctgcatttcgtgttctccccaaatatattactgcatcttcacttccacccccaccatattatcaccgcaaaaatggtggaccacggtatatcctcacagctactcctatcacacaggttatcatagagccattcaaacagagatttcgaaaagaacccctgctgcctccttcgcggcacaaatctgacccaaatccccaattgagctggacagtctctaagcacgtgaagcacagattcaactccacctttacaaacctgagacacattcgaggcgctaagatgtcttcgatgccgttcctcatctgtcataactatgtccagtttggttatatatattttctggttatacttat

SEQ ID NO: 438169 - DNA, 434 bp, Triticum aestivum
ggttaagcgaagatgtcggggcgcggcaagggaggcaagggtctgggcaagggcggcgccaagcgccaccggaaggtgctgcgggacaacatccagggcatcaccaagccggcgatccggcgcctggcgcggcggggcggcgtgaagcgcatctcggggctcatctacgaggagacccgcggcgtgctcaagatcttcctcgagaacgtcatccgcgacgccgtcacctacaccgagcacgcccgccgcaagaccgtcaccgccatggacgtcgtctacgccctcaagcgccagggacgcaccctctacggattcgggggctaggctccggcgaggcgaatcgagctcgcaccacttgatcagatgttcagattagcagtagctaggcgttgttcagtgttcacggtgatcgatgtaatttatgatgtatggtg

SEQ ID NO: 438170 - DNA, 456 bp, Triticum aestivum
caaatttacacgctccctgcatttcgtgttctccccaaatatattactgcatcttcactttcacccccaccatattatcaccgcaaaaatggtggaccacggtatatcctcacagctactcctatcacacaggttatcatagagccattcaaacagagatttcgaaaagaacccctgctgcctccttcgcggcacaaatctgacccaaatccccaattgagctggacagtctctaagcacgtgaagcacagattcaactccacctttacaaacctgagacacattcgaggcgctaagatgtcttcgatgccgttcctcatctgtcataactatgtccagtttggttatatatattttctgtttatacttatatttatatatatttttcctaaatataactattacttttgattatttgttaaacatgtccatggatttaactcaatctcaataaat

SEQ ID NO: 438171 - DNA, 407 bp, Triticum aestivum
ctctgtcctcctcctgcccctcccttctctcccctccgctcctcctcgcgcgcgcgcgtttttataagggtttcggggcgcgggatggccgacgacgacagcgggagcccccggggcggcggcggggtcagggagcaggaccgcttcctccccatcgccaacatcagccgcatcatgaagaaggccgtgccggccaacggcaagatcgccaaggacgccaaggagaccctgcaggagtgcgtctccgagttcatctccttcgtcaccagcgaggccagcgacaagtgccagaaggagaagcgcaagaccatcaacggggacgatctgctctgggccatggccacgctcggattcgaggagtacgtagaccccctcaagatctacctgcaaaagtacagagatatgga

SEQ ID NO: 438172 - DNA, 355 bp, Triticum aestivum
ttaaaacctcactgcttgtttcctgaaaccacaggtgttgaatttatggggatactatccactcagtgtaataggatcatgggcattcggcactattaaccgtatccatgatttcatcgagccagggcatacgatcttctggctctcagttcttgacgttgggacagctgctctaatggtagcaaacctatcaaataaataagttatacaactcgccatagatcatctttgctcttcccgagtcgatgttctgaatgttgaattttcagggcttgttcaattcaatagcctatgggttcaacagctcagtgcgcttagcaatccatgagagactggagctgtaagtcaccaccga

SEQ ID NO: 438173 - DNA, 414 bp, Triticum aestivum
gatgctcttgccttcagactcccgattaaggcccgacagatatgcccttgagaagggcgacatgtctaaatctggggcacacaagagcaggcttgaagaacaacaaagagctgagaagaaaattcgggacaccaagggggagcaatttactccaaaatggttcaagatgacggaagacatctcccctaccccgtggggcgacctggaggtgtatgaatacaatggcagatacgccgagcaccgggctgcgatagacagctctagcgtcgctgccaaggagaaggacgtcagctccatcgagttcaacccgtggcagtatggcgacttgccttcccaatgatttcaatgggtctgaaaccacccatatattattttctcatcgaaaaagctatcaggccttgtgctgatgcatac

SEQ ID NO: 438174 - DNA, 335 bp, Triticum aestivum
agatgttcgtgttcgagaacctgctggagctcgaggatcgcgcgatccatatggtgctgaaggaagtcgaatcggaaacgctcatcatcgcgctgaagggcgcaccgcccgcgctgcgccagaagttcctcgcgaacatgtcgcagcgtgcggccgaactgctcgccgaggatctcgacgcgcgcggcccggtgcgcgtatccgaagtcgagacgcagcagcgccgcatcctgcagatcgtgcgcaacctcgccgagagcggccagatcgtgatcggcggcaaggcggaagacgcgtatgtctgattcggcgagcgatcgcgcgggcaccctcac

SEQ ID NO: 438175 - DNA, 414 bp, Triticum aestivum
gcgggctgtttgcgcaatggcggcgggtcccttcgcgctccgcctagggccgcgcctcgcggcgccggccgtggcgagtgcgactaggggaggaggacggggaagtgaccgccctacggccagccgagcgctggtgtcaaagaagtcaaacaaggaccaccgtttgtggattaggaaagacttggctgggtcagggaagaaggctctttgtcttgttaatactgtaaccaagtggctgatgagtaaaggtcaggtgctgacatggacaacgtacgatacactgctgttggctctttctatggatggaagagtagatgaggctgagtcaatttggaatactatcttacaaacttatacacgctcagtgcccaagaagttgttctctcggatgatccagatttacaacacgcgcca

SEQ ID NO: 438176 - DNA, 371 bp, Triticum aestivum
tcggttttgcacaactcaagaaactacaccaacaaaccggacatggctagaaagaataacatggcgtccaagtctagcatctcccccctcctcttggccaccgtcctggtctccgtcttcgccgccgtcacagccacaggtccatattgctacgccgggatgggcctttcgatcaacccgtttgaaggctgccgggagtatgtcgcacagcaaacctgtggcatcagcatatccgggtcggcggtgtccaccgagccggggaacaccccaagggatcggtgctgcaaggagctttacgacgcctcgcagcattgccggtgcgaggcagtgcgctacttcatagggcggaggtctgatcccaattccagcgt

SEQ ID NO: 438177 - DNA, 576 bp, Triticum aestivum
tgtggctggatttcatcattaaaacctcactgcttgtttcctgaaaccacaggtgttgaacagatggggatactatccactcattctaataggatcatgggcattcggcactattaaccgtatccatgatttcatcgagccagggcataagatcttctggctctcagttcttgacgttgggacagctgcactaatggtagcaaacctatcaaataaataagttataaaattcgccatagatcatctttgctcttcccgagtcgatgttctgaatgttgtattttcagggcttgttcaattcaatagcctatggtttcaacagctcagtgcgtcgagcaatccatgagagactggagctgtaagtcaccaccgatctctttggtttgctatattattcccaataatcaatgaagcttgatttttatgaaacccttggtctgctagattcttgccagaacggctatatcgatggcttccaagcaatttcagaccaaaaaaccatctgattctacatcagcaacaacaacagcgaagcgaaatggtatcactcaagaccgaggaccagcaatgacacta

SEQ ID NO: 438178 - DNA, 446 bp, Triticum aestivum
gtgacaggagaacattttatggcgactgacatcatgtgggatcctactggaagatttctcgcgactgcagttacctcggttcatgagatggaaaatggtttccaaatttggtccttcaatgggaagctaatttacaagatttcaaaggatcacttctatcagttccaatggcgcccgaggccaccatcactacttactcctgagaaggaggaggacatctcaaagaacctcaagcggtacagcaagaagtatgaacaagaggatctggacgtgtccaaccaggtgggtgagctagagcgcaagagacggacgcagcttcaagaggaatggcaaggatgggtggccaagtggaagcagctgcacgaggaggagcgtgcataccggatggagctgagaggcggggaggagagcgacaaggaagaagaggcggagtacaaggagattga

SEQ ID NO: 438179 - DNA, 363 bp, Triticum aestivum
tcgtttatatacatttggacctgataaagtggctggatttcttgagaagcatgatttagacctcatctgccgagcccaccaggtcggtgaggatggcttcgagttctttgctgatcgtcagctagtaacaatattgtcggcacctaattactgtggagaattcgataatgctggtgccatgatgagtgtagacgagacgctgatgtgctccttccaaatactcaaacctgcaaggaaaatgttgcctggttcaactaataacaagtctggcttcaagtcaatgagaggatggtgacggtggcacggcgattggtgagcaagctgtggtctcatttgcgggcaggcacgtgcctaccacgagcg

SEQ ID NO: 438180 - DNA, 362 bp, Triticum aestivum
gttgttgcaggttgcaactgacaaatgcatcatggggtttctgtttttgatagtttgtggtgtgattgccatcattgttgtcaagatcgtcaacccgcataacaagagcatcccagacatcccgggactggcgcctcctgcacctcctgcgcagaaccggaagctgctatccgtagatcctttcagaatgctctgagcattcgggaatggaagtctcgtgccatgcaggtctctcgctctgaagccaaaacacacgatgtcaactgttccattggtgcttgcttgtacattatacccgtatgtaattttctttgattggttcattctttccacactggctgctgttagcttcggattgttag

SEQ ID NO: 438181 - DNA, 528 bp, Triticum aestivum
tagaggcattcgagcgatactctgtcaaagcagaaaatatcaccgttgttagtgttcctggcagctttgaaattcctgttgcagcacagaagcttgggaagtctggaaagtatgatgcaattttgtgcattggggctgtgattagaggtgacacaacccactatgatgctgttgcaaactctgctgcttcaggtgtactcaatgctggattgtctgctggcgtcccctgcgtatttggtgttctgacctgtgatgacatggaccaggcgctaaatcgtgctggtggcaaggctggaaacaaaggtgctgagaccgccataactgctattgagatggcctcgctgtttcggcatcacttagcctgatgacaccgaatgctatggtcggcgagccagcaagattttctcccctgttcgcggctatcggagtttttcccccacatttgttttaaaatttcttttttattgctgcaggctagtgtttgacatgtcgtttctaaattattttggtctgtacgtatgtactctg

SEQ ID NO: 438182 - DNA, 522 bp, Triticum aestivum
ggtggatttcatattaaaacctcactgcttgtttcctgaaaccacaggtgttgaacttatggggatactatccactcattctaataggagcatgggcattcggcactatgaaccgtatccatgatttcatcgagccagggcataagatcttctggctctcagttcttgacgttgggacagctgcactaatggtagcaaacctatcaaataaataagttataaaattcgccatagatcatctttgctcttcccgagtcgatgttctgaatgttgtattttcagggcttgttcaattcaatagcctatggtttcaacagctcagggcgtcgagcaatccatgagagactggagctgtaagtcaccaccgatctctttggtttgctatattattcccaataatcaatgaagcttgatttttatgaaacccttggtctgctagattcttgccagaacggctatatcgatggcttccaagcaatttcagaccaaaaaaccatctgattctacatgagcaacaacaac

SEQ ID NO: 438183 - DNA, 490 bp, Triticum aestivum
cttgaagagaaaggttgatgctggcgctgacggtatagtcactcagcttttctatgataccgatatctttctcaagtttgtgaacgactgccgtcaaattggtataacatgccctattgttcctggcataatgccaataaataactacaaaggatttgtgcgcatgactggattctgcaaaactaagattccagctgagattactgctgccttggatcctattaaagacaatgaggaggctgtgaaagcatatggaatccaccttggtactgagatgtgcaagaaaattttggctagtgggatcaagactttgcacctttacacactaaacatggaaaagactgctttagcaattttgatgaatcttggattaatagaggagtccaagctttcaagaacattaccttggaggcctccaactaatgttttccgtgtcaaagaagatgttcgccctatattctgggccaacagaccaaagagttacatctca

SEQ ID NO: 438184 - DNA, 367 bp, Triticum aestivum
tcgttcctcgggctcctcgaccgggtcctgctcccgctctggaggcgggtgaccggccacacgccgacgccgctgcagtgcgtgggcgcgggccaggcgctcaccgtgctgagcatggccgcgtcgtccctcgtggagcgcgagcgcaccgccaccgtgcgcgcgcacggtcaggagggcgatccggcgtgggtgtcgccgctgtcggccatgtggctggtgctgccgttcgccgtggccggggccggggaggcgctgcactttccggcgcaggtgacgctgtactaccaggagttcccgccgtcgctcaagaacacggccacgggcatgatggccatgatcgtcgcgctggggttctacctgagca

SEQ ID NO: 438185 - DNA, 337 bp, Triticum aestivum
tcgcccacgcgttcggtcaaactgggtctgatgtcttgctttgacaaggctgctgtttctggactgcataaccagtcaatcgtgaatgctgtcattgacggcgatgacatcatatacagagactatgtcgacgttagtgtagctgctggcacatccaagggtcttgtggtgccggttattcgagatgctgacacaatgaactttgctgacatcgagaaagggataaacaaccttgccaagaaggctactgagggggcgctgtcaattgacgagatggcgggaggaacattcaccatctccaacggtggtgcctacggaagccttattagcacgccca

SEQ ID NO: 438186 - DNA, 357 bp, Triticum aestivum
ttatcattttcccttccgatgcagaaaggatttctgtctcagaagcacgaaagatgaatgaggttgttcatactcaagcaaagatcatagcagatcaagatgtgatgtataagtatttatcaaagaacttaatttttgttgctacggtgtctcctaaagctgctggtgaaattggatccgcggcacctgaagaagcttcactagtggcatatctcattgatgctgtcagcggacgcatactacaccgtgtgacccatcatggtgcacaaggccctgtacatgccgttgtcagcgagactggggttgtctatcattatttcaacctccgagcccacagatttgaaattgcagtgattg

SEQ ID NO: 438187 - DNA, 341 bp, Triticum aestivum
ttaattctcaagaggcggcaccatgctcgtgtaccaggacaagctttccggcgacgagcttctgtcggattcgttcccgtacagggagctggagaacggcgtgctctgggaagtcgacggccattgggtcgttcaaggagcagttgatgtggacattggagccaatccctctgctgagggtggtggtgatgatgagggtgtcgatgaccaggccgagaaggtggttgacattgttgacaccttccgtcttcaggagcaacctgcttttgacaagaagcagtttatctctcacatgaagcgctacatcaagaacctctctgccaagcttgaaggggatgacc

SEQ ID NO: 438188 - DNA, 378 bp, Triticum aestivum
ttctttaggtaatccaatccgcacagaaatccccgtctcaaaaccctagccctcatccccgatcccggcgagcgagatggccaacccgagggtgttcttcgacatgaccgtcggcggcgcgccggcggggcgcatcgtgatggagctgtacaaggacgcggtgccgcggacggtggagaacttccgcgcgctctgcaccggcgagaagggcgtcggcaagagcggcaagccgctgcactacaagggcagcgccttccaccgcgtgatccccgacttcatgtgccagggcggcgacttcaccaggggcaacggcaccggaggcgagtacatctacggcgagaagttcgccgacgagaagttcgtccacaagcacaccaa

SEQ ID NO: 438189 - DNA, 276 bp, Triticum aestivum
tcttcaaagctgcggcggcgcgcgcataggaggcgaatcagcagcggaaccaagccgccgacgccaccatgggtatctcgcgtgactccatgcacaagcgccgggccaccggtgggaagcagaaggcttggaggaagaagcgaaagtatgagctcggccgccagccagccaacactaagctttcaagcaacaagacagtgaggagggtccgtgttcgcggaggtaacgtgaagtggagggctctccgtcttgacactggtaacttctcatggggta

SEQ ID NO: 438190 - DNA, 324 bp, Triticum aestivum
actgcttgtttcctgaaaccacaggtgttgtttagatggggatactatccactcattctaataggatcatgggcattcggcactattaaccgtatccatgatttcatcgagccagggcataagatacttatggctctcagttcttgacgatgggacagctgcacttatgggagcaaacctatcaaataaataagttataaaattcgccatagatcatctttgctcttcccgagacgatgttctgaatgttgtattttcagggcttggtcaattcaatagcctatggtttcaacagctcaatgcgtcgagcaatccatgagagac

SEQ ID NO: 438191 - DNA, 369 bp, Triticum aestivum
gctgcgtgggctcctatggggcccaagggcttcatccgcgaggaagccgggaagatactcaccgcatacctgaagggccgtccagcattcgaggctgacgaccagtctgcgttgatacacctcttgctctcgcagaaggagaagtggatggacaaggtgtatatagagaattcatactacttgcacggtttctgggctgggctggtggacaagtacgaggagatgatggagaaccaccatccagggcttggggatgagcggtggccatttgtgacacactttgttgggtgcaagccatgcggaagctatggtgattacccagtagaccggtgtctcaagagtatggagcgagcatttaattttgccgat

SEQ ID NO: 438192 - DNA, 433 bp, Triticum aestivum
tggcagttttacacgtacatgattcttatttcagaaacaaccacccctgaaatcaacatgagatggttccttgacaccgctggactgaagaagtcgagcgcctacctgatcaatggtattttgatatttgttgtatggctggcggcaaggatatttttgttcctgtatgtattttaccacatctatttgcactacagccagataatgaagatgcacgcatttggttattacctgacactgaccgtgccgtcggtgctctttgtcatgaacgcaatgtggtttacgaagattttgaaaggggtaatgaaaacactgtcgaaatggtcgtaaatcggattaggctctgcggaccagaagtacaacgtaactgggtgttcctgccgtgctgcactgcgtgtgacctgaatgtgtaaagttatgaatatatgaatta

SEQ ID NO: 438193 - DNA, 132 bp, Triticum aestivum
actcattctaataggagcatgggtattcggcactattgaccgtatccatgattgcatcgagccagggcatacgatcttctggctctcagttcttgacggtgggacagctgcactaatggtagccaacctatc

SEQ ID NO: 438194 - DNA, 409 bp, Triticum aestivum
cacagcgcgaaggcattaacgcctatgacgtgtactccccaaaaatatgctcgcaggtttacttccacccacaccatatgagcaccgcaaaaatggtggaccacggcatatcctcacagctactactatcacacaggttatcatagagccattcaaacagagatgtcgaaaagaacccctgctgcctccttggcggcacaaatctgacccaaatgcccaattgagctggacagtctctaagcacgtgaagcacagattcaactccacctttacaaacctgagacacattcgaggcgctaagatgtcttggatgccgatcctcatctgtcataactatgcccagcttggttatatacattttctggctatacttatacttatatatatctgtcctaaatataactattac

SEQ ID NO: 438195 - DNA, 411 bp, Triticum aestivum
  unsure (1)..(411): unsure at all n locations
ggctggattccatcattaaaacctcactgcttgtttcctgaaaccacaggcgcagaactgatggggttcctatccacncancctaanaggagcatgggcattcggcactattaaccgnatccatgatttcatcgagccagggcataagatcttctggctctcagttcttgacgtcgggacagctgcactaatggtagcaaacctatcaaataaataagttataaaattcgccatagatcatctttgctcttcccgagtcgatgttctgaatgttgtattttcagggcttgttcaattcaatagcctatggtttcaacagctcagtgcgtcgagcaatccatgagagactggagctgtaagtcaccaccgatctctttggtttgctatattattcccaataatcaatgaagc

SEQ ID NO: 438196 - DNA, 230 bp, Triticum aestivum
cgattggcgttttttaccaccaccaacgcggatcagctgccttagcaattttgacacttaacgggaagcaaatttttgggctgactatcaaagttaattgggcatatgctatcggacagagggaggatacaacagaccatttccatattgatgctggtgatcttagccctgaggtcacggatgatgcattatttgcagtcttctcagcatattcccctaactgctctgat

SEQ ID NO: 438197 - DNA, 456 bp, Triticum aestivum
ttagatcatgtggctggatttcatcattaaaacctcactgcttgtttcctgaaaccacaggttttgaacttatggggatactatccactcattctaataggatcatgggcattcggcactattaaccgtatccatgatttcatcgagccagggcataagatcttctggctctcagttcttgacgttgggacagctgcactaatggtagcaaacctatcaaataaataagttataaaattcgccatagatcatctttgctcttcccgagtcgatgttctgaatgttgtattttcagggcttgttcaattcaatagcctatggtttcaacagctcagtgcgtcgagcaatccatgagagactggagctgtaagtcaccaccgatctctttggtttgctatattattcccaataatcaatgaagcttgatttttatgaaacccttggtctgctagattc

SEQ ID NO: 438198 - DNA, 442 bp, Triticum aestivum
  unsure (1)..(442): unsure at all n locations
ggatttcatcattaaaacctcactgcttgtttcctgaaaccacagtcgcngaactgattgggatactatccactcattctaataggatcatgggcattcggcactattaaccgtatccatgatttcatcgagccagggcataagatcttctggctctcagttcttgacgttgggacagctgcactaatggtagcaaacctatcaaataaataagttataaaattcgccatagatcatctttgctcttcccgagtcgatgttctgaatgttgtattttcagggcttgttcaattcaatagcctatggtttcaacagctcagtgcgtcgagcaatccatgagagactggagctgtaagtcaccaccgatctctttggtttgctatattattcccaataatcaatgaagcttgatttttatgaaacccttggtctgctagattct

SEQ ID NO: 438199 - DNA, 364 bp, Triticum aestivum
tttgcctgaatttcgacgcgtatcggtttgcaagcttatggtccaggatcttcccagatggggaggggaaagttaataaagaaggtgtcacgtattacaacaatctcatagactacgtccttaagcaagggctcactccttatgtcaatctcaaccactatgatatccctcttgcgcttcagaagaagtatgatggcttcttaagcccaaagatcgcgaacatatttgcggactatgctgaattttgtttcaagacttatggtgatcgaattaagaactggttcacattcaatgagccaaggatagtagcagcacttggctttgatactggaacgaatccccctaacaggtgcaccaaatgcgc

SEQ ID NO: 438200 - DNA, 317 bp, Triticum aestivum
ttccctcctcctgcgctacaccgcacaggagggcattacacgagctgatcagctgaaggtgagttggcctatggcgaggtttgctgccctcgccgtgtgcgccgccgcgctcctgctcgccgtggcggcggggggtgccgcggcgcagggcgtgggctcggtcatcacgcggtcggggtacgcgagcatgctgcccaaccgcgacaactcgctgtgcccggccagagggttctacacgtacgacgccttcatcgccgccgtcaacaccttcccgggcttcggcaccaccggcagcgccgacgacatcaagcgcgacc

SEQ ID NO: 438201 - DNA, 389 bp, Triticum aestivum
gaattcttaattcaagagttatagggagggacttatgtcaccacaaacagaaactaaagcaggtgttggatttaaagctggtgttaaagattataaattgacttactacaccccagagtatgaaactaaggatactgatatcttggcagcattccgagtaagtcctcagcctggggttccgcccgaagaagcaggggctgcagtagctgccgaatcttctactggtacatggacaactgtttggactgatggacttaccagtcttgatcgttacaaaggacgatgctatcacatcgagcctgttgctggggaagacagccaatggatctgttatgtagcttatccattagacctatttgaagagggttccgttactaacatgtttactt

SEQ ID NO: 438202 - DNA, 253 bp, Triticum aestivum
ttaagctcttgccttcagactcccgattaaggcccgacagatatgcccttgagaagggcgacatgtctaaatctggggcacacaagagcaggcttgaagaacaacatagagctgagaagaaaattcgggacaccaagggggagcaatttactccaaaatggttcaagatgacggaagacatctcccctaccccgtggggcgacctggaggtgtatgaatacaatggcagatactccgagcaccgggctgcgat

SEQ ID NO: 438203 - DNA, 456 bp, Triticum aestivum
tttttcagcttcccattcctcgccgccgccgctccgtacccgctcgaagccaacccgaccatggcggacgtcgacgttgacacggaggtggccgcgggcgcgcagccgaagaagaggacgttccgcaagttcagctatcgcggcgtggatctcgatgccctcctggacatgtccaccgacgaccttgtccagatgttccccgctcgcgcccgcagaaggttcaagaggggtctcaagaggaagcccatggcgctcgtcaagaagctgcgcaaggcgaaaaaggacgctcctgctggtgagaagcctgagccagtgaggacacatctgcgtaacatgatcattgtccctgagatgattggcagccttatcggtgtctacaatggcaagacctttaaccaggttgagattaagcctgagatgattggccattaccttgcagagttctctatcttctac

SEQ ID NO: 438204 - DNA, 427 bp, Triticum aestivum
gttgttacgcgtgcggttttatccctttaccggaaggggctcgcaagaagtcgatccacaagaaggtgaccctcaagtacatggccaatgactccagccggcgcagtaggtttaggaagcgtctcggggggctgatgaagaaggcggcccagctggccaccctgtgcgacgtcaagacctgcgtggtggtgtacggcgagcgcgaggcggagcctaaggtattcccttgccacgccgaggcggtggatatcctcaacgaatttaaaagcatgccacagctagggcattgcaagaagacgatggaccaggaggccttcctcacccagcgcatcgccaagctccgggaccaggtcgacaaggctcgccgcgagtgccaagacagcgagattaggtacctgctttacaacatcatgcacggtaaccaccc

SEQ ID NO: 438205 - DNA, 358 bp, Triticum aestivum
tggtatggccgatccagcggagcaccgcgaggaggaggagtaggccacggccgccggtgaggaagaggacaccggcgcccaaatcgctcccatcgtgaagctcgaggaggtggccatcaccaccggcgaagaggacgaggacgtcctcctcgacatgaaagcgaagctgcatcgatttgacaaggacgggggccagtggaaggagaggggcacgggtgccgccaagctgctcaaacacaatgagactgccaaggtccgcctcgtcatgcgacaggccaagaccctcaagatctgcgccaatcacctcgacgtggccacgacgaagatgcaggagcacgctgggagcgacaagtcgtgc

SEQ ID NO: 438206 - DNA, 341 bp, Triticum aestivum
ttttcaatgttgccagcagttgccgcaaatcccccagcaatcccgctatgaggcaatccgtgctatcatctactccatcatcctgcaagaacaacaacaggttcagggttccatccaaactcctcagcagcaaccccaacagttgggccaatgtgtttcccaaccccaacagcagtcacaacaacaactcgggcaacaacctcaacaacaacaattggcacaaggtacctttttgcagccacaccagatagctcagcttgaggtgatgacttccattgcgctccgtaccctgcaccgatgtgccgtgtcaatgtgccgttgtatagaaccaccactagtgt

SEQ ID NO: 438207 - DNA, 445 bp, Triticum aestivum
ttgtcttcgaccagcaccaccgccgcaacgccagggcaactgtgcgtcccgttggtgatcatcaggcgccaccggtcgccggcagtgctgcccgagacgacgatcatcgtcgtcgggcgaacgccacaacaatcacaaagcccaattctaccaccacaagtcatcttcccagcacgcgtcggcatgaagaaaagggagcgaaggaggatgcggagttccgggggctggcggcggcggtggcacgcgcggcaacggacgaccggacggtgatcatcacgtgcgtgaaccaggcttgggcggcaccaggctccttactggacctgttcctggagagcttccgcatcggcgacggcacggcgcggctcctcctacacgtgctggtcgtggccatggatcccggcgcccatgcacggtgcctcgccgtgcaccagcactgctaccacta

SEQ ID NO: 438208 - DNA, 216 bp, Triticum aestivum
aggggaagatgcctgcggggcacgggctgcggtcgcggacgcccgacctgttcgcgcggtccttccgtaagaaggggtacatcccgctcaccacctacctgcgcacctacaaggtcggggagcacgtcgacgtcaaggtgaacggcgccgtccacaagggcatgccgaacaagttctaccacggccgcaccggccgagtctggaacgtcaccaagc

SEQ ID NO: 438209 - DNA, 462 bp, Triticum aestivum
tttaccggctgggactggcgctccatcccgcaggggctctcctccgcctgcatcttcatctgctccggaggctgttttggatgctgtgagaaggccgcaaaacatgtaggcgatctttccaagagcttaatagcccatgcccagaatcctacggtggcagaggaattttggagtacgaccaccatcgaggttgatccggcagacctacgagcaccatacaacacatcctcttgggaccttgatctgcatggagtcggaagcagtcataacctgggcgaatctgctaatcatggtttttctctttggcaacaaactagggatgagtggactgagaatacaaggttaaggcaagaaccggtggtgaagcagatccaggaaccagtgttgagttggaatgcagcgtatgaaagtttgcttggatcaaataaaccattccctcagcccatccctctacatgagatg

SEQ ID NO: 438210 - DNA, 379 bp, Triticum aestivum
gcatcttgccgggcggtagtgttgctgggttccagattgactgactgcgccaacttcttcagccatgtccggggatggccagagcggcttcgcaagggtgcactccgtgctggtcccgatgatggcgcagggtcacataatccccatgaccgacatggcgagcctgctggccgagcacggcgcgcaggtcaccttcatcaccacgccagtgaacgcgtccaggttggcgagctttgccgtccacgtggaggagacaggcttggcggaccgactcgtggagctccatttcccggcagccaagtttggcctaccggacgggtgcgagaccgtcgacatgatccaatcgcaggatctgctgtcgaacttcttggaggcatgc

SEQ ID NO: 438211 - DNA, 318 bp, Triticum aestivum
cttatgatcggggcgtttgcagctccagacaggatccactgggcgccggggctccccaagacccgcagcggcaagatcatgcgcaggatcctgcgcaaaattgccgcgaagcagctggacgagctcggcgacataagcactctcgctgaccccggcgtcgtcgaccagctgatcgcgctcaaagattgctaggatgtaaagcagttatgcgactgttttttcccctatgcggttatgtggttggtagaaggttgattttagtgctcgctagtccttttaatcagtgcgattttctcctgaggctagtgagctgcagcg

SEQ ID NO: 438212 - DNA, 393 bp, Triticum aestivum
attcaatcgcaggtggaatctgaagctagaagagctcttcaagcagacttggatgaggccactgtttcactaaatgaggtgaatgagagtacattatttctgtctaataagcttgatagcactgtttccaggatttctgctattaaagaagagaaagaggttctttcagcggctcttttggagcaaaagaaaagtacagccgaagctcagaaaaatatggtggatgctcagcatcttattaaaaggcttgggatggagagagagaatagtgaaatcaggagtacaaagcttgaagaggagttggccacagcaaaaggtgagatgttatatctgaggaggcagattactgcaagtgggtcacagaatacagatgttttggaagcaagcccaaca

SEQ ID NO: 438213 - DNA, 380 bp, Triticum aestivum
tcggtcccctcgcgcgttccgcctcccagttgcggctccggtcgttcccctcctcctcggttgctgagatggccggtcgtgggaaggcaatcggcgccggcgcggccaagaaggcgacgtcaaggagctccaaggctgggctgcagttccccgtgggaaggatcgccaggttcctcaaggccggcaagtacgccgagcgcgtcggagccggcgcccccgtctacctcgccgccgtccttgagtacctcgccgctgaggtcctggagctggccggaaacgccgccagggacaacaagaagacacgtatcgtgccccgccacatccagctcgccgtgcgcaatgacgaggagctgaccaagttgctcggcggcgccaccatc

SEQ ID NO: 438214 - DNA, 421 bp, Triticum aestivum
agctgattttcttcggcggcatcgcgaacacgttcatgctcgcggccggcctgtcgatcggcaagtcgctcgcggaagccgatctcgtcaacgaggcaaaggcgatcatcgacgaagcgcgcgagcgcggcgcgtcggtgccgatcccgaccgacgtcgtgacggccaaggaattctcgccgacggccgcggccacggtgaagcaggtcgccgacatcgaagcggacgacatgatcctcgacatcggccccgatacggccaaggcgctcgcgagccagctcgagaaggccggcacgatcgtgtggaacggcccggtcggcgtgttcgagttcgaccagttcggcaacggcaccaagacgctcgctgaagcaatcgccaaatcgtccgcgttctcgatcgcgggcggcggcgacacgctcgc

SEQ ID NO: 438215 - DNA, 437 bp, Triticum aestivum
gctagttatcgcctccccacctagcaatttacgtactccgccatggccccagccgtgatggcttcttccgccaccaccgtcgcgcccttccaggggctcaagtcgaccgccggcctccccgtcagctgccgctccggcagcaccggcctcagcagcgtcagcaatggcggaaggatcagatgcatgcaggtgtggccaattgagggcatcaagaagttcgagaccctgtcttacttgccacccctctccacggaggccctcttgaagcaggtcgactacttgatccgctccaagtgggtgccctgcctcgagttcagcaaggttggcttcgtcttccgtgagcacaacagctcccccgggtactacgacggtcgatactggacaatgtggaagctgcctatgttcgggtgcaccgacgccacacaggtgctcaacga

SEQ ID NO: 438216 - DNA, 393 bp, Triticum aestivum
gtccacctggccaccatccccatcaccggcaccggcatcaacccggcccggagcctgggggccgccgtcatctacaacaaggacaaggcctgggatgatcagtggatcttctgggtcggccccatgatcggcgcggcgatcgcggccttctaccaccagtacatcctcagggccggcgccatcaaggccctcggctccttcaggagcaacgcgtaacaagttatcatccatgtcatctgtatgcaagactgaagcaatggcgacccgtgttgtgtccatccatccagagagaaatgcgcttttgcaacttctcgacagttcagttcggccgccgcaatggtcgtgttattatgtgtcggcagctgcatatgcgtagtacgtggtccggtcatg

SEQ ID NO: 438217 - DNA, 304 bp, Triticum aestivum
gtcccctgcaggcccagcaccgccaactgctccgccaccgccaagaacgtctgcccgccctacctcgttgtctacggctccggatccaccgcggggctcctcgtctccgacacgctgcgcatgtcgccacggggcgccgccagccgcaacttcgccgtgggctgcagcctcgcgtccgtgcaccagccgccgtcggggctcgcggggttcggccgcggcgcgccgtccgtgccggcgcagctcggggtcaccaagttctcctactgcctcctctcccgccacttcgacgacgacgccaccgtca

SEQ ID NO: 438218 - DNA, 402 bp, Triticum aestivum
ttaaatactcctcctccacctagggttttgctgcctccctcccccaccgccgccgtcgccgcccgcgtccaccatggcgctgccgaaccagaacaccgtcgattaccccagcttcaagctcgtcatcgtcggcgatggcgggactggcaaaaccacatttgtgaagaggcatctcactggagagtttgagaagaaatacgaacccaccattggtgttgaagttcacccgttggatttcaccactaactgtggaaagatccgtttctactgctgggacactgctgggcaagagaagtttggtggccttagggatggatactatatccatggtcagtgtgcgattatcatgtttgatgtcacttcaaggctgacctacaagaatgttcctacgtggcacaggga

SEQ ID NO: 438219 - DNA, 351 bp, Triticum aestivum
cttagtttctgagatcaccaccactctgtacagaagatgacccagatagtgcttggtatgtaaatatttcgatgtgtagaactcgtcttccaagagttgaacttgttggtgatattgctggtggcccagtggagaaatggcctcaaagacttgctgcagtgccaccaagaatagccaatagggaaatcaaggggatgtccatccaggcatacaaacatgacttttcaatttggaagagaagagttgaactctatggaacatatttgaaagatttatctcacaggagttacagaaatgtcatggatatgaatgctggttttggtagctttgctgcagccatgttgaaatacc

SEQ ID NO: 438220 - DNA, 355 bp, Triticum aestivum
ctgggtattcaacaatggaatcatccacaatgatgaaggtagttccgctgccattgccccttttgtaaaggatgtattggacagcctagaattcgcaagggggagtgcaaactcaacatggggctctgttagagctgcaatggggcatcctgaaccgttcccagtcaaatatgttgcgattggaaatgaagattgcgggaaaaaatactacctcggtaattacctcaagttctacaatgctataagagaatcctatccagacattcagatgatttcaaactgtgatggttcatctaaaccacttgaccatcctgctgaactgtatgacttccatgtctacaccgattctaagact

SEQ ID NO: 438221 - DNA, 238 bp, Triticum aestivum
gttgcgccggcgtggtgaaggggttccagcagggcctgtacatgggcaacggcggcggcgccaacgtggtggcgcccggctacaccaagggctccggcctcggcgccgagatcatcggcaccttcgtcctcgtctacaccgtcttctccgccaccgacgccaagaggaacgccagggactcccacgttcccatcctcgccccgctgcccatcgggttcgccgtgttcctggtgcacct

SEQ ID NO: 438222 - DNA, 384 bp, Triticum aestivum
gttcatcttccgtgagcacaacgcatctcctgggtactacgatggccggtattggacaatgtggaagctgcctatgttcgggtgcactgacgccacacaggtgatcaacgaggtggaggaggtcaagaaggagtaccctgacgcgtatgtccgcatcatcggattcgacaacatgcgtcaggtgcagtgcgtcagcttcatcgccttcaagccaccgggctgcgaggagtccggcaaggcctaaacagctcactcacgacaggccatatataaagtgccattgcagttttgtcaactctgacattgctttgggttttccttctccatttatctttcttatttgttcctaagaatatgtgtatgtccatgttcatgtaccaacat

SEQ ID NO: 438223 - DNA, 407 bp, Triticum aestivum
gctaagtccatggagcagggcgccgtcgacgcggtgaccaaatggcaaacgctcgcaccggtgctccccgacgacctcagcgtacgtgtcgtcatccagaagagccaggccaacttccagtccctgtacctcggcaactgcagcacggcggtggcgacgatgcgcagccggctcccggagctcggggtgacgagcgccgactgcaaggagatgagctggctgcagtacacggtgtacatatacttgggcgacgccatcaacagcaagccgctggaggcgctcctcctcaaccggtccacgaccctgggccccttcgtcaagaacaagtcggactacgtcaagaaagccctcaccaaggagacctggaagaagatcttcctctggcccaacggcggcgggtcggggca

SEQ ID NO: 438224 - DNA, 316 bp, Triticum aestivum
ttcttttcccctcgccgccgccgccactccgccgctgccgccgccgagatgggtcgcgtgatccgcgctcagcgtaagggtgcgggctccgtcttcaagtcccacacccaccaccgcaagggccccgcccgcttcaggtcgctcgacttcggcgagcgcaacgggtacctcaagggcgtcgtcaccgatgtcatccacgacccggggcgtggtgcgccgctggccaaggtgaccttccgccacccgttcaggtacaagcaccagaaggagctcttcgtcgccgccgagggtatgtacaccggccagttcgtctact

SEQ ID NO: 438225 - DNA, 397 bp, Triticum aestivum
tctcttcgcgttcgcgccgtgttcgccgtgctcgcggcactggctgtggcggagatggcgtccggggcggtgacctgcggcgacgtgacgtccgccatcgcgccgtgcatgtcatacgcgacggggaaggcctcggcgccgtccgcggggtgctgcagcggcgtgaggaccctgaacggcaaggcgtccacctcggccgaccggcaggcggcgtgccgctgcctcaagaacctggcggggtcgttcaagggcatcagcatgggcaacgccgtcaccatccccggcaagtgcggggtctccgtctttttcccaatcaacaccaacgttaacttgaacaacattcactaagttatctgtcagcatcatcacaccaggctctatatggatagctagccga

SEQ ID NO: 438226 - DNA, 379 bp, Triticum aestivum
tcttccacgcgtccggcgctgtttctcttgtgccagggtatctaacgaagttctataataaactgctgatctgctttaaggagtttgataatgaattgagagtcaatagaagatattcaattgatcacatcaagaagaagttccaactgctatctagttgtcaactccaagaggctgaatggttgcacaaaaatcacaagcccaggtttgaagataaattgcatttgggtgccatgtccgtaggcgcggtagggctatgcgtgtatatgatggcttgcatgggtgataaaatgcccaagggagcactggagtgggcacttgcataccccgatgtcatcatggcatgtgccaagattgggcgcctaatgaatgaccttgc

SEQ ID NO: 438227 - DNA, 389 bp, Triticum aestivum
tttttccgcgctcccaaaccctagctcccaccgcagcggtcaccgcctctcgacccccgcccctctcccggtgcgcgcctgttgctgcagacgagaagcggctgaggcgaagaggaatcgaccatggcgacccgtatccagtttgagaacaactgtgaagttggtgttttctccaagctcacaaatgcctactgtctggttgcaattggaggatcagagaatttctacagtacatttgagtctgagcttgcagatgtcattcctgtggtcaagacctctatcggtggcactagaataattggtcgcctctgcgttggaaacaagaatggacttctcttgccacacacaaccactgatcaagagcttcagcatctgaggaactgcatacc

SEQ ID NO: 438228 - DNA, 375 bp, Triticum aestivum
aatccactccaatccaatccccacagaaatccccatctcaaaaccctagcccgtccgatcccggcgagatggccaacccgagggtgttcttcgacatgaccgtcggcggcgcgccggccgggcgcatcgtgatggagctgtacaaggacgcggtgccgcggacggtggagaacttccgcgcgctctgcaccggcgagaagggcgtcggcaagagcggcaagccactgcactacaagggcagctcgttccaccgcgtgatccccgacttcatgtgccagggcggcgacttcaccaagggcaacggcaccggcggcgagtccatctacggcgagaagttcgccgacgagaagttcgtccacaagcacaccaagcccg

SEQ ID NO: 438229 - DNA, 368 bp, Triticum aestivum
tccctaatgaagggttcgaccggcaagtcgccggcggcggcgccgcccgccttccggaacaggtactggatcctccgccacggccgcagcgtccccaactagcgcggcctcatcgtctcctccctggagaacggcacgaaaccggagttcgggctggccccgcagggcgtcgagcaggcgcgctccgccggcgagtcgctctggaaggagcttgaggagatgggtgtgccggtggactctgtcaagatccggtactcaccgttctcgcggacgacggagacggccagggtggtcgccggcgtgctgggcgtcccatttgagggtcctagctgtaaggttaccgtggaacttcgtgaacgttattttgg

SEQ ID NO: 438230 - DNA, 364 bp, Triticum aestivum
ttcttgtgggaccactacctcgatcttctccaggccgactacactgagggggatgctctggatgccttgggcttggttcgctactgctgccgccgtatgctcatgacccatgttgacctcattgagaagttgctcaactacaacaccctggagaagacggagacaagttgaagttaattgaacccattctgcctcgaaacctttgttcctttgtactttccaagatgctgtttcttgcgtcagtgcttaggaggtgcaaagtgaggcactgaaatgaagttggtttgttcatgaatctccaaggactgttagtgtgaccatgcgtttctactatgtgatcttcaaggctatattaaccaacaag

SEQ ID NO: 438231 - DNA, 355 bp, Triticum aestivum
  unsure (1)..(355): unsure at all n locations
ttcttgaaccatttaagatagtactaaatcagagacagaaagtctgttcgcagaggaacaaagtcgatgaagatcgtgttctcggtgctcctgctatgtatgctcgtggcnacacccatggggtccgagtacggcgcatggagctataacagtggtccctggatgtgctatccttttcaggccttccaggtgcccgcgctccctggctgtcgtccattgctgaagctccagtgcaatggcagccaggtgcccgaggccgtcctaagggactgctgccagcagctcgccgatatcagtgagtggtgcaggtgcggtgccctctacagcatgttggatagcatgtataaggagcatg

SEQ ID NO: 438232 - DNA, 372 bp, Triticum aestivum
tatcgaagcaagcttgtagccaaccaccatgaagaccatgttgatcctcgctctcattgccctcgcggcgactagcgtcgttgcgcagctggacactacatgcatccagggctatgggcaatgccaacagcagccacaacaacaggtgaacacatgcgctgctctcctgcatcagtgtagcccgacaccatatgtccagtcacaaatgtggcaggcaagcggttgccagttgatgcggcaacagtgctgccaaccgctggcccagatctcggagcaggctcggtgccatgccgtctgcggtgtggcccaggtcatcatgcggcagcagcaagggcaaagtttcggtcagcctcagcagcagcaagggcaaag

SEQ ID NO: 438233 - DNA, 445 bp, Triticum aestivum
ttctttagatcatcaatcatgttcaatcccttcaaagacaagtcgagtacctgtcaatgagactcgcagcagtaaacccaagggttgactttggtgggctagacaaccttttgactacagagtgtggaaggataacaggtttaaactgcaagagtggaatggacttggagcaagtcagctggcctgacatgggcgttcacggagcaagaaatctcgcgcagctacaacagcagttctggcatggtgatttggcacatccacatcagccagcttcacagtgggaaaaacggggggatgtacaaccccctggctttagcaacaccagttcttctctcttcggctacgatctcgcaagctctggaccgcagcaaccgccaacaagcaagctaaaagcagagctgtgagctacatcagtatattgcaggccaggagagcgagctacaca

SEQ ID NO: 438234 - DNA, 314 bp, Triticum aestivum
  unsure (1)..(314): unsure at all n locations
tttcttcccggcgtacgtgccggggcggcggcccgaggcgccgcccaacggctacgcgggggtggacggcatggtgagcgtcatcgcgcacgagctatcgtatatntcntccaacccnttggccaacgcgtggtacgccggcggggacccctccttccccaccgagatcgccgacctctgcgagggcatctacggcaccggcggcggcggcgcgtacaccggccagctgctcacctacgggcggtccggcgcgtcgtacaacctgaacggtgtcggcgggcgcaggttcctggtgcagtgggtgtgggacccct

SEQ ID NO: 438235 - DNA, 412 bp, Triticum aestivum
tttcggcaagctctacgagttctgcagcggccagagcatgcccaaaacacttgagagataccagaaatgcagttatggtgggccagatacagcaatacaaaataaggagaatgagttagtgcagagcagtcgaaacgagtacctcaaactgaaagcacgagtggagaatttgcatagaacccaacgaaatttgcttggtgaagatctcgggtcactcggcatcaaagatctggagcagctcgaaaagcaacttgattcatccttaaggcacataagatccacaaggacacagcatatgcttgaccagctcactgatctccaaaggaaggaacaaatgctgtgtgaagcgaataagtgccttcgaagaaaactggaggagagcagccagcagatgcagggccaaatgtgggag

SEQ ID NO: 438236 - DNA, 417 bp, Triticum aestivum
  unsure (1)..(417): unsure at all n locations
tgtgtgccagagtgctagacgagagagagagagagaccgagagacatcggccgtgaaggttccggaaggatgcctcgcgcggggttgtcggcggtttcgagcaaggtggacgtggccatcgacctcgggaacccgctcctcaaccgcaccgtcgacntcttcctcaagatcggcgccgtcggcgcctgcagggtggccgccgaggacgccttcgactgcctccaaagtgggagtgtctcgaagcgcaagcttgagaagacactggaaaaaatgtgcaaggagggcgcatattggggtgctgttgctggagtgtatgtaggcatggagtatggagtggaaagggtccccggagagtatgactggaaaaatgcattgattggaggcatcgcaagcggcaccctgatctctgctgctagc

SEQ ID NO: 438237 - DNA, 405 bp, Triticum aestivum
ttataggaggacctgatggacgagctcatgaggatacacgaggaaggtgacctcgaggtgcctctcaccattggcaacatcaaggctgtcacgatagatctctttggcgccgggaccgagacgtcagcagatgcactccagtgggcgatgtcagagcttatgaggaacccgagagtgatgcataaagcacaggccgagctgcgcgacaaactcggcgggaagcctaccgtgaccgaggccggcctggccgacatgacctacctgaagctcgtcgtcaaggagaccctgaggctgcacccggcgctgccattgctcgttccaagggagtgcaacgagacgtgcaagatcatggggtacgacgtgcccaaaggcttcgtcgtgttcgtgaatgcatgggcgatcggc

SEQ ID NO: 438238 - DNA, 462 bp, Triticum aestivum
tttctcgcgtccggaatcagaaggagacaagaacgaggttaatgagagtgaggatctgaaggagattgttcttgatgatctagagcccaaggttttcaaggcaatgcttcatttcatctacagagataccctcgttgatgattatgagttggatgcatcaggctccatgggctctatttttgatactttggcggcaaagttgttggccgcagcagacaagtatgacttaggaaggttaagattgctatgtgaatcttacttgtgcaaaggcatttctgtggcctcggttgcaagtactcttgcattggctgatagtcaccatgccatggagcttaaagccgtttgcctaaaatttgctgcagaaaatctttcagctgtgatccggactgacgggttcgattgcctcaaggataattgcccatcacttcagtcggagatactgagaactgttgctgggtgtga

SEQ ID NO: 438239 - DNA, 437 bp, Triticum aestivum
tttctttgacgcgtgggccttcctgttgaccatgtcctgggccagcgcctccatcacatactggatggtcaagttccggccaggattcagctacttcgccttcttcgccctcaacctctatggtggcgtctccgtcatcgagagcctcatgatgatcatctcctcccttgtgcccaacttcctcatggggctcatccttggcgccggcgtcattgggatcatgatgctgacgtctggattcttccggctccttccggaacttcccaagattttctggaaatacccagtgtcctacattgtctacggctcttggggtttgaagggtgcatacaagaacgacctgctcgggctggagttcgagccgatgacgccgggaggcgagaagctgaccggcgagttcatcatcaccaacatgatggggctgagcgtcagctact

SEQ ID NO: 438240 - DNA, 374 bp, Triticum aestivum
tttttgcctcgtcgcggaacagtgctgccaccgccggcgccatgagtaagttgcagagcgacgccctgagggaggcaatcacaaacattatcaatgactgccgtgagaagaaccgcaagttcgttgaaaccattgagctgcagattggtctgaagaactattacccgcaaaaggacaagcgtttcagtggttctgtcaagcttcctcacatccctcgcccaaagatgagggtttgcatgcttggtgatgcccagcacgttgaagaggcagggaaaatgggcctagactgcatggatgtggaatcccttaagaagatgaacaaaaacaagaagctggtcaagaagcttgcaaagaagtatcatgctttccttgca

SEQ ID NO: 438241 - DNA, 304 bp, Triticum aestivum
  unsure (1)..(304): unsure at all n locations
taagcacaaggagcacctcggcgagatgggcgccgccgccgccggagccttcgccctctacgagaagcacgaggcgaagaaggacccggagcacgcgcacaatcacaagatcgaggaggaggtggccgccgctgcagccgtcggcgccggcggcttcntcttccactagcaccactagaagaagcaggaccacaaggaggccaaggaggccagcggcgagaagaagcaccaccacttcggctagatcaccgttgacgtgcggtggccggcctcgccgccggccgtgcgtgtgcttacgttacgt

SEQ ID NO: 438242 - DNA, 371 bp, Triticum aestivum
tgttcattgaaccactgaagctcctatttaaggatgaggttcggaagctgggaagtatcctaaatgtcccagagtcattcttaaagcgacacccatttcctgggcctggtcttgctgtacgtgtcataggtgatgttacagcaggcaatgctctggaggttcttcgtcaggtggatgagatatttattcaagccattaaagatgcaggcctctatgatgaaatttggcaagcttttgctgtgtttttgcctgtccagacagttggggtccagggtgaccagagaactcactcccatgtggttgctctaagggcaattactagtgaggatggcatgactgcaaattggtatgattttgagcgcccgttcctg

SEQ ID NO: 438243 - DNA, 399 bp, Triticum aestivum
gcttctccgccatgaagttgaacatcgcgaaccccaccacggggtgccagaagaaggtcgagatcgatgacgaccagaagctgcggaacctttatgacaagagaatctcccaggaggtagttggtgatcttctgggtgaggaattcaagggttatatcttcaagatcatgggtggctgcgataagcagggcttccccatgaagcaaggggtgctaacttctgggcgtgtccgccttctgcttcacaggggcacaccttgcttccgtgggtttggcaggcgtaatggtgagcgcaggcgaaagtccgtccgtggttgcattgtcagccaagacctgtctgttatcaacttggtgattgtcaagaagggtgagaatgatctgccaggccttactgacactg

SEQ ID NO: 438244 - DNA, 339 bp, Triticum aestivum
gtttcggcaagaagaaggccccgccgaagaaggccaaggcgcccccgaccaccgaccggccgctgtggttccccggcgcgcaggcgcccgagtacctcgacgggacgctcgtcggcgactacggcttcgaccccttcggccttgggaagcccgcggagtacctgcagtacgacgtggactccctggaccagaacctggcccagaacctggcgggcgagatcatcggcacccggttcgaggacgccgacgtcaagtccaccccgttccagccctacgccgaggtgttcggcctccagaggttccgcgagtgcgagctcatccacggtcgctgggccatgc

SEQ ID NO: 438245 - DNA, 414 bp, Triticum aestivum
tttagagccgcgacgtgggcaagggcttccgctgcgtacgcatggtgaacaacatctacctcaacttcgacgccttccacggcgacaaggcccacggcggcgtccacgacggcaccgaggtcgtgctctggaagtggtgcgagggcgacaaccagcgctggaagatcctcccctggtagatgagatgccaggagagctttcgcattgccatcgacacatcgccatggattagtccggggacaagcccccccgccccgagtcgtcgtccgtccgtccatcgtcgtcgtagtagtcctctgccgctggtagcgaataatgttgctgtgtccaaataaaaccgtgtgcgatgtgtggcaatggtgtctgtgtgcgtccgtcgtgtgtcgccttgtgattgaatgattgagccggcgt

SEQ ID NO: 438246 - DNA, 370 bp, Triticum aestivum
tcttccacgcgtccggcaagctatatacctacatagtacagccatggcccccaccgtgatggcctcgtcggccacctccgtcgctcctttccaggggctcaagtccaccgccggcctccccgtcagccgccgctccaacggcgctagcctcggcagcgtcagcaacggtggaaggatcaggtgcatgcaggtgtggcccatcgagggcattaagaagttcgagaccctgtcctacctgccaccgctcagcacggaggccctcctcaagcaggtcgactacctgatccgctccaagtgggtgccttgcctcgagttcagcaaggttgggtttatcttccgcgagcacaacgcatcccctgggtactacgat

SEQ ID NO: 438247 - DNA, 421 bp, Triticum aestivum
cacttaggcacagccgccgccgccgcggctcccaggacagcagccaaggaagaggaagccaagcctccgccatgccgaaatccaagcgcaatcgctcagtcaccttgtccaagaccaagaagaagcctggtctagagcgtaagggcaaggtggtcacggagatcaaagacgcgattgagcgccacagcagcgcctatgtcttcaccttcaacaatatgaggaatcagaagctcaaggacctcagggaccaacttaaatcctctagccggatattccttgctggaaagaaggtcatgcagatagcattggggcggtcacctgctgatgaagctaagacaggcctgcataaactctccaagttccttcaaggtgcttctggattgttatttacaaatctcccagggatgatgttgagagatta

SEQ ID NO: 438248 - DNA, 469 bp, Triticum aestivum
ggaattcatacatcgactgaagcagcatttgttcctaaagttattgacttggcagccagagaactcacttcccttgctactcctggtcaagttgaccaaacccaactggaacgtgctaaagcatttgcaaaatcagctatcttgaagaacctggaatcaaaggcatcaacaactgaagacatggggcgccaagcattggcatttggtgaaaggaaacctgtggagcagcttcttaaggctgttgatgctataactctggcagatgtatcaactgttgctgagaagatcatctcgtcaccattgacaatggcatctcatggaaatgttctcaatgtaccagcctacgagacagtgcgtggcaagttcagctcgaaatgaggaggcttctgaacaagttaactgttcatatttaattttctccaagacctggtcacatttttcacaagaaaaataagatgcatacaatttt

SEQ ID NO: 438249 - DNA, 429 bp, Triticum aestivum
gttatcagcctcctcctcttccctcgccgcccgccgcccgccgaggttggtcgccggacgccatggcccccaccaagaagtcgaagaagagcacggagaacatcaacaacaagctgcagctggtgatgaagagcggcaagtacacgctcggctacaagaccgtcctcaagacgctccggagctccaaggggaagttgattatcctcgcaaacaactgccctccgctcaggaagtctgagatcgagtactatgctatgctgtccaagatcagcgttcatcatttccatggaaacaatgtggatcttggaactgcgtgtggcaagtactaccgggtgtgctgtttgagcatacttgaccctggtgactcggacatcatcaccaccgttcctcagtgaagacaagcttacctatcctagcctaagatgatgt

SEQ ID NO: 438250 - DNA, 326 bp, Triticum aestivum
gagaatagaaaatacacaaaagatagaccacgattgccggcatcgagcccgacgaggcgtcggaggtgcgacaaagatgaggaagaagctgggcacccggttccccgcggcacggatcaaaaagataatgcaagcagatgaggatgttggcaaaattgcactggctgtgcctgttttagtttcgagagccattgaattgtttctgcaagatttgatcgaccactcatacaaaattactcttcaaagtggtgcaaagacactgaattccttccacctaaagcaatgtgtgaagaggtacagctcttttgacttcctaactgagattg

SEQ ID NO: 438251 - DNA, 462 bp, Triticum aestivum
gtgttccatgatggcacaaagatggcatgctgggctctaccagagctttcaactttccaagataaattagggagagaggcttatgataaggtagatgtcataggtatcgatgaagcccagttcttcgatgatcttcatgatttttgcagcaaagctgctgatcatgatggaaaaatcattgtggttgcagggctagatggtgattacaaaaggaacaagtttggctcagttctggacatcattcccctggccaactcggtcaccaagctgacagcacggtgtgagttgtgcgatcgccgggcgtccttcacattgaggaagacacaggaaaccaggactgaactcattggtggagccgatgtgtatatgcctgtgtgcaggcagcactacctggacgggcagattgtcatcgaggccacacggattgtcatggatattgaaagatccacggaagtagctcgc

SEQ ID NO: 438252 - DNA, 322 bp, Triticum aestivum
tctccatatccacaaccgcaaccacagtatccgcaaccatattaaccaatttcgcagcatcaagcacaacaacaacaacaacaacaacaaatccttcaacaaattctgcaacaacaactgattccatgcagggatgttgtcttgcaacaacacaacataacgcatgcaagctcacaagtattgcaacaaagtagttaccaacagttgcaacaattatgttgtcagcaactgtttcagatccccgagcagtcgcggtgccaagccatccacaatgtcgatcatgctattattctgcatcatcattaacaacaacaacaacaac

SEQ ID NO: 438253 - DNA, 322 bp, Triticum aestivum
  unsure (1)..(322): unsure at all n locations
tgnatacgcacagctcgaccgcaatggcgtcgctcgtcgccgtccagccggtcgccgtgaggggcctggccggcagctccatctccggccgcaagctcgccgtccggcccgcctccgccgccgtctcccgctccacgcgcagggctcgcggggcggcggtggtggccaagtacggggagaagagcgtctacttcgacctggacgacatcgccaacacgacggggcagtgggacctgtacggcagcgacgcggcgtcgccctacaacggcctgcagagcaagttcttcaacaccttcgccgtgcccttcaccaagcgggggct

SEQ ID NO: 438254 - DNA, 193 bp, Triticum aestivum
tcacccagcgccagttttgtgaagctgtcggacatgggctccgaggagtggaatgcgttcctcgacaagttccaggagctcctcccgagcgccttcgaagcacggaagcacgctgctggcgccggcccgcgcccgctgcagaggctgggaacttcttgccagttttgaaggtagcagtacgtacccaaaggta

SEQ ID NO: 438255 - DNA, 236 bp, Triticum aestivum
tcggtggagaagctgataacatcaaagatgatacttgctgggtcgaaccggagacttcattccgtgcaccgaaactctggcttggctgtggctgggttagcagcagacggtaggcagatagtctcaagagcaaagtcagaagcagccaattatgaaaaggtatacggagaacccatgcctgtaaaggaattagctgatcgtgttgctagctatgttcatctgtgtacactctactg

SEQ ID NO: 438256 - DNA, 272 bp, Triticum aestivum
tggtgctggagaacggcgtgctctgggaagtcgacggtcattgggtcgttcaaggagcagttgatgtggacattggagccaatccctctgctgagggtggtggtgatgatgagggtgtcgatgaccaggccgtgaaggaggttgacattgttgacaccttccgtcttcaggagcaacctgcttttgacaagaagcagcttatctctcacatgaagcgctacatcaagaacctctctgccaagcttgaaggggatgacctagatgttttcaag

SEQ ID NO: 438257 - DNA, 330 bp, Triticum aestivum
gttatttcttcgctgaacagtgctttgatctgctggaaaaatgctcccaacctaccagcaaagaactttcatgcattgacaaggttggatgaaaatagagccaagtgtcagctagcgttaaaagctggtgtgttttatgacaaaatatcaaatatgactatttggggaaaccattcaacaactcaggttcctgatttcttgaatgccaaaattaatgggaggccagtaaaagaagtcatcaaagatacaaagtggctagaagaggatttcactataactgttcaaaagcgtggaggtgtgctcatccaaaagtggggctgatcttcagct

SEQ ID NO: 438258 - DNA, 284 bp, Triticum aestivum
gatatgttgaacttcttgaggaatgcaacataaatatcccttcatggttttccttcaactcaaaagatggagttaatgttgtgagtggagactcattaatcgaatgtgctaaaattgctaatgaatgtgcaaaggttggtgcagttggcataaactgcacacctccaagatttattcatagcttgatactctccattcggaaggtcacagacaagccaattctgatataccccaacagtggagaaagatacgatgctgagaaaaaggagtgggtggaatccact

SEQ ID NO: 438259 - DNA, 313 bp, Triticum aestivum
cgttttgtttgggagattcctgatgtgcagcctggatgcatcattcagatgagattgcaagttcctgagaacaaacggcgagagtctacattgaaagggattgtgatagcaaggcgcaatgctgggataaatacaaccttcagattgcgtagattagtagctggtgtgggagtcgagtccgtctttccactttactcaccaaacatcaaagaaatgaagatcttggacaggaagaaagtcaggagagctaagctgtattacctgagagacaggatgaatgcacttaaaaaatgaggctttcggctaggatttt

SEQ ID NO: 438260 - DNA, 300 bp, Triticum aestivum
ctccaactcgcaccccgctgggggcctccacctccgcctccgcctgcgctgctgctgctccgccagcgatccggcgccgatggtgaaggccatcagggtccacgagctcggcggccccgaggcgctgcggtgggaggatgtggaggtgggcgagcccggggacggcgagatccggatccggaacaccgccatcggcgtcaacttcatcgacgtctacttccgcaagggcgtctaccccgctccccttcccttcacccccggcatggaagctgttggcgtggtgactgccgtggggcccgg

SEQ ID NO: 438261 - DNA, 356 bp, Triticum aestivum
ggaaagaggaggtgggcaacgtgccgacgcggcggatcgggtccgcggcgggcgccatagccagcacggccacgttcccgctggaggtggcgcggaagcagatgcaggtgggcgccgtgggcgggaggcaggtgtacaagaacgtgctgcacgccatgtactgcatcctcgagaaggagggcaccgccgggctctaccgcgggctcggccccagctgcatcaagctcatgcccgccgccggcatctcctacatgtgctacgaggcctgcaagaagatacttgtcgacgagaaagaagacggcggcgccgtcgagccccaggaggagacggagaccggacaggcaggaggacaggcg

SEQ ID NO: 438262 - DNA, 318 bp, Triticum aestivum
tccgcgatatcacaaaatatcacatccttccacatgagttgctcttcggaatgatagctatatgcttcatttggtccttccaagcaaagttgatccactggtcaatcttatgaaagttgataaggtcccagattctacatatgatatgattggaggtcttgatcagcaaatcaaggagatcaaagaggtcatcgagcttcctatcaaacatcctgagttatttgagagccttggaattgcccagccaaagggtgttctcctttatggaccaccagggacaggcaaaacattactggcacgtgcagttgctcatcacac

SEQ ID NO: 438263 - DNA, 281 bp, Triticum aestivum
tggtaatctctgggatctctttgttccaagcaggggaactattcaggactagcttggtatgtcgccggccaaatcgaccgcacactgagctggaaggtaaaccaagaagaagaaaaatgtcttacttgaacttgacaactaactccattcgtgtatgaaatttgttctagttgccgtggctctgaactgaagatgtagccttgtggtgcaggatgtgaagtggctgcagtccattaccacgatgccgatcctggtgaaaggagtgatcaccgcagaggaca

SEQ ID NO: 438264 - DNA, 290 bp, Triticum aestivum
attaacaagtctgccccaaggatgcccgatgtgatcattcctgaggatctggttgacaacattgcgctatctacacgtcatgagatcaacagagcctttgcaaaccgtcattcagattgctcttggccgtgacataaagaaggtccttatggtgattgctggtctatggctgctttccattctcggcagttgctgcaacttcttgacgctgatctacattgtttttgtggttctgcacacagttccagtaatctacgagaagtctgaagatcagattgatacctatggtg

SEQ ID NO: 438265 - DNA, 450 bp, Triticum aestivum
ctctttcttgcggcactcacactacactcatccacgcacaagctaatctagcggcgtggctcacttcagtccagtcggcatggcggctcccaggggcgcggcactggtgctggcgatggtgctcgcggcgatgctggtggcgccgccggcgacggtgcacgccatatcctgctccacggtgtacagcacgctgatgccgtgcctgcagtacgtgcagcagggcgggtcgccggcccggggctgctgcaccggcatccagaacctgctggccgaggccaacaacagccccgaccgccgcaccatctgcggctgcctgaagaacgtcgccaacggcgcctccggcgggccctacatcacccgcgccgccgcgctcccctgcaagtgcaacgtcgccctcccctacaagatcagccccagcgacgactgcaactcgatccactgaacgaactg

SEQ ID NO: 438266 - DNA, 290 bp, Triticum aestivum
gctccgatcaagatcggcatcaatggtttcggccggatcggcaggcttgtggccagggttgcgctccagagccccgatgtcgagctcgtcgccgttaacgaccccttcatcaccaccgactacatgacctacatgttcaagtatgacactgtccacggtcagtggaagcaccatgaagttaaggtgaaggactccaagacccttctctttggtgagaaggaggttgcggtgtttggctgcaggaacccataggagatcccatgggctgctgctggtgctgagtacgttgt

SEQ ID NO: 438267 - DNA, 372 bp, Triticum aestivum
gtctttttttgcaatggtgacatccctggcctcgccacccataccggcgccgactcatgggtcgctaccaacatcgcgccatactacccctcgacagatatatctctcatcgccgtgggcaacgagatcatggacacgaccgacaagaatctcatcggcaagctcgtccccgccatgcagatgctcaaggatgcgctcgtcacggctggctacaacgaaattcgtgtttccacgccaagctcactcagcatcctggtagactcccagctgccgtccgcggctcggtttcgcgacgtctgggatgacgccatcttcacgccgatgctccaatttctccggcagaccaagtcgccactcatcgtgaacatgtac

SEQ ID NO: 438268 - DNA, 429 bp, Triticum aestivum
ggctttgttaaccaaggcgcctcccaagactcacaagaggtacaaccccaagaagctgacctatgagcagaggaaggccagcctcgtcgaaaggctcaacgccctcaacaactctgccggtgccgccgatgatgacgaggaggacgacgagtgaagagcgttcttgtccaccccagtgtagtattgcaacgtgcgtttttgttgaagtctggcaccctgcccaacgggcctgttcctttgagttttggttatgtcgcttgagttatagattgtgttatctggattatgtgccgtgctggcatttggatcttaatcttaatcctttagtctggcaccctttctttattttttgtggctgttccatgctggttggccttaggttgacatgaccttcgttgaggtcttttcagcttattactaaccatacta

SEQ ID NO: 438269 - DNA, 415 bp, Triticum aestivum
gtcttaggtgtacccgctgttcgcggcgacgggcgtggccatcggcatctgcgccttcagcctcctccgcaacatcaccggcaacccagaagtcagggtcaacaagatggggagggcagcaggagtgcttgagaaccatgaggagggcaggcgctacgccgagcacggtctcagagcctatgtgcaggacaagacccccgagatcatgccaggaatcaacaagttcttcaccagcccgaaatgaagcactttagtctctctgtgactcgctattagcaactgttgtggtcaagtgcaaacctatttcaagcattcagtaatgttgtcgcgtccataattcagaggatatcataaagtacctcttattgaaagaaccatgtgatgtttgatggcttgctatatatgtgatggttga

SEQ ID NO: 438270 - DNA, 415 bp, Triticum aestivum
ccactgttttgtgaccgtgagctctcagaggactggctggtctatttcatcggacagggaaaaagaatgttttgcttcttgcctcttcatttgctacgacttgattcgtgcggatgttgctcttgagcttgcatggacgaataacatgctggattttgcgttcccctatctattacagttcatccgtgagtacacaagcaaggtggatgatttggtgaaggacagaatagaatcgcagaaggaagaaaaagctaaagagaacgaagagaaggaactagttgcgcagcagaacatgtacgctcaattgcttcctctggccttgcctgctccgcccggcatgatgggcggtccacctccgatgggtggaatgggcatgccgccgatgggcgggatgggtttgcctccgatgggtcct

SEQ ID NO: 438271 - DNA, 455 bp, Triticum aestivum
tttttatcaagcagatccctcgtctccttggccctggtcttaacaaggcaggcaagtttcccactctggttagtcaccaggaatctcttgaagccaaggtcaacgagacaaaagctacagtcaagttccagctaaagaaggttctttgcatgggtgttgctgtgggcaacttgtcgatggacgagaagcagatccaacaaaacatccaaatgagtgtcaacttccttgtgtccctcctgaagaagaattggcagaatgtgaggtgcctgtacgtgaagagcaccatggggaagcgtgtacgggtgttctaagtgtgtgcgctccagtgaagttgataagataccgggctttcctgccgacccctgcttgtctttggattagatctgtttcactgataccaattttgtgtttgcctaagcgaatatcaacaagtatttaatcgtactagtcttatc

SEQ ID NO: 438272 - DNA, 269 bp, Triticum aestivum
tttttctgctagggttttggtccttcggtttcggcggctcaagatgggggagagggtcaagggaaccgtgaagtggttcaacgtcaccaaggggttcggcttcatctccccggaggacggcagcgaggacctcttcgtccaccagtccgccatcaagtccgacggctaccgcagcctcaacgagaacgacaccgtcgagttcgaggtcatcaccggcgacgacggtcgcaccaaggcctccgacgtcaccgcaccaggaggaggagcgc

SEQ ID NO: 438273 - DNA, 375 bp, Triticum aestivum
tctcttcaccggagtcgccgccgccatggccgccggggtgccggagctgcagggcgcggctatgccgatggcgacgctggccggggttgccctcgcgcaggcgctggcggcgggggtgctggtgacggcggggttccatgtgtcgggcgggcacctcaacccggcggtgacggtggcgctgctggcgcgcgggcacatcacggcgttcagggcggtgctgtacgtggcggcccagctgctggcctgctccctcgcctgcatactcctccgctacctctccggcggccaggccactccggttccggtgcacaccctgggcacaggcataggccccatgcaagggctggtcatggagatcatcctcaccttctccct

SEQ ID NO: 438274 - DNA, 427 bp, Triticum aestivum
  unsure (1)..(427): unsure at all n locations
tggatgcttcaatatgatggtgagttgaagcttccaagcaagtaccttgtttccccacctttgattgagaggacatctggtgaatacttggtgaagaatggtgtccgcaccttcgcttgcagtgaaacagttaagtttggccatgtcacatttttctggaatggaaaccgttcgggatactttgacgagaccagggaagagtatgtagaaattcccagtgacagtggtatcacattcaatgagcagcccaaaatgaaggcacttgaaattgctgagagaactcgggatgctatcctcagtgggaagtttgaccaggtgcgtattaacctgccaaacggtgacatgngttggtcacactggtgatattgaagccacagttgttgcttgcaaggctgctgatgaagctgtcaagatggtcttggatgct

SEQ ID NO: 438275 - DNA, 433 bp, Triticum aestivum
ccacgcgtccggaccgtagcttgcgtatggccaaccttgtcaatttctccctcgactccaagcgtgagaatagagaaatggtttcaagagcaactcttctatctgagttggctgcgaaaggtgtgatttcatgtgcttcccaagaagtaaaagatctatacaaccttatggagcatgagttccttcctctggatctagcatcaaaagtgcagcctctgctatccaagatttctacgattggaggaaagctttccgctgcatcgtcagttccggaaattcgtttatcacagtaccaaactgcattggagaagcttactgcactgagggtgctgcagcaggcatctcatattttccagtccatgaaaattgatatgctatctagaatgatcccattctttgagttcattgtcgtcgagaagatcgctgttgatgc

SEQ ID NO: 438276 - DNA, 337 bp, Triticum aestivum
  unsure (1)..(337): unsure at all n locations
tcctgcgcgcagctggagtcactgaacatctccgccgggagcgtatcacagacagtcgacttgcagacactttacagcatagaaggctgggatgcatatgccctggctttccaagcagtggatgagcaggcgagcattgagtttaggaaccctggcatggaggacgacccgacctgcgggcctatccttgacaacgtggccatcaagaagctcttctcccccgacaaagcaaaggagaacatgngtgatcaatggagactttgaggaggggccaatggatgtttccaaacacaagctttncgtgtcctgctcccgacgaaccttgacgagcagacat

SEQ ID NO: 438277 - DNA, 308 bp, Triticum aestivum
tcattcccagatcccccaagagctccctctcccccacccacgaagcgcctcccatcccgatggcccgcacgaagcagacggcgaggaagtccaccggcggcaaggcgccgcggaagcagctggcgaccaaggcggcgcgcaagtccgccccggccaccggcggcgtgaagaagccccaccgcttccgccccggcaccgtcgcgctccgcgagatccgcaagtaccagaagagcaccgagctgctcatccgcaagctgcccttccagcgcctggtgcggggagatcgcgcaggacttcaagaccgacct

SEQ ID NO: 438278 - DNA, 279 bp, Triticum aestivum
tgccaccatgagcggagtgacctgttgcctgaggttccccggccagctgaactccgacctccggaagctggcggtgaacctgatccccttcccgcgtctccacttcttcatggtcgggttcgcgccgctgacctcacgcggctcccagatgtaccgctccctcacggtcccggagctgacccagcagatgtgggactccaagaacatgatgtgcgccgccgacccccggcacggccggtacctgacggcctcggccatgttccgcggcaagatgagcac

SEQ ID NO: 438279 - DNA, 452 bp, Triticum aestivum
gtttcttggctgacacctccaagaagggcgagggcaggctcaaggccgccggcggcgccagcaagaggaagaaggacgccgctgccgctggcaagcccaagcgcccgccctccgcctttttcgtcttcatgtctgagttcaggcagcagtacaacgcggagaaccccaacaacaagagtgtcgccaacgtgagcaaggcggcgggtgagaagtggagagctatgtctgatgaggagaaagcaccttatgtggaaaaggctgaacagaagaagaaggattatgagaagaccaaagccacctttgataacaaggagagtgcgagctccaagaaggccaagactcagaacgatgaggaggtcaaatctgaggtcgaagatgagggtagcgatgaggaaaatgaggacgatgacgagtaaatagtgtatcagatcatgaggtagcaaattgggtgt

SEQ ID NO: 438280 - DNA, 368 bp, Triticum aestivum
gtcatttttttacttctgcaagagggaagggtccggttcgggttcgtcgtcggacgaagtcgactgctactcgtacgaccatcctttccaccaggagctgtacaactatgtgaagcagcaagctctgaggaaccaggacagcgtcggccccgcgaagcaagggtcgatgcatgtgagggtgccgacgccggacctggaggaggccaagatcatggagacgatccagtcggagctccacagcctcaaggcaggcgacggcatttcccgctccttcagcaggatcacgatcgaaggtccatgatgaccttgtttcctgctcatatcgaagatcgtcatggatatgatccatgatgatcggagtggctcga

SEQ ID NO: 438281 - DNA, 467 bp, Triticum aestivum
agatcttgttaggctggtccctgttctggatgcaatcaccaaaatccccgagatggaagggaagctgatctcagtagacacattctacggacaagtcgctgctgaagctgtgaaaagaggagccaccatgattaatgatgtgtctggcggacagcttgacccaagtattcttgaagttgtagctgaacttggagttccatatgttaccatgcacatgagaggtgatccatcaactatgcagagtgaacagaatttacagtatgatgatgtctgcaaagaagttgcttctgaattatatgcacggttaagagaagctgagttgtctggaattcctttgtggaggatagttcttgatcccggcattgggttttcgaagaaatccaaacataatcttgaaataatcaacggcttgggatccattagaaaagagatgggtaaagtgagtttaggtgctttacatgtgccaa

SEQ ID NO: 438282 - DNA, 141 bp, Triticum aestivum
ggttggctaggcagcgcctgtgctaccgaagggtttggagtgggctgggtttgtgatgaactcgagaatgctgtggaaggaggcagagggcaagcctgattgggtgaaggatcttgatgctgtgggggagaatggggagga

SEQ ID NO: 438283 - DNA, 362 bp, Triticum aestivum
ccgtctcctttctcctttccccaacccaaaccaggagcgccctccctcccccagccgcccgccccctccccacccaggaaaccagccatgaagggggccaaatccaagggcgccgtcaaggccgacaccaagttggcggtgaagagcaagggggcggagaagccggccgtcaaggggaagaagggcaaggccggcaaggaccccaacaagcccaagagggcgccctccgccttcttcgtcttcatgggcgagttccgcgaggagttcaagcagaagaaccccaagaacaagtccgtcgccgccgtcggcaaagcggccggtgagaggtggaagagcttgagcgaatcggagaaggcccccta

SEQ ID NO: 438284 - DNA, 373 bp, Triticum aestivum
ggtgggttgcctcgactacctcggcaaccccagcctggttcatgcgcagagcatcctcgccatctgggcctgccaggtcgcgctcatgggcgccgtcgagggctaccgcgtcgccggcgggccgctcggcgagatccgcgacccgctctaccccggcggcagcttcgaccccctgggcctcgctgacgaccccgaggcgttcgcggagctcaaggtgaaggagatcaagaacggccgcctcgccatgttctccatgttcggcttcttcgtgcaggccatcgtcaccggcaagggccctctcgagaacctcgccgaccaccttgccgaccccgtcaacaacaacgcctgggcctttgccaccaacttcgtgccc

SEQ ID NO: 438285 - DNA, 359 bp, Triticum aestivum
ctctaactggcctacctttccgcaaatatttatcaacggggagttcgttgggggctctgacatcatattaagcatgcaccagaaaggggaacttaaggatttacttggtgattccgcacaaaagggcgagcaagacagtgcccagtgaaacaagctacagttgttagcatttgcatggagatggatgcttcctctctgagtactcttttactcgacgctcttcctgcggtgttctgttgttttgacgcaggattttcatcgtcgtgttgccagccatgatggaaatctctcggttccaagagcatccaagttttcgcttcatgacaaataaatgccactttttcaatactctgtttttt

SEQ ID NO: 438286 - DNA, 426 bp, Triticum aestivum
aagaggctggtagacgccggtgtggatggcgtcatggtagacgtctggtggggcttggtggaggccaagggccctagggtctacgactggtccgcctacaagcagttgttcaagctggtgcatgaggctggactgaagctacaggccatcatgtcactccaccagtgcggtggcaacgtcggcgacgtcgtcaacatcccgatcccgcagtgggtgcgggacgtcggtgcgagtgatccggacattttctacaccgaccagcacgggactaggaacattgagtacctcacccttggagttgatgaccagcctctcttccatggaagatccgccgtgcagatgtatgccgattacatggcaagcttcagggacaacatgaaagagttcttggatgccggtgttattgtagacattgaagtcggactt

SEQ ID NO: 438287 - DNA, 362 bp, Triticum aestivum
tcgttctgagctacgactacctccccgaggaccgctggtcctcgagcgacctcctcatcgcgtccaaccccgtgtacaagaaggtgcccgtcctcattcacaacggcaggcccgtctgcgagtcgctgctcatcctggagtacctcgacgacgccgtcggccttgccggcaacggcaagcccatcctccccgcagacccctacagccgcgccgtcgctcgcttctgggccgcctatgtgaacgacaagctgttcccttcgtgcaccgggatcctcaagactacgaagcatgaggagagagccggtaagatggaggagaccctgtccgggctcagacacttagaagctgtcatggcggagtgc

SEQ ID NO: 438288 - DNA, 287 bp, Triticum aestivum
ttcacgcgcaatcgttcgccggacttcggcgcgctcgacccgaacttcttcttcgtccagggcttcagcgggctcggcgtcgcgctcaccggcatcgccggacgcgcgattgccggcgcgatcgcgggcgatacgcgcgcgttcgacctgttcgcgcgcctgcgtcaccggcgcttccccggcggcgacgcatggcggcaacccgcgctcgaactcgggatgctgtaccaccgtgtacgcgagctgttctgagccccctctctccgttctccagaccatgcagacat

SEQ ID NO: 438289 - DNA, 264 bp, Triticum aestivum
gcacaaaaaaattggggccttggatggctacacactgtatggagctggtggcagctgataatgactatgcagatattatgttgcatgaagaacgacctaactttggtggcataagcatagaagaactgcaccggctagtctatgctcaagttttgtgttctcattctttaacttggcatattgcaccgacttatctgtgctggtgtctgaaccaaggcctatggctgctggagattctacttctcaagcaacccatacaagata

SEQ ID NO: 438290 - DNA, 230 bp, Triticum aestivum
cttacagcaacaaaccgatgaggccaaacatcggtaaacaaaactggagaagaaattgaaacaaaggggcttacttaacaaggagtcagaggaatctaatgaagaagagagctattttttctgttgagctgacaccaagcttgtttacatctactgctgataatgcataccaatcaatacatgagttctcaaagcccttgatcaacatgatgaaagctgcaggttgggat

SEQ ID NO: 438291 - DNA, 410 bp, Triticum aestivum
cccacgcgtccggtttgagaccctgtcttacttgccacccctctctacggaggccctcctaaagcaggtcgactacttgatccgctccaagtgggtaccctgcctcgagttcagcaaggttggctttgtcttccgtgagcacaacagctcccccgggtactacgacggtcgatactggacaatgtggaagctgcctatgttcgggtgcaccgacgccacacaggtgctcaacgaggtggaggaggttaagaaggagtaccctgacgcctatgtccgcgtcatcggcttcgacaacatgcgccaagtgcaatgcgtcagcttcattgccttcaggccaccaggttgcgaggaatctggcaaggcctaaagtgcaagttgaaataactgatatacatgtcatgttagttcac

SEQ ID NO: 438292 - DNA, 417 bp, Triticum aestivum
tccacgctcgctcgctcgcccgacgcgatggctcccaccaagaaggcgaagaagagcggggagaacatcaacaacaagctgcagctggtgatgaagagcggcaagtacacgctcggctacaagaccgtcctcaagacgctccgcagctccaaggggaagctgataatcctcgcaaacaactgccctccccttaggaagtcagagattgagtactacgctatgttggcgaaaattagcgtgcaccatttccatggaaacaatgttgatcttggaactgcctgcggcaagtactaccgggtgtgctgcctcagcatcctcgaccctggtgactcggacatcatcagcaccaccaccaccacccagtgaagagaagagaagagagctctccacctattttatttagtcgagttgtagggt

SEQ ID NO: 438293 - DNA, 189 bp, Triticum aestivum
cttgagcgtcggccgcacctcccgtggcatgcaggcgatcatggccatcggcgtggacgaggagccggacaagaagacgctcgagaagattggggcgatcccggccgtcgaggagtttgtgttcctcgagctatgatggacagacagcgggcgctcgctccactcatcgctagaataagtgatcatccc

SEQ ID NO: 438294 - DNA, 503 bp, Triticum aestivum
gtcaaccactcccacttgctagctagcagcagccatggccgccctctcctctgcagcggtgaccgtcccttccttcgccgctaaggccgccacccccatgcgcggcagcaggatggtggtgcgcgcgtccctgggcaagaaggccgccagcgcggccgtggccatggcggccagcgcgatgctgctgggagtgggcgggtcggcgatggcgcaggacgtgctcctgggcgccaacggcggcgtgctggtgttcgagcccaacgacttcagcgtcaaggccggggagaccatcaccttcaagaacaacgccgggttcccgcacaacgtggtgttcgacgaggacgcggtgccctccggcgtggacgtctccaagatctcccaggaggagtacctcaacgcccccggcgagaccttctccgtcaccctcaccgtccccggcacctacggcttctactgcgagccccacgccggggccggcatggtcggcaaggtcaccgtcaact

SEQ ID NO: 438295 - DNA, 436 bp, Triticum aestivum
ctttgtttctcccatccccacattctggaggatcgtgaggagcaggtcgacggaggacttcgaggcggcgccgtacgtcctcacgttgctcaacacattgctatggctatactacggcttcaccaagcctgacggcctgctcatcgccacagtcaatggcttcggcgctgtcatggagaccatctacatcgtcctcttccttgtctacgcggccgatcatgccaaaagggttaaaaccacaaagttggtggcagctttggacattggattttttggggtcgtgttcgcgaccacaacattcgccattcgtgggcttgacatgaaaatcgtggtcattggattgatatgtgcttgccttagcgtgttcatgtatgggtccccactcgctgccgtgagaagggtgatcgcctcgaggagcgtggagtacatgcccttc

SEQ ID NO: 438296 - DNA, 384 bp, Triticum aestivum
tccacgcgtccgcccacgcgtccgggcatttccatgcaatcaatttggttttcaagaacctggatcaaatacacagataaagcaatttgcttgtacaaggtttaaagctgaatttcctatttttgataaggttgatgtcaatggaccatttacagcccctatttataagtttctcaagtcgagtgctggaggatttttgggtgatatagtgatagtggaactttgagaagttcctagtggacaaaaatggcaaagttgtggagagatatccaccaacaacttcaccattccaaattgagaaggacatccagaaactcactgcggcataagtgcttttgagtccggcttcagttaagcactcctgtatatattgccttttttttt

SEQ ID NO: 438297 - DNA, 475 bp, Triticum aestivum
ttttggttgaccttggagtatttttgtttgaggagccttcatgcatataatgtgctataggcccccccatgttgtctgattgtttcctggcttcctgcactcttattcactatgatatttctttcctgcaggttccgatgttcactgcttctggcttacgtgttcggttcctcaaggtatgtggagcaagtacaatatgaaacattgaaaatgtttggtactaaaaccatctcttgatgcattttcaggtgtgggagaagagtggctacaacaccgttgagtgggttcgctacatcacaagggctggatcatatgaaatcaggtgttagtgaccaagaaaaatggcgtgggctcattatttcgtggatttgcagagctctttttgtactcatcatgattgatcagatggcacgtaaattatgacccaattcgttgcaagtttgaacttcagcagagggcagatcagagcaggcag

SEQ ID NO: 438298 - DNA, 440 bp, Triticum aestivum
tccacgcgtccgagcgactccaaatctctcgtggtagacagcttccatctcatctccggcgatgtctgggcgtggcaagggcggcaaggggctcggcaagggcggcgccaagcgccaccggaaggtgctccgggacaacatccagggcatcaccaagccggcgatccggaggctggccaggaggggcggtgtgaagcgcatctcggggctcatctacgaggagacccgcggcgtcctcaagatcttcctcgagaacgtcatccgcgacgccgtcacctacaccgagcacgcccgccgcaagaccgtcaccgccatggacgtcgtgtacgccctcaagcgccagggccgcaccctctacggcttcggcggctgagcgccatcagcgcgctgccgctggctgacactgctgtttcctgctttgctctgtagtcttactcccc

SEQ ID NO: 438299 - DNA, 325 bp, Triticum aestivum
gtgaagctgacagactaggaggtggatgagatgatccgtgaggctgatgtcgatggtgatggccagatcaattacgaagagtttgtgaaggtgatgatggccaagtgagctgccatactaagctagttctatctcgatgttagcagctagtttagccttgaaaactgacagcacttggtactactgttaagtccagtgaatgaacatattgctcgctcttcctttcttctcagggatgttgagaatttcgtttggattttcctgcagttgtattacctttgtacaatgtagctttctttccaaattgagatcatgaatttgctgt

SEQ ID NO: 438300 - DNA, 399 bp, Triticum aestivum
gttgtcggcggaggcttaggccgtcggccgccgcgcggtccttgggctcatggccagcggagtcgtcgggagcgcgttcgctcaggtggtgcacgccggcaccgtcgcggccatcaaggttggccccccgccgccgctctccggtggactccctggaacggacaactcggacgaggcaagggacttcgacctgcccctgaagaaccggttctacctgcagccgctgccaccggcggaggcggtggtgcgggccaaggagtcggtccaggacatgctcaacctcaagccgctcatggacaagaagcaatggccgtacgttatgaacgacctccgtctcagggcctcctacctgcgctacgacctcaagaccgtcatctcctgcaagaccaccaaggagga

SEQ ID NO: 438301 - DNA, 479 bp, Triticum aestivum
ttcacgcgtccgccctcgcgtccgcccacgcgtccgctctgctggctagtcagttaggtgttgggttttttgatgacaagctgggggcactttgcatgcaatggttggaagataaggttttctcgatcagagaagctgccgcaaacaacttgaagcgcctggcggaggagtttggtccagagtgggcaatgcaacatataattcctcaggtgttggagaagataaacaacccacattatctgtatcgcatgaccatcctgcaagctatctcattgctagcccctgtcatgggtgcagaaataacatgccaaaagctgctccctgttgtcattaattcctcgaaggacagagtgccgaacatcaaattcaatgttgcgaaagttctgcagtcgcttgtaccaatccttgatcaatctgtcgctgagaagactgtgaagccatgccttgtcgagctgagcgaggaccctgatgtggatgta

SEQ ID NO: 438302 - DNA, 411 bp, Triticum aestivum
ttcacgcgtccggtcagccggaagtgcagccgccgatgcacggcggcaatggatttttccacccccttgatgctgctggtgaacccacacttcacatagggtaccctcctgagtccatgagtaactcatgcatgacaactttcatgcccccgtggttgccttgattgaagacggcgaagaaagtgcgaagaataagtatatacgtggcacccggccggccgcatatatgcatgtatactacttcgagtgatggattattccagtcaagatcctcaattattttgcgtgcaacttttgtgtgatgaaaacttcagaaccctgtatttgatgctcaacattattgtgttactgcatgtaaaagatcatacattgtattactagagtggctatgcgtgatgatattttcccctt

SEQ ID NO: 438303 - DNA, 418 bp, Triticum aestivum
gctcttgcggccacgacgggcccttcggcgccaccggggtcaagcggctccaggacatcggcatgatccaggcggtgcccgggatgaaggcgctcgacatgaacacggccgaggatgccatcgtgcgcctcacccgggaggtggtccccggcatgattgtcaccggcatggaggtcgccgagatcgacggcgccccgagaatgggcccgaccttcggcgccatgatgatctccggccagaaggcggcgcacctggcgctcaaggccctcggccggccgaacggcatcgacgggacgctcaagaacgtgaccccggcgctgcacccggagatgatcctggcggcgaccaacaacggcgacatcgtggacgcctaagcaaagcaatgaaccacggacaccaaggcgtacgtacgctggtg

SEQ ID NO: 438304 - DNA, 398 bp, Triticum aestivum
tgagcaatgctgttcatgctgatgaagccctccgccgtgccaagttcaagttcccaggccgtcaaaagatcattcgcagcaggaagtggggctttaccaagttcaacaaggccgattacatcaagtacaagagtgagggaagaatcgtgcctgatggtgtcaatgctaagttgcttggtgtccatggccccattgctaaacgtgcccctgggcaggcgatcctggcttgaggcagttgaagcatgcacagaccatttccttcactagatggaactcatgagttctgtttttgctttagctagtataattccccatgcttgaacgagtgttaagtaaagctggctgctggctgcagtataatctacttctgtagttctttactgtagaccgtttctcat

SEQ ID NO: 438305 - DNA, 396 bp, Triticum aestivum
ttgacgcgtgggcggacgcgtggggggtgagttttggagcaaacactttcatctcagtctgtaccacacaccacgcctgcctcatctctcggagcaggaggaggagcttgcaggaacaatggcagcccagggtcttctctctgggaggcagctgctggggaggcctctgcagtcctccatctccaggtcgtcttcctcccggaagtcccccttcgtcgtcagggcatcgtccagcccccctgccaagcaaaatgacaacaggcagctgtggttcgcgtccaagcagtccctcacctacctcgacggcacgctgcccggtgactttggtttcgaccccttggggctgtccgacccggagggcaccggcgggttcatcgagcccaggtggctggccta

SEQ ID NO: 438306 - DNA, 262 bp, Triticum aestivum
ttcacgcgtccgcccacgcgtccggcgcccgctccgaagccgccatgatcagcgacgggtgccagtggcgcaagtacgggcagaagatggccaagggcaacccgtgcccgcgcgcctactaccgctgcaccatggccgccggctgcccggtgcggaagcaggtgcagcgctgcgccgaggaccggacggtgctcatcaccacgtacgagggcaaccacaaccacccgctgccgccggcggccatggcgatggcgtccaccac

SEQ ID NO: 438307 - DNA, 398 bp, Triticum aestivum
ttaaccttgactggtacatgggcccaaccctggttgaggcgcttgaccagatcatcgagcccaagaggccctcagacaagcccttacgtattcccctccaggacgtttacaagatcggtggcattggaactgtgcctgttggccgtgttgagactggtgtcatcaagcctggtatggttgtcaccttgggtcccactggtctgacaactgaggtcacgtccgttgagatgcaccatgagtctctcctggaggcgcttcctggggacatcgctggcttcaacgtcaagaatgttgccgagaaggatctgaagcgtggttttgttgcatgcaactccaaggatgaccctgccaaggaggctgccaacttgacctcccaggtcatcatcatgaaccaccct

SEQ ID NO: 438308 - DNA, 167 bp, Triticum aestivum
ggaggaactttaggacatacttggggaaatgcacctggtgcaccagctaatcgagtggctttagaagcttgtggacaagctagacacaaagggcgcgatcttgttcgcgaaggtaatgaaattatgcgagcagcttgcaaatggagtcctgaactagcctgagcttg

SEQ ID NO: 438309 - DNA, 411 bp, Triticum aestivum
ttcacgcgtccgacttggataccctgatgtcgtcatggcatgcgccaagattgggcgcctaatgaacgaccttgctgcttcatccaaaccccgggacaacagggacgtggccaactgcgtggagtgctacgccaatgagcacaaggtcacggaggaggtcgcatttgctgccatcgactcgatgatagaagatgagtggaagaccatcaaccaagctcgattcaaacatggtcgtgagctgctgcctgcggtgcaacggttcatcaacttcactctcagcgggccggtgtactacggtgataggaaagatgctttcaccttcagctcgtatcttgaagacatcatcaagagcctctttgtcaatcccatccccatctagcaactactctgtgtacctcatgcaggcatgca

SEQ ID NO: 438310 - DNA, 449 bp, Triticum aestivum
tccacgcgtccgtgcctctccagggtactacgacggtcgatactggacaatgtggaagctacccatgtttgggtgcaccgacgccacccaggtgataaacgaggtggaggaggtcaagaaggagtaccctgacgcctatgtccgcatcatcggattcgacaacatgcgtcaggtgcaatgcgtcagcttcatcgccttcaagccaccaggctgtgaggagtccggcaaggcctaaacaagctaactacccttcatcatacaacatggtttcgtgtcaggttgattttatttcccttttttacttttgttctgcttgtgtatgtgttctccccctgcaactcgagttaacattatatgagtactacaaatcataagagtactacaactatcgttgggtgagaaatatgtgaatgtaactacggctatgcataaagtaaatatatactccc

SEQ ID NO: 438311 - DNA, 440 bp, Triticum aestivum
tccggagagacgccagagagcgcgagcaaaccctagcctccgacgatggtgctgcagaacgacatcgacctcctcaacccgccggcggagctcgagaagctcaagcacaagaagaagcgcctcgtccagtcccccaactcgttcttcatggacgtcaagtgccagggctgcttcaacatcactactgtgttcagccactcccagactgtcgtggtgtgcccgggctgccaaacagtgctctgccagccaacgggtggcaaggccaggctaaccgagggttgctccttccgccgcaagggcgactaaacctctgaaggaagccaagacgttgttgaactttgagttattccagggtgttagtctgaagattttgcaatgtcggcaaattgaacccatctttggcaatatgatatctagcttgagtattattatgatgacca

SEQ ID NO: 438312 - DNA, 408 bp, Triticum aestivum
cctgaaatcacatatgaggaagtcattattgacaattgctgcactgacactcgtgaagaatcctggtacatttgatgtattagtgatgccaaatctgtatggtgacattattagtgatctatgtgctggtttgatcggaggattgggcttaactcccagctgcaacattggtgaaggtggcatttgtctggcagaggctgttcatggttctgcacctgatatctctggcaagaaccttgcaaacccaactgctcttatgttgagtgctgttatgatgttgcgccacttgcaattcaatgaccaagcagaccggatccacaatgccattctccagacaattgccgaggggaagtacagaaccgctgatcttggtgggaagtcatcaacatcagactacacaaaagcagt

SEQ ID NO: 438313 - DNA, 396 bp, Triticum aestivum
ttgtgaactcgagagaccgagcgaggaaagttgccgtgtgagacctgaaagttagggagatatggctgggattggtcctatcaggcaggactgggagccgatagtggtgcggaagaaggcgcagaacgccgccgacaagaaggacgaaaaggccgtcaacgctgcccgccgctccggcgccgagatcgacaccaccaagaagtacaacgctggaacgaacaaggctgcatctagcggaacttccctcaacaccaagcggctcgacgacgacacggagaacctttcccatgagcgtgtttcaagtgacctgaagaaaaaccttatgcaagcaagactggataagaagatgacccaggcacaacttgctcagatgatcaatgagaagccacaggtgat

SEQ ID NO: 438314 - DNA, 388 bp, Triticum aestivum
gctctcctcaaccccacacgcccacagatggaggagcccgcggcgctgaggcccgcggcgtgccgcgccaagggcggcgcgccggggttcaaggtggcggtggtgggcgcggccggggggatcggccagtcgctgtcgctgctcatgaagatgaacccgctcgtctccgtgctccacctctacgacgtcgtcaacacgcctggggtcaccgccgacgtcagccacatggacaccagcgccgtggtgcgcggcttcattggccaacaacagcttgaggcagcacttacaggaatggatcttgtcatcatccctgccggcctcccaagaaaaccaggaatgacaagggatgatctgttcaacaaaaatgctgggatcgttcgctcgattt

SEQ ID NO: 438315 - DNA, 394 bp, Triticum aestivum
taccgcttgtgtcaacgggctcggcatctccgcggcgaggctcgacatcgccatgggcggcgtcgtgccgctgcacacccacccggccgcctctgagctcctcttcgtcaccgagggcaccatcctggcgggcttcatcagctcctcctccaacaccgtgtacaccaagacgctctacaagggcgacatcatggtgttcccccagggcctgctccactaccagtacaacggcggcagctcgccggcggtggcgctcgttgcgttcagcggccccaaccccggcctgcagatcaccgactacgcgctcttcgccaacaacctgccgtccgccgtcgttgagaaggtcaccttcttggacgacgcgcaggtgaagaagctcaagtccgtgctcggc

SEQ ID NO: 438316 - DNA, 443 bp, Triticum aestivum
tttccgcctattcgtccgcggacgcgtggggtcgacgctgccccgcgccggcgccccgctgcagacgtacaccgtccgctccgtgcggccggtggagggggggcctgtcttcgtggcgtgccacgacgaggcctacccgtacaccgtgtaccggtgccacaccactggcccgtccagggcgtacatggtggacatggagggcgcgcgcggcggcgacgcggtgaccatcgccaccgtgtgccacaccgacacgttcctgtggaacccggagcacgtctccttcaagctcctgggcaccaagcctggcggcacgccggtctgccacctcatgccgtacgggcacataatctgggccaagaacgtgaatcgctcgccggcgtgagcggcccgggcagctctgtggtctcgccggaactaagatcgatgtactactactactatct

SEQ ID NO: 438317 - DNA, 396 bp, Triticum aestivum
ctttcatttataatctccggcgatccaccacaccctgcattggcgtccgcgctcaccaacgtgagcctgtctaccttcgcgcccacggccaggggcgacgtcctcgcgaggccgcaggtggccgccgcccgcgtcaccttcccgacggcgcaccgcggcagcggcgccctctcctgcagggcgggcgggccggccacgccgccgggcatctccgacaagatgtcggacagcatcaaggaggcccaggagacgtgctcggaggacgccgccagcggggagtgcgcggcggcgtgggacgaggtggaggagctcagcgccgccgccagccacgcccgggacaagctcaaggactccgacccgctggagaactactgcaaggagaaccccgagaccgac

SEQ ID NO: 438318 - DNA, 454 bp, Triticum aestivum
  unsure (1)..(454): unsure at all n locations
gttgtgcttaattgcatcaaggncgcaggacctttggcgtcaactttagtgtccaccaatgccaaatttgaaattagaagccccaaacgtgtacagatcaaattcgaagaaggcatcattggcactccgcagctgaccgattccatcgtactgccagagaagtttgaattatttggacagaacattgacctgagcccgttgagcggcatatttacttcgatcgagaatgcagcgtcctccgtcgccaagaccatcttcggtcagcccccactgaagatacctttcaggagcgagagcgctgggtcctggctgctcacaacctaccttgatgctgagcttagaatctccagaggagatggcagcagcatctttgtgctgttcaaggaaggaagcgcactctcgatataggccaagcgtatctattctctgagtagaatttgacatggagaaaggg

SEQ ID NO: 438319 - DNA, 328 bp, Triticum aestivum
cattgcctgtttcaccacaacctcgtattctagatttccagatagacagggtcagattaaccagacgatgatgcaggctgccgttgcttcgtcggccgtgctgcctgtcgccgtaaggggtaggccggcggcgaggaggaggagcgccaccgttgccggtggcagaaggattgtgggtgccggcgtccgggcatcggccgcggcggcgccggaggcggactacagctccaacgtctcggtgttccccatggaggcctgcgacctggtcggcggcgaggcgtgcgacgcgcagatgtacccggagacgaagctcggcgccggcaccggc

SEQ ID NO: 438320 - DNA, 418 bp, Triticum aestivum
ggtctccatttcaaccgacatggccgcctccgccgacgaggaggcgtgcatgtacgctctccagctcgtctcgtcgtcgatcctcccgatgacgctcaagaacgccatcgagctgggcctcctggagaccctggtggccgccggcggcaagctgctgacccccgccgaggtggccgccaagctcccgtccacggcgaaccccgccgtggcggacatggtggaccgcatgctccggctgctggcctcgtacaacgtggtgtcgtgcacgatggaggagggcaaggatgggcgcctgtcccggcggtacggcgccgcgcccgtgtgcaagttcctcacccccaacgaggacggcgtctccatggcggcgctcgcgctcatgaaccaggacaaggtcctcatggagagctggtactacctg

SEQ ID NO: 438321 - DNA, 414 bp, Triticum aestivum
gctcccggttcgctcgtcatgctcagcccgctggtcgccggcacgctgttcggcaccgagacgctggccgggctcctcgccggcgcgctggtgtcgggggtccaggtggcgatctcggcgtccaacagcggcggcgcgtgggacaacgccaagaagtacatcgaggccggcgcgtcggcggaggcgcgggcgctggggcccaaggggtcggacgcgcacaaggcggcggtcatcggcgacaccatcggcgacccgctcaaggacacgtccggcccgtcgctcaacatcctcatcaagctcatggccgtcgaggcgctcgtcttcgcgccattcttcgccgcgcacggcggcctcatcttcaagcacctctgagtttgaattccgggttcgcgcgccttgttgcctgggcttgga

SEQ ID NO: 438322 - DNA, 450 bp, Triticum aestivum
  unsure (1)..(450): unsure at all n locations
catgatgttgttatctagctgcaatnncggcatccagttactcctttgtttctttacttaagcacttccttcctatcatgaatccaggtggtgctagtatctcgctaacatacattgcatctgaaaggacaatccctggatatggcggtggcatgagctcagctaaagcagctcttgagagtgatacaaaagtacttgcttttgaagctggacgcaaaggcaaaatccgagttaacaccatatctgcaggtcctctgggaagcagagcagccaaggcaattggattcattgagaagatgatcgagtactcttatgtcaatgcaccattgcagaaggagcttctggcagatgaagtcgggaacacggcagcattcctggtgtctcctttggcttctgccatcactggatcgactgtttacgtcgacaacggactgaacaccatgggtcttg

SEQ ID NO: 438323 - DNA, 449 bp, Triticum aestivum
cttcgcgttcgcccggaggagttcaaaccggagcggttcgagaactccaaggtcgacctcaaggggacggatttcgagttcataccgtttggggctgggcgcaggctctgccctggcttggcgttcgggctggccagcattgagatcgtgctggccgtgctgctctaccacttcgactgggagctcccggacggggtggccccgagcgagctggacatgactgaggagatgggcatcaccatccgaaggaagaatgatctgtacctgcgtccaactgttcgtataaaggtgtaggttcttttttcgaaaaggagggtttactccgatctcggcctcttgcataataaacatgtgccgcatagttgccttgcaccgtcaatggtgacgggtttgcccgttgtactacctgtttatcatgacttgaataaaataagcatgaggtttgttcc

SEQ ID NO: 438324 - DNA, 353 bp, Triticum aestivum
cttcgcgttcgctgcaagatagcctgccagccatgggaagcaagggcctcaagggtgtgatggtgtgtttactcatactggggttggttctggaacaggtgcaagtagaaggcaagagttgctgcaagagcaccctaggaagaaactgctacaacctttgccgcgcccgtggtgctcagaagttatgcgcaaacgtttgcaggtgtaaactcacaagtggcctaagctgccctaaggacttccctaaattggtccttgagtccaactcagatgaaccagacaccatggagtactgcaacttgggatgtaggtcttccctatgtgactacatggtcaacgcagctgctgacgat

SEQ ID NO: 438325 - DNA, 430 bp, Triticum aestivum
cctacgcgtttgcttgagaacattctcaaagttggagaaactgataagaatttgggtgcttctggggaggggaatgtctatgcgcagatgattgatgaagcagagggcctggaaaagattgagaacctgcagagccatgataacaatgaaatctatgagaaggctgtgaagattctcgaggcttactggatggaggaggaagatgatgcgatgggggcaactatggaagctcccacaggtgttgcctttgactttggccaaggtggcaaccctgatctgaacttgggctgaatacagatttgaccaatggtggtaattcccttgtcgctgcagttgtcaccatttggtctagtcggtgtgtggggtaaggtcatggttgtggtgggtccaataagctgaagattttcaaggaagcaactggtcctgggta

SEQ ID NO: 438326 - DNA, 348 bp, Triticum aestivum
  unsure (1)..(348): unsure at all n locations
ttcgcgactacgcgtccgcccacgcgnccgcccacgcgtgcgatcagcgcccctccgtccctccctcctcctggcgcgtcgtgatccatccagcccaggggcgagaagctagttagcgggtgattaaggtcgccatgtcggactccgaggaccaccacttcgagtccaaggccgatgcgggggcgtccaagaccttccctatgcaggccggcgccatccggaagggcggctacctcgtcatcaagaaccgcccctgcaaggtggtggaggtttctacctcgaagactggaaagcacggtcatgctaaatgccactttgttgccttagatatattcaatggtaaaaagc

SEQ ID NO: 438327 - DNA, 339 bp, Triticum aestivum
  unsure (1)..(339): unsure at all n locations
gatgatccccagcaangnngagctcgacagctggaaggtttctggcgatgtctcctttggctctggagccgcgctcaagggcaacgtgaccatcgcagccaaggctggagtcaagttggagatcccagacggagctgtgctcgagaacaaggacatcaacggccccgaggatctttgagtgacgcctgctgcatcgccagtcgcgttcccagaaaccttcctgtcctccttcgctgagttaacagtcatgtaattttcgcgtgcattctgctggggtgttgtcctgggatagcccctttacataataaattgaatcccctctgtgctgttcatctacac

SEQ ID NO: 438328 - DNA, 320 bp, Triticum aestivum
  unsure (1)..(320): unsure at all n locations
cgtactcgtgggccgnggccaccgncatcgggtacaagcaccaggcagaccccgccggtcccaacgccgccgacgcggtctgcagcggcgtgggaatcctcggcatcgcctgggcgttcggcggcatgatcttcgtgctcgtctactgcaccgccggtgtgtccgggggacacatcaacccggcggtgaccttcgggctgttcctggcgcgcaaggtgtccctggtgcgcgcgctgctctacatcatcgcgcagtgcctgggcgccatctgcggcgtggggctcgtcaaggggttccagagcgccttctacgtgcgctac

SEQ ID NO: 438329 - DNA, 400 bp, Triticum aestivum
  unsure (1)..(400): unsure at all n locations
cgttttaccaccttcnttncagcaggagggcacttttaagtgtttatgcagacatgtctttagcgtgcaaggagtactatgatccaaaccgttcgatgctggagttggtttttgctccagcagaggaatggatcggacggagtgacaccgaaatcatcgaagcaactatgctagagctagccaagttgtttcctgatgaaatcgctgctgaccagagtaaagcaaagattcttaaataccatgttgtgaagacaccgaggtccgtttacaagaccgtcccgaattgcgaaccttgccgacctctgcaacgatcaccgatcgaagggttttatctggccggcgattacacaaagcagaaatacttggcttccatggagggtgcggttttgtcaggaaagtt

SEQ ID NO: 438330 - DNA, 329 bp, Triticum aestivum
cgtacgcgtgggcggacgcgtgggcggacgcgtgggattgggttgactacatggagtcctctcgcttcaggggttctcactgggaagtatagcaaagggaatatacccgctgaaagccggtttgccctagataactacaagaacctggcaaacaggtctctggttgacgacacgcttagaaaagtgaacgggctcaagccaatcgcttcggagcttggcgtctcgatggcgcagctgggtatcgcctggtgcgcgtcgaaccccaacgtgtcgtctgtgatcactggagccaccaaagagagccagatcgtcgagaacatgaaggccct

SEQ ID NO: 438331 - DNA, 426 bp, Triticum aestivum
taccgcttacacgtcgacgggctacccgggccggacgtaccggttctacacgggcgacacggtgttcgccttcggggacgggctgagctacaccaagatgtcccaccagctcgtgtccgcgccgccgtcgtacgtgtgcatgcagctggccgaggaccacccgtgccgcgccgaggagtgcgcgtccgtggaggccgcgggcgaccactgcgaggacctggccttcgacgtgaagctccgggtgcggaacgccggcgaggtggccggcgcgcactcggtgctgctgttctcgtcgccgccgtcggtgcacaacgcgccggcgaagcacctgctcgggttcgagaaggtgtcgctggcgcccggggaggccggcacggtggcgttcagggtggacgtgtgcagggacctgagcgtggcggacgagct

SEQ ID NO: 438332 - DNA, 303 bp, Triticum aestivum
  unsure (1)..(303): unsure at all n locations
ttcncgataaataacataaaaggggcagagaaggctctagagtagtctaatacaaaagccatagccatggcgaaactcatgtgcttatgtttcatcatcctcactattgcggtagtcgtgtcggctgacgaatgtgagggtgaccgacaggaaatgatcaagcagtgtgcaaagtatcaacaatggccagcaaatccaaaggtaaatccgtcggacgcatgctgcgccgtgtggcaaaaggcaaacatcccatgcctttgcgctggtgtcaccaaggagaaagagaagatatggtgtatggag

SEQ ID NO: 438333 - DNA, 330 bp, Triticum aestivum
agtattcgtgggcggacgcgtgggcggacgcgtgggcggacgcgtgggcggacgcgtgggcggacgcgtggggctcgatcctacctacgctagcacacactctgtctcacgctcgcgagcgaactagtccaggaacaatggcgccgcccaagaaggtgctgatgctgtgcggcgactacatggaggactacgaggcggccgtgcccttctacgcgctggccggcctgggcgtcgccgtccactgcgccgccccgggcaaggcccccggcgacccctgcctcaccgccgtgcacgacttcctcggctacgagctctacacggagctccccg

SEQ ID NO: 438334 - DNA, 316 bp, Triticum aestivum
taccggctagtaccagttcgatgacaagtacggcgccaacgtcgacggctacagcccaatctacacgccagaggaatggtctgaatctggtgaccgctacgccggcggaacgaccgggcttcttatctgggccgtcaccctcgccggcctcctcggcggcggcgtcctcctcgtctacaacaccagcgctctcgccggctaagagagcatctacgtgtaacacagggccgggtctctgcttgcatgcacgtctctgtaatctacatagctacctcctgtgaatgtatgcaatcaacgatgcaaagtaattgatccg

SEQ ID NO: 438335 - DNA, 464 bp, Triticum aestivum
gataataaagcagaggagaggaagcggaggcgacgatgtcggcgatgacggcggcggtgcccttctggcgcgcggcggggatgacctacatcggctactccaacgtctgcgcggcgctggtgcggagctgcctcaaggagcccttcaagaccgaggtctcctcccgcgagaaggtccacttctccctctccaagtgggccgacgagaagcagcagaagcccactgtgcgcacagatgatgaatgaagatcgggtgccatggtgattgatgttttgagaagttgttgagtcagggcttaagaacttgagaataaattcttgcggtgacaatggatctattccgatactatgttgttatatttactaattgctccttttctacttgatgaacctgaaccatgtgaaactcgtgtcttgtggggctcgagtgagcgtgtttttatgcgttatatcttccgatgcttt

SEQ ID NO: 438336 - DNA, 297 bp, Triticum aestivum
gtccgtcatcctcggcgccctcaccggcgagtggctcaccggggtcacctggcaggacgccggcaaggaggagctggtggacgggccgtcgtacctggggcagccgctggcgttcacgctcaccacgctgatctggatcgaggtgctggtgatcgggtacatcaagttccaccgcaacgcggagctggacccggagaggaggctctaccccgggggctcctacttcgacccgctggggctcgcggtggacccggagaagaaggagactctgcaggtggcggagatcaagcacgcccg

SEQ ID NO: 438337 - DNA, 383 bp, Triticum aestivum
tttcgctgtactctcactctcctgccgcggtgcgccgtacctgctctctagacaagatgtcgtcagtcagtgcccgcgctcccgtggccgctctccggccagcggcgtcagcgtcgagcccccggttcctgggcgactccggccgcgtcggcctcgccaagtccacacgccgcgacgtcgccgtccaggccaaggggtcgtggctccccggcctcccctcccctgcctacctcgacggcagcttggcgggtgacaatggtttcgacccgctggcgctggcggaggacccggaggacctgcggtggttcgtgcaggcggagctggtgaacgggcggtgggcgatgctgggggtggcggagatgctgatcccggaggtgctgacc

SEQ ID NO: 438338 - DNA, 308 bp, Triticum aestivum
tttcgcctactcgtacgcgcgaggcggcggagcggcggaccagaatgctggtccggagtttatcgatgctgggcacgatatgattctggcagcagatcattcggcttcagatctgatccgcggcatcgcgacggagtggggggttgactttgatgaggacccggaagcaatggttattgaccacatcaattatgcctccagcgaggttgaaggtgaccacaccttgattgctggcgatgaccttattcagtcagatgtgatattgggatccaaaaagactgaggcttctgttctgttccgagggattg

SEQ ID NO: 438339 - DNA, 335 bp, Triticum aestivum
tatcgattggtcaaccatgtcaaggcccgatccaggcacacttattattgaacccactgaaagtgaaagcaaggctgaactagacaggttctgtgatgcccttatctccatcagagaggaaattgcagaggtagaaaatggcaaagcagatgcacacaacaatgtcctgaagggcgctcctcacccaccccaactcctgatgggtgacgcatggactaagccatactctagggagtatgctgcgttccccgccgcgtggcttcgtggtgccaagttctggccaacaacatgtcgtgtggacaacgtgtacggggatcgcaacctgatctgcactc

SEQ ID NO: 438340 - DNA, 350 bp, Triticum aestivum
  unsure (1)..(350): unsure at all n locations
atttgaagtttggaactttgatcctaaaattgctaccttctggatcgactctgatagtcgattgaagggtgttttccttgagagtggaaccccagaggaattctcgcttcttccaaagctcgcgagatcacagcccattgtcgacaaagctaagctcaagagtgcgacttcagtcgaagatgcattagagatcgcgagaagctctctttagtctggctctttgtttaactagttgtcaacacatatggcctcttctgtttgggactgcagcttattttgaaaagtcaggactacgatgacaataatgcggccatagtatccgttctatgcggngtttgtaattttcctag

SEQ ID NO: 438341 - DNA, 297 bp, Triticum aestivum
ggtagtggtctatgttatgagccacatctcaactggtggtggcgccagcttggagttgttggaaggaaaggagcttcctggagtcgttgcacttgatgaaggtgtcatgacgaggtcggtgaccgtatgaggctaagcttcatttgttgcatcttaattcctttcatgtaccgttccaaacctgccatgttgtcctccctcttttgctcgtcttcgaccactcgaaatgtaagagaccaatgttttatagagaaatactgggaactgtttgaataacacccccagcaatttgtgctc

SEQ ID NO: 438342 - DNA, 274 bp, Triticum aestivum
gcgcgtgccctttacgccctgcatccagctgctctacggcctgcgcgccggcctcgacctcctcttcgaggagggcctcgacaacgtcatcaagaggcacacacgcctcggcaccgcaacaaggctggcggtggcggcgtggggactcaagaactgcaccgcgaaggaggagaacttcagcgacacggtcaccgccgtcgtggtgccgccgtacatcgacagctccgagatcgtcaagcacgcgtggaagcggtacaacctcagcctcgggctc

SEQ ID NO: 438343 - DNA, 320 bp, Triticum aestivum
gcgaatctattttcctacatagtacagccatggcccccaccgtgatggcctcgtcggccacctccgtcgctcctttccaggggctcaagtccaccgccggcctccccgtcagccgccgctccaacggcgctagcctcggcagcgtcagcaacggtggaaggatcaggtgcatgcaggtgtggcccatcgagggcatcaagaagttcgagaccctgtcttacctgccaccgctcagcacggaggccctcctcaagcaggtggactacctgatccgctccaagtgggtgccttgccttgagttcagcaaggtcgggttcatc

SEQ ID NO: 438344 - DNA, 232 bp, Triticum aestivum
cgtagttctctgctttgacattaaaaaatttaaattacaagatgagccatatatattcaggaaatggagctgcagaataacaacttcttcttgagggaaaaagtagctgagactgaaagggggcaacagcagacgttgaacatgatgggggcggcttcgacatcgaatgagtacgagcaaaatatgatccattgtgatccgagaaccttcctgcagttcaacttcatgcagc

SEQ ID NO: 438345 - DNA, 343 bp, Triticum aestivum
gcgcttattttttccctcacgccactactccctcctctcctcaatggcagatctgcctccgtccctcgccaccggcccctcctccccgcctccgaccccacccccgtacgggccgtcgaccgcgacgccggctgctagggggaaggactggaataaggttcccgcggagcagctcgtgatcgacttctgtgacccggagttgcgtgaggacgccctacgccagctctacaagaagcgagagatttttcaagaccttgctccactgctgtggcactcctttggcaccgttgctgcactgctccaggagattgtgtcaatctacccttcactttcacctcctact

SEQ ID NO: 438346 - DNA, 319 bp, Triticum aestivum
gcgcataatcttttctactccggccatctctccatcgaccaccgtagtaccacccctgcaccccactccaacgatggcgacagcggcagccggcggcgggaggggcaagccgaagggcagcaagtcggtgtcgcggtcggtgaaggcgggcctgcagttccccgtcggccgcgtcgcccggcacctgaaggtcggccgctacgcgaagcgcgtgggcgccggcgcccccgtctacctgtgcgccgtcctcgagtacctcgccagcgaggccctggagctggccggcaacgcggcgcgcgacaacaagaagacccggatc

SEQ ID NO: 438347 - DNA, 416 bp, Triticum aestivum
gataagacttctaggaccggaaacaagaccgtgccgaattgcgaaccttgccgaccactgcaacgatcaccgatcgaagggttctatctggccggcgattacacaaagcagaaatacttggcttccatggagggtgcggttttgtcaggaaagttttgtgctcagtccatagtgcaggattctaagatgctgtcccgcaggagccaggagagcctgcaatccgaagcccccgtggcttcccagttgtagctagctagcgcgattcaattgtttagcattttctatgtgtcattgtcacattgttgtagagtccaccagtgaattgagctgacaaccatactggaacaaaaaggagatttgtaaaacaaagaagaactttgcagaagggcaaaagtgataaagggatcttagatatc

SEQ ID NO: 438348 - DNA, 370 bp, Triticum aestivum
tttcgcttgtgcggacgcgagggcgcgcctgtggctgctcccgctcacccacccatggcgacggctatgatggctgcagccaccacctcctgctccccgccccgagcgctcctcaagcccgcggcctcctccagccccgcgccgccgcccaggccgcagccacggtccttcctcaagcagctcccggggctcgccgcgacggcggcggcggcggccgtcgcctacgtgcctctcccggcgctggccgtggagatggagaaggctgcgctgttcgacttcaacctgacgctcccggcgatcacgatcgagttcctgctgctgatggtggcgctggacaagctctacttctcgccgctgggcaagttcatgg

SEQ ID NO: 438349 - DNA, 358 bp, Triticum aestivum
tgtggtttttaggtgctctgaatgttgatgtgaacgaattccagaccaacctggtgccctacccaaggatccacttcatgctttcctcctacgccccagtcatctcagctgagaaggcttaccatgagcagctctctgtcgctgagatcaccaacagcgccttcgagccatcctccatgatggccaagtgtgacccccgccacggcaagtacatggcctgctgtctcatgtaccgtggtgatgttgtgcccaaggatgtcaacgccgctgtggccaccatcaagacgaagcgcaccatccagtttgtggactggtgccccactggtttcaagtgtggtatcaactaccagccacccag

SEQ ID NO: 438350 - DNA, 422 bp, Triticum aestivum
ggcgagtcaccttctcaaccgaagcagactccggagagcaggcaaggcggagaccgagatggcgcgcggcgtgccggcggctaccaagggcggcgcgggcgccgggaagaagaaggggtcggtcaccttcgtgatcgactgcaccaagcccgtcgacgacaagatcatggagatcgcgtcgctcgagaagttcctgcaggagcgcatcaaggtcgccggcggcaaggccggcaacctcggggactccgtcaccgtcgcccgcgacaagagcaaggtcaccgtcacctccgatggggccttctccaagaggtacttgaagtacttgacaaagaagtacctgaagaagcacaatgtgcgtgactggctccgggtgatttcatccaacaaggagcgcagtgtctatgagctccggtacttcaaca

SEQ ID NO: 438351 - DNA, 280 bp, Triticum aestivum
  unsure (1)..(280): unsure at all n locations
cctcnatattatctggtggaggcgctagcttggagctgatgtaaggaaaggagctgcctggagtcgttgcacttgatgaaggtgtcatgacgaggtcggtgaccgtatgaggctaagcttcattttgtcgcgtctcaattcctttcatgtaccgttctaaacctgccatgttgtcctccctcctttgctcgtcttcaaccactcgaaatgtaagagaccaatgttttatagagaaatactgggagctgtttgaataacaccccccagcaatttgtgctca

SEQ ID NO: 438352 - DNA, 366 bp, Triticum aestivum
agcgggtaacttttcttcggacaagattagtcagctgactgatattgtctacgtctgccgctctggatctgcagctgacacgcaagttatttcggattacgtgcgttattttctccaccagcacacaatccagcttgggcaaccagctaccgtgaaagttgcatccaacttagttaggttattggcctatcagaacaagagcatgttgcaagctggaatgatagttggtggatgggataaatacgagggaggccagatttactcggtccctcttggtggaacgattctgaggcaaccattcgcaattggaggatccggttccagttacctgtatggattgatggatcatgaatggaaagagggtat

SEQ ID NO: 438353 - DNA, 262 bp, Triticum aestivum
tcggttgtagcccgcgcgcccaagacagcgccggggtggccgttcccgcccccttcgccgcgccgcgtgcggccggccaggtgcgcggggttcgtgggcccggcggtggagtcggcgtccccgggcgcgagggcggcgacgctcgcgagcagccgcggcgggaccgactcgtcactggccatctgccgggtgctcaacggcatgtggcagaccagcggcgggtggggcctgatcgaccgcgccgacgccgtcgacgccatgc

SEQ ID NO: 438354 - DNA, 321 bp, Triticum aestivum
gtcgattgcacgcgcgcgctcgccttccccactacaggcacagccagcgagcgcactggtggtacaacgatggcgctggtctcctcctcctccgccaccgccgtcgcggcgctccccagcaatgggctggccggcgcccggagctccttccttggcgctgccggcaaggcggcggggtcgcgcgcgtcgttcgccgtgcgcgccgcggcgcccgagaggcccatctggttccccgggagcacccctccgccgtggctcgacggcagccttcccggagacttcggctttgacccctggggtcttggatccgacccggagagc

SEQ ID NO: 438355 - DNA, 300 bp, Triticum aestivum
gatcctcggggcgatgcaggggataatccgcctaatggacttacaaggtgcacattatgaggtcaaagcttatgaagattacaaatttctaaactcctcctatgttcctgtgctccgacaactggagtcagcaaacctccaaaaattctatttcgagaataagcttgagaatgccaccaaagatgctagcaatatgaagttcaggaatcccaagtatctttctatgcttaatcacttgcgattctacttgcctgagatgtacccgaagctgcagaaagattcttttcttggatgatgatg

SEQ ID NO: 438356 - DNA, 228 bp, Triticum aestivum
ggtaattagggcgtccctatgtgactacatggtcaacgcatctgctgacgatgaagagatgaaactctatgtggaacagtgtggtgatgcttgtgtcaatttctgtaacgctgatgctggcctcacatcccttgatgcgtaatgatgcgtatccatggtctgagatttcacagggcaaggtcgtgtctcacctttgcgttcaataaaattggatcccatcgagagtat

SEQ ID NO: 438357 - DNA, 295 bp, Triticum aestivum
acgagtaatctttggggacgactctgtattacaatttggtggaggaactttaggacatccttggggaaatgcacctggtgcagcagctaatcgagtggctttagaagcctgtgtacaagctcgtaacgaagggcgcgatcttgctcgcgaaggtaatgaaattatccgagcagcttgcaaatggagtcctgaactagccgcagcttgtgaagtatggaaggcgatcaaattcgagttcgagccggtagatactattgataagtagataaaactaaagataaagaagagaaggtat

SEQ ID NO: 438358 - DNA, 393 bp, Triticum aestivum
tcgcgtacgcgtgggcggatctctccccttccagcagtgccagcacaagatcgacaccgtcgactgccagccctcggggccccagggcggcgtcctcgtcttcgtctccggcaccatcaccaccggccccggcgagcaccccctcaagttctcacagatgttccatttgctgccagctggagggagcttctacgtgcagaatgacatgttccgcctgaactatggttaaggaagggcgaccgctctggcagcaaagaacttgttcagggatttatgttgaaacaatgaacatcaaatgatgatgctgcagactctttgtttgttcgccaacttgtgcaatttatcgcaaaaaattgccagacttgataggcatccaccagatcatcttttgtt

SEQ ID NO: 438359 - DNA, 380 bp, Triticum aestivum
tttccgaatacttgacagacaggagccgacatgatcaagggcaagaccccggaggagatccgcaagaccttcaacatcaagaacgactttacgcccgaggaggaggaggagatccgcagggagaaccagtgggcctttgagtagaggagcatctaggcgatgccaccgccgcgctgaaagaactacgcgtagtattcgtcatgtctgtatttcagcgctcttctttatgtctgtcgtaatgggttgtaattatcctcgagtctatgaggtggtgtcggtgaacatcttcggtcagtggttatgtttgcgagaacaagaaaaacctatcgtggtctgtggccatcgcttgtcaaactgaatcttaatcgtcaagtggatgc

SEQ ID NO: 438360 - DNA, 265 bp, Triticum aestivum
ctgacgtgtgggctcggaagctcgcattgcagcgctggcttgaagttatcgacccgtgacaccggtacgggcacaaccttcactactactacgactgctggctgaggtgcgaaagcagggagcctttcttctactggctcgacatcggagagggcaaggagatcaacctcgaggaccgatgcccgcggtcgaagcttctcagccagtgcatcaagtatcttggtccgaaagagagagaggaatatgaggttgtgatcgaggatgg

SEQ ID NO: 438361 - DNA, 259 bp, Triticum aestivum
ctcacgctgccggggttggtgcaagcagaagctgggtgcttatgtatatcctggctgtgtcactagctgcttgcaaagctggagccagcgtcaagaagattccgctgtaccagcacattgccaaccttgctggcaacaagcaattggttttgcctgttcctgcattcaatgtcatcaatggtggatcccatgctggaaacaagcttgctatgcaggagttcatgatccttcctactggagctgcctcattcaaggaggc

SEQ ID NO: 438362 - DNA, 240 bp, Triticum aestivum
cttacttgtgggcgcctacgctcttcgcttcctgcgccgccgccttcccccggtcttctcgcttcagatcagttaacgtaaatggctgacgcagaggacattcagccccttgtctgcgacaatggaactggaatggtcaaggctggtttcgccggagacgatgctccacgtgcagttttccctagtattgttggccgtccacgccacactggtgttatggtagggatggggcagaaggat

SEQ ID NO: 438363 - DNA, 186 bp, Triticum aestivum
ctcacgtgtccgttctactcctccacacaagtgaagtgagagctttgcgctgaaagttcatcagcaactatgaagggcaccaagctcgcggcgatcctgatcctccaggccgtcctggtcatgggagtcctctcgcacgtcaacgccgacttcttccccaagtgctgcaacaactgcaggttcttc

SEQ ID NO: 438364 - DNA, 129 bp, Triticum aestivum
tttcgtcgtcaactttcactgattgtgtgaactgtcttattgcgttcaccaacagtaggtttaacaaggatataggccttaatgcaattggttttcttcgattctgtgcggcaaagctggcagaaggtg

SEQ ID NO: 438365 - DNA, 133 bp, Triticum aestivum
ttgacttgtgggtgggcgccaacatctccggcgggcacgtgaacccggccgtgaccttcggcgccttcgtgggcggcaacatcaccattttccgcggcctgctctactggatcggccagctcctgggctccac

SEQ ID NO: 438366 - DNA, 245 bp, Triticum aestivum
ctgatcgtgtggcaaacccaatcagaaatctcaagcttagcacagcatcaatggcgtcggagcagaccttcatcatgatcaagcctgatggcgtccagaggggcctcatcggtgaggtcatcagccgcttcgagaagaagggcttctacctcaaaggtctgaagctccagaacgtggagaagtcgttcgccgagcagcactacgccgatctgtcctccaagcccttcttcgctgggctcgtggag

SEQ ID NO: 438367 - DNA, 335 bp, Triticum aestivum
tttacgtgtccgcccacccgtccggggccccttggtacggcggcaagagcgggtgcatcaaggacctcaacacgctgtcgtgggtgcacaacgtggcgctgcagcgcaagatcgtggagcttcggaagaagcacgccgacgtgcgcatcatgtacgccgactactacacgcccaccatccagttcgtcctccacgccgagaaatgggggatgctaaggcagaagccgagggcgtgctgcggggcggcgggcgtgggggtgtacaacttcaacctgacgtccaagtgcggagagcccggtgcgtacgcgtgcgacgaccccttcaaccactggagc

SEQ ID NO: 438368 - DNA, 339 bp, Triticum aestivum
tttcgtgtccgcccacccgtccggggccccttggtacggcggcaagagcgggtgcatcaaggacctcaacacgctgtcgtgggtgcacaacgtggcgctgcagcgcaagatcgtggagctccggaagaagcacgccgacgtgcgcatcatgtacgccgactactacacgcccaccatccagttcgtcctccacgccgagaaatgggggatgctaaggcagaagccgagggcgtgctgcggggcggcgggcgtgggggtgtacaacttcaacctgacgtccaagtgcggagagcccggcgcgtacgcgtgcgacgacccctccaaccactggagctggga

SEQ ID NO: 438369 - DNA, 309 bp, Triticum aestivum
tttactcgtgggcacgcctccgtctccgccagcgagctcctctccgcttcctcctccggtccccgccgccgccccgctccccaagaccaatggctgacggcgaggacatccagccacttgtgtgtgacaatggcactggaatggtcaaggctggttttgctggtgatgatgccccaagagcagttttccctagtatagttggccgccctcggcacacaggtgtcatggttggaatgggccaaaaagaagcctatgtgggtgatgaagcgcagtcaaaaaggggtttcctgaccttgaaataccctattg

SEQ ID NO: 438370 - DNA, 172 bp, Triticum aestivum
tacgttgtgccaaaaatggtctcctctcctccccattctcctactcgccggcatggttggcatctcccaagccggcaacatcgccgtctactggggccagaacggtaacgagggcacgctcgtcgacgcctgcaacttcggcctctacgcatacgtcatggtctccttcctc

SEQ ID NO: 438371 - DNA, 118 bp, Triticum aestivum
tttgatcaatcccggagatggagatctgtgactttgatttcgtgccatgtggctactccatgaacgccatccatggctctgctttctccaccattcatgttactcctgaggacggctt

SEQ ID NO: 438372 - DNA, 375 bp, Triticum aestivum
gttatttccgtcatgaaacttcctgtcttcttcaagcagagggatcttcttttctttcctgcatgggcctacaccataccatcgtggattcttcagatccctatcacgtttgttgaagttggagtttatgttttcaccacatattacgtcattggatttgatcccagtgtaagcaggttctttaagcagtatctgctgctccttgcgatcaatcagatgtcatcttcgctgttccgcttcattgctggaattggaagagacatggttgtgtcccacacctttggacctttatcactgttggcttttgcagcattgggtggctttatccttgcaagacctgatatcaaaaagtggtggatttggggttactggata

SEQ ID NO: 438373 - DNA, 321 bp, Triticum aestivum
tcggtgcgacggctgagattatgtgtaatctcctttcatttgaagctgacagaagagctgtaaacattaccataaacagtattggtactgagctgactagagatgaccgccggaagctgtactccaactttggtctattgtttccgtatggtcatgaagagttggctgtctgtgaagatgttgaccaggtgcgtggtgtaatggaaaagtaccccccataccagtctatttttgccaagatatcatatggcgaaagccagatgttggacaaggccttttatgaggaggaagtaaagaggctgtgccagtcatttgaacagc

SEQ ID NO: 438374 - DNA, 256 bp, Triticum aestivum
ttcactcgtccggcccggccgcccgactttgaccgcctccacgtctccgctcccacgcccgcgggagagaggcgaccggcggcggcgcgcgaggagggcctacccatcccacccaccaccccgccggccaagatgttcggccgcgcccccaagaagagcgacaacaccaagtactacgaggtgctcggggtgcccaagaacgccgtccaggacgaccttaagaaggcctaccgcaaggccgtcatcaagaaccacc

SEQ ID NO: 438375 - DNA, 220 bp, Triticum aestivum
tcgtaacagatgcttactcagagcaatagtcccgtccctccagaacttgctaggcatgaggcgtcgaagtttaagccaggatcggttcctgatagacctccaagaagaaatgacaccgtctatgcatctcactgaagcaatctgttgcagaagaggcggagatccttcttgggttcaatttagggccaccttctactgtgtcgagatttagtacttatga

SEQ ID NO: 438376 - DNA, 225 bp, Triticum aestivum
tttcgtcattcgcatcgccaccttcctccctcctcccctcgccatctccgacccgacttgcggccaatggcggaccagctcaccgacgaccagatcgccgaattcaaggaggctttcagcctcttcgacaaggatggggacggttgtattaccaccaaggagctgggaactgtcatgcgttccctggggcagaatcccactgaggcagagcttaaagacatgatc

SEQ ID NO: 438377 - DNA, 204 bp, Triticum aestivum
gcaggcagcaggaaggaaggaaggaagggaggtggagatggcgcccatcaagctgtacgggatgatgctgtcgcccaacgtgaccctcgtggccacgctgctcaacgagctcggcctcgacttcgacttcgtcgacgtctacctccgcaccggcgcccacaagcagcccgactttctcaagatcaacccttttggccagatccc

SEQ ID NO: 438378 - DNA, 271 bp, Triticum aestivum
tttcttagaaggtcaagaaagaagagttgaagagatcactttatgcattgtgctctcagtatggaaggatagtggatgttgtggccttgaaaactcataaactcagggggcaagcctgggtggcattcagtgaaattacagcggcttccaatgctttccggggcctacaggactttgatttttacggcaaaaaaatgcgggtacaatatgcaaaaacaaagtctgactgttttgcaaaagcagatgggtcttatgctcctaaagagaaaag

SEQ ID NO: 438379 - DNA, 229 bp, Triticum aestivum
tttttactagggtgtcaatggcgtctgccattacaaggctgaaaatgccgtagttcaggttttggactcagttaacatcacactgaatgctgaggacgaactgaaaaacgccgtcgggttggttcgcccagtgagtgttgcctttgaggtgatcgacggtttcaggcagttcaagagcggagtttacactagcgaccattgtggtactacacctgatgacgtgaaccac

SEQ ID NO: 438380 - DNA, 428 bp, Triticum aestivum
gttgtcgtcgccgccgaccgttgttgcggacgcgtgctccttgtcgacgagatgacgaagctcaccaagaaggctggaatcgttggcaaatatggtacaaggtacggtgccagtctgcgtaagcagatcaagaagatggaggtctcccagcactccaagtacttctgtgagttctgtggcaagtttgccgtgaagaggaaagcagtcggaatctggggatgcaaggactgcgggaaggttaaggccggtggtgcctataccatgaacaccgccagtgcggtcactgtcaggagcacgatccgtcgtctgagggagcagactgaagcttgatcgcggtcaatctgacaaaggagcctctggattttgtagttcagacgagactcattcgacgcaatatagcctaaattgacaacatacaatgttattta

SEQ ID NO: 438381 - DNA, 360 bp, Triticum aestivum
gttattctggcaggtgccgcagtacgtggtggtaggcgcggcggaagtgttcacgtttatcgggcagatggagttcttctatgaccaggcgccagacgccatgcggagcgtctgctcggggctctccagcgcggcgtttgcgctgggcaactacgcgagctcggcgctcgtggccgtcgtggtgcgcgtgacgactaggggcgggcggcccgggtggatccccgacgacatcaacgacggacaccttgactacttcttctggctgctcgccatgctctgcaccggcaacttcgttgcgtacctgctcgtcgcacggtggtatacctacaagaagaccgctgactaaacctggcgatcact

SEQ ID NO: 438382 - DNA, 352 bp, Triticum aestivum
gtcttttgaagggctgcacggtggagccggtagcttgatcaagtggaaccctgtggctaatgtcgatggcaaggatatctggaccttcctcaggaccatggatgtccctgtgaacaccctgcatgctcaaggctacgtctccattgggtgcgagccgtgcaccaggcccgtgttgccggggcagcacgagagggaagggaggtggtgggggaggacgccacggccaaggagtgcggcctccacaagggtaacatcgacagggaagatcaggcacccaaggtcggcgttaacggcaatggctcggccgaggcccgcgccccagacatcttccagagccaggccatcgtcaacc

SEQ ID NO: 438383 - DNA, 379 bp, Triticum aestivum
tctttctcccttgcagactacaacatccagaaggagtccactctccacttggtgctcaggctccgtggtggtatgcagatcttcgtcaagaccctcacaggcaagaccatcaccctggaggttgagtcctcggacaccatcgacaacgtcaaggccaagatccaggacaaggagggcattcccccggaccagcagcgtcttatcttcgccggcaagcagcttgaggatggccgcacccttgcggattacaacatccagaaggaatccaccctccaccttgtcctccgccttcgtggtggcatgcaaatctttgtcaagaccctcaccggcaaaaccatcaccctggaggttgagtcctcagacaccattgacaatgtga

SEQ ID NO: 438384 - DNA, 458 bp, Triticum aestivum
tttatcccgcacccgcccaccagagacacagggcaggcgtctcaccacccaggtccagcttcggcgagatctccggcgacccttcgagatgagccgtggatcgggcgcgggctacgaccgccacatcaccatcttctcccccgagggtcgcctctaccaagtcgagtacgcgttcaaggcggtcaagtcggcgggggtcacctcgatcggcgtccgcggcaaggactccgtctgcgtcgtcacccagaagaaagtcccggacaagttgctggatgacaccagcatcacgcacctcttctcgattaccaagtacaccggcttgcttgccactggcctcacagctgatgcgaggtccttggtctcccaagcaagaaatgaagcagctgagttccgtaaaaaatggggatatgagatgcctgtggatgtattagcaaaatggatagcagacaaagcacaaa

SEQ ID NO: 438385 - DNA, 395 bp, Triticum aestivum
ggcttctcctactagtctgaaaatctctctcacatcgataagagaagggaggctgcaaactgttggtgagtgcttgcgccgagaatatagaatggtttgccatgtgatgcgcggtgacttcagcagagacttctttgagggatgcagggcgatacttgtagataaagatcgaaacccaaagtggatgccgccaactctggataaagtgcatgacggggtagttgcaaaatatttctccaaggtcgacgatccacagtgggaagatttgaacctgccaactagaccttcccatggaagaagaattgttcccaagctctgatggaagtctcaggctggtcatagtgaggagtaacttatattagtgtcatgcatataatactagcctaagttactac

SEQ ID NO: 438386 - DNA, 430 bp, Triticum aestivum
tttgtttgttgcatctttgaaagatgattgagggggcaaggttccacaatatgttaggtggtggtggtgctggcatcggcggcggcagagggaagctggagaacgagggcaacggcttctacgacatgccgtattaccacaaggtcggggagagctcccacatgtcggtggacagcgcggacaacatgaactcgatgaactacgtcggcggctcggtcgccatgtcggtggacaacagcagcgtggcctccaacgagtcccgcaccgtcatgctcaaccacccgggcctccgtgatgttcccacaccaaactattcggtttgcaacagcgtcatctatcccaacaaggctgccgcgtctgtcctcaaggaggatgctttggctcgggttttgatggacccaactcatccaacggagatactcactaacta

SEQ ID NO: 438387 - DNA, 356 bp, Triticum aestivum
gtttcgctgttcgtgatgctggcccgggagcccatggtgcctttcatggaccggccattcatgaccagcatcgtgttcgcgcacgacaaggagggcacctctgtgctcttcaaggtgctctccgccttcgccttccgtgacatcagcctcaccaagatcgagagccggccgcaccggcccatccgccttgccgacgatgccgacagcggcaccgccccgaagcagttcgagtacatgttctacgtggacttccaggcctccctggccgacccgcgcgtgcagaatgcacttgctgaggtccaggagttcacgttattcttgcgggtgctcgggagctaccccatggacatgacacc

SEQ ID NO: 438388 - DNA, 330 bp, Triticum aestivum
tttctaagctcatcttcttctccttgaaatcttttggggttcatcagatttggaggatgtcttgcaactgtggatccggttgcagctgcggctcacactgcaagtgcgggaaggtgtaccctgatctgacggagcagggcagtgccgccgcccaggtcgccgccgtggtcgtcctcggcgtggcgcctgagaacaaggcaggtcagttcgaggtggccgccggccagtccggcgagggctgcagctgcggcgacaactgcaagtgcaacccctgcaactgttaagctgcatgcactcgtaccgtcgtacgtacgtgtgatggtgtgagag

SEQ ID NO: 438389 - DNA, 408 bp, Triticum aestivum
gatggatttctatgaaaggatgggtgatacattagctatccagtacggtggttctgctgctcacaacaagatcttctgtgagcaaagagggcagtggaaggcagcaacccaatcccaggagttccttcgaacccttcaacgttactacaataatgcttacacagatcctgagaagcaggatgctataaatgtattcttgggtcatttccagcctcaacaaggcaaacctcctctgtggaagttggactcagatcagcattacaatatcggccggcaaggaactttaagtgaagaaactggaagatatggccgtgtgggaataagcgagtggtgcatgtaccacttaagtggggcactagtgactgcatggtgcctacatgtgatgtgtgcttgtgggaatatttctat

SEQ ID NO: 438390 - DNA, 356 bp, Triticum aestivum
ttctttctcgcgaaaatgtcgactgaagtggctgccgctgacatcccggtgcctcaggtggaggtagccgccgacgccgccgttgacacaccggcggcgaagccggccaaggcggccaaggtggccaaggccaagaagtccactggcccgaagaagccccgcgtcaccccggcccacccgtcctacgccgagatggtgtcggaggcgatcgccgccctgaaggagaggagcgggtcgagcaccatcgcgatcggcaagttcatcgaggataagcacaaggcgcaccttccggccaacttccgcaagatcctgctgacccagatcaagaagctcgtcgccgccggcaagctgaccaa

SEQ ID NO: 438391 - DNA, 427 bp, Triticum aestivum
ttctttctcgcgaaaatgtcgactgaagtggctgccgctgacatcccggtgcctcaggtggaggtagccgccgacgccgccgttgacacaccggcggcgaagccggccaaggcggccaaggtggccaaggccaagaagtccactggcccgaagaagccccgcgtcaccccggcccacccgtcctacgccgagatggtgtcggaggcgatcgccgccctgaaggagaggagcgggtcgagcaccatcgcgatcggcaagttcatcgaggataagcacaaggcgcacctcccggccaacttccgcaagatcctgctgacccagatcaagaagctcgtcgccgccggcaagctgaccaaggtcaagggctcctacaagctcgccaaggcccccgccgccgtcaagcccaagacggcgaccaagaagaagc

SEQ ID NO: 438392 - DNA, 368 bp, Triticum aestivum
tcgatccagaggagatgggctcgttggagattacagccacggaggtggcggcgctgctggatctgaagccgcacccggagggcggcttctacgccgagaccttccgcgactcctccgtctccctcagcaccgcccagctcccgccgcagtacaaggtcggtcgtgctgtgagcactgctatctatttcttgcttccttcagggagtgtttcacatctgcatcgtattccttgcgctgaaacctggcatttctacaagggagagcctctcacggtatttgagctacacgacgatggccacattgacctcaccgtaattggtccgcacctagatgctgggcagcgcccccagtacaccgtgccaccaaat

SEQ ID NO: 438393 - DNA, 320 bp, Triticum aestivum
gcatcaacatgctgcacaagggctcggtcgagcaggccgggttcgcggtgctgaaggcgcccgacattccgtcgatcctcgtcgagaccgcgttcatcagcaacccggacgaagagcgccggctcaacgacgacagctatcgcgacgagatggccgacgcgatcttccgcggcatcaagcgttatttcgccgcgaacccgccgctcgcgaagaaccggatggcctgacggccgaacctcccccgccgccggcacgcagcgcgtgccggcgcgtcacgacgccgcgaagcggcgcatcagtttcccgccgaacacgttcac

SEQ ID NO: 438394 - DNA, 242 bp, Triticum aestivum
cggcaactacgtgctgaaggatttcggcggcatcaacaagctgcacaagggctcggtcgagcaggccgggttcgcggtgctgaaggcgcccgacattccgtcgatcctcgtcgagaccgcgttcatcagcaacccggacgaagagcgccggctcaacgacgacagctatcgcgacgagatggccgacgcgatcttccgcggcatcaagcgttatttcgccgcgaacccgccgctcgcgaaga

SEQ ID NO: 438395 - DNA, 444 bp, Triticum aestivum
  unsure (1)..(444): unsure at all n locations
cggcaactacgtgctgtaggatttcggcggcatcaacatgctgcacaagggctcggtcgagcaggccgggttcgcggtgctgaaggcgcccgacattccgtcgatcctcgtcgagaccgcgttcatcagcaacccggacgaagagcgccggctcaacgacgacagctatcgcgacgagatggccgacgcgatcttccgcggcatcaagcgttatttcgccgcgaacccgccgctcgcgaagaaccggatggcctgacggccgaacctccccgcncgccggcacgcagcgcgtgccggcgcgtcacgacgccgcgaagcggcgcatcagtttcccgccgaacacgttcaccgcgagcccgcccatcacgagcgccgtgccgatcagttgcgtgcgcgtcaggtgttcgtcgagcagcagcgccgacgacgcgagcccgacgatcg

SEQ ID NO: 438396 - DNA, 346 bp, Triticum aestivum
aggctctacgaccgcggcaccatcctcggatacaagcggtccaagtcgaaccagtacgagacggcgtcgctggtgcagatcgagggggtgaacaccagggaggacgtggcctggtacggcggcaagaggatggcctacgtctacaaggccaagaccaagagcaacggcacccactaccgctgcatctggggcaaggtctctcgcccccacggcaacaccggcgtcgtccgcgccaagttcacctccaacctgcccgccgaggccatggggaaaaaggtcagggtcttcatgtacccgagcagcatctaaaaggttactttgaagtgtggaggatttcgctcgcccc

SEQ ID NO: 438397 - DNA, 393 bp, Triticum aestivum
ccctcgcgtccggaaattttttggaaacctgatggatgctggaatgtgctcagtttgtggtgaagaaagctttggcacgggttctgaccacatccgtgaaaaggatggtatttgggctgttctagcttggctatctattctagcttacaagaacaaggacaaccttggaggagataagcttgttacggttgaagacattgttcttcagcactgggctacgtatggtcgccattattatacacgatatgactatgagaatgttgatgcagaagctgccaaggaacttatggctaacctagtcaagatgcagtcgcacctgtctgacgttaacaagtcgatcaaggagatccagcctactgttgcagatgtggtatcggctgatgagtttgagta

SEQ ID NO: 438398 - DNA, 390 bp, Triticum aestivum
ctagctagccatggcatcttccaagagtagtcttgcattgtttgcactggtcatagtcatggccgcggtggctgacgtctcggcgcagaacaccccgcaggacttcgtcaacctgcacaaccgcgcccgcgccgtggacggcgtcggccccgtggcatgggacaacaacgtggccaggtttgcgcaggactgggcggcgcagcgcgccggcgattgccggctgcagcactccggcgggccgttcggcgagaacatcttctggggttccgggcagtcgtggacggccgccgacgcggtgaagctgtgggtggacgagaagcagaactaccatcttgacagcaacacctgcgacgccggcaaggtgtgcgggcactacacgcaggtggtgtg

SEQ ID NO: 438399 - DNA, 300 bp, Triticum aestivum
tttttcatccccgataccaaagctcattttcttgtgcttgatatctttttgtgttcacagatttggaggatgtcttgcaactgtggatccggttgcagctgcggctcagactgcaagtgcgggaagatgtaccctgatctgacggagcagggcagcgccgccgcccaggtcgccgacgtggtcgtcctcggcgtggcgcctgagaacaaggcggggcagttcgaggtggccgccgggcagtccggcgagggctgcagctgcggcgacaactgcaagtgcaacccctgcaactgttaagct

SEQ ID NO: 438400 - DNA, 403 bp, Triticum aestivum
ttgtaacgtccgtcgatcttcttcctcgtgatcatagatcgcaacgaaattttgttaccgttcattaactaatcaatttgcgattgattttgactagcaggtggtgaaggatgggtaccaatggcggaagtacgggcagaaggtgaccaaggacaacccatgcccaagggcctacttccggtgctcgttcgcgccgtcgtgccaggtgaagaagaaggtgcagcgcagcgccgaggacaaggccgtgctcgtggccacgtacgatggcgaccacaaccacgcaccgtcgtccaagcaacaaggccctagtggcaggaagagcggcgacgcaaccgccgtccgcgcaccaccggcgccggtgcttgttcagcagcagcggaagcaggaagcttcgacggcggag

SEQ ID NO: 438401 - DNA, 370 bp, Triticum aestivum
ggctactccaagggcaccggcctgggcgcggtgatcatcggctccttcgtgctcgcctacaccgtcttctccgccaccgaccccaagcgcagcgcacgcgactctcacgtcccggtgctggcgcccctcccgattggcttcgccgtgttcatggtccacctggccaccatccccatcaccggcaccggcatcaacccggcccggagcctcggggccgccgacatctacaacaaggacaaggcctgggatgatcagtggatcttctgggtcggccccatgaatcggcgcggcgatcgcggccttctaccaccagtacatcctcagggccggcgccatcaaggccctcggctccttcaggagcaacgcgtaa

SEQ ID NO: 438402 - DNA, 442 bp, Triticum aestivum
tcttccacgcgtccgcccacgcgtccgcggacgcgtggggccgacgagaggttcgaggtggtcgtaccgaggaactttgctcttgtgtgctttagaatcaaggcaagtggagccatgacggaggaggatgccgatgaggccaaccgtgtgctaatggataatctgaacaagactgggaaggcttatcttgcacacacggtggttggtgacaagttcgttcttcggtttgccgttgggtcgtcactgcaggaggagagacatataagaagtgcctgggacctcatcaaaaagactacgagcagtatcatggattaagtggatggacctattgacacataaagttccaggagctacacaaatccctatatttagggtatgattattcttttaaaattataatttgtttttcttttgctttgattctgattattacttatttgga

SEQ ID NO: 438403 - DNA, 284 bp, Triticum aestivum
tctttcatccccgataccaaagcccatcttctgggccttgaaatcattttgggttcacagatctggaggatgtcttgcaactgtggatccggctgcagctgcggctcagactgcaagtgcgggaagatgtaccctgatctgacagagcagggcagcgccgccgcccaggtcgccgccgtggtcgtgctcggcgtggctcctgagaacaaggcggggcagttcgaggtggccgccgggcagtccggcgagggctgcagctgcggcgacaactgcaagtgcaaccc

SEQ ID NO: 438404 - DNA, 355 bp, Triticum aestivum
ttatatttcttgctctgtatctgtgtgccgagtgctagacttgagagagcgagagagggagggaggtcggccgacaaggttcaggaaggatgcctcgcgcggggttgtcggcggggtcgaacaagttggacatcgccatcgacctcgggaacccgctcctcaaccgcaccgtcgacggcttcctcaagatcggcgccgtcggcgcctgcagggtggccgacgaggacgccttcgactgcctccaaagtgggagtgtctcgaagcgcaagcttgagcagacactgaagaaaatgtgcaaggagggcgcatattggggtgctgctgctggagtgtatgtaggcatggagtatggagt

SEQ ID NO: 438405 - DNA, 427 bp, Triticum aestivum
gggttctcactgggaagtatagcaaagggaatatactccgctgaatgtttgtttgccttacataactacaagaacctggcaaacaggtctctggttgacgacacgcttagaaaagtgaacgggctcaagccaatcgcttcggagcttggcgtctcgatggcgcagctgggtatcgcctggtgcgcgtcgaaccccaacgtgtcgtctgtgatcactggagccaccaaagagagccagatcgtcgagaacatgaaggccctggaggtcgtcccgctgctgaccccagaggtcctggagaagatcgaggcggtcgtccagagcaagccgaagcgcctcgagtcgtacagatgaagcggtcggtcggtcggcttcgtcagctgtgcagcgtgtgccccgccgccgcccggtgggattttttcagtacccg

SEQ ID NO: 438406 - DNA, 372 bp, Triticum aestivum
gatcatgcagcttctgcgtgataacctgacgctgtggactttggacatctcggcggacgctgctgaagaaatgaaggatgctcccaagggtgaatctggagatggacagtaaacactgtctatgtgcccagaaacttgtctttctcgcttgttcagtgtagattgtaatgtcgtcgtggttgctggtaattggaggctccaatttgtgctgtgatagggaagcttgtagctgccttgcttgctcggcggcctgattatcgggctgcactggttattgcctcttgttgaacctttgtgttacttttggtggtatctagaaattttctgctgctcttgtttgtgaccccctgcctttgtattcactagatgacc

SEQ ID NO: 438407 - DNA, 236 bp, Triticum aestivum
acaccaaaccctagcctcctcctgcgcgcgccgccgccgccgccgccatgtcagggaggaagaagacccgcgagcccaaggaggagaacgtgacgctcggccccgccgaccgcgagggggagcacgtcttcggcgtcgcgcacatcttcgcctccatcaacgacaccttcatccatgtcacggatctgcccgggagggagacgctcgaccgcaacaccggcggcatgaaggacaaa

SEQ ID NO: 438408 - DNA, 342 bp, Triticum aestivum
tgttcttccacgcgtgcgcccacgcgtccgcccacgcgtcctgccacgcgtcctccggagctcgcaccacgcgccccccctcccccccctgtgatcgctcaccgtggtctcgccgccgggccgaccccttcaccgggattggattcggagcccagctcatccgccggcagccgagccatgggcacggatgtggatgctcccgcagttgtgactgacaaggaggtggttgctgagaacatgttgggtgacaagaaagtcacagtagtatttgttcttggcggtcctggaagtggaaagggcacacagtgttccaacattgctgaacactttggattcacccat

SEQ ID NO: 438409 - DNA, 355 bp, Triticum aestivum
tttttgaactacaaaaaggacttgttatcaagcataatgcttaccagcgttttgccacatgtgctgcaacagcttttctcttcaaagaaatagctcgaattcataaccttcccgtccaggaatttgttgtaaggaatgatatgggttgtggctcaactatcggtcccatacttgcttctggtgttggcatacggactgttgattgtggtattcctcagctttccatgcacagcgttcgggaaatgtgtggcaaagaagacatagacacgacatacaagcacttcaaagctttcttcgagatgttctcggacattgaccagaaactgaatgtagatttttaggtcttgacatctga

SEQ ID NO: 438410 - DNA, 187 bp, Triticum aestivum
ttctgctccgcacacgggacagcggcggcgccgctgaatcaggagcccaccgacgccggggtggacgccgggcgcgcgttccgcggcgtgcggaagcggtcttggggcaagtacgcggcggagatccgggactcgacgcggaacggcgtgagggtgtggttgggcacgttcgagagcccggaggcgg

SEQ ID NO: 438411 - DNA, 293 bp, Triticum aestivum
agccgccttcgtccaggccgccacgatgccgtcgcacaagaccttccggatcaagcagaagctggccaagaagcagcgccagaaccgccccatcccctactggatccgcatgaggaccgacaacaccatcaggtacaacgccaagcgcaggcactggcgccgcaccaagctcggattctaatccggggatgacggcgatgacacccgttgctgccgacgggagaagggtctagggtacctagggtttatgacgtctcgctgtttttgcacgctagcaagtgactccgggatgc

SEQ ID NO: 438412 - DNA, 380 bp, Triticum aestivum
tttctccgctacagccctgactcggagatccaaacccagtattcctgagcttctcatacctacaaattattaggtcgtgcttttcggcttccttctgtctccttagctttccccatttattgcaaccttctcaaatctcaagattccaactggtcaaggaagtgaagaacaaggacagaaggacatggatgccttaagttcaatgctcgacaaggcgaaagacaaggtgaaaagcaaccctgatgtgatggagaaagtcaattcggtcctcgacaaggttaagaaccacccagaagtcatggagaaagttgctgaggttttacatctgggaaaacgtgaatccaaagagaaagaacccgaggccgaggacaagacaaaag

SEQ ID NO: 438413 - DNA, 351 bp, Triticum aestivum
cgcccacgcgtccgggcgcctatgaaggtgtatcggctgtttcttgtgtcttcctggatggcgcgggtcctcgtgtgcctggaggaggccggcgccgagtacgatttcgtgcccatgagcaggaacggcggcgaccaccggctgccggagcacctcgccagaaaccccttcggcgagatcccggtgctggaggacggcgatctgacgctctaccaatcccgtgccatcgcaaggcatattctgcgcaaatgcaagcccgagtttctaggagcgggcagcctcaaggagtcggcgatggtggacgtatgggtcgacgtggatgcccaccagcttgagcccgtactcaagccc

SEQ ID NO: 438414 - DNA, 395 bp, Triticum aestivum
tttttgacgcgtgggcgctgccgccgcccaaaatccacctgtgaagaagaaatgaggggcctcttctcttcctctctcgcgtccgatggcctcgagcccgggcgtcggcggcggaggggcggacggcggcggaggggatggaccgacgacgctcgacgagctgtaccacatcaacgtcgtgccggccgagctgcacttcaagttccgcaaggagctccagggcctccgcgtgggcctcaacttcgagttctacaacctagaggtgaatgattttgaggcaaaggtagttctgaagcccctggactttgaccggaagtggaagttccagtacaagcccatcagtggtgacatacagctgctttccaagaagataccagtcacaaaatatctcaacc

SEQ ID NO: 438415 - DNA, 283 bp, Triticum aestivum
tgttttcgacgacaacggcgtggtgatcaagaggaagattaagaagggtctcatggagaagctccaggagaagctgcccggccacaaggacaccgagggtgagcacgtgacgggcctacccgcaccggcggtccccgcgtccgtgcagacccaccatgacaccgacgtcgtcgtcgagaagatcgacggtgacgtgaagacagaggcgacaccggcagtgcccgaggaggagaagaaaggcttcttggaaaagatcaaggagaagctgcccggcggccacaag

SEQ ID NO: 438416 - DNA, 434 bp, Triticum aestivum
ttctttgcgtccgcccacgcgtccgcccacgcgtccgatgaggacggcgtgttgtgcggtgtgtccgacggccacgggccgcacggccacctggtggcgcgcagggtgcgggactcgctgccgctcaggctcatgtccgccgcgcgcgcctcgcccaagaccgggctcgacatgccggccgccgcctggaggaaggccttcgcgcgcgcctacaaggccatggacaaggacctccgctcccaccccgccctcgacagcttctgcagcggcagcaccgccgtcaccgtcctcaagctcggcacggacctttacatggccaacatcggggactcgcgcgccgtcctaggctccagagacgccgccgccggcggcatggcggccgtgcagctcaccgttgacctcaagcccgacgtccccagcgaggcggagcggat

SEQ ID NO: 438417 - DNA, 349 bp, Triticum aestivum
tctcctcacacgtccgcggacgcgtgggcggacgcgtgggcttataatcattctttcgcccgtcgccgccgccgctcccgccgctagaccagctcgccagcagcaatggcccggatcaaggtgcacgagctgagggggaagaacaaggcggagctgcagggccagctcaaggacctcaaggcggagctctccctcctccgcgtcgccaaggtcaccggcggcgcccccaacaagctctccaagatcaaggtggtgcgcacctcgattgcgagggtgctcacggcgatctcgcagaagcagaagtcggcgctgagggaggcgtacaagaacaagcgtctcccgctcgacc

SEQ ID NO: 438418 - DNA, 283 bp, Triticum aestivum
caaagctcatcttcttctacgtgaaatttttttgggtcttctgatttggtggacgtcttgcaactgcggatcaggctgcagctgcggctcagactgcaagtgcgggaagatgtaccctgatctgacggagcagggcagcgccgccgccgaggtcgccgccgtggtcgtcctcggcgtggcgcctgagaacaaggcgggacagttcgaggtggccgccgggcagtccggcgagggctgcagctgcggcgacaactgcaagtgcaacccctgcaactgttaagct

SEQ ID NO: 438419 - DNA, 394 bp, Triticum aestivum
tttggaactctcgtcagtacctgatactattcctcctagagcacaggtgcaaatcccagtcgaggttacaaatcttcgcgcgagtagagatgttgctgttcttgatttctcatataaacatggagctgcactggtgaacgctaaacttcgacttcctattgtgttgcataaattcttgcaacctataactctttcccctgaagattttttcgcccattggaaaacatggaatgttcagtcactcaaggttcaagaagtggttagaggtgtaaaaccattacctattcctgagatggctagtcttctcttgagccttcacctggcagatactcctggacttgataccaacccgaacaacatggtggcgtgtgctacattcttttcggagacaacc

SEQ ID NO: 438420 - DNA, 441 bp, Triticum aestivum
tcttctgtttcacagtgtgactttgaccgtcttaaattgtcgactgcgccctttatggaaaggaacctagaatttatgattgggtgcatggatggtctttcatcagagcaaaacaagttccaatattactatcgcaacctaggaaggcaacagtcacagcaacaggcatggcttcaaaagagaaggcaagagaacatgtccagaaaggctgctggcgaggagccgttgccagaagaagatccatccaaccctatcttcaagccgcttcctgagccatcccgcttagagggttatctcgtaaccaatcagatctcgagttactgcaaccatatcaatggggttgctggccagagtttcaacaggctatacttgatgaaggcgttgcaggaagattaggtgccgggtggcagctgctgtgagattttaacttaacactgtacc

SEQ ID NO: 438421 - DNA, 363 bp, Triticum aestivum
tttttcacgcgtccgcccacgcgtccgcccacgcgtccgcgccgaacaactctcaccggaacgcagcaaattccccagccttccctcgacccagatccggaaaatggcccgcacgaagcagaccgtgcgcaagtcgaccggcggcaaggccccgcggaagcagctggcgaccaaggcggcgcgcaagtcggcgccggcgaccggcggcgtgaagaagccgcaccgcttgcgccccgggaccgtcgcgctccgtgagatccgcaagtaccagaagagcaccgagctgctcatccgcaagctgtccttgcagcgcctcgtccgggagatcgcgcaggacttcaagaccgacctgcgcttccagag

SEQ ID NO: 438422 - DNA, 407 bp, Triticum aestivum
tgttattgttctatttatttgcttctgcacatttaggaatggaaagaagaaggcgcctcctgttgaaacacccaagcaaaggacaccagatgcagtatctgcagttgaatcacttcctcgccccacaagtactaggttccttgcatatgaagaacttaaagaagcaacaaacaactttgaggcttcatgtgtgcttggggaaggtggttttggccgtgtctttaaggggatactaagtgatggcactgctgttgctattaagaagcttactactggggggcaccaaggagataaggagtttctagttgaagtggagatgctgagcagattgcaccaccgcaatcttgtgaaactcattggatactatagcaaccgtgaattgtcacaaagccttctttgctatgagc

SEQ ID NO: 438423 - DNA, 422 bp, Triticum aestivum
ttgtcaggggtttgaggctgtcatgcgtgtcaggtgcagtcaggggcttcaagttcaagactattctggcaatttctgcaagcgcgtccctactgatattgatttgcctgtgattgactctgacaaaaccataatggtttcctttaagcatgatgataagtttcaggagaattcagaatgtggttttcagtgtgcacttctttacaccacggtatatgggcaaagaaggatacgagttataaatatttcacttccatgtacaagcatgctcagcaaccttttccgatgtgctgatctggaagcacagtttacgtatgttgttaagcaagctgcaaatggcattccatcaagttccctatcccaagttagggaccaagtaacaagtacatgcatcaatattctccagtcctaccgacaatatt

SEQ ID NO: 438424 - DNA, 487 bp, Triticum aestivum
tcgtttcttctcgcccccctcgtctccttgccaggacctcgcgcgcatctcgccccccccccccctctcactcgcccaggtctagggttccggcgcccgattcgggccgaattggacggcgccgcggcggatcggaggagcgggggagagatgacggggaagaagcgcaaggcggaggcggcgcggctggacgagacggaccgggccatgtacggcgcgttccggggcgccgccaactcgctctcgcagctctacacgctcgccatgggcggccagaagctctccttccaggccggcgagcgccacgccatggaaaagctgtatgaatggatcttaagacagcatgaaaatggtttgaggctgacagttggtgatatagcctcgcacgtccagcatgagattcagtatggaggcgacaatccgttggcctctccaagatcacaatatgcaagccaaagcactcatggtaccgtgcatatgcccaaca

SEQ ID NO: 438425 - DNA, 346 bp, Triticum aestivum
ctcgcagccccggtggtgggaacgcgcgctcgtgctcgtcgtgcagggcgtctgcttcaacgcctacttcctgggctgcctcatctcccccaagttggcgcaccgttgcccttggtacccagaggaggaggccgtggagtcctatactgagtacctcaaggaccttcgaggccttccttgatcgagaacaccaccggtccggtcattggcgtcgactactggcgccttctcgacgacgccaggctcaaggacgtcgtcaccgccgtgcgcgccgacgaggcgcatcaccgcgacgccaaccactacgcatcggacattcattaccagggaatgacgctgaatcaga

SEQ ID NO: 438426 - DNA, 303 bp, Triticum aestivum
tctttgacgcgtggggctcgctggggcagaaccccactgaggcagagcttcaggatatgatcaatgaagtggatgctgatggcaatggaacgattgactttcctgagttcctcaacctgatggcgcgtaagatgaaggacactgattccgaggaggagcttaaggaggctttcgcgtgtttgacaaggaccagaatggtttcatctcggcagctgaactccgccatgtcatgaccaaccttggtgagacgctgacagacgaggaggtggatgagatgatccgtgaggctgatgtcgatggtga

SEQ ID NO: 438427 - DNA, 321 bp, Triticum aestivum
tcgttcacgcgtccgcggacgcgtgggctcgcgcacgcgtcctacgccttcaacgactactaccagaagaacggccaggccagcagcgcgtgcgacttcagtggtgctgccaccattgtcaaccaggcaccatcaggccggtgcgacccgagcccgagctggtgtgtggcgaacgcggcggtgggcgccgcgcggctgcagaatgcactggactacgcctgcggtcacggcgcggactgcacggacatccaacccggagcacggtgcttcgatcccgacaccaaggtcgcgcatgcgtctttcgcgttcaatgactattac

SEQ ID NO: 438428 - DNA, 413 bp, Triticum aestivum
tcttttccgcgcattccatccaccgccgcattccgaggggttcgagctcgccggagagggaagagagatggccaggaagggcggagagaggaagaaggcggtgacccggtccgtcaaggccggcctccagttccccgtcggccgcatcgggcgcttactcaagaagggccgctacgcgcagcgcgtcggctccggcgcccccgtctacctcgccgccgtcctcgagtacctcgccgccgaggtgctggagctcgccggcaacgccgccaaggacaacaagaagagccgcatcgtgccgcgccacctgctccttgccatccgcaacgaccaggagctcggcaagctgctcgccggcgttaccatcgcgcacggcggcgtgctgcccaacatcaaccccgtgctgctccccaaga

SEQ ID NO: 438429 - DNA, 359 bp, Triticum aestivum
gttttcagcgccctccatggcgccatggcaggatacagtggcttcaccgtcgcgcccgtgaacggcagacacgcttacatcccattctatagaatcaccgagaagcagaacaaagtcgtgatcactgacaggatgtgggcgagggtgctgtgctcgacgaaccagccctgcttcctgagccacgaggacgtggagaacatgaagcacgacgacgatgagcgccaccacctgcacaacacgcagctcctcgatggctcaccggcgaagtgctcacccaactgtaacgggtcagctggagccgagtgagaggcacaaagctgttgggatggatatattgagcatgtgtaattatagctatt

SEQ ID NO: 438430 - DNA, 278 bp, Triticum aestivum
tcgttgacgcgtgggcagctttctcctgctcatcaaccttgttctagctagctagctactccaggtgagcgagcttactttctggagcacgaaacgcatggcggtgtcggcgctggcgatcctgctcgcctcgtgtgccctggcggcggcgagcttagacacggagttcgacgtcacctggggtgacgggcgcggcacgatcctcaacaacggccagctcctcacgctggggctagataagatctccggcttcgggttccagtccaagcacgagtacc

SEQ ID NO: 438431 - DNA, 410 bp, Triticum aestivum
tcgttatgggctgcgaaaacattgtaccaggtgatccattctgctcgtgcgaacgcagctcacaaccatggactggatgcagataaacttattgcggaagaggcttttgtggggaaaggactttatctcaagagattgtcttaccacgccaaagggaggtgcggtgtcagggagagacctaggtgcaggctgacggtggtggtcagagaagccacagccgaggaggaagctaagattgcgaaactcagggtcatgaactacaagaagctcaccccgaaggagaagcagctcatgccgtaccggcttatcgaggtcagcccgaaatgggctcgtaaaaggaaagaggaggaggaggaggctggtgcttcagcgtagtacaagtttacgtttgcagcaaggtctgtctttct

SEQ ID NO: 438432 - DNA, 316 bp, Triticum aestivum
ttgtacgtcccagccctccctcgtcttatatctagggttcagggttcttgcggcggcggcgcgacttcctcccccctcttgcgaaggtctagggtttggctgagtagagaagagagacttccccctcgtccagtagggagccgccatgagccgatcggggcagccgccggatctgaagaagtacatggacaagaagctccaaatcaagctgaatgcgaaccgtgttgtcattggcacgcttcgtggatttgatcagttcatgaatttggtggtggacaacactgtggaggtcaatggagatgagaagaccgacata

SEQ ID NO: 438433 - DNA, 384 bp, Triticum aestivum
tttagcaagtggcatgtgttctgggtagacgagagggtcgtgcccaaggaccatgaggatagcaactacaagctcgccctcgatgggttcctctccaaggtaccaattcctgctggtcaagtgtatgctatcaatgatgccttatctgctgaaggagcggcagaggactatgaaactatcttgaagcaacttgttaagaatggcgtccttgcaatgtcaaagacaactgggtttcccaggtttgatctccagcttcttggcatgggccctgacggtcacatcgcctctctcttcccaggccatcctcttgttaaagagaacaagaagtgggtcacccacatcttggactctccaaagccgccaccacagaggatcacattcacg

SEQ ID NO: 438434 - DNA, 162 bp, Triticum aestivum
actcaacgacatcatccagtccatcatcaacatggacgctgatgtgatcacccttgagaactcgcggtctgacgagaagcttctctccgtcttccgcgagggtgtggtgcacggtgcacgcattggcccgggtgtgctcgacagttcactcccccaggatcc

SEQ ID NO: 438435 - DNA, 254 bp, Triticum aestivum
ttttccacgcgtccgcccacgcgtccgcccacgcgtccgcccacgcgtccgcccaaaccctaccccgccgccgccgtcgccgccgcagcgcgcggaggcgacctcccaccgccgccaagatgcagatcttcgtgaagaccctgacgggcaagaccatcacgctggaggtggagtcctcggacaccatcgacaacgtcaaggccaagatccaggacaaggagggcatcccgccggaccagcagcgcctcatcttc

SEQ ID NO: 438436 - DNA, 405 bp, Triticum aestivum
tttctggagaatattgattgatgattgtgatacttctaagtttggaatttgggatttgcgaaaagtgttaggaataataccacaggcaccggtcctcttttcaggtactattcgatttaatctggatcctttcagcgagcataatgatgcggatctatgggaggctcttgaaagggctcatctaaaagatgtcataaggaggaatgctctagggctagatgctgaggtttctgaggccggtgaaaattttagcgttggacagcggcagctgctgagtttagctcgtgcattgctaccaagggcaaagatacttgttcttgatgaggcaacagcagcagttgatgttcgaactgatgctcttatacagaagacaatcagagaagaattcaagagttgtacaatgct

SEQ ID NO: 438437 - DNA, 315 bp, Triticum aestivum
tttttgacgcgtggggaagaacttccacttccctagctttgatagaaaacaaacaaggaaaacagagaagctcacaccatggcaaccaatgggtactccaatggcggcagcaccaagggaaagcccatcaaatgcaaagcggcggtggcgtggggtcccggcgagccgctggtgatgcaggaggtggaggtggcgccgccggcgcacatggaggtgcgcgtcaaggtcctctacacctccatctgccacaccgacctcagcttctggagaggagagaacgagcgtcaacgcaggttccctcgcatccttggacac

SEQ ID NO: 438438 - DNA, 370 bp, Triticum aestivum
  unsure (1)..(370): unsure at all n locations
ttgcttcatcgtcggcgccaacatcctcgccgccgggcccttcagcggcggctccatgaacccggcgcgctccttcggcccggccgtggcggccggcaacttctccggccactgggtgtactgggtcgggccactcatcggcggcggcctcgccgggctcgtctacggcgacgtgttcatcgcctcctaccagccggtcggccaccaggactacccgtgaagcgcacggatccgaacctagcttcctgggctcttggctcgttgctgtttccccttgtgtgaatttcccttttcgattntaatccacctcaaaaatgtaaaaatgtaagacaaccactcgatcttacatgaacggttctggcgtttttcc

SEQ ID NO: 438439 - DNA, 285 bp, Triticum aestivum
ttgtgcagagagagctctgtttctgtggaacaacgatcatattgagggtttaatcaaacaaaacagcaaggtgttactgcccataatccttccttcgttagaacgaaatacaaaaggtcattggaatcaggcagtgcaaagcttgagtcttaatgttcgcaaaatattcttggaccatgaccctgtactctttgaggggtgcctgaagaagtttcaggacgatgaagctcaagaagatgcgatgcgatcaaaacgtgatgccacatggaagcgcctagaggaaat

SEQ ID NO: 438440 - DNA, 378 bp, Triticum aestivum
tgttcgaccgctgcatgcaggcgaggcctagctagctagtgtcactaaccaagcagagcactaaccagtctcacaccggcggccagccatggcgctcgcgtccctccccaaggtggtgctcggctccttcgccttcgccatcttctggatgatggccgtgttcccgtcggtgcccttcctgcccatcggccggacggcgggctcgctgctctccgccgtgctcatgatcgtcttccacgtgatcagccccgacgacgcctacgcctccatcgacctccccatcctcggcctgctcttctccaccatggtcgtcggcggctacctcaagaacgccggcatgttcaagcacctcggcacgctcctcgcctggaagagcca

SEQ ID NO: 438441 - DNA, 276 bp, Triticum aestivum
tttgttagtcatggcatcctccaagagcagccttgcaatgttcgcactggtcatagtcatggccgtggtggccggcgtctcggcgcagaacaccccgcaggacttcgtcaacctgcacaaccgcgcccgcgcggcggacggcgtcggccctgtgacgtgggacaacagcgtggccaggttcgcgcaggactacgcgaacaagcgcgccgccgactgccggctgcagcactccggcgggccgttcggcgagaacatcttctgggggtccgggcagtc

SEQ ID NO: 438442 - DNA, 149 bp, Triticum aestivum
actccacgcgtccgggcggagaccccgagaagttcaaggagctggcacaagcctatgaggtttcgagtgaccctgagaagcgtgagatatatgatcagtatggcgaagatgctctcaaggaaggaatgggtggaggaggtggtggtgga

SEQ ID NO: 438443 - DNA, 274 bp, Triticum aestivum
ttttgttctccttgaaatctttttgggttcacagatttggaggatgtcttgcaactgtggatccggttgcagctgcggctcagactgcaagtgcgggaagatgtaccctgatctgacggagcagggcagcgccgccgcccaggtcgccgccgtggtcgtcctcggcgtggcgcctgagaacaaggcggggcagttcgaggtggccgccgggcagtccggcgagggctgcagctgcggcgacaactgcaagtgcaacccctgcaactgttaagct

SEQ ID NO: 438444 - DNA, 309 bp, Triticum aestivum
cttcgattccggcttctcgtgaagaagctgttcaatctgccacaggatttcctgacaaaaagggacgcgtgggctgggaccttcgaaggtgtcgtgcaaaccagaactgaaccgaggacagactgcccagagcaactcccgacgccgacgaggatccggcagacggaggcgaacgaggaggcgaagctgagctcgttccagcaggagatcgtgcagctggcggcggtgctgaacggcgaccaccagctaagcagcctgcaggagaggatcagggagaggatgaacgtgagggaaggcacctcctacatg

SEQ ID NO: 438445 - DNA, 323 bp, Triticum aestivum
tttgcctctctctccatcccgacctctcgtggccgccgcgaagaaaaggagcttatcatggcttcaaaacgtatcctgaaggaactcaaggacttgcagaaagatcctccgacatcatgcagtgcaggtccttctggcgaggatatgttccattggcaggcaaccattatgggtcctcctgatagtccctatgctggaggtgttttcttagtgaatatccatttccccccggactaccccttcaagcctccgaaggtatcgttcaagacaaaggtcttccatccgaacatcaatagcaatggaagcatatgcctcgacattct

SEQ ID NO: 438446 - DNA, 292 bp, Triticum aestivum
ttctgatcatccccgataccaaagctcatcttcttctttgaaatctttttgggttcacagatttggaggatgtcttgcaactgtggatccggttgcagctgcggctcagactgcaagtgcgggaagatgtaccctgatctgacggagcagggcagcgccgccgcccaggtcgccgccgtggtcgttctcggcgtggcgcctgagaacaaggcggggcagttcgaggtggccgccgggcagtccggcgagggctgcagctgcggcgacaactgcaagtgcaacccctgcaact

SEQ ID NO: 438447 - DNA, 397 bp, Triticum aestivum
tttttctatgaggtgctgtacatggttgacgccattgatgagtactccattggccagctcaaggagtttgagggaaagaagctggtctccgccaccaaggagggcctgaagcttgatgacagcgaggaagagaagaagaggaaggaggagctcaaggagaagttcgaggggctctgcaaggtgatcaaggaggtgctgggcgacagggttgagaaggtgatcgtctctgaccgcgtcgtcgactcaccgtgctgcctcgtcaccggcgagtacggctggaccgccaacatggagaggatcatgaaggcccaggccctgagggacacgagcatgggcggctacatgtcgagcaagaagacgatggagatcaacccagagaacgccatcatggaggagc

SEQ ID NO: 438448 - DNA, 330 bp, Triticum aestivum
tggtggcagtactacaagcgagtgacacaggttcttgcaccgatcagatccaacttctgcgcaagatgctggacaagctgtgggacgacgtggtggccgggcctcgcccggagacgggcctcgacaagctccgccgcgccgccgccacccaacccctcgccatcaacacagctgcaggggaggcgattaagcagtcgccgtcgatgccgacgaccccgaccacgccggtgacgccgtcgtcgtcgacgccgccgcgtggcggcagcgtgtggcggagcgttttccaccccgggagcaacctggccaccaaaagcctcggagccaacctct

SEQ ID NO: 438449 - DNA, 303 bp, Triticum aestivum
ttctttcaccccaaccccccctctcgcggcgcggcacggcagagaggagtcggcggagatgtcgggcgtgacggcggacgaggacaagaagcccgcgggcgacggcggaggcgcccacatcaacctcaaggtcaaggggcaggatggcaatgaggttttcttccgcatcaagagatccacacagctgaagaagctgatgaacgcctactgcgaccgtcagtctgtggatctcaactccattgctttcctttttgatggtcgtaggctccgtggtgagcagacccctgatgagcttgagatgga

SEQ ID NO: 438450 - DNA, 329 bp, Triticum aestivum
tttggaggagtacacgttccaagagatcatcgccaagcttgggccgatcccaagtacgtattcggcggttcatcttcccgcctatctgctcgagaaggctgatcagtacagatatcttcttcctggcaactgcatgagagaaagtgggtagcctccgctgtttgcatcaagatgtgatgcccccttggggaagagcgtggcttagcggttgtatttgataccagtggctggctgacttagttggatggcggctgggttgggttcatgattttgtaccatgtaattcaaaacaatggaaggagggcctgacagcatagcgcatgctccat

SEQ ID NO: 438451 - DNA, 414 bp, Triticum aestivum
tcccacgcgtccgcggacgcgtgggcgaggatttttgacagctttgtgctgacccaagagcaaaagctgctgtcttggctgacatggattctattggaaaggaagcacagctaagaggttttgaattcgccaaagctgttactcttgttgctgaaccattcacagtagaaaatggtctcctcacccccacgttcaaggtcaaaagaccgcaagctaaggcctatttcgcgaaagaactcgcagatatgtatgcacagctgcgtgacgccgaatcagctaggcagaagttgtaattaatcgagaaatgttcaggagtaaggttcaaaccaatacaggacaggttcacacaacggagtaaggatttctcgtttgctccatgagcaggaatacctttcagccgtcaacagtcaggag

SEQ ID NO: 438452 - DNA, 326 bp, Triticum aestivum
tttcaaccgcgtcgcttaatcggaagccgccgccagggaggaagagaacggagcgaggagccatggccgcccggaacttcttcgtccgatcccccaaggaggaggaatccagcgccgccatccgagaggctgtcctgttgggagggaagaacgccgccattgctggcaccgtggtcgcggttcccacggtgcgtatttgtgtgctgaattcttgtgtgcatgctcgcatatgtcctgacttctggcagatctgatcttgtgcagttcgttgcttgccgtgtccttccttgggctaagcacaacctgaactacaccgcgcaagcgct

SEQ ID NO: 438453 - DNA, 335 bp, Triticum aestivum
tcgccgaagcagaaaaagcatcgtctcgtctcgtctcgtcgaggaatcaacagccatgggcggcggcaacgcgcagaagtccaagatggcgagggagaggaacctcgagaagctgaagggcggcaaggggagccagctcgaggccaacaagaaggccatgaacatgcagtgcaagatatgcatgcagactttcatctgcaccacctctgaagcaaagtgcaaggagcatgccgaggcaaatcatgctaaaagcgagctcgtccagtgctttcctcacctcaagcagtgatatctgcccatcagacagagagagagataaagagagagagagagag

SEQ ID NO: 438454 - DNA, 403 bp, Triticum aestivum
tgagacaatgtcacagtagggcatagtgctgtattacatggatgcactgttgaggatgaagcttttgctggtatgggagctaccctgttagatggtgttgttgtggaaaagcatgggatggttgctgctggagcccttgtaagacagaacacgaggatcccttgtggagaggtatggggtcggaaaccctgcaaaatttctgaggaagctcacagacgaggagatcgcttttattgcggaatcagctgccaactattccaacttatccaaggcacatgctgttgagaatgctaaatccttggaaaagattgattctgagaaagtcctgcgcaagaaatttgctcaccaggacgatgaacacgattccatgcttagtgtcactcgagaggtccctccagagctg

SEQ ID NO: 438455 - DNA, 405 bp, Triticum aestivum
tttctcggaagtacgggcctctgaagctgcaagtgttggaccacgacatggtgtccaaggacgacctgatgggggaggccgagatcgacctgcagcccatgatcaatgcggcagcatcgtttggagatccagaactgctcggcgacatacagatcggccggtggctcaagtccggggacaacgctctaaccgccgacagcgctgtcatggtgaccggaggcaaggtgaagcaggaggtctccctgaagctgcagcacaccgagtcgggggaggtgacggtggagatgactggggatggctctaaacatttagagaatccggatatacgatggcaaatttgtactttgctgcaaaggatccattgaatcgactttctgggaaaaataataatttctgctactagta

SEQ ID NO: 438456 - DNA, 323 bp, Triticum aestivum
tttttcccacgcgtgcgtccacgcgtccggcgacgcgtccgtccacgcgtgcgcccaaaccctaccccgccggcgccgtcgccgccgcagcgcgcggaggcgacctcccaccgccgccaagatgcagatcttcgtgaagaccctgacgggcaagaccatcacgctggaggtggagtcctcggacaccatcgacaacgtcaaggccaagatccaggacaaggagggcattccgccggaccagcagcgcctaatcttcgccggtaagcagctcgaggacggccgaaccctcgccgactacaacatccagaaggagtccaccctcc

SEQ ID NO: 438457 - DNA, 333 bp, Triticum aestivum
tttgcaatgagatatacatcctgaggggggtactttatacaaatgtattattgttccttggggcatgcatggtacctccgcacctgtcaatggttactgaatatatggaaatgggatcactgtactatctcatccatatgagtggtcagaaaaagaaactcagctggcgcaggaggctgaaaattattcgtgatatatgcaggggattgatgtgcatacaccgcatgaagatagttcacagggacctgaaaagtgccaactgtctggtgaacaagtatcggactgtcaagatatgtgactttggcctttctcgagcgatcacagatagtccta

SEQ ID NO: 438458 - DNA, 335 bp, Triticum aestivum
gtctgttgtttatggtattggcatctgtgctgagtttggtggttctgcatttaggcctcatactggggaggcactgtccagattatacaatgtaatcaaacatcctaatgcattggatttggataatgcgatggcatatgacaattctgtttgcgctcttggaaagatatgtcaatttcatcgtgatagcatcgatgcatctcaggtcattcctgcttggttaagttgattgccattgaaaaatgacctagttgaggccaagattgtccatgaacagatgtgtgcaatgcttgagaagtccgacagtgagcttttaggccataataatcaacatc

SEQ ID NO: 438459 - DNA, 247 bp, Triticum aestivum
tcgctacgcgtgcgcccacgcgtccggggacgcgtggggccgaagatcgccctccgtgacggtcttcccctcatggtcaccgacttccgcaagcggatcttcggcgaccaagataacgctgccaccgccaccaaagggaggttactagagatccggatttcgactgggatgcttgcattcgcagttgcgacgacaaagatgctctcccaatcaagaaggagcgagagaacaagaaagacggcgtagt

SEQ ID NO: 438460 - DNA, 373 bp, Triticum aestivum
tcggttatatcttgctcaattgctgttgatgctgcagcagatcgtcatcctggagtcgagcagtatgcaatcagggcatttgctgatgctttggatgccattccactagctttagctgaaaacagtggtttgccgcctattgatactctcaccgtcgtaaaatcccaacatgtcaaggagaacaattctcgctgtggcatcgattgcaatgatgttggtaccaatgacatgaaagagcagaatgttttcgagactctgataggcaagcagcagcagatcttgctggcaacacaggtggtcaagatgatcctcaagattgatgatgtcataacgccttctgagtattgatgacgccttcaagaacggaatcgac

SEQ ID NO: 438461 - DNA, 250 bp, Triticum aestivum
gtttatttccactgccaccgccaaggtggcctccatcgacaagaagatagggctcagcgagaagttcaccatgggcactacagtggtaaacgagaaggtcaaggagatggaccagaagttccaggtctctgacaagaccaagtcggcgctggctgcggccgagcagacggtgagcaacgccgggtctgccatcatgaagaacaggtacgtcttcacgagcgcgtcgtgggtcaccagcgcgttcggcaag

SEQ ID NO: 438462 - DNA, 307 bp, Triticum aestivum
tcgtttctttgctgccatattgacttctattcagtccttgctgtgtgatccaaaccccaactctccagcaaattcggaagctgccagaatgttcagcgagaacaagcgagagtacaaccgcaaagtccgcgagatcgtggagcagagctggactgctgactaaggcagggcgaggcggcggctgccagaaagttgcaataagcaaccatgaaacctttgtttatggctctctatagttggttcttagatgaaatattaaacatctccagtgattgcttgcaggtcaaaccgtcaaagtatctttagt

SEQ ID NO: 438463 - DNA, 370 bp, Triticum aestivum
tcggttaggctgattgatggtatcctgctcaccaagtttgacactatcgacgacaaggtcggagccgcgctgtccatggtttacatatctggatctccggtcatgtttgttggatgcggccagtcctacactgacctgaagaagctgaacgtgaaatccattgtgaagaccctactgaagtaaaatggtagtgctagtacatgtcgagctccgatatgtgccacataccaaaagtctgctatatctccaaatatccccagtgacctcgttgttttctcgtttggtgtgaaactgtcgtccctagcaaacttttctggttgctgataacttattctgttatgtggatcgttatgcttggttgcctcatcag

SEQ ID NO: 438464 - DNA, 421 bp, Triticum aestivum
  unsure (1)..(421): unsure at all n locations
tcggtgtcagactaccattcggaaaagcctcatatactggactacagtaaatatccagatatcgatgagcagaggcgtttcgtgaagacttacctgagcacttctcgcgaggaacctgaagcggaggaggtggagaatctgctccggagcgtggagaagtacacgctcgcgagtcatctggtttggggactctggggaataatatcggatcgtgtcaacgacatcgacttcgattaccaggagtacgcaaggcagagatttgagcagtactggcagaagaagcctgccgtcctaacctcatgaatagctgtacctatggctctaggaactccctgagggcctgtgctgctgcacacaaactgtgcagtgttactaacacacatatccnctggctgggataatgacaggaaggatatgagag

SEQ ID NO: 438465 - DNA, 334 bp, Triticum aestivum
tcggtcatggatccggctcttcggcgccgctcccgcctgcctatccacctcctgctggtggccgtcactttactcgccgccctggccgcgcgatccgacgcggaggtcatcaccctcaccgaagagaccttctccgacaagataaaggagaaggacacagtatggtttgtgcaattctgcgtcccttggtgtaagcactgcaagagcctaggaactctttgggaggacctcggaaaggctatcgaaggtacggatgaaattgagatcggagaagttgattgcggtgcaagcaaaccagtctgctcaaaggtggacattcattcatacccaacat

SEQ ID NO: 438466 - DNA, 353 bp, Triticum aestivum
tcgttttctttgtgtttggcatctggtcattgtgggaaggcttcaaagaagaaggagagtcagaagatctggctgaattggaagcaaagctggatgcggactttaagactaacaaaggggaatcgaaaaataaatcaaaggcaactgaagatacaaagaaaaagcaaaggccatttctcatgcagttcttctcgccaatttttataaaggcattttccatcactttctttggtgagtggggtgacaagagccagattgctacaattggcttggctgctgatgaaaacccattcggcgtcgtcatcgggggagtcatagctcaagcactctgcactaccgctgccgtgatggga

SEQ ID NO: 438467 - DNA, 176 bp, Triticum aestivum
gttcatttcggtgagcgggttcaacaagacggggctgccgggcgccatctggaacttcatggcgccctactccaaggtggacagcgccggcggcatctccgtgctctgcgtcatcatgctactgctcttcaacctggcctgcaacgtaccaacagtgctgctgatggggaacgagg

SEQ ID NO: 438468 - DNA, 362 bp, Triticum aestivum
ttttaaaatgatatcgagactgatatagaaagatcactaaagcaacttcagcaagtaaattctcaaatgcaaacctgggtatcatcaggaggctcagaagttctatctcatacattgacccgtcatatggagattttgcaagaccttacgcaggaattctatcggcttcgatctagtctcagagtgaagcaacagcatgcttctctccttgacttgagagactttgacagagcaaagtttgacgtggaagagtctggggactcagaacaagctcttcttagagaacaagctgcaatcagcaggaattctggacaggtggacactgtgatatcacaagctcaagcaacactgggcgctctcat

SEQ ID NO: 438469 - DNA, 428 bp, Triticum aestivum
tttctgacgcgtgggcgcgtgatgatggagcagctgctggatgcggcaaagaagatacatggagccggcatcatccatcgggacttcaagccggagaacgtcatggtcggcttcttcggcgggctcaaggttggtgactttgggtcggcgattcgggcgaagccggccagagtgccctatgaggagtgttgtgtcggcaccctgatttacacatcgccggagcagctggaaggcaaccggtactagggccaggccgtggacatgtgggcgcttgggtgcatcatggcagagatgttggccggcgggaccctcttcgtggcggagacagaggaggagctgctcgccgagatctacaagctgcgagaccagatcacttctacggggaagctggatttggagttcttggaggagctttcagaagccgggca

SEQ ID NO: 438470 - DNA, 377 bp, Triticum aestivum
tcgttttgccgaggcgaatgctggggacgctggtgcagctgccggatcaaaagactacgttcatgtacgcatccagcagcgtaatggtcgcaagagcctgaccactgtccagggcctgaagaaggagttcagctacagcaagatcctcaaagacctcaagaaagagttttgctgcaatggtacagttgtccaggacacagaacttggacaggtcattcaactccagggtgatcagaggaagaacgtctcaaacttccttgtccaggccggcattgtgaagaaggaacacatcaagattcatggtttctgaacaactgccagctccatatcagagtctacatgcaaagcagctatatattggtggtgcagtatattta

SEQ ID NO: 438471 - DNA, 356 bp, Triticum aestivum
tcttttgccctgaggaagatgtcgctcaacaaggccaagaggtaccttgaggatgtgttggcacacaagcaagccatccccttccggaggtactgccgtggtgttggacgcacagcccaggtgaagaaccgtcagcccaatggtcagggacgctggcctgccaagtctgctaagttcgttctggatcttctaaagaacgctgagagcaatgctgaggtgaaaggtcttgatgttgatgctctctacatttcacacatccaagtgaaccaggcccagaagcagcggcgccggacctaccgtgcccatggacgcatcaacccctacatgtccaacccatgccacattgagctgatctt

SEQ ID NO: 438472 - DNA, 445 bp, Triticum aestivum
tgtttttgcccgtttctggcttgcggtgacctgagcggttacgattcagaccgctcatacccccttccaagcacagaaggcggcacctaccagagcctagatccagtccagcctcccatcgccccgccatacaaaactgcattggagatgaagaaggcgtctagccacggcgctggcacagataccagcaaattatctcttgacccccaaacaacattatagcttcagcttatgctcatctacccaatcgccacatggaaacatatgaatcatcctgcagtgacgttcagcacatgttgcagagtagatgctgaagttgaagctgaattttggttattcatccaatcttgaaggcaatagcatgtggaagagatggtataaaccgaggggtatgcatgccatgggctaagcaaactcttgaatgaactataagcctggatcacca

SEQ ID NO: 438473 - DNA, 399 bp, Triticum aestivum
tctttcacgcgtccggaacttttttcttctgagaggcatccatgagtgtgcttcaataaacagaatatatggattttatgatgaatgcaagcgtcgcttcaatgtgcggctatggaaggtcttcaccgactgttttaactgtctccctgtggccgctctaattgatgataaaatattatgcatgcatggtggcctttctcctgatctggggcacctagatgagataaaaaacttgccccgtcctaccgatgtgccagatacaggtctactatgcgatcttctttggtctgatccaggaaaagatgtccaagggtggggcatgaatgataggggcgtttcatacacatttggccatgacaaagttacggagttccttctaaagcatgatcttgatcttat

SEQ ID NO: 438474 - DNA, 323 bp, Triticum aestivum
gcggacgcgtgggcggacgcgtgggtgtacagtttataattttgaccggaactccaattgttggattcccaaagatacaatggcgtgctcttgatgagatcaattctggtgtatgtgatgggatgacgtatgaagagataaagaaaattatgcctgaggaatatgagtcacgtaagaaggacaagctgcgttatcggtacccgcgtggggagtcttaccttgacgtgattcagaggttggagcctgttatcatcgagctcgaacgccagcgagcaccagtggttgttatatcccaccaggccgtattgcgagcgctgtactcg

SEQ ID NO: 438475 - DNA, 330 bp, Triticum aestivum
ttgtagagtggaagctcgacacactgtgtgacctgtacgagactcttgccatcacccagagtgtcatctttgtgaacacccgccgcaaggtggactggctcaccgacaagatgaggggcagggaccacacagtctccgccactcacggagacatggaccagaacactagggacatcatcatgagggagttcagatcaggttcttcacgtgtgctcatcaccactgacctgcttgctcgtggtattgatgtccagcaagtgtccctggtcatcaactatgacctcccgacccagccagagaactacctgcatcgcatcggtcgtagtggtc

SEQ ID NO: 438476 - DNA, 436 bp, Triticum aestivum
ttgttacgcgtgggtcgagctatctaactatcccgatcttgatcccgatctcctaccatggtgtccgatgccagcaagaagaaagccgcgcagaagaaggccgccgccgccgccaagaggggagccaagtccagcgccgctgcctcgtcctcgtcggcgtcgtcagcggccgataaggccgccaatggcgtagcggcccttaacttatccgatcggacatgtaccggggtcctggcttcgcatccgctctcccgtgatatccacattgagtgcctttcattaacatttcatggacatgaccttattgtggattcagaattggagcttaactacgggaggcggtatggtttgctcggcttaaatggttgtgggaaatctacccttctcaccgcaataggctgtagggaacttcccattcctgacacatggacataca

SEQ ID NO: 438477 - DNA, 211 bp, Triticum aestivum
cgtccggagcagccctgacgcgagcgggattattggcctgctgggccggatcatggacaagctgcctggttaccacaagacaggggaggaggacaaggccgtctccgatacaggcgagcacaagcccagcgcttgatcgccgccgtgcccgagacccgtgaccggacctcgattgaatagctggcgtgtgttgcgtttgctttacgtctaa

SEQ ID NO: 438478 - DNA, 336 bp, Triticum aestivum
  unsure (1)..(336): unsure at all n locations
tanctgcctcggcgccatgcaggagggcgaggcggtgcgcgtgctgccggcctgcgcgcacgtgttccacgtcccctgcgtcgacacgtggctcgcgtccagctcgtcgtgcccggtctgccgtgccctggtggagccgccaccgtcgccggccgcgccagcctgggtgcaggagaagcagggcctggagaaggagtgtgctgcaagtgggagctcggcgccgccgtgtgggctcggcgcgtcgctgatgaggatgctgaacagggagaggccgctggcgcggaggctgacgcaaggtgaccacgcgcacccgatggaaatgcatgtcgaggacct

SEQ ID NO: 438479 - DNA, 357 bp, Triticum aestivum
tttcttggacccggcatggcctcacctgcaggttgtcttcgaactgttcttaagatttgttcagtctccagagacagatgctaagatggccaagagatatgttgatcagggtttcattctcaggctgctagatctcttcgactcagaggatcctagggaaagggagtatttgaagacaatacttcacaggatatatgggaagttcatggtgcaccgtccattcatcaggaaggcaattaacaatatattctacaggtttatatttgagacagaaaagcattatgggattgcagagctgttagagattctgggcagtataatcaatggttttgctttgcctctaaggaagagcataaa

SEQ ID NO: 438480 - DNA, 188 bp, Triticum aestivum
ttggttgatgtgaagaacaggcaggttaaggcgaagcaggtgacattccacaggaggaagaacctgcagtactatgagatctctgccaagagcaactacaactttgagaagcccttcctttaccttgcaaggaagctggctggtgatcccaacatccacttcgttgaagcagtggcccttaagccccc

SEQ ID NO: 438481 - DNA, 440 bp, Triticum aestivum
tttttatcctcatggtcggtctcgatgcggctggtaagaccaccatcctctacaagctcaagctcggagagatcgtcaccaccatccccacaatcgggtttaatgtcgaaactgtagagtacaagaacattagtttcaccgtttgggatgtcgggggtcaggacaagatcaggcccctgtggaggcactacttccagaacacccagggtctcatttttgtcgtggacagcaatgacagagagcgtgttgttgaggcaagagatgagcttcaccggatgctgaatgaggatgagctgcgtgatgctgtgctgctggtgtttgccaacaagcaagatcttcctaatgccatgaacgctgctgaaatcactgacaagcttggcctgcattctctgcgccagcgacactggtacatccagagcacatgtgctacctctggagag

SEQ ID NO: 438482 - DNA, 168 bp, Triticum aestivum
tctacgcgtgcgcccacgcgtccggccggggcccctttggggacaaggccgaggtctacggcgtcggcgcgctcaaggtggacgagcagctcccggcggaggacgtggaggtgttctacgacccgggggagctgctcgcggggcttatcaagggtcccaaggaggaag

SEQ ID NO: 438483 - DNA, 292 bp, Triticum aestivum
ttgttcacgcgtccgcccacgcgtccggccacgcccccaccggggacaaggtcgagttctacggcgtcgccgtgctcaaggtggacgagcagctgcgggcggaggacgtggaggtgttctacgacccgggggagctgctcgcggggcttatcaagggtcccaaggaggaagacgaggaggcggcggcgctcgccgggaggctccgggaggcggctacggtgtcggcatcaggtgccgacgcgcagcctgaggcctgccccttacttggctctggaaagcaggggtgatcgag

SEQ ID NO: 438484 - DNA, 428 bp, Triticum aestivum
tcttctgcgcgtccgcccacgcgtccgcccacgcgggcgttggattagggttgggcttgcatccattctcaacgttagcaggagcgagtgggagtccggccatggcgccgtcgcagcccaagtcagggctcttcgtgggcatcaacaagggccacgtcgtcaccaagcgcgagctgccgcctcgcccgtccgaccgtaaggggaaaggtacaaagagggtgcattttgtcaggaacttgatcagggaggttgctggatttgctccctatgagaagcgtatcactgagcttcttaaggttggaaaggacaagcgtgcactcaaggtcgccaagagaaagcttggtactcacaagagagcaaagaagaagagagaggagatgtcaagtgttcttaggaagatgaggtctgctggtggtggtgctggtgac

SEQ ID NO: 438485 - DNA, 355 bp, Triticum aestivum
tgtcgccgccgcagccgcctccgtctccgccgccacgatgccgtcgcacaagaccttccggatcaagcagaagctggccaagaagcagcgccagaaccgccccatcccctactggatccgcatgaggaccgacaacaccatcaggtacaacgccaagcgcaggcactggcgccgcaccaagctcggattctaagccggggatgacgatgatgacgcccgttgccgccgacgggagaagggtctagggtacctagggtttatggcgtctcgttgtttttgcaagctagcatgtgactccgggatgcctgttttaagattaagatttcgcttgttttgagagatattattatttact

SEQ ID NO: 438486 - DNA, 412 bp, Triticum aestivum
ttgtaacgacgccttgccagcgcacggcaaggtggtgcttgtggagtgcatcctgccggtgaacccggacgccacgcctaaggcgcagggggtgttccatgtcgacatgatcatgctcgcgcacaacccgggtggcagggagaggtacgagagggagttcgaggccctagccaagggcgccgggttcgccgccatgaagaccacttacatctacgccaatgcatgggccatcgagttcactaagtagatgatgaatgacagcgtccacccatctgatgcatccacttgatgtgtactttctcttggtgtttccttaattttgtcattctctgaatcattctaaattctaatgtttgtgtcgtcgattgattcgaaatgtactaccattaataatgttaattgctcttaatgg

SEQ ID NO: 438487 - DNA, 411 bp, Triticum aestivum
tgttcaaccccggctacccctacgaggagtcgctcatgggataccacaacgtcaccagcatgaacatgtgcatgtattttcccaagttcaatgcgtttaacttcaccaagggcggtctcgcgcagttcaaccacggccagggccaggcgctgcagtacgccgtcgccaactccttcctcgccgcgctctacgccgactacatggagtccgtcaacgtccccggctggtactgcggccccaacttcatgaccgtcgacgacctccgctccttcgccaaatcccagctgaactacattcttggggacaacccgatgaagatgagctacgtggtggggtacggcaagaagtacccgaagcggctgcaccaccgcggggcgtccacgcccaagaacgggatcaagtactcgtgca

SEQ ID NO: 438488 - DNA, 326 bp, Triticum aestivum
tgtcgtgaagacccacagaacgagttcctgtggggccttattgcgatcatatggtgtttcacctgtcctgacagatactttgagaaggtcgtccggttggcccttggaggcgtcggtacagacgaggacacccttacgagggtcataaccactcgcgctgaggtggacctgaaggtgataaaggaggcgtaccagaagaggaacagtgtcccgctggagaaggctgtttccaaggaaacaagcagagactatgaagatatgatgcttgcacttctgggggcagagtactgaggcatgtgcctgatctaccatatgcttgatgatgg

SEQ ID NO: 438489 - DNA, 383 bp, Triticum aestivum
gggtgtatttttttgcattgcaatccatgaccccaacaaatcagaagcacttaacaaatacaatctcactccctaacaatacagcaaagaagggaaaatagaaccctcaagaaaagggaaaaatggaagaaccctcgctaatcatcagtaaccaaatgcttcaatcgcacaagacggagaggccaaagccaggctctcataaagggctcacggccgactcacgatcagaggtggtcgccgttcatgagcgcggtggccttggcgccgcacgagacggccttcttgggcaccttaccgacgcggtcgatggccttggcgaagatgacccccatccccatgtggaggtgcggctcgatgtggcagtggaacgcccacaccccggg

SEQ ID NO: 438490 - DNA, 92 bp, Triticum aestivum
gggcaacccgtcggggtccaagcgcggcacggtttgcatccagggcatcgcctggagcttcggcggcatgatcttcgtgctcgtctactgca

SEQ ID NO: 438491 - DNA, 316 bp, Triticum aestivum
gcgtggggttctacggacctggtggaccttatgccctattcgctggcaaagacgccagcagagctctagccaagatgtctttcgagccccaggacctgaacggtgatacctctggcctcgggccgtttgagctcgacgccctgcaagactgggaatacaagttcatgagcaaatatgtgaaggtcggcaccatcaagaaggcagcttccgcagaagacggcaccacaagcacatccccagaaacaaatgaaacagtcaccgccgaggcagagaccgagaaggcacccgccacggagcacaagccgagggaggtgag

SEQ ID NO: 438492 - DNA, 149 bp, Triticum aestivum
tctcccacgcgtccgctcacacaggcacagcttgcacagctgatcaatgagaagccacatgtcatccaggagtacgagtcaggcaaggctatcccaaaccaacagatcattggcaagctggaaagggctcttggcacaaagctgcgagg

SEQ ID NO: 438493 - DNA, 378 bp, Triticum aestivum
tgcaaacccgcacagaagttcttcaagttaatgcctggcgaagttattcttgcttcgctggacggatttggtaaagtttgggacgctgttgaggtgtctggaaagaacgtgatgaaaacatcgtcagttgtcactacttcagttgtaacgcacaggtacggtgatcaggcaggagagatcacacaggactacctccacgccaccggaaacgctcttggggtcgcgtgggccgtcttcaagatccggaaagcgctcgacccaaaggggcacatcaagaagtcgtccctggcgagctcggcggcgcacgctgtggctaagcaatcgatcagcctgcagaagaagaagtaagccgtcgtcgtcgtacgctggtcgatgatg

SEQ ID NO: 438494 - DNA, 408 bp, Triticum aestivum
tttttaattccagcctgtcatccccttcgcgacactctaccgctctcccgatggatccgcagcagccggagcccgtcagctatctatgcggagattgcggagctgagaacacgctgaagacaggggatgtgatccagtgccgtgagtgtggctaccgtatcctctacaagaagcgcacccgcaggattgttcaatacgaagctcgctgaagacagaagaacaaacatcattcactgttggtaggtgcctcgattgatgtggagtgtgccctgagacaaagctacaatggagaaatgtattatatacagtacttttaggtcttatttgtccgttggactttggcttgaagtggtaaaacttgttgcaaaccgattgagattttagacaattgagaatccagattatgca

SEQ ID NO: 438495 - DNA, 213 bp, Triticum aestivum
ctctttggcaccaagggcgagatccggaacaactgcgccgtccccaacaggcgtgtccaggacatcgagaccgccgccacccgcgacgaggggatcgccgccgacatgtgagagacatgttctatcgatgtaacgtagtgtgagtgagtgatcgttaagccggtgtgttgtaaacttttaattaattgtgcaagcatgttgtcttagttagta

SEQ ID NO: 438496 - DNA, 222 bp, Triticum aestivum
gactcctccgctccaaggaacgatggcatcccacattgttggataccctcgcatgggccccaagagggagctcaagtttgccttggagtctttctgggatgggaagagcagcgctgcggatctggagaaggttgccgacgacctcagggccagtatctggaagcagatgtcagaggctgggattaagtacattcccagcaacaccttctcatactatgacca

SEQ ID NO: 438497 - DNA, 164 bp, Triticum aestivum
cacgctggctggggtgttatgaccagccacaggagtggtgagaccgaggacacattcattggtgatttggctgccggtctgtccacggggcagatcaagaccggggctccctgccggtcagagcgtcttgccaagtacaaccagattttgaggatcgaggagga

SEQ ID NO: 438498 - DNA, 366 bp, Triticum aestivum
ttgatcacgcgtccgaacaaacttccctgattcccctgaaccaatctacgggacccagtatctacccaggaagttcaagattgcggtcacagttgctggtgataactctgttgatatcctgaccaatgacatcggtgttgttgtcgtttcagatagtgcaggggagcctgttggctttaacctctatgttggaggtggcatgggaaggacacacagaatagaaaccacattccctcgtctggctgatccacttggttacgttcctaaggaggatatattatatgctataaaggcaatcgttgtcactcagagggagaatggaagaagagatgaccgcaggtatagcagaatgaagtatctgattga

SEQ ID NO: 438499 - DNA, 300 bp, Triticum aestivum
acgcgttcgctcccccgcaaaaccctatccctaccccgcgccgcctctgaccgtcgactccaggtaaggaggaggagaggagggcgagatggtgaagcacaacaacgtcatccccaacggccacttcaagaagcactggcagaactatgtcaagacgtggttcaaccagcccgcccgtaagcagaggcgtcgcatcgctcgccagaagaatgctgtgaagatcttaccccgacctacctctggacctcttcgccccattgtgcaatgccagacccgcaagtacaacatgaaggccagggc

SEQ ID NO: 438500 - DNA, 427 bp, Triticum aestivum
ttcttgtaggagtgagaagaagagcaggaaggccatgctgaagcttggcatgaagactatcactggcgtcagccgtgtaactgtcaagaagagcaagaatatcctgtttgtcatctccaagccagatgtattcaagagccctgcctctgacacctatgtcattttcggtgaagctaagattgaggatctgagctcacagctgcagtcccaggccgccgagcaattcaaggcgcctgatcttagcagcgtcatctcaaaccctgaggcttctacagctgttcaggaggatgacgaggattgtgatgagactggggttgagccgaaggacattgagctggtgatgacccaggccggtgtgcctaggcccaaggctgtgaaggcgctcaagtctgctgacggtgacatagtcagtgctatcatggaactg

SEQ ID NO: 438501 - DNA, 408 bp, Triticum aestivum
tgttatgctactgatcttggaactggcaaaggccaacgtgaacgagaatggagctgagaatgcggccactcataacggtcttctgcgtgcgatcgtcaacggcgcccatggcgctggccatggtggcactgccggggacttcatcgttggcaactgtaagaccatatacttcgcagggcatgagaccacggcggtcaccgccatttggtgcctgatgttactggccaaacacccggaatggcaggagcgtgcccgcatcgaggcgctggaggtttgccatgggaggagcacgttggacgttgacgccctccaccgactgaaaattctgacgatggtgatccaagaaactctccgtctgtacccaccggcgtcgctgatgatgcgtgaagccctgacggacataaagat

SEQ ID NO: 438502 - DNA, 275 bp, Triticum aestivum
tcgttcgccgcctcccctccgttcgttcttcttcttcgggttgggtagtttacgtctacccaccagccatgggtaaggagaagactcacatcaacatcgtggtcattggccacgtcgactctggtaagtcgacgaccactggccacctgatctacaagcttggaggcattgacaagcgtgtcatcgagaggttcgagaaggaagccgctgaaatgaacaagaggtctttcaagtacgcctgggtgcttgacaagctcaaggccgagcgtgagaga

SEQ ID NO: 438503 - DNA, 272 bp, Triticum aestivum
tcgtagatcgacccaacaggaagctcaactgacccaagagatagctagctaccaaaccagcgatggtgctcctcgtccctggcgagtttgatcgagcggacggcctctcctcccctcggtgcgggtgggtgaacgggcccatcgtactcagcgccgggccggcgggcatcgtcgtggccgacatgctccgggagcagggcgtgccctccgtcggcctagagcgcgacgacggcaactgcatcgcctccctctggcagaggcgcgtttacgac

SEQ ID NO: 438504 - DNA, 379 bp, Triticum aestivum
tgaacaccgtgtcgtatgtgaccctgaacaaggtcggcgggttcctgcagcggatggatctgtgccgcaagtatgctttcggcaagatgctcgtgattggttctgaggcgcccttcaaggtcaaggggctgtggctcttccgtgggcaggacatccctgagtttgtcatgaacgaggtctacgacatggagctctacgagtggaccaaggttgacctctctgacgaggcccagaagaagcgtgtcgaagccatgatcgaggaccttgagccgcttgaggggcaggccttgctggacgccaagtgcttcaagtaagcggatcagtgctttggatcgtgatggcggtgacaaaagaacctatctaggactcaaattcagtg

SEQ ID NO: 438505 - DNA, 324 bp, Triticum aestivum
ttcccacagcaccctgacttgcaagctgtagtgtaccgatccatggaggcttcacgcaggctcctctccgcggcgctcctcctcgtcctgctgctcgccgccacaggggagctgggaggcccggtgatggtggcggaggcgcggacgtgcgagtcgcggagccacaggttcagggggccctgcgtgcgcaggtccaactgcgccaacgtctgcaagaccgagggcttccccgacggcaagtgccgcgggttccgccgccgctgcttctgcaccacccactgccaccattaacaagcctctccttcgggtgatgccttctttggg

SEQ ID NO: 438506 - DNA, 375 bp, Triticum aestivum
tttcctctccactttcgtctctctcactcactgtccccctccgccgccggcgcagcgtcctccccgcgactccgatggccagcaagtgggtcaggcccgaggtgtacccgctgttcgcggcgacgggcgtggccatcggcatctgcgccttcagcctcctccgcaacatcaccggcaacccagaagtcagggtcaacaagatggggagggcagcaggagtgcttgagaaccatgaggagggcaggcgctacgccgagcacggtctcagagcctatgtgcaggacaagacccccgagatcatgccaggaatcaacaagttcttcaccagcccgaaatgaagcactttagtctctctgtgactcgctattagcaact

SEQ ID NO: 438507 - DNA, 412 bp, Triticum aestivum
ttaggactcactaccagcgcctctccgcgatccaaatcctcccgggaaagttcttggttgatctcttcctcctcgaccgcctcccaggttcttggtgtagcttttgccactctcaccaggagatttcatgtctgatcttgacgttcagatcccaactgcctttgacccctttgccgaggcgaatgctggggacgctggtgcagctgccggatcaaaagactacgttcatgtacgcatccagcagcgtaatggtcgcaagagcctgaccactgtccagggtctgaagaaggagttcagctacagcaagatcctcaaagacctcaagaaagagttttgctgcaatggtacagttgtccaggacacagaacttggacaggtcattcaactccagggtgatcagaggaagaacgtc

SEQ ID NO: 438508 - DNA, 408 bp, Triticum aestivum
cccttatagaagaagcagccgcagccgcagcgcgagcccgctaggaaaccctaccgccgccgtagcaggagcagccatgggtatcgacctcgtcgccggcgggaggaacaagaggaccaagcgcgtcgcgcccaagtccgacgatgtctacctcaagctcctcgtcaagctctaccgattcctggtgaggaggaccaagagcaagttcaacgccgtcatcctcaagaggctcttcatgagcaagactaaccgcccgccgctctccatgcgccgcctctccaacttcatgaagggaaaggaggagaagaacattgctgcggttgttggtacaatcacagatgacatgcggatccaagaggtcccagcaatgaaggttaccgctctgaggttcacagagacagcgagggc

SEQ ID NO: 438509 - DNA, 359 bp, Triticum aestivum
ttttatttccaatattcaggaaggtaggtagtagctgcttgatacgatgggcagccgcgcgggtggcacggaaacggcggaggagaggacgcgggtgtgcgacctcccggaggcgtgcgtggcgcacgtgatcgcgctcacctccccgcgggacgcctgccgctgcgccgctgtctcgccctgcttccgcgatgccgccggctccgacgtcgtctgggcgcgtttcctcccgccggactacctccagctgcaccaggcgccggcccggcgattcccgctctcgcgctccggctccacggcctcggcggcggcgtcggcgtcgtccaccaagaaggaggcctacctcgggctcaccgacg

SEQ ID NO: 438510 - DNA, 363 bp, Triticum aestivum; identical to SEQ ID NO: 435979

SEQ ID NO: 438511 - DNA, 373 bp, Triticum aestivum
tcttcacgcgtgcgctcaagcgcaactggttcgtcgtcgttgtgtaccgaatctccaccatcccccgcgcgcgccgccgcctccgtcgtcgacgatgggtgtctgggacgccatgtaccgcgtggtgatgcgccgtaacggcgtgtacgtcaccttcgtcgtcgccggcgccttcgctggcgagcggctggtggactacggcgtcaacaaggtctgggagatgaacaacgtcgggaaacggtatcaagacatatctgttctggggcaaaggccggttgaggagtgaagacattgaagcccagatttcccatgatcttttaagtgaaattaggcaccttataaagcttcatgttttgacattttccttttggca

SEQ ID NO: 438512 - DNA, 423 bp, Triticum aestivum
ttcccccagcaatccacccctttccgctccccggcggattccctcccctcccgagctcgtcaatggcaaacgcatcatccggagctgggatccatgatgactgcaagctgaggcttgtggagctcaagtccaagaggatgcaccgcttcataacctacaggctggagaaccagaaggaggtcattgtggaccaaactggggagcgcgaggccacctatgaggacttcaccaagaccctccctgagaatgactgccgattcgcggtgttcgacttcgacttcaccaccccggaggatgtgccaaagagcaggatcttctatatcttttggtccccggacaccgcacaggtgaggagcaagatgacgtacgccagcaccaacgagaagttcaagaggaccctggacggcatccagatcgagatgc

SEQ ID NO: 438513 - DNA, 301 bp, Triticum aestivum
tttcatcatccctgataccaaagctcatcttcttctccttgaaatctttttgggtccacagatttggaggatgtcttgcaactgcggatcaggctgcagctgcggctcagactgcaagtgcgggaagatgtaccctgatctgacggagcagggcagcgccgccgccgaggtcgccgccgtggtcgtcctcggcgtggcgcctgagaacaaggcgggacagctcgaggtggccgccgggcagtccggcgagggctgcagctgcggcgacaactgcaagtgcaacccctgcaactgttaagct

SEQ ID NO: 438514 - DNA, 241 bp, Triticum aestivum
tccacgcgtccgcccacgcgtccggccacgcgtccgacctacctcccctaccactccttcaagccctgctgcgttgactggcgctccagtggcgcttgcaccggcgtcaagaatcaaggcacttgtggatcgcgctgggcattcgcggcggtggcggccatcgaaggcatgaacaagattaggacaggggagctggtgtcgctgtccgagcaggaactcgtggactgcgacaccgggagca

SEQ ID NO: 438515 - DNA, 352 bp, Triticum aestivum
ttgtcgccaaggagaagcagctcaaggtcaagggccccgtcaggatgcccaccaaggtgctcaacatcaccaccaggaagtccccctgtggagaaggtaccaacacctgggatcggtttgagatgcgggtgcacaagagggtgatcgacctcgtcagctcccccgacgtcgtcaagcagatcacctcgatcaccattgagcccggcgtcgaggtcgaagtgaccatcagcgaccagtagttatgctaccccatgatatgtgtctttaaatctttctacaagggtggagagacaccagcgtaccaagatatttttgaaactttctgtagtatgagaactgggctttgtatgac

SEQ ID NO: 438516 - DNA, 335 bp, Triticum aestivum
ttctccctccaccagatggccagccccaatcatatggactacggcgtggtcgggatggaggcggacggggacgcggaggaggagatgatggcgtgcggcggtggcggcggcggctgcgggggaggggagaagaagcggcggctgagcgcggagcaggtgcgcgccctggagcggagcttcgaggtggagaacaagctggagccggagcgcaaggcgcggctggcgcgcgacctcggcctgcagccgcgccaggtcgccgtctggttccagaaccgtcgcgcgcgctggaagaccaagcagttcgagcgcgactacaacgcgctgtgccacttcta

SEQ ID NO: 438517 - DNA, 263 bp, Triticum aestivum
tgaatgggcttcccttcttttaggggtggagtgatgttttgggccgactctctcagcgcggaatacgtgtaccgcagactggacgggtggcccaaagattatggagagttcttcaaaccctgtgaatatctagctgccagagctagtcacggcgcatccttggctgccaccacagctgatggcaccaagacgcgactctagatggtttacctgggtgctctgccatgtccagtcgggatggaggagctggaatgttccggata

SEQ ID NO: 438518 - DNA, 364 bp, Triticum aestivum
tttctgtgacgacattgagtcgctctcaaccagtgtcggtgacggagcaaaacggctggtaaacaagctcaagggtaagatgcagaagccgctggcggagctgctccaggagcacgaccttccggcggggctgttcccgcgggaggccaccaactacgagttcgagccggagacgcggcggctgacggtgcacatcccggcggtctgcgaggtcggctacagggacggctccgagctgcgtttcgacaccacggtgaccggcacgctggacaagggcagcctgacgggggtggagggcctcaaagccaaggtgctcgtctgggccagggtcaccgccgtcaaggccgacgccgcaaaggtctac

SEQ ID NO: 438519 - DNA, 430 bp, Triticum aestivum
ttgtgcccaaccactctctcttctagctctgctccgtcctccatggaggggcgagcgagtgtgcgagtctgacttgcatgtgaccgagcctacagcaagcacacatccaagagacagagagaggaagtaatcttgcttgcttgcttagttgggttgggttttgtttcgtgtgtgcatctatggcgctgccggcggagagacggaccgaggaggccgcagtcaccggcgggtgccgggtgccggccgggcagggcgggctgccgatcggcttccggttccggcccaccgacgaggagctgctgctgcactacctgcgccgcaaggccctcttctgccccctccccgccgacatcatccccgtcgccgacctcgcgcgcctccacccatgggacctgccaggtacgctccacttactccccatatcactgac

SEQ ID NO: 438520 - DNA, 340 bp, Triticum aestivum
tgcactctggcggactacaacatccagaaggagtccaccctccacctggtgctccgtctcaggggtggtatgcagatctttgtgaagaccctcaccggcaagaccatcacgctcgaggtcgagtcttcagacaccatcgacaatgtgaaggcgaagatccaggacaaggagggtatcccaccagaccagcagcgcctcatctttgctggtaagcagctcgaggatggccgcactctggcggactacaacatccagaaggagtccacccttcacttggtgctccgcctccgtggtggccagcaagtgccctgccatggagctgcttatgtctctgggctca

SEQ ID NO: 438521 - DNA, 382 bp, Triticum aestivum
ttttatggatatgctcatgatggtgaactcaaaagggcgtcaacgggatgaaaatgactggagcaaattattcgttgaagcggggttcacggactacaaaattgtgaagaaactaggagctcgatgtgtcattgaggtctatccataagatattgtgctataggcacatgaataaagggagtgcctattaccataaatgtaagttgcatggactgtaagtagtttaagtgcccagcttaatccactgctttatggtccatgcaatgctggctttgggaagtaatgaagcacttggtgtgcatcttctgtcatgttgctaaagatggtttgttgtatgtcatcgatctattatatgttttattaagaaaaacattcttgacca

SEQ ID NO: 438522 - DNA, 331 bp, Triticum aestivum
tgtcctggaattgttgaactctgaaggtggtctaggaaagcaagttgccgcgtcaggtatatcagtctggaaccccgccttcgacgttactccagcaaatctaattactgcaatcattacagaaaagggtgtgatcacaaagtctgatcctaatggaagtttcgacatcaaaggtttcatcgaatgtgccaagtgatgctctccagtgagcataggttggcatgaatgcggtggaacatccttctcacacaattgatgataggatgcccatgttgtactcccagcaataagatctttcgaagtgagagaaaaataaagtcgcgtacgagat

SEQ ID NO: 438523 - DNA, 414 bp, Triticum aestivum
tcgatctcctcctaggtttcgctctccaccaccgcggaacgaaccggaaatggcggcgcggcacctcagatccggcctcccgctcctccaagctcgcctcgcggccaacgaatccgcggccgtcgctcaggtatcgagggggctggcaacggaggcggataagcctaaggagaacaagatcaaggttccaaaagctctgtatggtggcaccggcaactatgctagtgcgttgttccttgcagcagccaacgcaaattcgttggaaaaagttgaatccgagattctcgatgttgtaggggcatccaagaagagccctatgttttctcaattcatgaaggacacatcagtgcctaaagaaaccagggtgaaggctataactgaaatattctctgaagccgggtttactgacatcac

SEQ ID NO: 438524 - DNA, 361 bp, Triticum aestivum
ttggtctctctgaggaagttcggcgagacggtggagaagtgcctggccgactacggcgtggagcggccgtcgatgggggacgtcctctggaatttggagtatgtcctgcagctccaggatgtggattcttcgaccgtgtcggacgtgaacagcatgaaccggatcgtcgacctgtcgtcacaagttcagcatgtgggtgccatggagagcatcagcgtgacgatggcggaggacggagctttgcacgagcctgaccacgacctctccgacgtgtcgatgagcagggttttctctcagctgatcaaagctgaggggaggtgaaaacgcgccggatgatctgttagggtaccggtagaggtgt

SEQ ID NO: 438525 - DNA, 390 bp, Triticum aestivum
ttcaagattgcctcagagggtctgaagcacagggtgttcgaagtatctctagctgatcttcagaacgatgaggaccaggcctacaggaagatcagactccgtgctgaggatgtgcaagggatgaatgtcctcacaaacttctggggcatggacttcaccactgacaagctcaggtctcttgtgaggaagtggcagacactcattgaggctcatgtggatgtgaagaccactgacaactacatgctccgcatgttcgccattggcttcaccaagagacgcccaaaccaggtgaagcgcacttgctatgcccaagcaagtcagatcagacagatccgccgcaagatggttgagatcatggtcaaccaagctgcaagctgtgacttaaaggag

SEQ ID NO: 438526 - DNA, 257 bp, Triticum aestivum
tttcgttcacgcgtgcggtcaccccgaacccgcagatcctcttcccggcgccgccgcaacagcaagatggtgaagggacgcaccggccagcgcgtgaggctctacgtacgtggcaccatcctgggatacaagcggttcaagtggaaccagtacgagacggtgtacttggtgcagatcgagggggtgtacaccagggaggacgcggcctggtacggctgccagaggatggcctacgtctacaaggccaagaccaagag

SEQ ID NO: 438527 - DNA, 264 bp, Triticum aestivum
tctagttagctgatgagaccaagaaaggtgcttcatctgtcgaaggcgtggaggttaaagtgtggcaggtccctgagatcctgaacgaggaagtccttggcaagatgggcgccccgcccaagaccgacgtgccggtgatctccccgcaggagctggcggaggcggacggcgtcctgttcgggttcccgaccaggttcggcatgatggcggcgcagatgaaggcattcttcgactcgacgggcgggctgtggagggagcagagcc

SEQ ID NO: 438528 - DNA, 384 bp, Triticum aestivum
tttcttcgttgagcgcctcaagaccggcttcgagaagttcaagaccgaggtctacgaccagaagccggatctgttcgagcccctcaaggcccaccagtcacccaagtgaccttgggcctggagccaggcgaggccttcaccgtccgcaacatcgccgccatggtcccgtgctactgcaagaacaagcacactggtgtcgggtcggccatcgagtatgccgtctgcgccctcaaggtcgagttcatcgtggtgatcggccacagccgctgcggcgggatcaaggccctcctcaacctcaaggatggcgccgatgacaccttccacttcgtcgaggactgggtcaggatcgggtacccggccaggaagaaggtgaaggatgagtgc

SEQ ID NO: 438529 - DNA, 411 bp, Triticum aestivum
tgctttgcagcgtcaccgtgcgctcctacgcctacaagatcgtcgcccatgaggtggagacccgcctcttgcccgtcctcaccgacgcagccgacaagggcaaggtggtcgacctccaggacgtgttccgccggttcgccttcgacaccatctgcaagatctccttcggcttggacccgggctgcctcgacctcgacatgcccatgtcggacctggcgaacgcgttcgacaccgtctcgcgcctctccgccatgcggggcgcggcggcttcgccgttggtgtggaagatgaagcggatgctcaacattgggtccgagagggagctcaagaaggccatcaagctcgtcgacgacctcgcgtcggcgatgattctacagcggcggaagctgggttttgaaaatagccatgacc

SEQ ID NO: 438530 - DNA, 360 bp, Triticum aestivum
tgtccttcaacatcaccggcaacccagaagtcagggtcaacaagatggggagggcagcaggagtgcttgagaaccatgaggagggcaggcgctacgccgagcacggtctcagagcctatgtgcaggacaagacccccgagatcatgccaggaatcaacaagttcttcaccagcccgaaatgaagcactttagtctctctgtgactcgctattagcaactgttgtggtcaagtgcaaacctatttcaagcattcagtaatgttgtcgcgtccataattcagaggatatcataaagtacctcttattgaaagaaccatgtgatgtttgatggctcgctatatatgtgatggctgatggcttc

SEQ ID NO: 438531 - DNA, 419 bp, Triticum aestivum
tttcttcacctttcccccctgccccggcctcggcaagaccgcgcgcggcgcgccatgactagctccgcctccttctccccttgccgcaaggtgctgagcaagatcgcgtgcctccggctgcagaaggagctcggggagtggcaggccagccctcccggaggcttcacctacaaggtctccgacaacctgcagcggtgggtcatcgaggtgtccggggcggaggggacgctctacgccggcgagacgtaccggctgcaggttgacttcccggagcagtaccccatggaggctccacaggttatatttatgcatccggggccgatgcatccgcacatttacagcaatgggcacatctgtctagatatattgtacgactcgtggtcaccagcaatgacggtcagttccgtgtgcatcagcat

SEQ ID NO: 438532 - DNA, 397 bp, Triticum aestivum
ttattggtcaccgctttcatgactataatagatgacatatttgacacatatagcagcactgaagacagcatgcaacttgcagaagcaattaataggtgggatgaagatgcagtaaatgtgcttccagaatacatgaaggatatctacttatatttgttggaaacatttcattcttttgaggaccatttaggacctgagaacagctaccgtgtggtttatctaaaagaagcgttcaagaaattggttcaagcatacagtgatgaactaaaatggcgtgatgaaaattatgtaccaaaaacacttaatgaacaccttcaagtttcatcagtaagtattggaacctctgtggtagcatgtgctatatttgttggcatggatgacacaacagtggaaactc

SEQ ID NO: 438533 - DNA, 331 bp, Triticum aestivum
ttgttcgcacttctccccctctccgccgtcgtcgtctccgatccaccgccgctccgcgcgaccatgtcgtcgaagaggaagaccagggagcccaaggaggagaatgtcacccttggaccggctgtccgtgagggagagcatgtctttggcgttgctcacatctttgcatccttcaatgacaccttcatccatgtgactgacttgtctgggagggaaaccctggtgcggatcactggtggcatgaaggtcaaggctgatcgtgatgaatcgtcaccctatgctgctatgcttgcatctcaggatgttgctacccgttgcaaggagcttggta

SEQ ID NO: 438534 - DNA, 384 bp, Triticum aestivum
tttcttcacgcgtccggcgggaggaaacggcgaacaagttcttagcagagatatatacagacttgggcagctttttgattttttcaggatgttatccttctatgtgactactgttgggttttacttctgtactatgctaactgtactgacagtgtacatatttctctatggtaaaacttatctggctttatctggtgttggagaatcaattcaaaatagggcggatatacagggaaataaagcattgagcgtggctctgaacacccagtttcttttccagattggtgtgtttactgcaattcctatgattctaggtttcatcctggaagaaggtgtcctgacggcttttgatagcttcattactatgcagctccaactatgctc

SEQ ID NO: 438535 - DNA, 217 bp, Triticum aestivum
ttcctgcgcctccacttctctgctccctcgtctcctctcgcgcagggcccggcgaaagggaagcaagatgtacaccgccaggaagaagatccagaaggacaagggcgtcgagccctccgagttcgaggacaccgtcgcgcaggctttctttgacctggagaacggcaaccaggagctcaagagcgacctcaaggacctgtacatcaacactgcaatc

SEQ ID NO: 438536 - DNA, 363 bp, Triticum aestivum
  unsure (1)..(363): unsure at all n locations
cacgcgcattccctccgctcccggccccggatccgaccgtccacccgaccgcgccgcgcgaccgccgggggagggagagcatggcgagcgggggcaggacggatctggacggcgccgccgtggcgccgctgaccatctgcgtgatcggcgccggcggcttcatcggctcgcacctctgcgagaagctcatggccgagaccccgcacgtcgttctcgccgtcgacgtctactgcgacaagatccgccacctcgtcgacccgcccccgccccacctcgccggacgcatgtgcttccaccgnctcaacattaagaacgactcccgcctcgagggcctcatcaagatggccgatctgacgataaacc

SEQ ID NO: 438537 - DNA, 374 bp, Triticum aestivum
aggtaaaggaaagattcgcccatggctccgtcgcagcccaagtcgggcctcttcgtcggcatcaacaagggccacgtcgtcaccaagcgcgagctgccgccgcgcccgtccgaccgcaaggggaaaggtaccaagagggcgcatttcgtcaggaacttgatcagggaggtcgctgggtttgctccgtatgagaagcgtatcactgagcttctcaaggttggcaaggacaagcgtgccctgaaggtggcgaagcgaaagttgggtacccacaagagggcgaagaagaagagagaggagatgtccagcgtcctcaggaagatgagatctgctggaactggaacagacaagaagaaatagagcatcccaggctcatt

SEQ ID NO: 438538 - DNA, 397 bp, Triticum aestivum
ttgagatgtgtgcaaggaccatctactgcacaaacatcgacaagaaggtctctcaggcagatgtgaaactgttcttcgagtcaatttgcggagaggtctatcggctgaggctgcttggggactaccagcataatactcgcattgcctttgtggagtttgttatggctgaaagtgctacagctgctctcaactgcagtggtgttatactgggttccctgccaataagggtgagtccatctaagactcccgttcgtccccgtgctcctcggccaatgaactagagttgtaggtacaggaggtgccaatggcactgcttatatatagagagatcgacatatgtgaaagagaaattaagatatgtcttttcttctaagttatccgctcgagtgtcttttta

SEQ ID NO: 438539 - DNA, 364 bp, Triticum aestivum
ctgctcgatcgcgctccgacccgtcagccatggctcggctcgccgccctcctcctcgccttcgccgtcgccgtctccgccgccgcgctggcgcatggccgcgatctcccgacccagatcaagctgaccaagggcggcggcgcggtgggcggcgacagccaggagtgcgtgtacacggtgtacgtgcgcacggggtcgatctggaaggccgggacggacgccaacatcacgctggagctctacacggcgggcaacgccgacggcgtggcgatcgcggacctgccgtcgtggggcgggctcagtgggggggccactcctacttcgagcgcggcaacctggacatcttcagcgggcgcgggccgtgc

SEQ ID NO: 438540 - DNA, 443 bp, Triticum aestivum
ctggctagctgcaaagaatcttgcgcctaagtttaacagtttctccaaaaatatttctgtacacctcggagttgtggtgcctcatgtagagttgaagcatgtggttgctgctaccattggtctgaagggtctgggtggtctcctgtttatcgccagcagttcatttggtgcttatctcctggctctctaccttgctttcatcacgcccgtcgtctatgacttctacaactacgacatggagaaggctgaatttgtgcagatcttcatgaagttcacacagaacctggcgctgtttggagcccttctcttcttcctgggcatgaagaactcggtccccaagaggcaggccaagaagaaggcccccaagtccaagacaacttagatagttgcggagaagactcttatttaacaaagaagctaccgtacctggttctcttatgtgt

SEQ ID NO: 438541 - DNA, 371 bp, Triticum aestivum
tgcaaagaatcttgcgcctaaggttaacagtttctccaaaaatatttctgttcacctcggagttgtggtgcctcatgtagagttgaagcatgtggttgctgctaccattggtctgaagggtctgggtggtctcctgtttatcgtcagcagttcatttggtgcttatctcctggctctctaccttgctttcatcacgcccgtcgtctatgacttctacaactacgacatggagaaggctgaatttgtgcagatcttcatgaagttcacacagaacctggcgctgtttggagcccttctcttcttcctgggcatgaagaactcggtccccaagaggcaggccaagaagaaggcccccaagtccaagacaactt

SEQ ID NO: 438542 - DNA, 341 bp, Triticum aestivum
accaacagaaatcacttcccagccaccattgacttcccattcgatccgatcaccacaaaaaacctcaagcttctcgaccggtttattagttgttcaacagccaacaccatgagctctcggatggccggagccacgttgctgcgccacctgggcccccacctcttcgccgccgccgagccggcgtccgggctcgccgcgagcgcgaggggtatcctgcccgccgccgcgaggatcttccccgcgcggatggccagcaccgccgccggcgcgcatgccaaacaagaaggtgacgctgaaaagcccgagagcgccacagcgccggagcagaacaagaagcccgt

SEQ ID NO: 438543 - DNA, 304 bp, Triticum aestivum
ccacctttcctgccggatcttctcaggagcagcagcagcttgaattcttgcggatctgcggctgcgaatcccagtctcgtatcaactcgaccaggcggaggagaagcagggggaagatgtccaaggcggcgctgacactggaggaggtgtccaagcacaacaccaaggacgactgctggctcatcatcgccggcaaggtatatgatgtgaccaagcttttggaggatcaccctgcaggtgatgatgcactgctgtcctcgactgccaaggacgcaactgatgactttgaggatgtcgggcacag

SEQ ID NO: 438544 - DNA, 411 bp, Triticum aestivum
tcctctaatacactggatgcagctgctatcccagctgcaaggaaagctgatctaaaaggcaatatctcaaagctggaggatcaacttaggaaggcgaagaagaaaatgggtgaagaaaatatccagaaggctgtcaagattgccatagatgctgcagaagctgctctttctgaaggaaaaaccttctgtgttactcatgctgatgtgggtcttgacaccactgctgtccgggaagcagttgtcaaagccatgaaccgtttcaagggtttgccgataatggtattcagcacagatgaggcatcaaacaaggctgttatttatgccggcgtacctccggatgcacccaatggcttcaaggtgttggattggcttacaccttcaatcgcaccactcaagggaaaaggaggaggc

SEQ ID NO: 438545 - DNA, 424 bp, Triticum aestivum
cgcccacgcgtccgcccacgcgtccgagcttttggtgaggctatgcttcacactgttggatatatttatgtacggcaagcggcaagagaacttggaaagagtaaattgtatatgggtgtaccattcatagctgagtgggtaagagacaagggtcacaccattaaatcgcaagttcatgctgcttcaggtgctattgctctgatgcagctacaagaaggaatgaaaaaggtggaggagggtgccgacaaggaagagcagcttatgaagagttttgaggagaaaaaagaagccatgcttaattctctatggaaaattaatgtggtcgatatcgagtcaactctttcccgagtatgccaagcagttcttaaagatagcactgtctcaaaagatgttctgaagttgcgaggaaaagcgttgaaaaagc

SEQ ID NO: 438546 - DNA, 404 bp, Triticum aestivum
tttttcttcccacgcgtttgttcatcttcggtcagatgtcatattctgatgctatctagctacttattgggtccaacaagaaatccgagttcccggtaaagtgggggctggctccgcaaagcgagcatgaaagatatatcacagaagtcgcatttggcggcagtcctgcaataattagagattatccaaaggaaatcaaagctttctatatgcgacaaaatgatgacgggaaaacagttgcggcaatggatctattggctcctggggtcggcgaacttattggaggaagccaaagagaagaacgacttgattaccttgaaggtcggctggatgaatcaaatcttaacaaagatagctactggtggtatctggatctgcgacgatatggatcagttcctcatgct

SEQ ID NO: 438547 - DNA, 209 bp, Triticum aestivum
cccacgcgtccggacgagtgcgatccatactttgatcaggctggctgcaagcatcctggatgcgaacctgcttatcctacacctgtgtgtgaaaagaaatgcacggcgcagaaccaagtttgggaggaaaagaaacatttcagcatcaatgcataccaagtaaactctgatccacatgacaccacggcagaggtctacaataatggccc

SEQ ID NO: 438548 - DNA, 332 bp, Triticum aestivum
ggccatcctgagcaccgcttcggcggcaatctacaacatcggcgagccaggtggtgcatgggacctcaacaccaactacggcacctgggcatcctccaggaacttccaccccaacgaccagatcgtcttcaaatactctccccaggcacacgacgtcctcgaggtcagcaaggccgactacgactcctgcagcaccgcaagccccatcgccaccctcaactccgggaatgatgtcgtctccctcaccaccaccggcacccgctacttcctctgcggcttcccgggccactgcgccgggggaatgaaggtcaagatcgacgtcgtgccaagct

SEQ ID NO: 438549 - DNA, 387 bp, Triticum aestivum
ctcgtttggttgcatatgtccttctccatgttttagtgtttaggcataatggatggttgtaagtgtgtgttacccagaggatgaagtttgcaccacctcagacagataatgagtcaagagatgctaaggagatggacttggcgcggaggcggaatttgctctctattcttgcaattctggcggcaactgtcacgtaccaagctggcctgaacccgtcaggaggcatttggcctgctgagaacagtaagggtggcaaaccaggcaatccagttcttcaagacagccacccatagcgctatgatgttttctactactccaatgctgtctcatttgcgtcatctgcggctgtcatcattcttgttgctaatagggaatcatgcgaggatg

SEQ ID NO: 438550 - DNA, 299 bp, Triticum aestivum
ggaagttcccagctgctgttttcctcaaggtcgacgttgatgaactgaagcccattgctgagcaattcagcgtcgaggccatgccaaccttcctgttcatgaaggaaggagacgtcaaggacagggttgtcggagctatcaaggaggagctgacgaccaaggttgggctccacgcggctgcctagtaatcacctagcggagtagtattcgcctaaataaaattgccgcttgagaagtagtgcctccaatggcaccggatatgctgtgtactgcttgcttcttgcgagtttatggatgat

SEQ ID NO: 438551 - DNA, 376 bp, Triticum aestivum
tgacggacccgaaccccgatgatcctctggtgcccgagatcgctcacatgtacaagactgatcgggccaagtatgagtccacggcgcgctcctggacgcagaagtacgccatgggctagagcctggacggccagctggtgaccatggatgcgccgagccccagaaccgttatcacctaaataaccagccaaagtatcaccccaccccgtgacgaagtgaatggacttttgaggccgtcgtgcccctgttgaactcgtatgaatgtactctttgccatgtcaagtccgttgggtctgggtagtctgttctacctgacgtttcgttatccattaagttaaatctctgtccgtatcatgatatgtatggctttccattg

SEQ ID NO: 438552 - DNA, 156 bp, Triticum aestivum
atgctcgtgtaccaggacacgctttccggcgacgagcttctgtcggattcgatcccttacagggagctggacaacggcatgctctggcaagtcgatggccattgggtcgttcaaggagcacttgacgtggacattggagccaatccctctgctgag

SEQ ID NO: 438553 - DNA, 270 bp, Triticum aestivum
caaccatggcctgtgagactgtcgtcctcaaggatgcaatgtcctgcgcaggctgctcgggagcgggtaaaagggtgctcaccaaaatggaaggcgtcgagagcttcgacatcgacatggagcagcacaaggtgaccgtgaagggcaacgtcaagccagaagatgttttccagacggtctccaagaccgggaagaagaccgccttctgggaggcctaagccactcctgcaccggacgctaccccggccgctcctgcagcggaggcagccc

SEQ ID NO: 438554 - DNA, 332 bp, Triticum aestivum
gccggcctcccatacactgttcaacgacaagagcagctaccgcgagctctctgagatcgctgagcaagcaaagagaacagctgagattgcaaggtatattatctttccgcttccaggttgctaatagatcagacgagtcaggctagtcgttgatttgctaatgcccttttcctgatgattatgtgcaggctgagggagctcaacacactcaagggccacgttgaatccgcggtgaagctcaagggccttgacatcgacaccatcaaccagaactacaccgtgtgaggagtatcgacattggaccaacaaacatgacatccgtattggagcga

SEQ ID NO: 438555 - DNA, 248 bp, Triticum aestivum
ctgctggcgagaagcctgagccagtgaggacacatcttcgtaacatgatcattgtccctgagatgattggcagccttatcggtgtctacaatggcaagaccttcaaccaggttgagattaagcctgagatgattggccattaccttgcagagttctctatctcctacaagccagtgaagcatggcaggcccggtattggtgccacacactcttgccggatcattcctcttaaatgagttatgccgctt

SEQ ID NO: 438556 - DNA, 358 bp, Triticum aestivum
ggcggacgcgtgggccaagtgcgcccacttcgacgtcactgtcgactgttagcccgccggccccacgggcggcatgctcgtcttcgtctccggatccctccaagtcgacggcgagcaccacatcaagttctcccagatgttccacttgatgccaatcggaccagggaacttctatgtgcacaacgacatgttccgcctgaactacggctaagaatcttaccaaaggtcgtgcttccccatggaagacagaatgttctgcaaaacaaacaattcggttgtggtttttgtgtttgatggtgaaaaactttgtggtgctttcatgccaacagcttatgaaatccactgaggatgaaacata

SEQ ID NO: 438557 - DNA, 400 bp, Triticum aestivum
cgagcccaccgaattcctcgcgattcctttaccctcgcctcctcgtgcttcccctcctaggggatcgccggagaggaatcgcgacgagggcttcctcctatcagttaaatcaaagccatggagcacaaggagaccggctgccagtctcgggagggccccatcctttgcgtcaataattgtggcttcttcggcagcgcggcgaccatgaacatgtgctccaagtgccacaaggagatggcgatgaagcaggagcaggcaaagctggccgcctcctctttcgacagcatcgtcaacggtggcgatgccgcgaaagaacatcttgctgctggcagcacggcggtggcagctgctcacgttgaggcgaagacgcttattaccgcacagcctgctgatatcgctg

SEQ ID NO: 438558 - DNA, 371 bp, Triticum aestivum
atctttctccatgaaccaggcggggtcatttaggaggaatgtgcccaccgtcgctgctcgcccgaatcctcaaggatcatttcactacggcgaaatcaacgtgacccaagtgtacaagctgaggaacatgccacctgttaccatcaatggcaaaaggcggaccacactgaacggcatctcttactccccgcctgctactccattgaggcttgcggatctctatgacaagaaagaagtctacacactggacttcccaaccatgccgtctgatggaccgccggcgatcggatcttctgtcatcaactcgacgtacaaaaacttcatggagaatgtgtttcagaacaacgacacgaaagttcagacctaccaca

SEQ ID NO: 438559 - DNA, 360 bp, Triticum aestivum
gtctcgccccacgccaccggcgcagtttctgcaaagatgccgttcttgaggctcgtcgagatcgggcgggtggccctggtgaactacggcaaggactacggccgcctcgtcgtcatcgttgacgttgtcgaccagaaccgggcacttgtggatgctcccgatatggtcaggtgccagatgaacttcaagcgtctttcgctgaccgacatcaagattgacatcaagcgtatccctaagaaggccactttgatcaaggccatggaggaagctgatgtgaaaaccaaatgggagaacagctcatggggcaagaagcttgctgtccagaagagaagagcatcgctgaatgactttgacaggttc

SEQ ID NO: 438560 - DNA, 246 bp, Triticum aestivum
cgcgcgacaagagcaaggtcaccgtcacctccgacggcgccttctccaagaggtacctcaagtacttgaccaagaagtacttgaagaagcacaacgtgcgggactggcttcgcgtgatcgcagccaacaaggagcgcaacgtgtacgagctccagtacttcaacatcgctgagaatgagggcgaggaggaggattagagcgcattgccatattgtagcgcttgccgagttttgacacttgatctga

SEQ ID NO: 438561 - DNA, 390 bp, Triticum aestivum
gttgtggcgatgagatccctttgcttgatggatcagcgcaagagtgggtggaggccattcggggtgcaggtctgtgtgcggccgaggatatcggtggacagaagttggagaaactggcacccaagatcgacgagcctgtttacctgtgtaaggacgattgctttgtagctgcattcccttcctcgcaaatccacatcacctatggaattgattttccaaaggcgccagcgattggttgtcaatggttcaatactttcctggatgctgatatatactcaagcaagatagctcctgcaagaactttctgtatttttgaagaggttgaaaaaatgcgtgatgcccggctataaaaggaggatcactggaaaatgctatggtttgcagtatgtc

SEQ ID NO: 438562 - DNA, 427 bp, Triticum aestivum
cttattcgtccggaaagctatgcaaaaagcaacaaatatcgatgatgtcgacaagactatggacgaaattaatgaacagacagaaaacatgaaacaaatacaagatgctctgtcagctcctcttggagcttctgctgattttgacgaggatgaactggaagcggagctggaagagttggagggagcagagttggaatctcaactactggagcctgttgtaactattcctattcatacgacacccgtcccaggcaaggcacaaccaactcgtactgctccacagaaagcatcggctgaggaggatgagcttgctgcactgcaagctgaaatggcattgtgatcaggctcccagtgaagaaagagttgaaatgtataaatgattggctggacggtacgtggtcgcaggcgagtctggctacacatatat

SEQ ID NO: 438563 - DNA, 394 bp, Triticum aestivum
cttactcgtccgcttgccgagaagagagagagagagatggcggcgtcggcggcgacggcaacggcggcggcggtgggggcgggggaggtgatctccgtccacaccctggagcagtggaccatgcagatcgaggaggccaacgccgccaagaagctggtggtggttgacttcactgcatcatggtgtggaccatgccgcatcatggctccagttttcgctgatctcgccaagaagttcccaaatgctgttttcctcaaggtcgatgtcgatgaactgaagcccattgcggagcaattcagcgctgaggccatgccaaccttcctgttcattaaggaaggagatgtcaaggacagggttgtgggagctatcaaggaggaactgacgaacaaggttg

SEQ ID NO: 438564 - DNA, 403 bp, Triticum aestivum
tttgttaaatattaggccggcggggcatggaaggcaggagcaaggccgccgcgatgccgtcggagccggtgaggctcatcagctgcttcgccagcccggtggtccaccgcgccgagctggccctgcgcctcaagggcgtcccctaccagctcatcgaggaggacctcaacaacaagagcgagctgctgctcacgcacaaccccgtccacaagaccgtccccgtgctcctccacggcgaccgctccatcccggagtcgctcgtcatcgtcgagtacgccgacgaggtcttctccggccagccgctccttcccgtcgaccccctcgcccgcgccaacgcccgcttctgggcccgctttctggacgaggagtgcaagaagccgctgtggatggcgctgtggacaga

SEQ ID NO: 438565 - DNA, 379 bp, Triticum aestivum
tttgttttaaagtccaacatacttttaaatttgaagaagatatcactacaattacatatgaaaaatgtcagtcactctgaacttttataagggcaaaatcactgtctacttgcttatattaaagtacaacattgttcaaactttatattgatgaatatttggtagcgaattcagcgatattcttgtcggaacttccttcttcccgcattgcctccttggccttttgcatccacttcacagcatttcttttggacttatcatttctctccacatccatcatctctctaatgcacctctcaacctcctccatctttagatatccattattgtccttccgtacacgcacacccatgctccatgcactctccatatactttgc

SEQ ID NO: 438566 - DNA, 305 bp, Triticum aestivum
tttggctccatcgaggccgcggccatcatggagcacatcctggccggcagcgccttcatgggccacgccaagaaggtcaacgagattgacacgcagctcaagcccaagcaagacaggtacgcgctccgcacgtcgccgcagtggctcggcccccagatcgaggtcatccggtctgccaccaagtccatcgagcgcgaggtcaactccgtcaacgacaaccccgtcatcgacgtccaccgtggcaaggcgctccatggcggcaacttccagggcacgcccatcggtgtgtccatggacaacacccg

SEQ ID NO: 438567 - DNA, 453 bp, Triticum aestivum
ctgacgcgtgggcggcaatggcaggccaggcagagaaggtgtttgtccccaccgacacggagctgctccaggcgcagtcggacctgtggcgccacaccctctgctacctcacgcctatggcgctccggtgcgccgtcgaccttggcgtccccactgccattcaccgcctcggcggcgccgcgtccccatccgaactcgtcgccgccctatccctccccacgtccaagctgcccttcctcgcccgcctgctgcgccaactcgccacggcgggcgtcttcagtgcaaccgacgccggaacgtaccgcctcaacccgctctcgtacctcctggtagacggcgtccgcatcgacggcgacgctagccagacggccctcgtgcgcgccgtggactcgcgctactacgtggaggcggctatggggctggcggactggttcaggaaggacttcgatggag

SEQ ID NO: 438568 - DNA, 433 bp, Triticum aestivum
gtcgttctgatttgctgaagcaggagaacagttcacttaaggaagaattgaaacaacttcaggagaagtgtgataacttgacctcagaaaatacatctttacatgaaaagcttaaagcgcttgatagtgagaaaccaaatggaaacttgtgaagcagggcctcgctttctgactgctgatataaattggaggtgacatgataggccggagataattaggaggtgttcatgtgtgcaattagatttttggctgagatggtaggattgtatcataggattcaacatgatggctacagattcttcttcttccagtcgtggcagctgcggtgctctatggtgtgttttttttcctgcttttatgtgagatgctaccttagcagtatgcaaagatccccaagttatatttgagactttgcgggattagcttataagat

SEQ ID NO: 438569 - DNA, 432 bp, Triticum aestivum
tttgttgatttctattccaccatcaccagggccaggtttgaggagctcaacatggacctcttcaggaagtgcatggagccagtggagaagtgcctgagggatgccaagatggacaagagcactatccatgatgttgtgcttgttggtggttccaccagaatccccagagttcagcagctgctgcaggacttcttcaacgggaaggagctctgcaagagcatcaaccctgatgaagctgttgcctacggtgctgccgtccaggctgcaatcctcagcggtgaggggaacgagaaggtgcaggaccttctcctcctggatgtcaccccactgtctcttggtcttgagactgctggaggagtcatgactgtgctcatcaccaggaacaccaccattcccaccaagaaggagcaggtcttctccacctactccgac

SEQ ID NO: 438570 - DNA, 304 bp, Triticum aestivum
tttctgacgcgtgggcggccgcgtggggtcgctgctgcgaccaccgcacccatcgttcacaggttctccggtagtcaaaaggacttcttcaagaatttcgcggtctcgatggtgaaaatggggaacataagtccattgacgggaagggctggggagattaggaacaactgtcggagggtgaacaacaaaccctattgaagaatgagattaatgttatgagttgtgaactcattgtccttgtgtatatcattcttttaattaattctaactgtaagtgttcccttattattttctttggaaacac

SEQ ID NO: 438571 - DNA, 330 bp, Triticum aestivum
ctcactcgtccgcttctcctccccactcagtcctcggttcccggcccggttcggttcgttagggtttagtcgtggggaagaggaggaagaatggcggacgtcgagtaccgctgcttcgtcggcggcctcgcctgggccaccgacgaccagtccctccagaacgccttctccaagtacggcgacgtcatcgactccaagatcatcactgacagggagacgggccgttcccgcgggttcgggttcgtcaccttcgcgtcggacgaggcgatgcgccaggcgatcgaggccatgaacggccaggacctggacggccgcaacatcaccgtcaac

SEQ ID NO: 438572 - DNA, 401 bp, Triticum aestivum
tttgtaccacgccatcaccatcgtcggctactgcgagggtcctggcgagggaaacaagtactggattgccaagaactcatggagcaacgactggggtgaacaaggatatgtctacctcgcaaaggacgtgccctcgtccacgggcacatgtggcctcgccacctcgcccttctaccccacggcttgaccacaggcagcactatgtgtgatatctaaggaattgcttccgtttcgttgtgataatgctaaattactatttttgttatacttccctttaatttgatcaataatcggtagaccgtgcgtgcgatagcatggcctgagtgtaataaatcgtcgtgtgaattacactttctacaagttaattgtacatttgtgacacatatttaccgatttaacgg

SEQ ID NO: 438573 - DNA, 244 bp, Triticum aestivum
ttgttacgcgcccgggattatcccaacagaccgccatcagttaggatgacttatgcgatgtggtatccagacgggtatgctggcgggcgtgtgtgcatttctattgttgatgcacctggtgatgacccgaatggatgcgagcttgcaagagaacggcggacacctgtgcgcacagttgagagcatagttttgagcattattaggatgctctctaggccaaacgatgagactgcagcagatattg

SEQ ID NO: 438574 - DNA, 325 bp, Triticum aestivum
tttgttgatcacgccctccgtcctctccgagcgcctcaggatcaacggctcgctcgctcgcagggccatcaaggacctgatggagagggggctcatcaggatggtgtcaatccactccagccagcagatcttcaccagggccacaaacacctgatttacctcatgtgttggctgcctgttttctagtccagtagactgagatgtcgctgttatattgacgttcattatgttcagcgaggcactttggcactcgtgccacaagtatgttgaattgcttttgagtttttggtacaatctaagacgcaatgaaatctaccttatatta

SEQ ID NO: 438575 - DNA, 465 bp, Triticum aestivum
ctaccagctccagaggtggctgtaaactattacatgaatgaggatctctacatgtttgatgagtttcaaacatcaagagctccaaattctaggaggcctaaagttgataacttgtatgatgtattcgtgaatgtacgggacgatgaggcggagcattgcaagacaatgaaggcttgtcaaacgcatgaaaccctccgttctcctcatgccgtgcagagctcagtagaagctgatgcagaatgattctgtcaagaagtcccttggaaatgaagactgaccggttgtacgtacctccgtgctatagcgtcgtagagtatcatactaaattttggtgatatattgtattccatcctttttctcccttctcttcgtatgtagacattagccagactttcgtacttgtgaatcttacatagggaatataggtttataaatgcatcacagatttacaatgagagacgtgca

SEQ ID NO: 438576 - DNA, 404 bp, Triticum aestivum
cttgtatctctccatgacgtttccgcgcttatccaacctcaccattgaccattgcgtagatctgaaggagctgccacctagtgtatgtgaaatcagctctctggaaagcatctccttgtcaaactgccatgacctcacagagctgccatatgagctgggcaagctgcactgcctgagcatcctacgggtgtacgcctgcccggcactgtggaagcttccaccgtcggtatgcagcctgaagaggctgaaatacctggacatatcgcagtgcattaaccttacggaccttccagaagagcttggccacttgacaaacctagagaagatcgacatgcgggaatgctcgcggctgaggagcctcccgaggtcctcctcgtcgttgaagtccctcgggcacgtcgtgt

SEQ ID NO: 438577 - DNA, 356 bp, Triticum aestivum
ttcacgcgtccggggttggaaagcagctcgtcaacattccttctttcatggtgagggtggacactgagaaacacgtcgacttctcgctcaccagcccccttggtggtggccaacctggaagagtgaagcggaagaaccagaagaaggcctcaggtggtggtggtgatgacggcgaggaggaagactaagcgctcagcctcgacccgcaaacttccgttgcagaaatgttgagattgccttgtggatcttgcaacgggaaatgattcaaactttggttcgttcttagaaacttagtggtgtagagctttcgttgcttcagaatcatttggctatcgattctaaaattaaacttatgt

SEQ ID NO: 438578 - DNA, 449 bp, Triticum aestivum
ttcttcacgcgtccgcccacgcgtccgggtgaacttagtgaaccaatgtggcctattgaggcaaggaatgctgcaattgcaaatagctactttgtcggatcaattaaccgggtaggcacagaggtattcccgaacccattcacttctggtgatgggaaacctcagcatgccgacttcggtcatttctatggatccagccatttctcagcgcctgatgcttcctgcaccccatcgctatcgcgctaccgagatggcttgatgatatctgacatggacctgaacttatgccgccagatcaaagacaagtgggccttccgcatgactgctcggtatgacatgtatgctaacttgctttcagagtacttgaagccagattttaagcctcaagtcatcgccgatccgctgataaataagagggcttaattctggatcagttgggtctaagcaga

SEQ ID NO: 438579 - DNA, 340 bp, Triticum aestivum
cggtgtccttctcgtcggctacggggcgtccggcttcgcgccgtcccgcttcaaggagaagccctactggatcatcaagaactcgtggggtgagaactggggggacaaggggtactacaagatctgcaggggctccaacgtgcgcaacaagtgcggcgtcgactccatggtctccacggtgtctgccacgcacgcctctaaggaggagtaggctctgttctgatctgatcggcagccctcctggagccgatcttggtttcggtgtatcgctagaaagaagctttaatatgtagtagtcggctaggctccatcgtcgttgtggtatcatcagcagcgaaga

SEQ ID NO: 438580 - DNA, 321 bp, Triticum aestivum
ttggcacacatgcaagccatccccttccggaggtactgtcgtggtgttggacgcacagcccaggtgaagaaccgtcagcccaatggtcagggacgctggcctgccaagtctgctaagttcgttctggatcttctaaagaatgctgagagcaatgctgaggtgaaaggtcttgatgttgatgctctctacatttcacacatccaagtgaaccaggcccagaagcagcggcgccggacctaccgtgcccatggacgcatcaacccctacatgtccaacccatgccacattgagctgatcttgtcggagaaggaagagccggtg

SEQ ID NO: 438581 - DNA, 326 bp, Triticum aestivum
ttttatcgacttctgtgcccccaacttcggcctcgccgactactacggcggctggtgcaacttccccaaggagcacctggagatgaccgaggccgcattcctccgggtcgccaaggccaaggctgacattgtccaggtgcagttccgaagggtgagctgtgacagggccggcggcattcggttcaccatcaccggcggccccaacttcctccaggtgctgatcaccaacgtggcagcagacggcgaggtcgacgccgtgaaggtgaaggggtcgaagacggggtggataccgatggggaggaactgggggcagaactggcagtgcg

SEQ ID NO: 438582 - DNA, 394 bp, Triticum aestivum
cctcagatcttcgacaacatgcagaagccggccttcgtgttcgacggccgcaacgtggtctacgccgagaagctcagggagatcggcttcatcgtctactccatcggcaagccgctcgacgggtggctcaaggacatgcccgccgtggcctaattcctctccctccctcgtcggccggtccgccgggccggagctgcaggggaaggaagcaaggaaggaagagcaagaagtggtttgaccgtgattcattctttatagtttgcattttgcaggagaagcatccacattttctctctcggccataagaatttagtaaaccttcatgtcttgttaagttcccgatacatgtttgcgtctgtagatcttacttataatcaagtcaaatcctcgggcc

SEQ ID NO: 438583 - DNA, 272 bp, Triticum aestivum
cctcaacaccccagaaatcccacccgtctccacccagataaccacgagagatatttcgtccgccccgacgaccgacgaacggcagagaaaagtgaggtgatcatgagcaccatggcgatgtcggcgctgaacccggacgcgcccatgttcatcccggcggcgttcaagaaggtggaggactactcgcccgagtggtgggagctggtcaagaccaccgcctggttccgcgaccactggttccgccagcaccagctctacgaggacctcgccga

SEQ ID NO: 438584 - DNA, 383 bp, Triticum aestivum
tcgagccagccagccaaatcgagccccgttccccgaatccaggcggcaccaccaccacccacccatggcctccctggcggcgagatccggcctccgctccctggcggcgcgcgccagggcccccgccccggtcacgggcggacgccgcatgtcctcctccgcccacgacgactcctatgagacggccaagtgggagaagatcaccatcattggggccgtcacctgcaccctcctggcggcgtggaacctctccaagggccacccccacttcgacgagccgccggcctacccctacctgcacatccgcaacaaggagttcccctggggacccaatggcctgtttgaggtcaagcacgaccattgagtactgaatagtgcatcat

SEQ ID NO: 438585 - DNA, 247 bp, Triticum aestivum
tgcaaggtcaccgtcacctccgacggcgccttctacaataggtacctcaagtacttgaccaagaagtacttgaagaagcacaacgtgcgggactggcttcgtgtgatcgcagccaacaaggagcgcaacgtgtacgagctccggtacttcaacatcgctgagaatgagggcgaggaggaggattagagtgcattgctatattgtagtgcttgttgagttttgatacttgatctgagtacctcctagt

SEQ ID NO: 438586 - DNA, 206 bp, Triticum aestivum
gggagactagttcatattgatttcggatttattttggagatttcccctggaggtaacatggggtttgagagtgcacatttcaagctaagccatgagatgactcaattgcttgatccatctggaactatgaagagtgacacctggaatcagtttctcagactgtgtgtcaagggatacctagcgggaaggagacacatgaatggcat

SEQ ID NO: 438587 - DNA, 249 bp, Triticum aestivum
cggggcagccgccggatctgaagaagtacatggtcaagaagctccaaatcaagctgaatgcgaaccgtgttgtcattggcacgcttcgtggatttgatcagttcatgaatttggtggtggataacactgtggaggtcaatggagatgagaagaccgacatagggatggtggttctgagaggaaatagtgtggtgatgattgaagcccttgaaccaattgacaggtctcagtgatattttggcatacctg

SEQ ID NO: 438588 - DNA, 307 bp, Triticum aestivum
tcttaaccactctccactccacttttgtacgaagaacacttgtgaaatatggctgcccagaacaacaaggaggtggatgccctggtggagaagatcaccggcctccacgccgccatcgccaagctgccgtcgctcagcccatccccagccgtcgacgcgctcttcaccgagctggtcacggcctgcgttcccccgagcccagtggacgtgaccaagctcggcccggaggcgcaggagatgcgggagggcctcatccgcctctgctccgaggccgaggggaagctggaggcgcactactccgacatgc

SEQ ID NO: 438589 - DNA, 337 bp, Triticum aestivum
acgcgtccgcccacgcgtccgcccacgcgtccggtgccatcatgtacccgaccatcacgtcgcgcacgcagaaggtggagctggccaaggacgacgtcgacggcatccagagcctctacggcggcaaccctaacttcaagggcgtcacgccgccggccaccagcagcgaggagacccacagcgccgcccccagcgcgctctccgggccgtggagcggcctggccgtggcggctgcgctcgcactagctctgtcgtgctagttcttcttgggtcgatcgattcacgaccattttttggtttttaccttttttaacgggcattcactttgctctaggat

SEQ ID NO: 438590 - DNA, 375 bp, Triticum aestivum
tgatgagaatatttacctcttccctaaaaatggagggctgggacccgacccaaaatcatccgtcaaaattggaggcggtgaagggtccaactcaatagtgtttgcatccggtgaagatgttgatcgacctgcgcctcaggtatatgttgggcatcgcaattgtgagactgtgaagggtgtgacttttattgggccaaatcatgaatatgttgccagtgggtcagactgtggtcggttatttatttggaggaagagagatgggaaatttttacgggcaatggagggtgatgaatgcatagtcaattgtattgagccccatcctcatgctatgacaattgcaagcagtggaattgataatgatgtgaagctatggac

SEQ ID NO: 438591 - DNA, 297 bp, Triticum aestivum
cgaaccaccaccgctcctccaatcccacattcgctcatcagcagctcgaagcggatcgtcggcgaccatgtccgggcgcggcaagggaggcaaggggctcggcaagggcggcgccaagcgccacaggaaggtgctgcgcgacaacatccagggcatcaccaagccggccatccggaggctcgctcggaggggcggcgtgaagcgcatctcgggcctcatctatgaggagacccgcggcgtgctcaagatcttcctcgagaacgtcatccgcgacgccgtcacctacaccgagcacgc

SEQ ID NO: 438592 - DNA, 385 bp, Triticum aestivum
gcacaggagaaggagcaggcggcggcggtgccttaagaggagaagcacggcgacctagcccgagctcgcaaccatggctaggggtttgaagaagcatctgaagaggctcaatgccccgtctcattggatgcttgacaagcttggtggagcttttgcccccaagccatcatccggtcctcacaaggccagggagtgcctgcctctgatcctcatcctgaggaacagactgaaatatgctctcacctaccgtgaagtgcaatctatccttatgcagcgtcatattatggttgatggaaaggtccgcactgacaagacctaccctgctggtttcatggacatcatttccattcccaagactggtgagaactacaggcttctgtatgac

SEQ ID NO: 438593 - DNA, 302 bp, Triticum aestivum
tttctgacgcgtgggcggacgcgtgggttcgacttcaagcgattcctcgaactcatgcgcgcccacctccgcccggagcccttcgaccgcccgctccgcgacgccttccgcgtcctcgacaaggacgcgtcgggcaccgtctccgtcgcggacctccgccacgtcctcacctccatcggggagaagctcgagccccacgagttcgacgagtggatccgcgaggtcgacgtcgccgcggacggcaccatccgctacgacgacttcatccgccgcatcgtcgccaagtagtggattgatccgta

SEQ ID NO: 438594 - DNA, 353 bp, Triticum aestivum
agcccatgatctctcaaccagtggggtttttgaggttgaaccaaaacgttgccctggctatgtctatagaaggtctgtatggatgggtacaactgagatgtctagggcagagttccgctcgttcattcaaactcttgcaggaaagtacaatgggaatacatatcatctgatttcaaagaactgcaaccattttacggatgatgtctgtaagaacataaccaaaaaaccagcccctggatgggtaaatcggctagcaagagtgggttactttttcaatcgccttctaccaaaaagcaattaagactctactgttactcacggagcaacccatcctgcattctctgatgatgatg

SEQ ID NO: 438595 - DNA, 295 bp, Triticum aestivum
  unsure (1)..(295): unsure at all n locations
tgcttcgcttgcaatcattgccgatgagatttgctgtttgctgctcagcaaagcaggatacagtggagaaggtttgtgaaattgttaagaagcagcttgctgttcctgaaggcactgaagtttgcggtaccaccaagttttctgaccttggagctgattcactggacacggtcgagattgtgatgggccttgaggaggagttccagatcagcgtggaggagacgagcgcgcaggcaattgcgacagttgaagatgctgccacgctcattgacaagctngtctctgcgaagtcatc

SEQ ID NO: 438596 - DNA, 86 bp, Triticum aestivum
aactgatcgaggcggccgccgggcagtccggcgagggctgtttctgcggcgacaactgcaagtgcaacccctgcaactgttaagct

SEQ ID NO: 438597 - DNA, 369 bp, Triticum aestivum
tgttgcaccggttcggcaacacctccagcagctccctctggtacgagctcgcctacgccgaggccaagggccggatccgcaagggcgacctcacctggcagatcgccttcggctccgggttcaagtgcaacagcgccgtgtggagggcgctccggtcggtcaacccggccaaccccggggacgtcgccggcaacccctgggccgacgagatccaccgcttccccgtgcgcgtgccaaacttctcagccatcgatcctccatccactttcagcgacaccacccagcaataaggatttctagtggtcacgtacgtacgtcttttggtctgtagctagcattatactgtattagcgagctgcttggttgggg

SEQ ID NO: 438598 - DNA, 269 bp, Triticum aestivum
actattttatcctcaagaaggacatcaggaacttccacatgctccaggagatgtacaacgagtggccattcttcagggtcaccatcgatcttgttgagatggtgttcgccaagggtaatcctggcattgctgccttgtatgacaggctcctagtttcagaggggctacagccactgggtgagaagctgagggccaactatgaggagacccagaagctgcttcttcaagttgctgagcacaaggatcttcttgaaggtgatccctacctg

SEQ ID NO: 438599 - DNA, 418 bp, Triticum aestivum
ttttaaaactgaagagtgcgagagcttcttcaactttttcagccccccacaagtacctgatgatgatgaggacattgatgaagaagccgctgatgagcttcagggtcaaatggagcatgattatgacattgggtctaccataagggacaagatcatccctcatgctgtttcttggtttactggtgaggctgtgcaagctgaggatttcgatgatatggaagatggtgacgaggatgacgacgacgatgatgatgatgatgaagaagatgatgaggatgatgaggacgaggacgaagacgatgatgaagatgaggaagagctaagcaagccgacgaagaaggtggcgggcaaaccgaagggacctgcaaagggtggcgcacaagggaacgccgagcaaccgacggagtgcaagcagcag

SEQ ID NO: 438600 - DNA, 378 bp, Triticum aestivum
gcccacgcgtccgtcatggcatcttccaagagcagtcttgcaatgttcgcactggccatagtcatggccgtggtggctgacgtctcggcgcagaacaccccgcaggacttcgtcaacctgcacaaccgcgcccgcgccgtggacggtgtcggcccggtggcgtgggacaacaacgtggccaggtttgcgcaggactgggcggcgcagcgcgccggcgattgccggctccagcactccggcgggccgttcggcgagaacatcttctggggttccgggcagtcgtggacggccgccgacgcggtgaagctgtgggtggacgagaagcagaactaccatcttgacagcaacacctgcgacgccgcaaggtgtgcgggcact

SEQ ID NO: 438601 - DNA, 221 bp, Triticum aestivum
ttttgatcactggtggaatgaaggtcaaggctgatcgtgatgagtcttcaccctatgctgctatgcttgcatctcaggatgttgctacacgttgcaaggagcttggtattaccgcactgcacattaagctccgtgccactggaggcaacaagaccaagacacctggacctggagctcaatctgctctcaaggctcttgctaggtctgggatgaaaattggg

SEQ ID NO: 438602 - DNA, 424 bp, Triticum aestivum
ccggggaaggatgcggagagcgcttactgggaactcgtcataaaggacatccaagacgcgtgcaagctgtttgagcccatctacgacgagactgatggggctgatggttacgtttcagtggaggtgtctcctaggctggcaaatgacacccaaggaaccgtcgaagctgcgaagtggttacacaaagtggtcaaccgccccaatgtgtacataaagatcccagctacagcagaatgtgttccttctatcaaggaagtcattgctaatggcatcagcgtcaatgtcactcttatcttctctgttgcaagatacgaggctgtgattgatgcttacctcgacgggcttgaggcttctggtttgagcgacttatcccgagtaaccagtgtagcatccttctttgtcagccgagttgacagtctgatcg

SEQ ID NO: 438603 - DNA, 397 bp, Triticum aestivum
ttttgtaccttgtgaaggatctgctgcggcacgacacgagccgcctcgaggacttcgccgagctgctccggcacaccgtcgccggggcgcggcagtcctcgggcctcataatcaacaccctgggcgccatcgaggccgccaacctggagcagatccgcgaggacctgtcggtcccggtgttcgccgtcgcccctctccacaaactggcgccgtcggccaagtccaccagcctgggcgagacgcaggcagaccgcggatgcctcggctggctcgacacgcaggagcccggcagcgtgctctacgtgagcttcgggagcctggccgtcatggacccgcacgagttcgtggagctggcgtgggggctggccctgagcaagcggccgttcgtgtgggtcgt

SEQ ID NO: 438604 - DNA, 335 bp, Triticum aestivum
ttcttccacgcgtccgcctctttccattcttgcactttgcaattggctttgcactgaatacaattgcaatcttctatgggtcattagcggcaataccatttggtacaatggttgtcatttttgtcctttgggctttcatatcttttccactggtgcttttgggaacggtcgttggtagaaactggagtggggctcctaacaatccctgccgagtaaagactattccccggcctattcccgagaggaagtggtaccttacaccttctgtcatctcattgatgggtgggctgcttccctttggcagcatcttcatcgagatgtactttgtgttcaca

SEQ ID NO: 438605 - DNA, 259 bp, Triticum aestivum
ttttcgcgtccggtggcggagcgcaaggctgctgaagcctgggccgccctgaaccgcctcccgctcgtcccctcggtgacccgtgctgtcctccccacggcagcacagctctcagccaagtacaactctgccgtgcttgatggcgcgaagcgtggcaactccgtcgccacctacctcccgctcgtcccaactgagcgcattgcaagggttttcgccaacccggccgacgacactgcgcctgccacagctcctgagatgc

SEQ ID NO: 438606 - DNA, 326 bp, Triticum aestivum
caagaggagagaccaaggtagacgacgatggcggtgtcggtggagctgcccaaggagtacggctacgtggtgctcgtcgtggtggcctacgccttcctcaacttctggatgagcttgcaggtcggcgccgcccgcaagaagtacaaggtgttctaccccaccatgtacgccaccgagtcggagaacaaggacgccaagcgcttcaactgcgtccagagggggcaccagaactcgattgagatgatgccgctcttcttcgccacgctgctgctcggcggcctgcagcacccggtcgccgccgccgcgctggggctgctctacaccgt

SEQ ID NO: 438607 - DNA, 380 bp, Triticum aestivum
ataccgaaaggctttgatacgacatgtgcgctggaaagctccatcttgttgttggacttggtgaagctaatgggcccgaggtcggtaagaagagttggatgcctgcatcttatcctggtggtccgcgctgtatgactgaaaacttctatgatggggtggctgttttgcgtatgcatgcctcgcctgatataatcacaaccttcacatgtagtccaaagtggcctgaaataacggagagtactgaacctgggcaaaaaacagtcgataggtctgacattaccgttcgagtgtatcgcttgaaacttcttgagtacctacagaaaatgaggacagggaggatgtttgggcctatagttgctgatatccacgcaggggagttt

SEQ ID NO: 438608 - DNA, 428 bp, Triticum aestivum
ttgcatggagccagtggagaagtgcctgagggatgccaagatggacaagagcactatccatgatgttgtgcttgttggtggttccaccagaatccccagagttcagcagctgctgcaggacttcttcaacgggaaggagctctgcaagagcatcaaccctgatgaagctgttgcctacggtgctgccgtccaggctgcaatcctcagcggtgaggggaacgagaaggtgcaggaccttctcctcctggatgtcaccccactgtctcttggtcttgagactgctggaggagtcatgactgtgctcatcaccaggaacaccaccatccccaccaagaaggagcaggtcttctccacctactccgacaaccagcctggtgtgctcatccaggtgtttgagggtgagaggacaaggaccagggacaacaacc

SEQ ID NO: 438609 - DNA, 384 bp, Triticum aestivum
ttttaccaaccacacaagaaccgatcaagacaccagcaatggccggaggaggaagcgacgaagtgaagctgctgggcatgtgggcgagcccgttcgtccttcgagtcaagctcgcgctcagcctcaagggcgtcggctacgagtatgtcgaagaggacctcaagagcaagagcgagctgctcctcaagtccaaccccgtgctccagaaggtgccggtgctgatccacgacggcaagcccatctgcgagtcgtcggtcatcctgcaatacatcgacgaggctttcgccggcgtcggctcctcgctcctcccggaggaaccccacggccgcgccgttgctcgcttctgggccgcttacatcgacggcacgctcgtgaaagcatcgt

SEQ ID NO: 438610 - DNA, 314 bp, Triticum aestivum
tttacgcgtggggccccgtcaaggtgaacctcggcgtcggcgcctaccggaccgaggaagggaagcccctcgtgctgaatgtggtcaggcgcgccgagcagatgctgatccaaaacgagtcacgtgttaaggagtacttgccgatcactggattggccgatttcaacaagttgagtgccaagcttatctttggtgctgacagtcctgctattcaggagaatagggtggctacagtacagtgcttatcaggaactggttccttaagagtgggaggtgaatttcttgcaaggcactatcatgaacgcactatctac

SEQ ID NO: 438611 - DNA, 412 bp, Triticum aestivum
ttgaattcaagaaagacatggacgagcagtggatgatggggcagacttccctcagcctcggcctcaacgtcggccggccgacggcgcggcggggtgcccctccggtgaccaaggtcctcgtggaggaggacttcatgtcctccaagaagaatcacgaggtcgaggcgctggaggcggagctccggcgcgtgggcgaggagaacaggaggcttagcgacatgctccgcgcgctggtggccaagtactccgacctgcagggcagggtcagcggcaagatggcggcggtgaccgcggccaaaaaccgccagtcacccacgacgtctgagggcggctccgcatcctcgccgtccaggaagcgcgcccgcagcgacagccccgacaccgccgtccaggaagcacgcccagccagcgg

SEQ ID NO: 438612 - DNA, 442 bp, Triticum aestivum
  unsure (1)..(442): unsure at all n locations
ttcagacaatgccatcacaggaactgtccctatctcaacaggaacgacaccgggccttgaccttcttaccaacacgaagcacttccatttcaacaagaaccagctatctggaacgcttacaggcctcttcaagcctaatatgaccctcatacacatattgtttgatagcaatcagttcacaggcccaattccgcgtgagcttggaagcattacctcgctccaagtactccgactggataggaaccaatttgcgggagcagtccctaacatcaccaacttggtcaacctaaatgagctgaacttggcaaccaacaagctaactggatcagtgccaaatctcagcagcatgaacgtgttaaatgttgtggatttaagcaacaacagctntaccgcgtccgcaataccagcctggttcacaaatctaacaaatatttcttcaata

SEQ ID NO: 438613 - DNA, 393 bp, Triticum aestivum
gtctgccacttcatcggggagggcgggttcgggccggtctacaagggcttcctcgacgacaaggtggtgccggggatgcagccgcagcacgtggccgtcaagtacctggacgccgagggcccccagggccaccgccagtggctcgccgaggtcgtctacctcggcatgcagctcagccacccgcacctggtgaagctcgtcggctactgctaccaggagcaccaccgcatgctggtgtacgagtacatggcccgcggcagcctcgagcaccacctcttcaagaatctgctggcgagcttgccgtgggcgacgaggctgaagatcgcggtgggggcggccaaggggctggcgttcctgcacgaggcggagacgccggtcatctaccgggacttc

SEQ ID NO: 438614 - DNA, 404 bp, Triticum aestivum
tcttcctcgacatcctaaaggacaagtggagtccagctcttcagatacgcactgttcttctgagcattcaggcactgctgagcgccccaaacccagatgatcctctctcagaaaacgtcgcaaaacactggaaatccaatgaagctgaagctgttgagacagcgaaggaatggactcgtatgtatgccagtggcgcatgacaagctaacgctgttatggatgtaataacactgtgtcatagttgggcctaatcgaaaaccatttgcttgataaaaacacacttgaaatgatttgcgatggacgaatgtatccagagcggcatcatttcttgttggtggttgtatttgtggtgcgtgttctggcacgcttcataacttgctgcttatagaacacgctctgtttct

SEQ ID NO: 438615 - DNA, 371 bp, Triticum aestivum
ctgtactggcgcgcgcggcttcggatcgcgcggggcgcggggcgcggggtgctgcacatccacgaggtgtgcacgccgcagatcgtgcaccgggacatcaagtcgagcaacatcctgctggacgagtccggcgaggcgcgggtggcggacttcgggctggcgcggctgatcctgccggaccggacgcacgtgacgacggagctggtgggcacgctggggtacatcccgccggagtacgggcaggggtgggtggcgacgctgcggggcgacgtgtacagcttcgtggtgctgctggagctgctcaccgggaggcggcccgtggagatgatggcggcggcggggcagccgagggacctcgtcgggtgggtgac

SEQ ID NO: 438616 - DNA, 474 bp, Triticum aestivum
ttttaatcttacggatcaaggtgcgtcaagccaccgatcatctatggtgatgtgagccgccccaaccccatgaccgtcttctggtccaagatggcgcagagcatgactgctcgcccaatgaagggtatgctgacaggccctgtcacaatccttaactggtcttttgtcagaaatgaccaaccgaggtttgagacttgctaccagattgctcttgcaatcaagaaggaggtcgaggaccttgaggctggtggtattcaggttatccaaatcgatgaggctgctttgagagagggtctgccactccgcaagtcggagcatgctttctacttggactgggccgtgcactccttcaggatcaccaactgcggtgtccaggacaccacccagatccacacccacatgtgctactccaacttcaacgacatcatccagtccatcatcaacatggacgccgatgtgatcaccatcgagaac

SEQ ID NO: 438617 - DNA, 443 bp, Triticum aestivum
tctacgcgtccgcccacgcgtccggggccgcaagctttaacatcattcccagcagcactggtgctgccaaggctgttggcaaggttcttcctgagctgaatggcaagcttaccggtatgtctttccgggttcccactgtggatgtgtcagttgttgatctcactgttagaaccgagaaggctgcatcatacgatgacatcaagaaggctatcaaggctgcatctgagggaaaactcaaggggatcatgggttatgtcgaggaagatttggtctccactgactttgtcggtgacagcaggtcgagcatctttgatgccaaggctggaattgctctgaacgaccatttcgtcaagctcgtctcgtggtacgacaacgagtggggttacagcaaccgcgttgtcgatctgatccgccacatggccaagactcagtagagcgttctg

SEQ ID NO: 438618 - DNA, 453 bp, Triticum aestivum
tttttcagtcaatgaaccttctcttgataattgctttgtctcatcgagttatgatgccactactcactttgagacgactgtgacagatgttcttaatatgtacacactgattactggaaagactgttgatcttagcgttgatctcagtgctgccagcgctgcagaagagtactagatctcaaacccagaattttcttcaagacatacttcctggaggacgaggaacaccaccggaatcctactgtgtgatggtcacgtgtgacatcagctgcgtactgcgtagggttccaggtccacgcctgctaccagcactatgcgaaattattatctttggaatggtgctgggttccttcgttaacttccatattgatccactgggttgtaaacgttattctatcataacgatggctttgacatgttaatgttccgcttgtcgatgtattctacagttat

SEQ ID NO: 438619 - DNA, 427 bp, Triticum aestivum
ttgttcacgcgtccgcccacgcgtccgcccggaccagagcaagagagagatttcccccgattcgatccgatcagatccgagatctccatccccgatggcgtcccggagctgcaccttcctggagatcctgctcgccatcatcctgccgccgctcggtgtcttcctccactacggctgctgcagcatggagttctgcatctgcctgctgctcaccatcctgggctacatccccggcatcatctacgcggtctacgtgcttgtcgcgctcggctcggaggagcgggatcgggactacgacacccttgcttaataatcctgcagcaactcgtattgtgtgatgaacctctcgcctggtagttgcgaatcgacgtcgtgtgttcccatctggactgtgtagcgtgccttctttctgtcagcctgtaaatgc

SEQ ID NO: 438620 - DNA, 372 bp, Triticum aestivum
tcgttcacgcgtccgcccacgcgtccgcccggaccagagcaagagagagatttcccccgattcgatccgatcagatccgagatctccatccccgatggcgtcccggagctgcaccttcctggagatcctgctcgccatcatcctgccgccgctcggtgtcttcctccactacggctgctgcagcatggagttctgcatctgcctgctgctcaccatcctgggctacatccccggcatcatctacgcggtctacgtgcttgtcgcgctcggctcggaggagcgggatcgggactacgacacccttgcttaataatcctgcagcaactcgtattgtgtgatgaacctctcgcctggtagttgcgaatcgacgtc

SEQ ID NO: 438621 - DNA, 338 bp, Triticum aestivum
tgtattcttaaagcctttggtggtctccttttcatcatcagcagctcgttcggagcgctcgtactgcttgtttacttggcattcataacccctgtcgtgtacgacttctacaactacgagatggagtcccagcaatttgccaagctcttcaccatgttttcacagaacctggccctcttcggcgcgctgctcttcttcctgggaatgaagaactccatcccaaggaggcactccaagagaaggaccgcaaaggctaagacaacctgaagccagtaaggggattgtgataggaggggaagctatcaatatggaaactcgtcgtgttttacgcatacttt

SEQ ID NO: 438622 - DNA, 380 bp, Triticum aestivum
gtgtggctgcccacgaccacatggggatcggccccgtgctccggcagtgcagtgagctgttcgaggggcttgagactctcactgactgcggtggtggcgatgggacgacggctaggtccatcgtcgaggcctacccgcacatcaagtgcactgttctggaccttccaaaggtcatggacaaagttcttcttcccgctgaagaaggagcggtgaagtatgtttctggtgacctgttccacgtcgtcccacctgctcaagccgtgttgctcaagcttgttctgcacttctggagcgacgaggattgcatcaagatcctcgcacaatgcaagaaggccgttcctccccgagacgcgggagggaaagtcatcgtcatagacatt

SEQ ID NO: 438623 - DNA, 340 bp, Triticum aestivum
tcgtttcgagcgcctcctcctgtctcgtcctcgtcccccgttccccgtcccctcgtcggcgcccgatctaagtcaagatgagtcgtggcgggagtgctggaggtggtcaaagttctctgggttacctgtttggagatggtgagcctgcaaagcctgctgcagcaccagctgcgaagccagcacctgctgagaaaccagcactggcagctgccgatgtaaccaagcagattccagctggcattccaggtagccgggcgaacaactactaccgtgcagatggccagaacacgggcaacttccttacggaccgtccttcaaccaaggttcatgctgctcccgg

SEQ ID NO: 438624 - DNA, 419 bp, Triticum aestivum
ttgtcgaccggtaaggagctccccccgggcccgccggcgctagtcttcctggctaagttcctagcgctccggcgatccatcttccaccttgagccgctcctccgcgagctgcacgcgcgctacggccccgtcatctccatccgcctcttccgcgccctcgtcttcgtctccgaccgccgcctcgcccaccgcgttctcgtccagggcggcgccacctttgccgaccgcccgaggctcttcgagccggggctcctcttcacctccggctcccgcaacatcaacgccgcgccctacgggccttactggcgccttgtccgccgcaacctcgcctccgaggcgctgcacccggcctgcgtcagccagttcgcgcccgccaggcgccggatgcgcgacgtgctcgtacgcgacctcagcgcgcg

SEQ ID NO: 438625 - DNA, 382 bp, Triticum aestivum
tttacgcgtccgcccacgcgtccggggaagagggctgtcagctttcatggccagcaggagtccctaaacatcgcgggatatgcatggcaacaatggaacgaagacaagggcgaggaaatgatcgatccgttgataaaaccgtcgtgctcgattcgacaggtcctgaggtgcatccacattgcattgctatgcgtgcaagatcatgcccaagagcgtccggacgtgccggcggtcatcctgatgttgagcagcgacagctccagccttcccatgccgagggcgcccaccctgatgctccgtggccgtgctcttgagtcgagcaaatcaagcgagaacgagaggagccactccattggcaccgtatcaatgacacagttgcatg

SEQ ID NO: 438626 - DNA, 250 bp, Triticum aestivum
tctaccacgcgtccgagaaactcttccgagatttatttattcgtgaagggtaccagtctgatcatatatttgactggactgtgtcgaggcacttagcagagaataacagattgcgaccaagtggaaggacagctgggttggtgggaccatctgcagaacgggctgaacggattgcagcaagacaggatggtcctgatagattctgtagttcagtggaaacatttgccagaagaactggctctggttctgg

SEQ ID NO: 438627 - DNA, 185 bp, Triticum aestivum
  unsure (1)..(185): unsure at all n locations
ngtcccacgcgtccggaagctatcaaccttgtgggtgcttttaattttgtggcatcatcagataaaaaccagatggagttcctgaaaaattctctggatttcattgtcgatactgcctctggtgaccacccatttgacccttatctcgagcttctgaaagttcgtggcacactggcactagttgg

SEQ ID NO: 438628 - DNA, 345 bp, Triticum aestivum
tctttccacgcgtccggaagctatcaaccttcttggtgcagataattttgtggtatcatcagataaaaaccagatggagttcctgaaaaattctctggatttcattgtcgatactgcctctggtgaccacccatttgacccttatctcgcgcttctgaaagttcgtggcacaatggcactagttggctttcctggcgaaatcagagtgcatcctgcaacacttaatctgggtgcacggactctatctggcagtgtagttggaggcacaaaggatacccaggagatgataaatttctgcgcggcaaacagaatatacccaaatgttgaggtgataaaaatagacta

SEQ ID NO: 438629 - DNA, 286 bp, Triticum aestivum
ttgtggggttggcttctcctccccttccggttcgggttctggttcggttcgggtccgagagtagctagcctagtctagggtttccgtagttcggagaggagagaaagggagagatccatggcggagacggagtaccgctgcttcgtgggcgggctcgcctgggccaccgacgaccacaacctccagcaggccttcagccagtacggcgagatcctcgacgccaagatcatcaacgaccgcgagacgggcaggtcccgtggcttcggcttcgtcacgttcggcagcg

SEQ ID NO: 438630 - DNA, 257 bp, Triticum aestivum
cccacgcgtccgcccacgcgtccgatggaacatatctcatgccgagtggctcggggttccgctgaaggtgtacgcggaccggttgtcgtagatcgtcgcgcgccatcatcattttgtgcaaggtcaaccggttcgacttccaggagctcaccgtggatcttgtcaagggacaacaccgcgcaccagagttcaccaaaatcaaccccatggcgcaggtcccaacaatcgacgatggaagattcaaactctttgaaagt

SEQ ID NO: 438631 - DNA, 444 bp, Triticum aestivum
tttcaaatccccaaccccgactgacgacgagtggatctgttccggcgcttcctgccgccgtcgaccatggcgtcttccaactccggcggcatccccatcaaggcggaacaggattcggatggctcggcccagagcacagctgatatgactgcttttgtgcaaaatcttctagttcagatgcaaaccaggttccaaactatgtcagagaacatcattacaaagatagatgaaatgggtgcaagaatcgatgaattggagctgagcatcaatgacctcaaggctgaaatgggcagcgatggtatgacccctactaagtgaaggacgaagaatcaaagccagcagacagctctgcctgatttaagagaagtagcagagcaagtcgattagtcttggttccatgtcaatatcatcagccattcatcactaacttaatgcatgtatgag

SEQ ID NO: 438632 - DNA, 265 bp, Triticum aestivum
tttcagatcttcgtcaagaccctcaccggcaagaccatcacgcttgaggtggagtcatctgacaccatcgacaatgtcaaggccacgatccaggacaaggagggcatccccccggaccagcaacgccttatctttgctggcaagcagctggaggatggtcgcacccttgctgactacaacatccagaaggagtccacccttcaccttgtcctccgtcttaggggaggcatgcagatcttcgtcaagaccctcaccggcaagacca

SEQ ID NO: 438633 - DNA, 333 bp, Triticum aestivum
tgtttcttctgcggcgagccgcaccggtgcctcgaggtgccccacatcgacgaccggcagaactgcatcgccggacgccccgaccagcggcctggcgagcagtgcatcgagttcctccaccggccgccggcacagtgtgctgcgcacgggcaatcgtcgccaccgccgatgtacgcgcctccaccgccgatgtactgatacgtggcagacggcaatactgcaatttgtaactgtttgctgcctttgtgccgtgagaaagggtaaaaatgcacacatttggtatatactgtaatctttatttttcggaaacaaatgaaataacaatggattggt

SEQ ID NO: 438634 - DNA, 331 bp, Triticum aestivum
cttcttctgcggcgagccgcaccggtgcctcgaggtgccccacatcgacgaccggcagaactgcatcgccggacgccccgaccagcggcctggcgagcagtgcatcgagttcctccaccggccgccggcacagtgtgctgcgcacgggcaatcgtcgccaccgccgatgtacgcgcctccaccgccgatgtactgatacgtggcagacggcaatactgcaatttgtaactgtttgctgcctttgtgccgtgagaaagggtaaaaatgcacacatttggtatatactggaatctttatttttcggaaacaaatgaaataacaatggattggt

SEQ ID NO: 438635 - DNA, 385 bp, Triticum aestivum
ttttgcagcttcccattcctcgccgccgccgccgcttcgtacccgctcgaagccgacccgaccatggcggacgtcgacgttgacacggaggtggccgtcggcgcgcagccgaagaagaggacgttccgcaagttcagctatcgcggcgtggatctcgatgccctcctcgacatgttcaccgacgaccttgtccagatgttccccgctcgcgcccgcagaaggttcaagaggggtctcaagaggaagcccatggcgctcgtcaagaagctgcgcaaggcgaaaaaggacgctcctgctggtgagaagcctgagccagtgaggacacatcttcgtaacatgatcattgtccctgagatgattggcagccttatcggtgtctacaatg

SEQ ID NO: 438636 - DNA, 361 bp, Triticum aestivum
tcttgcagcttcccattcctcgccgccgccgccgcttcgtacccgctcgaagccgacccgaccatggcggacgtcgacgttgacacggaggtggccgccggcgcgcagccgaagaagaggacgttccgcaagttcagctatcgcggcgtggatctcgatgccctcctcgacatgtccaccgacgaccttgtccagatgttccccgctcgcgcccgcagaaggttcaagaggggtctcaagaggaagcccatggcgctcgtcaagaagctgcgcaaggcgaaaaaggacgctcctgctggtgagaagcctgagccagtgaggacacatcttcgtaacatgatcattgtccctgagatgattg

SEQ ID NO: 438637 - DNA, 343 bp, Triticum aestivum
tctctctctggcaacgccagcccctctgcagaggacctgacatccattcttgagtcagttggttgtgaaattgacaatgagaagatggaactcatgctgtcccaagtgaagggcaaggacatcaccgagctcttggctgctggtagggagaagtttgctgcggttccatctggtggtggtggtgtggctgtttcagctgctgcccctgctgctggaggtgctgctgcccctgcagctgagtcaaagaaagaagagaaggtcgtggagaaggaagagagtgatgatgacatgggcttcagtctgttcgactaagttgtggggcatcttgtgtctgaagtatcta

SEQ ID NO: 438638 - DNA, 384 bp, Triticum aestivum
tctcccgacgctcaagcccccagacgccgcagcgccgccactccacccgcagcggcaaccatggcggtcggcaagaacaagcgcatctccaaggggaggaagggtagcaaaaagaaggccgtcgatccgttcaccaagaagcagtggtatgacatcaaggcgccgctgctgttcaccagccgcaacgtcggcaagaccctcgtgtccaggacacagggtaccaagattgcctcagagggtctgaagcacagggtgttcgaagtatctctagctgatcttcagaacgatgaggaccaggcctacaggaagatcagactccgtgctgaggatgtgcaagggatgaatgtcctcacaaacttctggggcatggacttcaccactgac

SEQ ID NO: 438639 - DNA, 408 bp, Triticum aestivum
ctaccccgattccccttcccctgtgcgatcgatactctctagggttcatcggcggtcacaccaagcaaggatgactacttcaaggcgtcttgctgacaggaagagtgcgaagtttcagaagaacgtcacaaagaggggctcagtgcctgaaactactgtgaagaaggggaatgactatcctgttggacctatcgcgcttggattcttcatctttgaggacataggatcatccttgtttcagattatcaggacggatactagtggtgggacggcttaatatcaagctgaaaacaagacgatcattatcagagatttattttatccatgtgtctgggacgcaatatcatatctgtaccctgtagcaaacttcaaccctgatgatgttatgtagagatttaaatcttgtgc

SEQ ID NO: 438640 - DNA, 302 bp, Triticum aestivum
tcttggcggcgcgcgcataggaggcgaatcagcagcggaaccaagccgccgacgccaccatgggtatctcgcgtgactccatgcacaagcgccgggccaccggtgggaagcagaaggcttggaggaagaagcgaaagtatgagctcggccgccagccagccaacactaagctttcaagcaacaagacagtgaggagggtccgtgttcgcggaggtaacgtgaagtggagggctctccgtcttgacactggtaacttctcatggggtagtgagtgctgtgacccgcaagacccgtctctggat

SEQ ID NO: 438641 - DNA, 292 bp, Triticum aestivum
tcgtaccaccaacaaggactattcggacttggcccagacggaggacatcaacgcgggcgtcttcgccaccgacgacttccgcatgtacagcttcaaggtcaacccatgctcccgcgcctacacgcacgactggaccgagtgccccttcgcccacccgggcgagaacgcgcgccgccgcgacccgcgccgcgtgccctactcctgcgtcccctgcccggacttccgccgcgacccgcaggcatgccgcaaggggcgacgcctgcgagtacgcgcacggcgtcttcgagtcatg

SEQ ID NO: 438642 - DNA, 255 bp, Triticum aestivum
tgtaggcaagggcaaagggcgctgaggggtggaacgcgacgggcgagtttttccgtggctcgtgacgagtggaggaggcaccctatggtggggaaccagctgcgccacgccactccggggctaggcatcgccatcgtcgcctttgggatctaccttgtcggggaggccgcctacaaccgtctataccgacccgccggagacaaccaccactagatcttccccagaggtaaagtagatggagcaaactgtaccgaa

SEQ ID NO: 438643 - DNA, 336 bp, Triticum aestivum
tgtgtcatcttcgacagtcgagcttacagcattacgaaggatgtcttgcagctgtggatcaagctgcggctgcggctcaaactgcaactgcggcaagatgtaccctgacttggaggagaagagcggcgccaccgtgcaggccaccgccgtcgttcttggcgtcgggcctgcgacggtgcagttcgaggaggccgccgagtccggtgaggccgcccatggctgcagctgcggcgccagctgcaagtgcgacccttgcaactgctaaggtgcaagcggtcgatgcgcttgtggtgattgtgccgtgtgtgatcgagtgcgaataatgaaaccggccct

SEQ ID NO: 438644 - DNA, 275 bp, Triticum aestivum
tttagactagaggccaagatcgccgattttggcttgacgaaagcctttgactaccacaacaacacccatcttttcacgaacacgctcgcttttacccccgggtacgttgatccacagtaccaggccacgatgcagccaacgaccaagagtgacgtgtacagctttggagtggtgctgctggagctagtcaccgggaaaccagccattctttcggacccagagcccacaagcatcgtccaatgggcaaggcagcggctggcgcgcggcaacatgga

SEQ ID NO: 438645 - DNA, 385 bp, Triticum aestivum
tttttgctcagcatcaagatacagcagcacctcccttctacctcgactgctttgcatacccacttccggatgcaaccgcaatcaaaggctgccacgaagatcaccctacttgccgtgggccccttattatggcaccgtgtcagctggaacctacaactgtttcatagcagggcggctggaccctcaacaccgactacagcatgctgtgtgtacggcaagaagttcaacgctgacgatgagatcgtattcaaggactgcgtccgacgcgcacgatgtggtcgaggtcagcaaggccggctacgactcctgcagcatcgacggcgccatcaacaccttcaaatctggcaacgacgtcatccccctcagcgccaccggcacccgctac

SEQ ID NO: 438646 - DNA, 420 bp, Triticum aestivum
ttggaggatatgtacctgaagccgctcaaccttggtctcattgctgcgtactactacatcagctacactaccattgaacggttcagttcaatgctaactcagaagaccaagatgaaaggtctcctcgaaattctagcttcagcatcagaatgcagagcttccaagtcgcccaggcgaagaggaatacattgagaggctagtccgtcaccagaggttttctattgacaaacccaagtatggtgatccacatgtcaaggcgaacgccctgctgcaatcccactttgcaaggcacacggtggtagggaacctggcagccgaccagcgcgagatcctcctttctgcccataggctgctcctggcaatggttgatgtcatatctagcagtggatggctcactctggctctgaatgcaatggagct

SEQ ID NO: 438647 - DNA, 261 bp, Triticum aestivum
ttcgtttgcgcactcatcgtgatctcaaccaggcgcgcactcctcctcctcgccgtcgtcgtctccggtccaccgccgatccacgcgaccatgtcgtcgaagaggaagaccagggagcccaaggaggagaatgtcacccttggaccggctgtccgagagggagagcatgtctttggcggtgcttacatctttgcatccttcaatgacactttcatccatgtgactgacttgtccgggagggaaaccctggtgcggatcact

SEQ ID NO: 438648 - DNA, 480 bp, Triticum aestivum
tttagtgtgctctccctcccctcctggtcctggagccgcgactcatctgaaccctaaaccgtatatcccggcgcagcaggagcgagatatcctccagcaagcaagcatgagtcgccacccgagcaccaagtgggcgctgaggctggacaaggtttacctgacgattgatctgcccgacgccaaggatgtgaagctcaacttgaggcctgatggccatttcaacttctaggcaaaggcccctgctgatggcatgcagtatgagcttgaccttgagctctttgatgctgtcagcgttgaggagagccaagcggctgatgccccgagggctatatgctaccttgtcaagaaagctgaggccaagtggtggcctaggctgctcaagaaggaatgcaggccgcctgtgttcctcaaggctgactgggataaatggcaagatgaggatgatgaagacgctggatttggtgactttggtgatatgga

SEQ ID NO: 438649 - DNA, 385 bp, Triticum aestivum
tttcttattcctaggattcttgagcttgctgaagagctgtgcatgccgcttgctgccgtcaagtactctcgtgggatgttcatcttccccggcgcacagcctgctccccacaggagcttctctgaggaggttgatgtcctgaaccgctacttcggccacctgaagtctggtggcaatgcttatgtgatcggagacccagcgaagcctggccagaagtggcacatctactatgccaccgagcaacctgagcagcccatggtcaccctggagatgtgcatgactgggctggacaagaagaaggcctctgtcttcttcaagactcaagctgatggccacgtttcctgtgccaaggagatgaccaagctctctggaatctctgacatta

SEQ ID NO: 438650 - DNA, 183 bp, Triticum aestivum
ttgtttttcgaagaaaatgagagacagaaacttgccattttcacggcacttgcattctctcagaaattatcaggtctgccacctgaaactgtctttcagccattgcttaaggacaatcttgccgccaacgggatagtgctttcattcattactgagttcttcaaggaatatctgaaggaaaat

SEQ ID NO: 438651 - DNA, 282 bp, Triticum aestivum
cagatcttcgtcaagaccctcacggggaagaccatcaccctcgaggttgagagcagcgataccatcgacaatgtcaaggccaagatccaggacaaggaggggatcccgccggaccagcagcggctgatcttcgccggcaagcagttggaggacggccgcacccttgccgactacaacatccagaaggagtcgaccctccatctcgtcctcaggctccgcggaggcatcatcgagccatccctgcaggcgcttgcccgcaagtacaaccaggagaagatgatc

SEQ ID NO: 438652 - DNA, 394 bp, Triticum aestivum
tttttggtacaaggagcagccgctgatcgtgcgagggccgggcgcaggcgcggaggtgactgccggaggcgtcttctgcgacatcctgcggctggcgtcctacctcggcgccccctcatagacatctgcgcctgtattggtagattttctggggtagacggacggcaacttgtactcttcttgcacaatattggacttggtagcattttgttctgaatgcttgcgaggaaagcaaataaggtgttttgttttgtttgccagtgtgctgttccttgttagagggtgtagggatcaggtgttttgttttgttttgtttgccacccagtcccaggccatgccacaactgttactaaattatcaatgtaatactaaagaagggaatgcctttttctac

SEQ ID NO: 438653 - DNA, 322 bp, Triticum aestivum
ttgtttcgaaccaaaaccagaccaaatcttcggcgagcccatcggcacattctgagagcggagaggaagcaggaggcggcggatcatggagaggagactagaagatgggtggcggcatggaggtgaacaagaaccgctggatcgaggagtggaacgccggccgggagaacctcgagctcaacttgcgttttacccgccgcagcctcgccgtcatcggcctcttcggcctcgacgtacccatcctcgtctacaagggcatcgttcgcgaattccatatgcaggacgaggacgccggtcggccgtacaggaagttcctgtgagc

SEQ ID NO: 438654 - DNA, 434 bp, Triticum aestivum
ttattgtttcatgtctgatctcgacgttactctgccatctgccttcgatccttttgctgaggcaaatgctgaggatgctggtgcaggctccggcgcaaaagattatgtgcatgtgcgcatccagcagcgcaacggcaggaagagtctgaccactgtccagggcctgaagaaggagttcagctacaacaagatcctcaaggatctcaagaaggaattctgctgcaatggcacagtagtccaggatccggagctaggccaggtcattcagcttcagggtgatcagcgtaagaatgttgctactttcctagtccaggctgggattgcgaagaaggagctcatcaagatccacggcttctaagccgaagccgcctccgataaatgctcgaaccgccagccggctctttttatattgaaggcataaggcatatatatat

SEQ ID NO: 438655 - DNA, 171 bp, Triticum aestivum
gagcaagcgccgcaggggacgctctcatgtcgaagcgcgggaggggaggatcggcggggaacaagttccggatgtccctgggtctgccggtggcagcgacggtgaactgcgccgacaacacgggcgccaagaacctgtacattatttccgtgaagggcatcaagggaaggc

SEQ ID NO: 438656 - DNA, 316 bp, Triticum aestivum
tttcttacgcgtccgcatcatcatccctgataccaaagctcatcttcttctccttgaaatctttttgggtccacagatttggaggatgtcttgcaactgcggatcaggctgcagctgcggctcagactgcaagtgcgggaagatgtaccctgatctgacggagcagggcagcgccgccgccgaggtcgccgccgtggtcgtcctcggcgtggcgcctgagaacaaggcgggacagttcgaggtggccgccgggcagtccggcgagggctgcagctgcggcgacaactgcaagtgcaacccctgcaactgttaagct

SEQ ID NO: 438657 - DNA, 473 bp, Triticum aestivum
ttcttttcgcgtccgtccgcatccacccgaacgaaaccctagtctcccatcacttggatccggtctttgacattcttcgacgcaggacgccgtaagaaatttcgctagagatcttgcagctgccatggcggacaatgaacctattgacccaaagaattaccttgaggaacgctgcaagccgcaatgtgtaaaatcattgtatgactatgagagatgtgtgaagagagtcaagaatgatgaaactgggcagaagcactgcaccgggcaattcttcgactactggtcatgcgttgacaaatgtgtagcaccaaagctctttgagaagctcaaatgatggatggggtggcgctgattgccacagaccccaataaatcgatccactgtcctgatttctgattgtgctgaacctgtaacaaggagctttcttctatctgttgctaaaacttgtcaaaacaagcaaacacaattatttt

SEQ ID NO: 438658 - DNA, 381 bp, Triticum aestivum
tttgttaccaggcggcaccaccaccacccacccatggcctccctggcggcgagatccggcctccgctccctggcggtgcgcgccagggcccccgccccggccacgggcggacgccgcatgtcctcctccgcccacgacgacgcctatgagacggccaagtgggagaagatcaccatcattggggccgtcacctgcaccctcctggcggcgtggaacctctccaagggccacccccacttcgacgagccgccggcctacccctacctgcacatccgcaacaaggagttcccctggggacccaatggctctgtttgaggtcaagcacgaccattgagtactgaatagtgcatcataagaagtcggtgaatgcttcagtaaaat

SEQ ID NO: 438659 - DNA, 403 bp, Triticum aestivum
gcccacgcgtccgcccacgcgtccgctcacacacacacatcatctcccccacctctctcccaaagccaagagctcagagaagcaccggccatggagggcaaggaggaggacgtgcgcctgggcgcgaaccgctactcggagcaccagcccatcggcacggcggcgcagggcggcggcgcggacgagaaggactacaaggagccgcccccggcccccttcttcgaggccggggagctcacctcctggtccttctaccgggccggcatcgccgagttcctggccactttcctcttcctctacatctcggtgctcaccgtgatgggcgtggtgggcaacccgtcggggtccaagtgcggcacggtcggcatccaaggcatcgcctggagcttcggcggcatgatct

SEQ ID NO: 438660 - DNA, 388 bp, Triticum aestivum
ttgcccgtctcctctctcctttccccaacccaaaccaggagcgccctccctcccccagccgtccgccccctccccacccaggaaaccagccatgaagggggccaaattcaagggcgccgtcaaggccgacaccaagttggcggtgaagagcaagggggcggagaagccggccgccaaggggaagaagggcaaggccggcaaggaccccaacaagcccaagagggcgccctccgccttcttcgtcttcatgggcgagttccgcgaggagttcaagcagaagaaccccaagaacaagtccgtcgccgccgtcggtaaagcggccggtgagaggtggaagagcttgagcgaatcggagaaggccccctacgtggccaaggccaacaagctc

SEQ ID NO: 438661 - DNA, 427 bp, Triticum aestivum
tttttgtcgcgtgggttggaaaccatgctgcagggctggtaaatgcctaaatcatgcgtctcagtgtggtgctggtgttggcatatttcttttggtgaggaaaacaacaatcctgttgcaacgatcggctcgtcttacattttggccatctctgtaccttatgctttcggtgaggaggatcatgaaatgcacagaggaaagcccttgtatcttagccaagaaagatacgcagccctcacatatctggtggcatctcatagccttgaccggacttctgaagttctgcggcaaacaaccatcagcttttatacatctgattaagtgcatcgttttgaggaacaatgcccaaaggatcatgtgatgtgcatattttctgggaactgtggtctagcttcatattcatgctttccagtgatggtgaattgca

SEQ ID NO: 438662 - DNA, 371 bp, Triticum aestivum
tgtttggaggacttcgccaaggttgccgacttcttcgattcggcagtgaacttggctttgaaggttaaagctgcagcagcaggtaccaaactgaaggacttcgttgccactttgcaatccgacagcaacatccaagctgaaattgcaaagcttcgccacgatgtggaggaatatgcgaaacaattcccaacaattggattcgagaaagagaccatgaagtacaagaactaagaactgctatgtttcaacagcaaggaagcaaccaggaagcacaactgagtacaagtccatgtaaacaatagatgcatgatgaagcgccaccatatgtaaaaggaatccaagcattttacagaatatgggaactttgtcaa

SEQ ID NO: 438663 - DNA, 339 bp, Triticum aestivum
ttgtttacgcgtccggtaaaaccaaggctccggcgaacaattaccacagcattagcaaatccaagtccaacaataaaatgaaaacctcggagcctcgggcgaagcagcccaagccccagctgaaggaggaagatcacgaggacgaagcccctgatgcgggcgaggatggtggaggcgccgccggtggtggtggtggcggcggggaagagcacggcgatacgctgtgcggcgcatgtggggacaactacgggcaggacgagttctggatcggctgcgacatgtgcgagaagtggttccacggcaagtgtgtcaagatcacgccggccaaggcggagcaca

SEQ ID NO: 438664 - DNA, 233 bp, Triticum aestivum
ctcagcctcggcctcaacgtctggcggccgacggcgcggcggggtgcccctccggtgaccaagatcctcgtggaggaggacttcatgtcctccaagaagaatcacgaggtcgaggcgctggaggccgagctccggcgcgtgggcgaggagaacaggaggctcagcgacatgctccgcgcgctggtggccaagtactccgaccttcagggcagggtcagcggcatgatggcggc

SEQ ID NO: 438665 - DNA, 375 bp, Triticum aestivum
tcgggccaaagccgcagacagcacgcacgcggagcccaccgtcgccgctccaaatctcgcccgctcgcccgccgctctccgccgccatggacgccgcctcctcgctcatgggcgggccctcctccgccgacgcccccaccgacggcgagcaccggatgggcaccaccatcgtcggggtatgctacgccggcggggtcgtcctcgccgccgactccaggaccagcaccggaatgtatgtggcaaaccgtgcttcggacaagattagtcagctcactgataatgtctatgtctgccgttctggatctgccgctgatacacaagttatttcagattatgtgcgctattttctccaccagcacacaattcagcttgggc

SEQ ID NO: 438666 - DNA, 347 bp, Triticum aestivum
ttggaaaaaccctagccctcgcagccgcagcggcgcgcacacctctccctcctccctgaagacagcgccgccgtcggcgagagcacaggatggcgaccgtgcccgctcccgcagccgagaccgcggcctccacggcgcgcacggtgaaggatgtcaacccccacgagttcgtcaaggcctactccgcgcacctcaagcgctccggcaagatggagcttccggagtgggttgacattgtcaagactgcaaggttcaaggagcttccaccttctgatgctgactggtactacatcagggctgcctcgatggcaaggaagatctacctgaggcagggaattgggatcggc

SEQ ID NO: 438667 - DNA, 320 bp, Triticum aestivum
gcagaatgtgttccttctatcaaggaagtcattgctaatggcatcagcgtcaatgtcactcttatcttctctgttgcaagatacgaggctgtgattgatgcttacctcgacgggcttgaggcttctggtttgagcgacttatcccgagtaaccagtgtagcatccttctttgtcagccgagttgacagtctgatcgacaaaatgcttgagaagattggaacaccggaagctcttgccctgaggggaaaggctgccgtagcacaagcaaagatagcaaatcagctttacctgaagaaattctctggaccgaggtgggaggc

SEQ ID NO: 438668 - DNA, 299 bp, Triticum aestivum
tttttgcccgaacccccagctcccctccccggcgccgtcgtagcagcaagatggtgaagggacgcaccggccagcgcgtgaggctctacgtccgcggcaccatcctcggatacaagaggtccaagtcgaaccagtacgagacggcgtcgctggtgcagatcgagggggtgaacaccagggaggacgtggcctggtacggcggcaagaggatggcctacgtctacaaggccaagaccaagagcaacggcacccactaccgctgcatctggggcaaggtcttccgcccccacggcaacacc

SEQ ID NO: 438669 - DNA, 346 bp, Triticum aestivum
  unsure (1)..(346): unsure at all n locations
ttgtttcaactccagggtgatcagaggaagaacgtctcaaacttccttgtccaggccggcattgtgaagaaggaacacatcaagattcatggtttctgagcaactgccagctccatatcagagtctacatgcaaagcagctatatattggtggtgcagtatatttagttgtgtgctagcgctagcaggcgttaccagcttgcgcgctctgagtatacagaaaatctagcatagcccacctctctgcgtgtatgcttgttaccgntgtgttgaaactttgtaaggagcaccgtctttagatggcttgttaccctctcccatcaaggttgaataatatatgctttgtt

SEQ ID NO: 438670 - DNA, 387 bp, Triticum aestivum
ttgcgcaccaccaccgctccccatctcgatctaaaaccgagggtttcgtctagctccgtcgccgcgagccagagccagcccaccccagccagccagccatgccgaagaacaagggtaagggaggcaagaaccgcaagaggggcaagaacgaggccgacgacgacaagcgcgagctggtgttcaaggaggacgggcaggagtacgcgcaggtgacgcggatgctcggcaacggccgctgcgaggccatatgcgtcgacggcaccaagcgcctctgccacatccggggcaagatgcacaagaaggtctggatcgccgccggggacatcgtcctcgtcggcctccgcgactaccaagacgacaaggccgacgtcatccttaagtacatga

SEQ ID NO: 438671 - DNA, 392 bp, Triticum aestivum
tctgcccacgcgtccgggcaagtacgagaagaaggtgtacgtcctccccaagcacctcgacgagaaggtcgcggccctccacttgggcaagctcggcgccaggcttaccaagctcaccaagtcccagtctgactacattagcatcccagttgagggaccttacaagcctgcggcctaccggtactagtgtgtccagcgcgactagcggctggcctgagcctgagtccgtgcagcggcaccaacgggaactctatcaactatcctgtttcccttctattatcttacatgctgtctcttaggcggaggatttgttattatggttatgttttgagccgtgtgagggttgggagaggcggcgtttgcttttgcccagaaataatggcattattatt

SEQ ID NO: 438672 - DNA, 292 bp, Triticum aestivum
ttgcacccatggggctacatgcagtcgtcgtcggacgaggcacagctgctggggatgctgatcaagatggcgggcgccaagaagacgatcgaggtgggcgtgttcacgggctactcgctgctggccaccgcgctggcgctcccggaggacggcaaggtggtggccatcgacaccgaccgcgagtgctacgaggtgggccgccccttcatcgagaaggccggcatggcgcacaaggtggacttccgcgagggcaccggcctggcgcgcctggacgagctgctcgtcgaggacg

SEQ ID NO: 438673 - DNA, 368 bp, Triticum aestivum
ttgttgaattggcacagcagaggttgagtctgctttggtttcgcatccacagtgtgcagaggccgctgttgttggtgttgagcatgaggtcaaaggtcagggaatatatgcttttgtaactttggtggatggcgttccttacagtgaagaactacgaaagagcctcatatcaaaagtccgcactcagatcggggcatttgcagctccagacaggatccactgggcgccggggctccccaagacccgcagcggcaagatcatgcgcaggatcctgcgcaagatcgctgcaaagcagctggatgagctcggcgacataagcactctcgctgaccccggcgtcgtcgaccagctgattgcgctcaaagatt

SEQ ID NO: 438674 - DNA, 444 bp, Triticum aestivum
tttttgcggacgcgtgggcaagcagctggtggggggcgacgtgttcgtgttcccacaggggctcatccacttccaggtgaacaacggcaaggtgcccgccgtggccatcgcggcgctcagcagccaggacgccggcgtgatcaccatcgccaacgccgtcttcgggtcaacgccgcccatcagtgacctcatcctcgccaaggccttcatgaccgagaaggacaccgtcgactggatccaggccaagttcgcgccggccatgagcggcaacagcagcatgggaggaggcggctacgacatgccgcccggcggcggcgagggcgaaggcggcaacagcaccggcggcggtggcgggtactaccctggcatgcgcaagcggaagccctaagcacggacaggacggccggccatccacgcgcttatactaataattaatgaataatt

SEQ ID NO: 438675 - DNA, 310 bp, Triticum aestivum
ttctttaaccttgcggttgtagggggcgaccatgggaatctatgaaaggacatggaggagcacgctgagttcaagaagatgtttgaccttattgagcagaacaacctgaatgggcatgtccgctggatctctgctcagatgaaccgtgtacgtaatgctaagctctaccgttacatctgtgacacaaagggtgcctttgtgcccactggtttctatgaggctgtccggcttactgtcatccaagccatgacctgcagtcttactacctttgcaactgcatacggtggtcctgctgagatcatcgtgaatg

SEQ ID NO: 438676 - DNA, 279 bp, Triticum aestivum
ttgctcacgcgtccggcttgccttcgtcaaccatggtgaggtcaagcgaacccttgccgattggataacgagggtggcaccagacgacttcgacaagtcctgcacacgcatgtaggaggtactggaattcagcattgaattattcacctgctgctaggatgtgctctagcagagagattgtgtatttgtgttgctatagttgctccacacactggagtttgattgttcatgtttccatgacatttatcatctaatgataactgaaagttacgtggctgc

SEQ ID NO: 438677 - DNA, 337 bp, Triticum aestivum
ccgtttactcagacccagacgcagagcgcacgggacaaagctgccatggcggaagacgcggggccgctggtgggaggcatcagtgactcgccgatggggcaagaaaacgacctcgacgtcatcgcgctcgcccgcttcgccgtctccgagcacaacaacaaggccaatgccctgctggagttcgagaatgtggtgaaggtgaagaagcaaactgttgctggcacgatgcactacattacaatccgggtcactgaaggtggggccaagaagctctatgaagctaaggtgtgggagaaaccatgggagaactttaagaagctcgaggagttcaagctgg

SEQ ID NO: 438678 - DNA, 336 bp, Triticum aestivum
tttcttacgcgtccggagaaaatatcaccaactttgaggaaaatgatttccagatcctacgtgtccttatgacagtcattgacacatcaaccgacaccactgctcttgcggttgcctgctatgacctctcacagttccttcagtaccacccttctggccgcttagtggtggcagacctcaaggcgaaggaccgagtcatgaaactcatgaaccacgacaatgccgaagttaggaagaactccctgctctgtgtgcagaggctcttcctcggcgccaagtatgctagcttcctgcctgatgtgtaaaaaaaaaaaattatacataaaaaataattat

SEQ ID NO: 438679 - DNA, 437 bp, Triticum aestivum
ttgttttttttttttgtgtcatatattatgcctcagccaacgaacagcaaaataaattaaatgtcactgacgaaaagaaaagaaaaaagaaaactatatatgatttcttctaagccaggcaggccattctctctgaatctgcttttgcggtgcagaagctccgtgttcagggagatgaagaaataccagatgggtttttctagctggtgcggtgagtgccagcgtgaaaagagagaaaggcagattcagtgcgtcaaagcgaccaagcatttcttaggggtgctggaggggcaatgatttaagtcatatttactgcatgtattttatgcaatcctgtattatattaaacatcctttgatcatttggaaacgtctagtataactgttgtccaatttccagctcgtattttgtcagtgtcattgcatcttatgtaaatc

SEQ ID NO: 438680 - DNA, 246 bp, Triticum aestivum
tttgtttctcaacaggcaaaaggacatcaagactggaaagtactcccaactgctctccaacggtcttgacaacatgctacgtgaagatcttgaacgcctgaagaagattcgtgcccaccgtggtcttcgtcactactggggtctccgtgtgcgtggtcaacacaccaagacaaccggccgcaagggtcgtaccgtcggtgtatcgaagaagaaataagggcttgggcaacgacaataaaaactctc

SEQ ID NO: 438681 - DNA, 349 bp, Triticum aestivum
tgtgttttcggacgcgtgggcggacgcgtgggcggtggtagtgctacaagcgagtgacactagttcttgcaccgatcagatccaacttatgcacaggatgctggacaagctgtgggacgacgtggtggccgggcctcgcccggagacgggcctcgacaagctccgccgggccgtcgccacccaacccctcgccatcaacacagctgcaggggaggcgatcaagcagtcgccgtcgatgccgacgaccccgaccacgccggtgacgccgttgttgtccacgccgccgtgcggcggcagcgtgtggcggagcgttttccaccccgggagcaacctggccaccaagagcctt

SEQ ID NO: 438682 - DNA, 405 bp, Triticum aestivum
tttgtttgctgccctccccttctccttaggttaggttaggctaggggcttcgcagagctcgcggaaatggtggccttcaggttccatcagtaccaggtggtgggtcgcgcgctgccgacgcccggcgatgagcagccgaagatctaccgcatgaagctctgggcgaccaacgaggtgcgcgccaagagcaagttctggtatttcctgaggaagctgaagaaggtgaagaagagcaacggccagatgctcgccatcaacgagatctttgagaagaacccaaccacgatcaagaactatggcatttggctgcgttaccagagcagaaccggctaccacaacatgtacaaggagtaccgtgacaccacactgaatggtgccgtggagcagatgtacactgaaatggcc

SEQ ID NO: 438683 - DNA, 415 bp, Triticum aestivum
tttctcacgcgtccggacgacgaatcattacagagcattattgacatgacttctgactggacaaaggaagaaagagagatgttgagacggaaggtgccagtaactggtttgaagacgccattccgggatgggtatgtaagagatttagctgaagatgttctccagttagctaagaatggattagaaagaagaggatacaaggaggttggtttcctgagagaagtcgacgaagttgttagaacaggagtgacacctgccgagaagcttctgaatctatacgagatgaagtggcagcgcagcgtggaccctgtgttcgaggagttgttatattgatatgctgatatcgtatataacttcggtggaagctggacaaggtggacagggtcttcagattgtatccccatacaaaatcccg

SEQ ID NO: 438684 - DNA, 378 bp, Triticum aestivum
tgtttttggtgctattgggcttatgcctatgattgatcagggtgagaaagatgacaagatcatagctgtctgtgctgatgatcctgagtaccgtcacttcagagacatcagtgaacttcccccgcatcgcctacaggaaatccgtcgcttctttgaagactacaagaagaatgaaaacatggaggttgcagtgaatgatttcctcccagcagaagatgccatcaacgcaatcaagtactcgatggacctctacggttcgtacatcatggagggcttaaggaagtgatctccagttggcggactgcggatgctacgcgatccgccctacggcttatcaatagtacgacaaacatctatgttaacatgatgatcgaaaac

SEQ ID NO: 438685 - DNA, 271 bp, Triticum aestivum
ccacgcgttcgaaaatttccccactcgcgaaccctaacttcgaccagcctctcgccccagatccccttcccctactctcaccaggagcagaacccacccgctcggaccgctccgtgtaatcgccatggcggacgaggaacccgttgatcccaagaagtatcttgaggagcggtgcaagccacagtgtgtaaaaccactgtatgagtatgagaaatgtatcaagagagtcgaggccgatgatactgggcacaagcactgcactgggcaatat

SEQ ID NO: 438686 - DNA, 464 bp, Triticum aestivum
ttgcccacgcgtccgctgtaagagaaaaggcagatcttctttctgattctcagagaattaaatatactattgagactttcacgaagggcatccctgatgcaaggacgtacttggatacccttcagcagctcaggaaaaagagtggtctcatagatgatatgggtattgaggatatgatgatggaagctctcgagaaagttgagaaggacattaagaaacctcttctgaggagtgacaagaagaacatgggtctcctcttggcagagtttgacaagattaacaaaaagcttggcattcggaaggaggatcttcccaagattgaggaaaatcttgaaatggaacttgccaaagctgagctgacggaacttaagaaggaagttgttgaagcaatggagggccaactaaagagggaggagtttaaagatgaggcgatgcctgacgtcaggaagttggacattagaaac

SEQ ID NO: 438687 - DNA, 441 bp, Triticum aestivum
ttgaataaatgctgcgccacgccgtccgccgcctcgcctcccgcgccgccgctgccggcagcggctccatgagccgcagggccctcgcgacggcgcaggcgcccgcggaggcgggcgaggaccccgccttcctggaggcgtggaagaaggtgaccacaatcatcgagcccccccagacgcccatgtcggccatgaagccccgcccgcccacgccggcctccattccctccaagctcaccgtcaacttcgtcctcccctacaagtccgagatcaccaacaaggaggttgacatggtaatggtaccggctacaactggcctgatgggtattttgccaggccatgtttccacaattgcagagctcaagcctggtgttatgtctgtacatgagggaaatgatgttacaaagtactttgtgagcagtggctttgcattcatccatg

SEQ ID NO: 438688 - DNA, 304 bp, Triticum aestivum
cgccgcagcctccatcgaagccaagagaggagcatggcgaaaggaggccgtcggcgatgtcggagaagaagcgcgcccccggcccgtgcaaggacgaggtggtgacccgcgagtacactgtcaacctccacaagcgcctccatggatgcaccttcaagaagaaggcaccaaatgccatcaaggagatcaggaagtttgcacagaaggccatgggaaccaacgatgtccgcattgacgtgaagctcaacaagcacatctggagcagcggcatcaggagtgtcccgaggagagtccgtgtcaggat

SEQ ID NO: 438689 - DNA, 457 bp, Triticum aestivum
ttgtttatcgcgtccgccgaaatccccaattccccaccccagagcgtcagcgagagagatggcgtcggcgacggagatgcagtcgctggcaccgtcgggctaccgccgggcgccggagatgaaggagaaggtggaggcgtcgtcgatcgacctggaggcggggaacggggagacgctctacccggggatctcgcgcggggagaacgccctccgctggggcttcatccgcaaggtctacggcatcctctgcgcgcagctggtcctcaccaccgtcgtctccgccatcaccgtcttccaccccaccctcaacgccacgctcttcaactcgtccgtcctcgcgctcgtgctcgctgtccttcccttcatcctgatgatcccattgtacatctatcagcacagacaccctcacaatcttgctatcttgggtttgttcactctgtgcttgagcttcagcatt

SEQ ID NO: 438690 - DNA, 229 bp, Triticum aestivum
tttctgtgcgacttcctcccccctcttgcgaaggtctagggtttggctgcgtagaggagagaggctttccccctcgttcagtcgggagccgtcatgagccgatcggggcagtcgccggatctgaagaagtacatggacaagaagctccaaatcaagctgaatgcgaaccgtgttgttattggcacgctttgtggatttgatcagttcatgaatttggtggtggataaca

SEQ ID NO: 438691 - DNA, 355 bp, Triticum aestivum
ttcttttttgaggtcactgcaggaggagaataaagttctccataaggaagtaagcccgttatatcacctttggtccaaccggtctaaattgtttcgtatagcatattttattgacagaggtccgtgtcccttccccacagctcgtggagaagcagaaggcccatgtggcgcatcaagatcaaactcagccttaaaccagctcttcatcttcttccttcatgctgagggatgctccccctgccgcaaataccagcattcattcagcggcaacaggcgagagggcagaggatgcggtagtgcatccgcaggccccaccccggacggggcttccaccgtggatggtgagccacatcaa

SEQ ID NO: 438692 - DNA, 202 bp, Triticum aestivum
ttgttgcccacgcgtccggcgcgcggggtggccttcatggtggacaactgctcgacgacggcgcgtctggggtcgaggaagtgggcgccccgtttcgactacatcctgacccagcaggcgttcgtgacggtggacaaggacgagcccatcaaccaggacctcatcagcaacttcatgtcggaccccgtccactgcgccatcg

SEQ ID NO: 438693 - DNA, 373 bp, Triticum aestivum; identical to SEQ ID NO: 436078

SEQ ID NO: 438694 - DNA, 339 bp, Triticum aestivum
cgtgtattaaatgcttatgcaaggttccttgatgacacacctgagctagtgaagattgttagagtatcatgtggagagtaccatgcagcagctatatcagaaaacggggaggtgtatacatggggacttggaagcctggggcagtttgggcatagctcgctttagtctggagataaggagctaatcccaaggcgagttgttgcccttgaaggaatagtaattagggatgtgtcttgtggtggggttcactcttgtgctgtgacggaaggtggagccttctactgttggggaggaggacatgtgggccaactggggcttggacctcaaaatggtttcttt

SEQ ID NO: 438695 - DNA, 407 bp, Triticum aestivum
tttcgttccctatgagaaacgtatcactgagcttcttaaggttggaaaggacaagcgcgcactcaaggtcgccaagagaaagcttggtactcacaagagagctaagaagaagagagaggagatgtcaagtgtccttaggaagatgaggtctgctggtggtggtggtgctggtgacaagaagaaatagagcgtggctagtcggtgaattttatcccaaaactctgtcctgtattaccagtccgtacctttagagctatctatggccatagtgttggattttggaattaagcccgtggtttctattttgagaagaccaatctttttaagatatttatgtcagattggtgcctttgttttattgttacttgctttgtttgattacttgatacccagctgtttattcggtt

SEQ ID NO: 438696 - DNA, 469 bp, Triticum aestivum
tcttttttccacgcgtccgcccacgcgtccgatggacatggggaggaacactgtgacgacagggatccgtgggacaatgggccacatagctcccgagtactttaagaccgggaggccatcagtgaagacggacatatttggatatggtgttatgttattagagattgtgacaggcgagcgtgcaattttccccgatttcctcgaaggagctggcgaggtcatgctcatcgatcaagtgaaactgttgatgcaagaagggcgattggaagaaatcgtagaccgcaatataggctgtggatatgactttcaagaactagtaaaaattatccaagtagcactcctctgcaccaatattgacccttgtcaacgccctgctatgtcggaagttgtgcatatgctggaagaaaaaattgtgccagaagatcagtgggaggagtggcagcaagctgagcttacccgtcgacagcag

SEQ ID NO: 438697 - DNA, 419 bp, Triticum aestivum
tctttttattttcatccccccgcccgccgccgccgccgccgctagaccagctcgccagcagcaatggcccggatcaaggtgcacgagctgagggggaagaacaaggcggatctgcagggccagctcaaggacctcaaggcggagctgtccctcctccgcgtcgccaaggtcaccggcggcgcccccaataagctctccaagatcaaggtggtgcgcacctcaattgcgagggtgctcacggtgatctcgcagaagcagaaggcggcgttgagggaggcgtacaagaacaagcgtctcccgctcgacctgcgccccaagaagacccgcgccatccgcaggcgtctcaccaagcaccagctctctttgaagacggagagggagaagaagcgcgagaagtacttccccatgaggaagtatgc

SEQ ID NO: 438698 - DNA, 396 bp, Triticum aestivum
ttttctctccgcccggccgcccgactttgaccgcctcctcgtctccgctcccacgcccgcgggagagaggcgaccggcggcggcgcgcgaggaggggcctacccacccatcccaccaccccgccggcgaagatgttcggccgcgcccccaagaagagcgacaacaccaagtactacgaggtgctcggggtgcccaagaacgccgcccaggacgacctcaagaaggcctaccgcaaggccgccatcaagaaccaccccgacaagggcggagaccccgagaagttcaaggagctggcacaagcctatgaggttttgagtgaccctgagaagcgtgagatctatgatcagtatggcgaagatgctctcaaggaaggaatgggtggaggaggaggtggtg

SEQ ID NO: 438699 - DNA, 436 bp, Triticum aestivum
tttgtctaggcaggggcttggaaaagcaagcttgaaccagcatctagggagttgtttgacttcttgcccaaaaccattcaggagcagcttttgcttgaaagagatccccatggcaatgttcaggttgcgaaaattgaaactgagaaaatgcttattgccatggttgaaactgaattggagaagagaagagcggcggggaagtactctgcacatttcagaggccagtctcacttcttcggatatgaaggaaggtgcggcctccctaccaattttgattccagctattgctatgcattaggctatggtgctggtgctcttctccaatttggcaagacaggacttatttcgtcggttggtaacctggctgctcctgtggaagaatggactgttggaggaactgcactgactgcgttgatggatgttgagaggaggcatg

SEQ ID NO: 438700 - DNA, 372 bp, Triticum aestivum
tttacttaacctgggcagctctctcctcgttgctccgattgccgccgggaagccaaaggccgccgtccgccgtcatggacccaagctccgagatcgtgtacgacatgcccggcttcatacgcatccacaagagtggccgcgtggagcgcttgcaaggcaccgagaccgtcccgccctccccctccggtgaccccgccaacggcgtcgcctccaaggacgtcgtccttgacccggcggccaacgtctccgcccgtctctacctccccgccgccgccgcggcggagcctggaaagaagttccccgttgtcgtctacttccacggcggcgcgttcgttgtccacacatcggcctcaccgatctaccacaagtacg

SEQ ID NO: 438701 - DNA, 376 bp, Triticum aestivum
gcgtgggcgggtatattggagctccgatggagtggtgtcggcatcgaggactggtggaggaacgagcagttttgggttattggtggcacatctgcccatcttttcgcagtgttccagggtctgctgaaggtgttggccgggatcgacaccaacttcacggttacatcgaaggcaaacgacgaggacggcgactttgccgagctatatgtgttcaagtggacgagtctcctcatccctccgaccaccgtccttgtgattaacctggtgggcatggtggcaggcatatcatatgccatcaacagcggttaccagtcctggggtccactcttcggaaagctcttcttctcaatctgggtgattctccatctctacccct

SEQ ID NO: 438702 - DNA, 376 bp, Triticum aestivum
ttttctggccgcagtacgtgctcctgggcgcggcggacgtgttcgccatggtcggcatgcaggagttcttctacgaccagatgcccgtggagctcaagagcctcgggctcgcgctctacctgagcgtccttggcgtcggcagcttcatcagcagcttcctcatctcggtcatcgacggcgcgacgaggaggggcggcgggacgagctggttcgccgacaacctcaacaggggccatcttgattacttctacctgctccttgctgctctcagcgcgctggagcttcttgctttcctctacttctccgcgacttacatttacaagagaaagcctgtcaatgttcactgaccgagactgatacattcgtcttatgttct

SEQ ID NO: 438703 - DNA, 354 bp, Triticum aestivum
ttttcttgattgatctcgggacgggaaacaacaacaagatcaactgggcaatgaaagacaagcaagagtttgttgacattgtggagactgtctacagaggagctcgtaaggggcgtggtctggtgattgctcccaaggattactccacaaaataccgttactgaggtatctgtgcctggctattcatgtgaagtgtgtggcctgctctgttccgtgatatgcgctgtgtgacccttgatgtaatgtctgtcaactttgaaagtgtcgtaactatgtatttgtatcttgaatatcaacatgtcataaacctgtaaccctttaaaacaggacctgctgtctattggtattactgct

SEQ ID NO: 438704 - DNA, 399 bp, Triticum aestivum
ttttgtttgcgtgggcaggattgtgctttgtgtgaggttgctttgcaatactggtgatgatgtgaggaggatttggttgcaatcatgtagacagagttttgcgaagatgcttgctgagaagcaattcagggagacagaggagatgagggccaaggcacagatctctcatgcccagccagatgatcttattgacttctaccacctcaagagcagaaagggcatgagccagcttgagttggaggacgaggtccaagatgatttgaaggctgcaactggtggattcaccaaggaaacagatgatgcaaatagacttaatcgcattcttcagttgactgggttcagtgatcctgtatatgctgaagcatttgtgacagttcatcattatgatattgtacttga

SEQ ID NO: 438705 - DNA, 461 bp, Triticum aestivum
tcgtttcgcactgccccaccgcgccggccccgactccgactccgacactccccggcggcgcgcgctcgccgagctcggtcgcgctgcggttcggatcccccggaggcgtgcggcttcggcgcgggcgagggtcggcggcggtcgcgatggcatccgacgggcgcgtggagcggatcgcgtccagcatccgcgccatccccaacttccccaagccagggattttgtttcaggacatcacaaccttgcttctcgatccgcaggcattccgtgacaccactgacctctttgtcgagcggtacaaggacaaagacataactgtagttgctggtgttgaagccagaggattcatttttggtcctcccattgcattagccataggtgcaaagtttgttccaataaggaagccgaaaaaattacctggtgaggtgatatcggaagaatattctctggaatatggcact

SEQ ID NO: 438706 - DNA, 324 bp, Triticum aestivum
ttttcttctcgtccggacgaagcgctcttcggtgatccggtttctgaatttgctggtcaaaacgttggcgttgtgattgctgaaacacagaagtacgcctatatggcggcgaagcaagccgtcatcgagtatagcaccgagaatctcgagccgcccattctgacaatagaggatgccatccaacatgacagctacttccatcctcccccatttttggctcctaagccagttggggatttcgagcaagggatgtctgaagctgatcacaagattttatcaggagaggtgaaacttgaatcacagtactacttctacatggagact

SEQ ID NO: 438707 - DNA, 368 bp, Triticum aestivum
tttccttcgcgtgcggggtgagaagaactcgtccggggacctgatgtccagcagcaagctggtcgcggaggccgccaagacggcctacgagaagaagagcgtcgagggcatcgacaaggaaaaggtagccgccgcctccgtcgacatcctcgactccgccgccaagtacggcaagctggaggacaagccggtggggcagcacctctagaaggctgaggggtacctgaaacagtacagctccggcggcaccgagaaggagaaaaccgacgcacctgctgccgctgacgcaccgaagccggatgcacccaaggaggcagcgcctgcgcctgcccctgccgcggaggaagagaaatcgtccgatgggttcg

SEQ ID NO: 438708 - DNA, 298 bp, Triticum aestivum
ttctgtctgatgccctacatgctgctgtaccccaacacgtcggacgccggcggcgagaaagggctgggcctcaccgacatgggcatgcccaacagcgtctccatctgagctgagcgaggtcctttaatctgaacagcgtctcgttcagtagattggctggttcgtgtctcgcgtgcagggtgtattgtgttcctttaatccttctcatcattcgcttctgggtggttgccgtaattagttgcgagggatcagtggacgatggcaaatgatgatcgtagatgatgttgatcgggagaga

SEQ ID NO: 438709 - DNA, 358 bp, Triticum aestivum
ttgtttggcggcggcgcgttgcacaggagaaggagctggcggcggcggtgcccgaagaggagaagcacggcgacctagcccgagctcgcaaccatggctaggggtttgaagaagcatctgaagaggctcaatgccccgtctcattggatgcttgacaagcttggtggagcttttgcccccaagccatcatccggtcctcacaaggccagggagtgcctgcctctgatcctcatcctgaggaacagactgaaatatgctctcacctaccgtgaagtgcaatctatccttatgcagcgtcatattatggttgatggaaaggtccgcactgacaagacctaccctgctggtttcatggaca

SEQ ID NO: 438710 - DNA, 266 bp, Triticum aestivum
tttcgctgacctggctagtaggttcggcgtctctatcggcatggaaaagcctccgacgctgtttaggaaaaccgccttcaagatggggttaaagggtgtaccaggaattcggataagaaaatgaataaccaagctacattttatctcccattctgtaattcgtcttatttctaattttcactacatcaagtctgaaactgatcgatgacttgttgactggctcaaacgaagaacgactctcacatttttcttacggccttacactc

SEQ ID NO: 438711 - DNA, 195 bp, Triticum aestivum
tgctccctctcctcctctagcaaccaagccaagctcaagcggcatcaatggagggcaaggaggaggacgtgcgcctgggcgcgaaccgctactcggagcgccagcccatcagcacggcggcgcagggcggcggctcgtacgagaaggactacaaggagccgtccccggcgcccctcttcgaggcggaggagctca

SEQ ID NO: 438712 - DNA, 382 bp, Triticum aestivum; identical to SEQ ID NO: 436087

SEQ ID NO: 438713 - DNA, 334 bp, Triticum aestivum
ttctgttcgcggacgcgtgggcggacgcgtgggcggacgcgtgggcggacgcgtgggcggacgcgtgggcggacgcgtgggccgcggccccaagggcaccggcgagtacgagtgcatcgacctctacgccgtcggcgggggccgcaaggccagcgacatgtacaactcgacggccgaggacgtgctgtacgtgctcaaggagagcagcgacgacgaccggcacgactggtactcgctgggccggtttgacgccgccgtcaacaagtggacgccgatcgacgaggagctggagctcggcgtctggctgcggtacgactggggcaagtactacgcg

SEQ ID NO: 438714 - DNA, 404 bp, Triticum aestivum
tcttgcagctgcaattgcctatggtcttgacaagaaggctaccagtgtcggtgagaagaatgtgcttatctttgaccttggtggtggcacttttgatgtctccctccttaccattgaggagggtatttttgaggtgaaggccacggctggtgacactcatcttggtggggaggactttgacaaccgtatggtgaaccactttgtccaagagttcaagaggaagcacaagaaggatatcagtggaaaccccaggtctttgagaaggctcaggacttcttgtgagagggcgaagaggaccctttcttccactgcccaaaccaccattgagatcgattcactctttgagggagttgatttctattccaccatcaccagggccaggtttgaggagctcaacatggacc

SEQ ID NO: 438715 - DNA, 487 bp, Triticum aestivum
tgtctcttcggatttcgccgccgccgcagccgcagcagctcgccgcccacgcctcctacccgtcgacgagatgacgaagcgcaccaagaaggctggaattgtcggcaaatatggtacccgttatggtgccagtttgcgtaagcagatcaagaagatggaggtgtctcagcactccaagtacttctgtgagttctgtgggaagtttgctgtgaagaggaaagcagttggaatttggggatgcaaggactgtgggaaggtgaaggctggcggtgcttacaccatgaacactgccagtgcggtcactgtcaggagcactatccgtcgcttgagggagcagactgaagcataagttgctactagtgttttgtcctagtgaatcatctgggattttgcagtttagacgatactttggattcagttctgttggctggttagtcaaggattatctttgtacttggtgcgatgatgttctgttatgttattctct

SEQ ID NO: 438716 - DNA, 391 bp, Triticum aestivum
ttctttcgcccacgcgtccgcccacgcgtccgctttagtgaatgtgctaatggagtcaaagggtggcaaaaagtctagcagtagtagttccctgatgtacgaagcacccctcggctacagcattgaagacgttcgacctgctggaggcgccaagaagttctctgctgcatacccgaactgcgcgaagaagccatcctgatatcgtttttggcatccccttctcgtagtttaggatttttatgcaattttattctgactcttttctcccaccaatctctctggcttgctgcttcacgataatcgaccagttctctagtctttctccctctgttcctctctgctctgctctctgactcgaactgcaacaatggctgccccgacctctgcgatc

SEQ ID NO: 438717 - DNA, 377 bp, Triticum aestivum
ttctttcggttcccgttctcctctccccctgtcgcctccatagcagcagcagctccagctcgagcaagaaagaactagtttgatctgtgaaaatgttggccatcttccagaagcaggtggcgcacgcgccgcaggagctcaacagcccgcgcggcagcaccgccaagcccaagaaccccgacgagatcctccgcgacttccacgccgtccacccctccgacgccttctccacctccttcggcggcggcgccgccctcgcctgcgtcgccgcgcagccccgcaacctcgccgacggcgggtaccagaggatgttctgcgggctggacgacatctactgcgtcttcatggggacgctggacaacctgagcgcgctgatg

SEQ ID NO: 438718 - DNA, 384 bp, Triticum aestivum
tctgtcacgacagatttctgagctgggcatttaccctgctgttgatcccttggactcgacatcaagaatgctttctccccacgttctgggtgtggatcactacaacactgcccgtggtgtccagaaggttcttcagaactacaagaatcttcaggatatcattgccattttgggtatggatgagctcagtgaagatgataagatgacggttgctcgtgcaaggaagatccagaagttcctgagccagcctttccatgttgccgaagttttcactggtgctccagggaagtatgtggacctaaaggagggtgtccaaagtttccagggtgttttggacggcaagtacgacgacatctcggagcacgcgttctacatggttggagg

SEQ ID NO: 438719 - DNA, 424 bp, Triticum aestivum
tcttgctggagtcgtcgccgtcgaggtcaccggcgggcctgaggttcccttccacccggggagacaggacaagcccgagcctcctccagaaggccgtcttcctgatgccacccaaggctctgaccacctcaggcaggtgttttccactcagatgggtttgagtgaccaggacattgttgctctttctggtggtcacaccctgggaagatgccacaaggagagatccggctttgagggagcatggaccgccaatcctttgatcttcgacaactcttacttcactgagctcctgagtggagagaaggaaggccttcttcagttgccgaccgacaagacccttctgaccgacccggccttccgcccactagtggacaaatatgctgcggatgaggatgcgttctttgctgactacgctgaggcacac

SEQ ID NO: 438720 - DNA, 325 bp, Triticum aestivum
ttcgttcgaagtcatatgcctttgctgatgatggaacaaccacaataaatgccacttccattaagtggaaggagggaatggaaattaatgggaatgccattaagaagaaaggaagcaagcgcccattggttgaagaaagtttcttcacctggttcactgatacagagcacaagagccttgctgacggggtgcaagatgaggtggcagagatcatcaaagaagatttgtggccgaacccattgaaatatttcaacaatgaggttgaagagtttgaaggagatgactaggatgaagagggatctgatggggaggatgctgaggagga

SEQ ID NO: 438721 - DNA, 360 bp, Triticum aestivum
ttcgttcggattccgatcggaatcgcaactagctccgccgcttgattagccggcagccccgtccccatggcgtccaagcggatcctcaaggagctcaaggacctgcagagggatccccccacctcctgcagcgccggccctgtggcggaagatatgttccactggcaagcgacgatcatgggtccatcggaaagcccatatgctggtggtgtatttttggttactattcacttccccccagactacccattcaagccacccaaggttgcatttaaaacaaaggtttttcacccaaatatcaacagcaatgggagcatctgtcttgatatcttgaaggagcaatggagccctgcattgaca

SEQ ID NO: 438722 - DNA, 381 bp, Triticum aestivum
ttcgttcgaaaaagcatcgtctcgtctcgtctcgtcgaggaatcaacagccatgggcggcggcaacgcgcagaagtccaagatggcgagggagaggaacctcgagaagctgaagggcggcatggggagccagctcgaggccaacaagaaggccatgaacatccagtgcaagatatgcatgcagactttcatctgcaccacctctgaagcaaagtgcaaggagcatgccgaggcaaagcatccgaagagcgagctcgtccagtgcttccctcacctcaagcagtgatatctgcccaatcagacagagagagagattaaagagagagagagagagaagctgtcataatccacctactattatcatgttccgcaatgactgatt

SEQ ID NO: 438723 - DNA, 412 bp, Triticum aestivum
tcgtacgtgtacacaaacgggactgtgtgtgatctcacagatataccacggtacacagaggttaggtttgtttgttccgagcccactgtactgatcagttcgataaaggagatatcttcctgcaagtatgttttaactgtccaaagcccaatgctctgcaagaacccgttgtttcagcaggaaaagcgcaccttcttcatccactgcaacgagtcgcttgcggaagcagaagctgaggccgtcgaggacgacgactctctcccaaaagaagctcagatgtccatcgttccaaaccccgacgaattgcataactacgcagcttacgctacctgattgcccgccaatcacggtgccctcagctgatgaaagatgccgttattttggaagtacaacagcaagttggcaacatagt

SEQ ID NO: 438724 - DNA, 343 bp, Triticum aestivum
tttcgagcaaagctcgagcatagcaacagcactaaagctaactagagcttccagcaatggcgacctccccggtgctcttcctcctcctcgctgttttcgccgtcggtgccagcgcggccaccttcaacatcaagaacaactgtggcttcacaatttggccggcgggcatcccggtgggtgggggcttcgcgctgggctcagggcagacgtccagcatcaacgtgcccgcgggcacccaagccgggaggatatgggcccgcaccgggtgctccttcaatggcggttgtgggagctgccagaccggcgactgcggcggccagctattctgctccctctccgggcg

SEQ ID NO: 438725 - DNA, 346 bp, Triticum aestivum
tcttttcaacgtccccggctggtcctggcgtgccaacttcatgaccgacgacgacctccgctccttggtcaaagcccagctgaactacattctcggggacaacccgatgaagatgagctacgtggtggggtacggtatgaagtacccgaagcggctgcaccaccgcggggcgtccacgcccaagaacgggatcaagtactcgtgcaccggcggcaacaagtggcgcgactccaagaaggccgaccctcacgtgctcgtcggcgccatggtcggcggtccggacaagaacgacaagttcaaggacgcgaggatcagctacgcgcagaacgagcccacgctggtcggc

SEQ ID NO: 438726 - DNA, 349 bp, Triticum aestivum
tctttcacgcgtccgcccacgcgtccgggccgccagtagtgcggtcggcgggagcgccatggcgtgcctcagcgcgtgcgaggcgttcgggtccctccagtactgctgcagcggcgcgtacgggagccccagcacgtgccggcgcggggcgtactcacagttcttcaagagcgcgtgcccgtgcgcctacagctacgcgtacgacgactccacctgcaccttcacctgcgccgacggcaccaactacgccatcaccttctgcccgagcaccaccagtgggaagtacaccgacgagaacccgcaggctgccggcgtgccgcccgcgaacggcacgatggtgtaccgcggc

SEQ ID NO: 438727 - DNA, 383 bp, Triticum aestivum
ttggttttcggttggtatcttctgtttaccaaagcatgctatcattcctctgcacaaccatcccgggatgaccgtcttcagcaagatgctcttcggctccatgcacctcaagtcgtatgactgggctaggagtatctcggaggctggcactactgcgctcaccacctcagacggggctcgtctagcaaagatcaacacaaacaatgttgttgacgcctcagctgataccatagttctgtacccggagaacggaggcaacctgcactgcttcacggcgctgaccccttgcgctgttttcgacgtcatgggacccccttacagcagcgctgctggcagggactgcgcgtactacagtgagaccaccttctcaaacacagctggtg

SEQ ID NO: 438728 - DNA, 367 bp, Triticum aestivum
ttgcccacgcgtccgggggagaataatgtggtgaagaggaagcgtgaacaagatactgaagagactcctcgctcaaggaaggacaaaggtctggatggaagtctagttggttcaaggatcaaagtatggtggccagacgatgagatgttttacaagggtgttgttgactcatttgatacccattccaaaaggcacaaggttgcatatgatgatggagatgtagaggtactgctgcttagggatgaaaaatgggatttcatcagtgaggaagaaggcaaaactcctgatgtaccatctgagcgccgtggtcgaaaagggagaggaatcacgctgctgccagtgaaggaagaaaaaattgaaacaccta

SEQ ID NO: 438729 - DNA, 322 bp, Triticum aestivum
ttgttgaacatgtggcaggagcccttgaaccccggcaactggaaggaagagcactttgtgctaaccagcttagcgatgtggggcgctattatatatggtggattgaaggcgtctggcgggaaaaatgaagtgaaaaccgaggcggggtcagtgccagcagcagcaccggcacattaaacttcatgagagctttattttcttaccacaatcggttttaagtatgttgttgacgataaatcgagaccaagttggctggcaaggttaaggagctgcgctgcccagccaccatgaataatctgaacgtggtgtaacttttgatgca

SEQ ID NO: 438730 - DNA, 411 bp, Triticum aestivum
tttttgcgatttcgattggaatcggagccagctccgctgcctgattagccggccggccccggccccgtctccgttcccatggcgtccaagcggatcctcaaggagctcaaggacctgcagagggatccccccacctcctgcagcgccggccctgtggcagaagatatgttccactggcaagcaacgatcatgggcccatcggaaagcccatatgctggtggtgtatttatggttactattcacttccccccagactacccattcaaaccaccgaaggttgcatttaaaacaaaggttttccacccaaatatcaacagcaatgggagcatatgccttgatatcttgaaggaacaatggagccctgcattgacagtttcaaaggtgctcctttcaatctgctctctactaaca

SEQ ID NO: 438731 - DNA, 405 bp, Triticum aestivum
ttgattgtctcgaccggtgagtcacctgaatgggacgaggcctttgcatgggcttttgacagccctcccaagggccagaagcttcatatctcttgcaaaaacaacagcaaattcggaaagaaatcgtttggcaaggtgacgatccagatcgaccgggtcgtcatgctggggtcagtcgccggagagtacaccctgctgccggagagcaagagtggtccgaataggaacctggaaatcgagttccaatggtcgaacaaatgacagcatctacagaattaggcgcccgtgtaagttaaaatatataaagttaagagtggttttcttgtttcacatcctctgctaaatgttaccctgtttgtgcatcagtgtaaatagccggcagagaaagtcgttttttggttgttg

SEQ ID NO: 438732 - DNA, 293 bp, Triticum aestivum
tcgcgccaccggcaaggtgaccaggctcaggaaggagtgccccaacgccgactgcggcgccggcaccttcatggccaaccacttcgaccgccactactgcggcaagtgcggcctcacctacgtctacaaccagaaggcttagaggtggctcgcgtttgctctgctctttttacctacctatcgagaatcgaactcatttagatgtgtcccgtttgtcttttaaactgaaaccttgagtatcatgtttcctgaatatttcatcgcatactgctgtagtgcgatgcgtgcttaaa

SEQ ID NO: 438733 - DNA, 257 bp, Triticum aestivum
ttgttgacgcgtgggctttggggaggtggcggaggaggacgagggcgaggtcgtcgacgacgtcgaccgccccgccgtcgttctgaagccgtccgtccacgccttcgtcaccgacctgcgcgtggtcggcacaaacccacgtggaacgctcttcctggacgacagcgagaggaacattgccgtggggaaagcactcggtcttcgcacagtcctggttggcaagagggctaggagcaaggaggcggactacgcgctgg

SEQ ID NO: 438734 - DNA, 421 bp, Triticum aestivum
tcgcccacgcgtccgcttgtcgttgggctctgggtcctgctcctgctttctctcctggccgtctcctccggcgaggaattcgatgtcttctaccttggtcagcaatggcctgggtccttctgtgacacgaagaaggggtgctgcttcccggacaccggctagccggcgacggacttcggcatccacgggctgtggcccaactacgccaagtgcaagacccgcggcgagctcgacggcgccctggagatggtgaccaagcgcaagaagaagtgctggccggagaactgcaacagcgagcgcctcaagctctgggagatcaaggacctggtgacggagctggacgccaactggccgacgctggcgtgcaagggcggcaagagcatcgagttctggacccacgagtgggagaagcacggcacct

SEQ ID NO: 438735 - DNA, 300 bp, Triticum aestivum
tcgatcatccccgataccaaagctcatcttcttctccttgaaatctttttgggttcacagatttggaggatgtcttgcaactgtggatccggttgcagctgcggctcatactgcaagtgcgggaagatgtaccctgatctgacggagcagggcagcgccgccgcccaggtcgccgtcgtggtcgtcctcggcgtggcgcctgagaacaaggcggggcagttcgaggtggccgccgggcagtccggcgagggctgcagctgcggcgacaactgcaagtgcaacccctgcaactgttaagct

SEQ ID NO: 438736 - DNA, 445 bp, Triticum aestivum
  unsure (1)..(445): unsure at all n locations
tgttgagagagagagagaaagagtacacagcggcggaggcgatggcgaagggcgggaaggggttgaacgcgacgggcgagtttttccggcgccgtgacgagtggaggaggcaccctatggtggggaaccagctgcgccacgccactccggggctaggcatcgccatcgtcgcctttgggatctaccttgtcggcgaggccgcctacaaccgactctaccgncccgccggagacaaccaccactagatctcccccagaggtaaagtagatggagcaaactttaccgaagcaccaatgactgatcttttccggattgatctcataaggtctgcatgaccaccttgtaattcgcgatcaggagacgtgctgttggttcaactagttttcctggaacgcgtgtcctttaaatctgatactattttgtggatatactcggcatctggaca

SEQ ID NO: 438737 - DNA, 253 bp, Triticum aestivum
cgagctgccggcatggcgaggccgtccatctccctccacctctgcctggccgtcctggccatggccgccgccgagtccgaggccgggttctacgaccagttcgacgtggtcggctccggcaacaacgtgcgcgtgaacgactatggcctggcccagcaggtggcgctcacgctcgaccagggcaacggcggctccggcttcagctccaaggacaagtacctctacggagagttcagcgtccagatgaagctca

SEQ ID NO: 438738 - DNA, 341 bp, Triticum aestivum
ttgctccaatcccctccaatcccaccttcggaacagcagccagcaagcgtagccagccatgtcgggccgcggcaagggaggcaagggcctgggaaagggcggggcgaatcggcacaggaaggtgctgtgcgacaacatccaggggatcacgaagccggcgatccggcggctggcgcggcggggcggtgtgaagcgcatctccgggctcatctactaggagacccgcggcgtgctcaagatcttcctcgagaacgtcatccgcgacgccgtcacctacacggagcacgcccggcgatgaccgtcaccgtatggacgtcgtctacgcgctcaagcgccagggc

SEQ ID NO: 438739 - DNA, 358 bp, Triticum aestivum
tcgcgtcgcgctcgccactcagagaagatgagggagatcctgcacattcagggtgggctgtgtggtaaccagattggttccaagttctgggaggtggtgtgtgatgagcatggcatcgaccccaccgggcggtatgtcggcacctctgacctgcagctggagcgtgtcaacgtctactacaatgaggcctcatgtggtcgctttgtgccccgtgctgtccttatggatcttgagccgggcaccatggacagtgtccgtactggaccgtacgggcagatcttccgccctgacaactttgtgtttgggcagtctggtgctggtaacaactgggccaagggtcactacaccgagggtgctg

SEQ ID NO: 438740 - DNA, 254 bp, Triticum aestivum
aacccgacaggtatgttattctgggcaaccatcatgatgcgtggacatttgtggcagctgacccaaacaggggaacggccgccttgcttgagctagcatagaggttgtctgagctacaaaacatgggttggagaccttgtcgaaccatgattttgtgtaattgggatgctgaatagtacggcttgataggttccacataatgggttgaagagaacagggcaatgctaactctcagaactgatgcttacctgaat

SEQ ID NO: 438741 - DNA, 347 bp, Triticum aestivum
tcccacgcgtccgcgccgcaacgcgccgctgctgggccttgggggcatgtccgacgacgacctccgcgggatgctcgccgagggcgacttcgacggcgacggcgcgctctcccagatggagttctgcgtcctcatggtcaggctcagccccgacctcatggaccagccccgccggtggctcgacgacgccgtcgcccaggcctcccacttcctcttcaccagctagattccggccggataggaaaattaatcttcttcttcttcgttgttgtttcttctctcccccgctgttcatagagtcaggattcgagaaaagaaaaggcactgtcgattggttgaatgaaaaa

SEQ ID NO: 438742 - DNA, 411 bp, Triticum aestivum
tcggtggccagaaggcaacaacaaagtgcgcgtgagaaataagcggtgcttgccaagcagagagagagagagagagagagatggcggcggcggcgacggcgacgactacagcggcggcgacggcggcggcggtggggccgggggaggtgatctccgaccacagcctggagcagtggaccatgcagatcgaggaggccaacgccgccaagaagctggtggtgactgacttcactgcatcatggtgcggaccatgccgcatcatggctccaatttttgctgatctcgccaagaagttcccagctgctgttttcctcaaggtcgacgttgatgaactgaagcccattgctgagcaattcagcgtcgaggccatgccaaccttcctgttcatgaaggaaggagacgtcaaggaca

SEQ ID NO: 438743 - DNA, 330 bp, Triticum aestivum
tcgccgaggtgtcttcgccagggcatccggtgactacgccatcgtcatcagccacaaccccgacaacggcaccttaaggatcaagctcccctctggtgccaagaagattgtcccaagcagctgccgtgccatgattggtcaggttgctggtggtggcaggactgagaagccaatgctcaaggctggtaacgcctaccacaagtaccgtgtgaagaggaactcgtggactaaggtgcgtggtgtggccatgaaccctgtggagcatccccacggaggaggtcaccaccagcatattggtcacgctttcactgtacgccgtgatgcaccacc

SEQ ID NO: 438744 - DNA, 282 bp, Triticum aestivum
tcgcccacgcgtccgttcgacttccgccggccgcagcaaccgaagccaagtttcgaagtcgccgccgaggaggagcaggcgaccagacgccatggcccgtaccaagcagaccgcccgcaggtccaccggcggcatggcgccccgtacgcagctcgccaccaaggcggacaggaagttggcgcctaccaccggcggcgtgaagaagccccaccgctgcaggcccgggaccgtcgtcctgcgggagatccgcaagtaccagaagagcacggagctgctgatccg

SEQ ID NO: 438745 - DNA, 313 bp, Triticum aestivum
ttcatctgcagctacagctcctcttcagcacaaccctttcttcaggacacagatcaatccagatacacatacaccacctgccgagtgccgacgtctagctgctagcttactttcagaatccagatacacacacacctgccggcgtccgttgctgcatatttcgatggagtgcgagaacgcacacgttgccgccaacggcgatggcttgtgcgtggcgcagccggcgcgggccgacccactcaactgggggaaggcggcggaggagctctcgggtagccatttggaggcggtgaagcggatggtggaggagtac

SEQ ID NO: 438746 - DNA, 354 bp, Triticum aestivum
tttttcgcaagccgtgcgcctcgctcttctgccgagcctggtcctcatcctctcgcctctctcccgccacacaggcttagcaatctagcgttagcgcctgcgtccatctcgtagctgcttcgatggcgatcaagaggaccaaggccgagaagaagatcgcgtacgaccagaggctctgccagctgctcgaggagtacaccaaggtgctcattgtcgtcgccgacaatgtcagatccaagcagcttcaggagatccgcaagggtctacgtggcgactccatcgtgctcatgggcaagaacaccctcatccgccgctgcatcaaggtgcactcggagaagaccggcaacaaggact

SEQ ID NO: 438747 - DNA, 304 bp, Triticum aestivum
tttctctccatctcactcactctctgcctccgccgctggtgcagcgtcctccccgcgactccgatggccagcaagtgggtcaggcccgaggtgtacccgctgttggtggcgacgggcagtggccatcggcatctgcgcctttagcctctcttggcaacatcaccggcgacccagaagtcatgatcaacaagatggggagggcagcgggagtgcttgagaaccatgaggagggcaggcgctacgcctagcacggactaagagcctatgtgcaggacaagacctgcgagatcatgccaggaatcaa

SEQ ID NO: 438748 - DNA, 270 bp, Triticum aestivum
ttgcccacgcgtacgtgttaatctcatttttgttggaatgctagtaaccggaatgtacagtttgaagtacataaatgttgccatggtgacgatattgaagaacatgacaaacattttaacggctgtaggggagatatatgttttcaggaagtgtcagaacaaacaggtttgggctgccttatgcatgatgattatattagctggcagcggtggtatgacagatctttctttccatttaatcggttacgcgtggcagattttgaattgctt

SEQ ID NO: 438749 - DNA, 278 bp, Triticum aestivum
gtcacatccaaagatttccttcaaccaacaggttatcatatggtgggcaggtctcatgagaggagcagtttcaattgcacttgcttataacaagtttacaacatctggtcatactgctgtgcgagttaatgctgtcatgatcaccagcacaatcattgttgttctgttcagcacaatggttttcggcttgctgactaagcctctgattaatctcctcatcccaccaagacctggcaccgcagctgatatctcaagccagtcattcctagacccactta

SEQ ID NO: 438750 - DNA, 289 bp, Triticum aestivum
atctgcagctacagctcctcttgagcacagccctttcttcaggacacagatcaattcatatacacatacaccacctgccgagtgccgacgtctagctgctaactgactttcagaagccagagacacacacacctggcggcgtccgttgctgcatatttcaatggagtgcgagaacgcacacgttgccgacaacggcgatggcttgtgcgtggcgcagccggcgcggaccgacccactcaactgggggaaggctgaggaggagctctcgggtagccatttggaggcggtg

SEQ ID NO: 438751 - DNA, 248 bp, Triticum aestivum
ttggtctcctccgaacgtcacgctccgtccgtgcgcgttcaaggccatcaacgccatccgcgcgctcctgcagagggcgtgcggtgggcccgtggtctactgcgccgacatcggcgcgctcgccgtccgcgactcctgccacctggccggtgggccaaggtacgccgtaccgctcggtcgccgcgacgggctaacccccgcgtccctggacaccatcttgggcgcgctaacgccgacgacctccaagg

SEQ ID NO: 438752 - DNA, 379 bp, Triticum aestivum
gacgtggtcgcgcttctcgaccacctccgcctccccaaggtggtggtggtggggcacgactggggcgcgcaggtggcgtggcatttctgcttgttccggccggaccgggtgcgcgccgtcgtcgcgctggggatcccgttcttcccccgctcccctcgttcgatggcggagatgttcgcggcgcgcggcgatgggttctacatcacgcagttccaggagcctggaagagctgaaaaggcatttgctcggtacgacgttgcgactgtcctaaagaagttctactccattgaattagatgaccttgctgctcctcctggagtagagattatagattttttcgatgtgtcatcatccccacttacttggatgaccgaggaag

SEQ ID NO: 438753 - DNA, 371 bp, Triticum aestivum
tttcccacgcgtccgcccacgcgtccgcgtcccgtcttcccgccgcctcctcctcctccgcgtcgcaaaccctcgttcaaatccgccgaatcccgcgacccaggaaccaaggtagatcgatggcgaagagctcgttcaagctggagcacccgctcgagaggaggcaggcagaggctaaccgcataagggagaagtactctgacagaattcctgtgatcgttgagaaggctgggaagagtgctattcctgacattgacaagaaaaagtacctcgtccctgctgatcttacagttggacagttcgtgtatgtcgtacggaagcggatcaagctcagtggtgagaaggcgatcttcatctttgtgaagaacact

SEQ ID NO: 438754 - DNA, 218 bp, Triticum aestivum
catccatccgcccctcgctgccgctgcgtctcgtctccaccaccccacttgcccccggactcaggaggatcgtcggagatgtcggacaccgatgagcaccacttcgagtccaaggccgactccggcgcctccaagacctacccgcagcaggccggcgccatccgcaagggtggacacatcgtcatcaaggcccgtccctgcaaggttgttgaggtctc

SEQ ID NO: 438755 - DNA, 433 bp, Triticum aestivum
tcggcaacgagggcgagtacgagcggatcaccaaggaggagaagcaccacaagcacaaggagcacctcggcgagatgggcgccgccgccgccggagccttcgccctctacgagaagcacgaggcgaagaaggacccggagcacgcgcacaagcacaagatcgaggaggaggtggccgccgccgcagccgtcggcgccggcggcttcgtcttccacgagcaccacgagaagaagcaggaccacaaggaggccaaggaggccagcggcgagaagaagcaccaccacttcggctagatcgtcgttgacgtgcggtggccggcctcgccgacggccgtgcgtgtgcttacgttacgtgtgttccataaagtgagagaggctgggacgcgggcccggtctcgtgctcgcccgtgcgtgattttctctgcgtgctaagc

SEQ ID NO: 438756 - DNA, 402 bp, Triticum aestivum
ttcacgcgtccggccacgcgtccgaaagcatccatccgctgagttggagagcttgctaatcgcagttcgtcctcgcccaaatcgagcagccatgtcgctgattccccgcggcaacgccttcgaccccttctcccctgacctctgggaccccttcgacggcttacccttcggctccggcggcagcagcagcctcttcccctcgttcccgcgcatcagctgcgagaccgcggccttcgccggcgcgcggatcgactggaaggagacgcccgaggcgcacgtgttcaaggcggacgtgccggggctgaagaaggaggaagtgaaggtggaggtggaggacggcaacgtgctccagatcagcggcgagcggaacatggagcaggaggagaagactgacacctggca

SEQ ID NO: 438757 - DNA, 421 bp, Triticum aestivum
gtgggtctctctctcgcggcggcgcaggcgtctctctccttctcctccggcggcggcaaggcattttggcatctgagcccaacagctagcagatggcaggcggcagagttgcacatgcgaccctcaaggggccgagcgtggtgaaggagatcttcattggactcacccttgggctggttgctggtggtatgtggaagatgcatcactggaacgagcagaggaagacgcgatccttctacgacatgcttgagaaggggcagatcagcgtcgttgtcgaggagtagttctgaagtgctgaaccagaagttctacatctcgaagtcttttgtcattttggttttgccagtaatttctgaaactctctggagagcatgacagagtgattgctgtggagattgtcatgaaaataagcacaccacca

SEQ ID NO: 438758 - DNA, 375 bp, Triticum aestivum
tttggaggttgacatggtaatggtaccggctacaactggcctgatgggtattttgccaggccatgtttccacaattgcagagctcaagcctggtgttatgtctgtacacgagggaaatgatgttacaaagtactttgtgagcagtggctttgcattcatccatgcaaactccattactgatgttgtggctgttgaggctgtcccccttgatcagattgaccaaagcttggtccagaaaggtcttgctgaattcactgccaagcttggatcagcctcgactgacctagagaaggcggaagctcatatcggagtggatgttcacagtgcgctcaatgctgcattgactggttgatgatgacatcttacatttttatg

SEQ ID NO: 438759 - DNA, 362 bp, Triticum aestivum
ctctcccacgcgtccggcgagtgggagtccggccatggcgccgtcgcagcccaagtcagggctcttcgagggcatcaacaagggccacgtcgtcaccaagcgcgagctgccgcctcgcccgtccgaccgcaaggggaaaggtacaaagagggtgcattttgtcaggaacttgatcagggaggttgctggatttgctccctatgagaagcgtatcactgagcttcttaaggttggaaaggacaagcgtgcactcaaggtcgccaagagaaagcttggtactcacaagagagcaaagaagaagagagaggagatgtcaagtgtccttaggaagatgaggtctgctggtggcggtgctggtgaca

SEQ ID NO: 438760 - DNA, 298 bp, Triticum aestivum
agaacatccccatggggctgtgtggcaacaaggttgatgtgaagaacaggcaggttaaggccaagcaggtgacattccacaggaagaagaacctccagtactatgaaatctctgccaagagcaactacaactatgagaagcccttactttaccttgctaggaagctggctggtgatcccaacatccacttggtcgaagcagtggcccttaagcctacggaagtgaccttcgacttggccatgcagcagcagcactaggctgagcttgcggctgcagcggcacagccactgcctgatga

SEQ ID NO: 438761 - DNA, 389 bp, Triticum aestivum
tttgtgcagggtttgtgagaacatccccattgtgctgtgtggcaacaaggttgatgtgaagaacaggcaggttaaggccaagcaggtgacattccacaggaagaagaacctccagtactatgaaatctctgccaagagcaactacaactttgagaagcccttcctttaccttgctaggaagctggctggtgatcccaacatccacttcgtcgaagcagtggcccttaagcctccggaagtgaccttcgacttggccatgcagcaacagcacgaggctgagcttgcggctgcagcggcacagccactgcctgatgacgatgacgatctgttcgagtagagagaggatcatgagtctgtcttataatcaatactttgagagccagagacta

SEQ ID NO: 438762 - DNA, 412 bp, Triticum aestivum
tgttggggatttgcgatcggtaatggtctcacagatccagcaatccaatacaaggcctacacagactatgcattggacatgaaccttattcagaaagctgactatgaaaggatcaacaaattcatcccaccatgtgaatttgcaatcaaactttgtggtacagatgggaaagcatcttgcatggcagcatatatggtctgcaattccatcttcaactctatcatgaagcttgttggtaccaagaattattacgacgttaggaaggagtgcgaagggaaactctgctacgacttctcaaacttggagaagttcttcggtgataaagcagtcagacaggcaattggagtaggtgacattgaattcgtctcatgcagcacttcggtttatcaagcaatgctcacagactggatga

SEQ ID NO: 438763 - DNA, 395 bp, Triticum aestivum
tgctctcgggactatcccgacaggccaccgactgttaggtttcactcaagaatcaacatgacctgtgtgaatgccgagactggattggtggaccaaaggaagtttagcctgctgtccaactggcgccgtgagtacacaatggagaacatcttgatacagcttaagaaagagatggcgacatcacacaaccggaaactagtgcagcctccggaggggaccttctactgaaggagcacttgccgtgtcgcacgtgtcattcccaagaaccctcgcggttcccattttagatatcgcataagatcgcaacatttggtgcaaacgattatgtataactttgacggtgtccttcacatggctcttgtgtgtctagtctcgttatatctgctgggtacgcc

SEQ ID NO: 438764 - DNA, 351 bp, Triticum aestivum
ttttcgctcccccgccgccgccgccgctccactcccccgcaccgtcgtctccaggtaaggagggcgagatggtgaagcacaacaacgtcatccccaacggccacttcaagaagcactggcagaactatgtcaagacgtggttcaaccagcccgcccgcaagcagaggcgccgcatcgctcgccagaagaaggctgtgaagatcttccctcgccccacctctggacctcttcgccccattgtgcaatgccagacccgcaagtacaacatgaaggccagggctggcagaggctttacccttgaggagcttaagtccgctggcatcccaaagaagctcgctcctaccattggca

SEQ ID NO: 438765 - DNA, 418 bp, Triticum aestivum
tgtctgggcgacgtccacccaatcggagtgaggggctgctacgatgagggtaagcgtgttgctgagacactgatgttcgactaccacaggcagcatggcattgagatccgtattgccaggattttcaacacctactgacctaggatgaacattgatgatggccgtgttgttagtaacttcattgctcatgccattcgaggtgaagcactgactgtccagaagcctgcaacacagactaggagcttctgctacgtcgctgatatggacaatggtcttatgaagctgatgaatggagacaacaccggacccattaacattgggaacccaggtgaattcaccatgctggaacttgccgagaatgtgaaggagtttgatcaacccacaagtgacagtgacgatgactgagaacactcctgat

SEQ ID NO: 438766 - DNA, 355 bp, Triticum aestivum
tcccggccccccgacccgaggaaagaggaagttagagcagagtccacacggcagaggccaaaggcgggaggaggggcgggatgccgatcctgtacgcggtggtggcgcggggcgcgacggtgctggcggagcacagcgcggcggcgaccaacgcgggcgccgtcgcgcgccaggtgctcgagcgcctccccggcggcggcgccgacagccacgtctcctacacccaggaccgctacgtcttccacgccaagcgcaccgacggcatcaccgccctctgcatggccgacgacgccgccggacgacgtatcccatttgctttccttgaggatatccatggaaagtttgtcaagacata

SEQ ID NO: 438767 - DNA, 420 bp, Triticum aestivum
ctctgggcaatgttaacccaattggagtcaggagctgctacgatgagggtaagcgtgtagctgagacactgatgttcgactaccacaggcagcatggcattgagatccgtattgccaggattttcaacacctacggacctaggatgaacattgatgatggccgtgttgttagtaacttcattgctcaggccattcgtggtgaagcactgactgtccagaagcctggaacacagactaggagcttctgctacgtcgctgatatggtcaatggtcttatgaagctgatgaatggagacaacaccggacccattaacattgggaacccaggtgaattcaccatgctggaacttgccgagaatgtgaagggagttgatcaacccagaagtgacagtgacgatgactgagaacactcctgatgac

SEQ ID NO: 438768 - DNA, 449 bp, Triticum aestivum
tgctatcgccaagggtaaggggtatgaaggcgttgtcactcgctggggtgtgacccgccttccccgcaagacccacaggggtctccgaaaggttgcctgtatcggtgcctggcatcctgctagggtttcctacactgttgctcgtgctggtcagaatggttaccaccaccgcacagagatgaacaaaaagatttacaagatgggcaagtctggacaggagtctcacgaggcctgcactgagtttgacaggactgagaaggacatcaccccgatgggtggcttccctcactatgtgtggtgaagggtgactacctcatgatcaagggctgctgtgtgggccccaagagagagtggtgaccctccgccagtccctgttaaagcagacgtcgcggttggcccttgaggagatcaagctcaagttcatcgacacctcatcaaagtttgggcat

SEQ ID NO: 438769 - DNA, 344 bp, Triticum aestivum
tcgcaaaggtgctgttttctatggccctcctggctgtggtaaaaccttgttggccaaggcaattgcaaatgagtgccaggcgaacttcatcagtatcaagggacctgagctgcttaccatgtggtttggtgagagtgaggctaatgtgcgtgagatctttgacaaggctagggggtcagcaccatgtgtcctcttctttgatgagcttgactccattgctacccagagaggaagcagtgttggggatgctggaggtgcagctgatagagtgctgaaccagctgctgactgagatggatggcatgaacgccaagaaaactgtcttcatcattggtgctaccaaca

SEQ ID NO: 438770 - DNA, 403 bp, Triticum aestivum
ctctcttcgagggagttgatttctattccaccatcaccagggccaggtttgaggagctcaacatggacctcttcaggaagtgcatggagccagtggagaagtgcctgagggatgccaagatggacaagagcaccatccatgatgtcgtgcttgttggtggttccaccagaatccccagagttcagcagctgttgcaggacttcttcaacgggaaggagctctgcaagagcatcaaccctgatgaagccgttgcctacggtgctgccgtccaggctgcaatcctcattggtgaggggaacgaagaaggtgcaggaccttctcctccttgatgtcaccccactgtctcttggtcttgagactgctggaggagtcatgactgtgctcatcacccggaacaccacca

SEQ ID NO: 438771 - DNA, 355 bp, Triticum aestivum
  unsure (1)..(355): unsure at all n locations
tgttcgcccgttcccgcgccgcggcctgccggcctccgtgctccggaccctccccgtcgccgtctacggcggcggcgcctcgcccaagacgcccggcggccaggggaggaggagcagccgcgacgcgctcgagtgcgcggtgtgcctctcggaggtggccgacggcgagaaggtgcggacgctgcccaagtgcgaccaccgcttccacgtcgactgcatcgacatgtggttccactcccacgacacctgcccgctctgccgcgcccccgtcggcgccgacgcggacgagcccgccgccgaggggctcctccgcgtgccgcgcgaggaccacgccacgncggagttccccatgttc

SEQ ID NO: 438772 - DNA, 227 bp, Triticum aestivum
tgttcgcgccgcagcagaaaagcatcggctgtggtctcgtcgagggatcaacaaccatgggcggtggcaacgcgcagaagtccaagatggcgcgggcgaggaacctcgtgaagctgaagggcggccaggggagccagctcgaggcctacaagaaggccatgaacattcagtgcaagatatgcatgctgactttcatctgcaccacctctgaagcatagtgcaaggag

SEQ ID NO: 438773 - DNA, 297 bp, Triticum aestivum
tgttcggggagcatcaagatcggcaaatgatggtgagtttgctattattggtgggacaggtgacttcgcaatggcacgtggtatcctaacgaaacgactagttgtggacgtagctggtagtaaaatattcgagcttactgtggatggattttgccacatgaacattccggtccctgcacctacgaagatgggaccgtggggtgcaaaggatgccccccttcgtgaaatggaaagaaaatcccaacgtctagaggagtgtcacaatatactttacagcgtaataagtgcgattcagtt

SEQ ID NO: 438774 - DNA, 247 bp, Triticum aestivum
ttctcgagcctctcaagaagtgacacgggagaggagcagggcggcgcaagccatggccatggcggagcagcggatcgagcacagccacctcgacatcagaggcctgaacctccacgtagcgcaagcaggcacaggccagctcgggacggtgctgatcctgcacggcttcccggagatatggtactcgtggcgccaccagatgctggccgtggccgccgccgggtaccgtgccatcgcgccggactgg

SEQ ID NO: 438775 - DNA, 433 bp, Triticum aestivum
gtgaatcacagattcaagtatagtggtcttctctttgggagccaacaatcctagcaatggctgacgctagacttgccctagcctccctctttgtctccattctgatgctttccatggcccatcccttctttgcatgtcccactcgttgtgaaagtgagataaaaatgcagatgtatttgcaccaggtggtgtccggaccaacccataaccaagaagttgtgtttaagtctactcccactatagagtttggtaggacggttgcttttgattatactctacttgatgcacctacaccggacgccaaaattattggtcgtgccaaaggaacccatgtccaggctgaccaggtcaatgctggagatttctcccatttcagtatgatattccagcagggacggtttactggttcaacatttcaagttatggggatgac

SEQ ID NO: 438776 - DNA, 222 bp, Triticum aestivum
agacaactatatcatcaaaacctttggatgctccaagtggacaagggtcatgtgacatcaaaatcaatgatgatttctgcgcagttacgatggtacctcttttgctacagaagggtgtgctcaggacaaactgcatagactgcttaaaccgcacaaatgtcgcacagtttgcatacggattagctgctttagggcgtcaactgcatgtgttgaagctcactg

SEQ ID NO: 438777 - DNA, 235 bp, Triticum aestivum
gttagctcatggcatcttccaagagtagtcttgcaatgtttgcactggccatagtcatggccgtggtggctgacgtctcggcgcagaacaccccgcaggacttcgtcaacctgcacaaccgcgcccgcgccgtggacggcgtcggccccgtggcatgggacaacaacgtggccaggtttgcgcaggactgggcggcgcagcgcgccggcgattgccggctgcagcactccggcgg

SEQ ID NO: 438778 - DNA, 339 bp, Triticum aestivum
atcacattggatgttggtacaaataatgaggagcttctgaatgatgaattttacattggcttgaggcaaagaagggtcactggccaggagtatgctgattttctgcatgaatttatggctgctgtgaagcaaaactatggggagaaagttctcattcagttcgaggattttgcaaaccacaatgcctttgatctccttgcaagatacggaacaacccaccttgtattcaatgatgacattcagggaacagcttcggtggtccttgctgggcttgttgcagcactgaaattagttggtggtacattagcagagcacacctacctgttcttgggagctgga

SEQ ID NO: 438779 - DNA, 297 bp, Triticum aestivum
ttgcctcacgcgtccgcccacgcgtccggtcaaaattagactcaaaggacatcaaaagaggataaccggattggccttctccaacagcttgcatatacttgtttcttctggcgctgatgcacagttatgtgtgtgggccaccgattcttgggaaaagaagaaatcggtcgctatacaaatgccagctgggaagactccatcaggagacacaagggttcagtttaattctgaccaaaatcgcttgttagtagtccatgagactcagatagctatttatgatgcgttcaagatggagag

SEQ ID NO: 438780 - DNA, 291 bp, Triticum aestivum
gttgatcgctcttgggaaattgcccgaacggtctgtgtcaatgaatggatggggccttgctttccgagcctgtggtgaccggctgattgtcattggaggcccaaggacttctattggtggcatcattgagcttaattcatgggttcccgatgggcaaccgcctgtgtggaatttggttgccacacggcaatccgggaacttcgtgtataactgcgccgtgatgggttgctgagtccactgaataaagattggatgcagtggatatttatgaaggatgatagtatgcacaaa

SEQ ID NO: 438781 - DNA, 271 bp, Triticum aestivum
gttgtacttgactggggagaagacacggtctcctggggaagaggtggacaaggtgtttgtcgccatgaaccagggcaagcacatcgacgcgctgctggagtgcctaaaagagtggaacggtgagcccttgcctctctgctgaacagaggatcaagaaactgaagagaagactgtgtgcagaaggctttggatcttttaaatgataaatgataatatttttccaattgtattttcttaaatattgatgttttgtgggatggaacatcctttc

SEQ ID NO: 438782 - DNA, 288 bp, Triticum aestivum
ttctgtttcaacgaataaggttcacttcatcctgaagcacaagaaccccaagactggcaaatatgttgaacatcacctcaagtccccaccctctgtcccatatgacaagctctctcatgtctacacggctatcttgaagccggataacgaggtcagaattttggttgatggggaggagaagagcaaagcaaacttcctttccgctgatgattttgagccagcacttattccatcaaagactattcctgaccctgacgacaagaagccagaggactgggacgagagagc

SEQ ID NO: 438783 - DNA, 238 bp, Triticum aestivum
ctgtatcatactgttggatgataacatggggccgataatcgccaatttcggtctctccagactctttggtcaagaacaaacacggatgaacacacagaatgttgttgggtcatatggatacatagctccggaatatctatacagaggtgaaatcttcacgaagtcagacatatacagtttaggcctactaatcatggagactaccacgggagagaagaattgtccaggcaaagaaccg

SEQ ID NO: 438784 - DNA, 227 bp, Triticum aestivum
gtcactacaagcacagagggagaagaagaagggatggcgcctatgaaggtgtacggctgggcggtgtcgccatggatggcgcgggtcctcgtctgcctggaggaggccggcgccgagtacgagctcgtgcccatgagccgcaacggcggcgaccaccgccgcccggagcacctcgccagaaaccccttcggcgagatcccggtgctggaggacggcgatctgacgct

SEQ ID NO: 438785 - DNA, 346 bp, Triticum aestivum
agctatgtactgctttcaccattactgtggatgctaaagaaggcacaacgactggggtatctgcaaaggatagggcaaagacagtcatgactcttgcatctccttactcaaagcctgaagatttcaatcggcctggccatattttccctctgaagtacagagatgggggtgttctcaaacgagctggacacactgaagcatctgttgatcttgctgtgctggctgggttacctcctgttggagtactctgtgagattgtggatgaggatggttccatggctcgcttacccaagctgcgcgtgtttgctgaaaagaataatttgaagatcgtatcgattgctgactt

SEQ ID NO: 438786 - DNA, 321 bp, Triticum aestivum
tgtctcgcccttgccccccgttcccttgttggtgcccgatctaagtcaagatgagtcgtggcgggagtgctggtggtggtcaaagttctctgggttacctgtttggagatggtgagcctgcaaagcccgctgcagcaccagctgcgaagcccgcacctgctgagaaaccagcaccggcagctgctgatgtagccaagcagattccagctggcattccaggtagccgggcgaacaactactaccgtgcagatggccagaacacgggcaacttccttacggaccgttcttcaaccaaggttcatgctgctcctggcggtggct

SEQ ID NO: 438787 - DNA, 407 bp, Triticum aestivum
catggtttacctgtaattgcaacaaaaaatggagctcctgttgaaattcaccaggtgttggacaacggcctgcttgttgatccccacgatcagcatgcaattgcagatgcactctataagcttctttctgacaagcaactctggtcaagatgtagagaaaatgggctgaaaaatatacaccggttttcttggcctgaacattgcaagaattacttgtcgaggatattaactcttagcccaagataccctgcttttccgggcaatgaagaccagattaaggcacctatcaaggaaaggaagtgtatcatcgttattgctgtagactctgccagcaagaaagatctggtctgtatcataaaaaattctattgaggctacacgtaaagaaacgttgtcaggttcaacagg

SEQ ID NO: 438788 - DNA, 313 bp, Triticum aestivum
acttatataaacgtttgttaattggagattctggtgttggaaaatcatgtcttttgttaagatttgctgatgatacttacactgaaagttatatttcaactattggagttgatttcaagattagaactattcaattagatggaaaaactattaaattacaaatttgggatactgcaggacaagaaagatttagaactattacttcttcttattatcgtggtgctaatggtattattgttgtatatgatgttactgatcaagtttcattcaacaatgttaaacaatggcttcaagaaaattgatagatatgctt

SEQ ID NO: 438789 - DNA, 366 bp, Triticum aestivum
tgagatcacatacacaatggtgaaggctgtggctgtgcttaccggcagtgagggtgtcaagggcaccatcttcttcacccaggagggagatggcccgaccaccgtgacgggaagcgtcactggactcaaggaagggctccacggcttccacgtgcacgctcttggtgacaccaccaacggctgcatgtcaactggaccacacttcaaccctgctggtcatgtgcatggggcaccagaagatgaaatccgccatgctggtgatcttggaaatgtgacagctggagcggatggtgttgctaacattaatgttactgactgccatatcctccttactggaccaaattcaattgttggccgtgctgttgt

SEQ ID NO: 438790 - DNA, 328 bp, Triticum aestivum
ctgcgccggaggggccagggcgtcgggatcctcgtctccaagcaccccaaggacaccagcgcctccttctcgctgcaggagccggccgaggtcatggagttcctgctccgcctcgtcgagtggaagcagctctccagggcgcgcctcaggctgcggcgtcaggccgacgcctgatccaacggccggactaattaattcactacgtgtagcttaattagctagttaatgaatcccctgctcatccgaacaaagccaaaggctacgtacgtggatgggaagaaggaacgtactatggcgaacctgtggctgtggagcattgttgcgccac

SEQ ID NO: 438791 - DNA, 407 bp, Triticum aestivum
caattaaaccgcccacgcgcagccgcagctataaccccgcatcgtccaagatccggccggcggcacaagaagcggcagcagcggagacaatggcggcggtgaagcgcgcctacctcgccgtctacaactgggccgtcttcttcggatgggcgcaggtgctctacttcgccgtggaggcgctgctccggtcggggcacgaggacgtgtacgccgccgtcgagaggccgctccagctcgcgcagaccgccgtcgtcctcgagatcctccacggcctcgtcggcctggtgaggtcgccggtgtcggccacgctgccgcagatcgggtcgcgcctcttcgtcacctggggcatcctttggagctttcccgagaccaggacacacatcctggtgagcttcttggtcattagc

SEQ ID NO: 438792 - DNA, 290 bp, Triticum aestivum
atccctgcgatattggaaattccatccaaggaccatccatatgatccagcgagtgactcggtcctttctcgtgtgaagtatctgttttctgctgactcggttgcttctgataggcgttgagtagcaaccttgttgataactggggcatcacactttgattgagttcttcgtggacttgctccgtgtatctgtattaaattattcataccattctgttgtgggcgcaccaataaggagtaaacaatttggattgcaccaacgggttaatgtaataaattcttacttttttt

SEQ ID NO: 438793 - DNA, 287 bp, Triticum aestivum
gggatcgagagtctttctcgccgcggccgtggtggccgtggccgtggcggcggcgggggcggacgtggcggcggacgtggcggcggaccgggcggagtgctcggacaagctggtggcgctggcgacgtgcctgacgttcgtacaggggcaggggcaggcgccgactccggactgctgcggggggctgaagacggtgctgcagaccagccccaagtgcctgtgcgtgctcgtcaaggaccgtgacgaccccggtctggacttgaagctcaacgtcaccagggcgctcg

SEQ ID NO: 438794 - DNA, 406 bp, Triticum aestivum
cttacgcgtccgcggcctcatctcctcccggaagaccgctgtggccattgacatattgaagctcatgtcctcgacattcttggtcgccttgtgccaggccatcgacctccgccatcttgaggagaatataaaggaagccgtcaagagttgtgtgaagatggcagccaggaaaacactgagcaccaacaacaatggccatctccacaacgcacgcttctgcgagaaggacctgctgctcacgattgaccgcgaggcggtgttcgcgtatgcagatgacccttgcagcgctaactacccactaatgcagaagatgcgtgcggttctcgtggagcacgccttggccaatggtgaggccgagcgcaacgtggagacatctgtatttgccaagcttgccgcgtttgagcag

SEQ ID NO: 438795 - DNA, 344 bp, Triticum aestivum
cttatgcgtccggtcgacgagtggggaggaaagggtggtcatcttgacaaccaactaggaggagcgtctcgacccggcactcctgcggcctggcaggatggacatgcacatacacatggggtactgcaccacggaggccttccggatccttgccaacaactaccattccgtcgactaccatgccacctatccagagatcgaggcgctgatccaggaggtgacggtgacgcctgcagaggtcgccgaggttctgatgaggaacgacgacactgatgttgccctccatgatcttgtcaagctcctagagttaaagaagaaagaggccactgagatcaagactgaaa

SEQ ID NO: 438796 - DNA, 380 bp, Triticum aestivum
gaatatggctcgtcgccgacgtcggcaaaacggccggggggaggttgaagagcttgagggagtgggagaaggccccctacgtggccaaggccaacaagctcaagggcgagtacaacaaggccattgccgcctacaacaagggcgagagtgctgctgctgctgccccaaagaaggcggcggccaaggaggtagaggaggacgatgaggaggaatccgacaagtccaagtcggagatcaatgatgacgatgacgatgagggtagcgacgaggacgaggacgatgacgagtgaagctgacaatgcgggagctgctgtgcgagaagcgacctgagctgtgtgcggtggtgtcataaggagcctatccatctccactagaattat

SEQ ID NO: 438797 - DNA, 392 bp, Triticum aestivum
aggttgttcgtctcaaacttccttgtccagggtctggagaaggtgttcagctacagcgagatcctcaaagacctcaagaaagagttttgctgcaatggtacagttgtccaggacacagaacttggacaggtcattcaactccagggtgatcagaggaagaacgtctcaaacttccttgtccaggccggcattgtgaagaaggaacacatcaagattcatggtttctgagcaactgccagctccatatcagagtctacatgcaaagcagctatatattggtggtgcagtatatttagttgtgtgctagcgctagcaggcgttaccagcttgcgcgctctgagtatacagaaaatctagcatagcccacctttctgcgtgtatgcttggtaccg

SEQ ID NO: 438798 - DNA, 503 bp, Triticum aestivum
tttattctttgacggtttacggcgatggcaagcggaggaggagtttccaatacgttggtgatttggttgaggggttgatgaggctgatggaaggtgaccacatagggccattcaacttgggtaaccctggtgagttcaccatgctggagctggccaaggttgtccaggacaccatcgacccgaatgcacggatcgagttccgtgagaacacccaggacgacccgcacaagcgcaagccagacatcaccaaggccaaggagcagctcgggtgggagccgaagatcgccctccgtgacggtcttcccctcatggtcactgacttccgcaagcggatcttcggcgaccaagatagcgccaccaccgccaccgaaggccagtaaagagtagaccggagtactatactttgaaattttggtggcctgcttctagcttgcttcttggttaatccccccactgacagagctatggccacgtagtcgtcgtcgagagttttactgctaaat

SEQ ID NO: 438799 - DNA, 313 bp, Triticum aestivum
gtgaggagctgacgctggtgggatactggtcgagcccgttcgcgctgcgcgcgcgcttcgccctcaacctcaagggcctcccctacgcgtacgtggaggaggtgggcctcttcgacggcaagagcccgctcctcctcgcctccaaccccgtgcacaagagggtgccggtgctcatccacaacggcaagcccgtccccgagtcgcagctcatcgtgcagtacgtcgaagaggctttcccggccagctccccgcgctttctccctcccgacccgcacgagcgcgccgtcgctcgcttctgggcctcctacgtcga

SEQ ID NO: 438800 - DNA, 473 bp, Triticum aestivum
cgtccgcccacgcgtccgaaagctgcgggggcgctctcataggaggggggtgagcatcggaaccaagccgccgacgccaccatgggtatctcgcgtgactccatgcacaagcgccgggccaccggagggaagcagaaggcttggaggaagaagcgaaagtatgagctcggccgtcagccagccaacactaagctttcaagcaacaagacagtgaggagggttcgtgttcgcggaggtaacgtgaagtggagggctctccgtcttgacactggtaacttctcatggggtagtgaggctgtgacccgcaagacccgtctcctggatgtggtttacaattcgtcaaacaatgagcttgtgaggactcagacccttgtcaagaatgccattgtgcaagctgatgctgcccccttcaagcagtggtacctgactcattatggagtcgaaatcggtaggaagaagaaagctgctgcagc

SEQ ID NO: 438801 - DNA, 453 bp, Triticum aestivum
cccttgttatcgtccacgcgtccgggcaaggtccgggggggtatgttccaggccaggaggggtaatatctgcgccaatcacctagtgatctcgaccacgaagatgcaggaacacgccggcagcgacaagtcctgtgtctggcacgcggcagactctgctgacggagaacttaaggatgagatgtttgccatccggtttggcaccgttgagaattgcaagaagtttaaagacttagttgatgagatcgctgagtcgcttgcaaagaatgaaggcggtgaaagcgaagaaggttcttccgcagctggactgctggagaaacttagtgtaagcgaaagcaaacctgaggaaagcgcatctaaggaggaatcaactgatgctagcaaggagacagaaaccaaagccgcgacagccccctcagagtagtgggcagagcaacgcccgtcacaatggtac

SEQ ID NO: 438802 - DNA, 367 bp, Triticum aestivum
ccctcgcttccggtttattcgaagcgatatggagcggtgggtatcatgtctgatgttgatagttatggaatgatggttctcgagatggttggtgcaagggataagaatatcagtccaaatactgaatctagcagccaatatttccctcaatggatttatgaacatctagatgaatattgtgttagtgcttctgagattaatggagaaatcacggaggttgtgaggaagatgatagtggttgggctgtggtgcattcagttacgttctacagatcgtccaacaatgactagagtcgtcgagatgcttgaagggagcacaactggccttgaattgccaccaaaagtgctcttgagttgataggtttata

SEQ ID NO: 438803 - DNA, 379 bp, Triticum aestivum
cgcttcttgaccccgcaccaaccagcgcccagccgggggcggttaaggagacggagcagcctcagccatgggtcgcgtccgcaccaagaccgtgaagaagacctcccgccaggtcatcgagaagtactactctcggatgaccctcgacttccacaccaacaagaaggtgctcgaggaggtctccatcctccagtcgaagcgcctccgcaacaaggtggccggcttcaccacccatctgatgcgccgcatccagcgcggccccgtgcgcggcatctccctcaagctgcaggaggaggagcgtgagcgccgcatggacttcgtgccggagaagtcggcgctcgaggtcgacgagatccgcgtcgacaaggagaccatggac

SEQ ID NO: 438804 - DNA, 456 bp, Triticum aestivum
ttttcatggtgggattaggaaaggaagcggttgcaggtattgttgcagtacaggggcggcttcaaaaattgacattacaacgcctgattgcgatggttgaggccgagagaacttatcatcagaaagtcctggagatccttgaccatttggaagaagaaatggtgtctgagcgccaaaaaatcgaagcacctccaccccctgcagcagagagttttatgtcaccgccaccaccatcatatgacgaagttaatggcatgtttgcctccacttctgctgatcaggcagttaactctgtcgacttcttcctgggagaggcgctcgattccttcgaggctgagagtgagtttgagcttaacttatcagttggcgacatcgttatcgtccggaagatatcaagcaacggttgggcggaaggtgaatgcaagggaaaagcaggatggttcccacatgcttatg

SEQ ID NO: 438805 - DNA, 407 bp, Triticum aestivum
ttctctcgtccgggggttggcttctcctcccggtcgggttcgttttctggttcgggtcgggttcggttcgagagagaggccgagtagctagcctagtctagggtttcggtagagaggaagggagatccatggcggagacggagtaccgctgcttcgtgggcggcctcgcctgggccaccgacgacaacaacctccagcaggccttcagccagtacggcgagatcctcgacgccaagatcatcaacgaccgcgagacggggaggtcccgtgggttcggcttcgtcacgttcggcagcgaggagtcgatgcgccaggccatcgaggagatgaacggcaaggagctcgacgggcgcaacatcaccgtcaacgaggcccagtcccgccgctccggcggtgggggcggcggc

SEQ ID NO: 438806 - DNA, 282 bp, Triticum aestivum
gttcttatcttctgcagaagaaacagtggaaggatgggctccttaggttaaaggagaggtagaagagaggcaagtctgatatggatgcttatggctatgctagtatcgcaggtgaaaatgatcaggatcctcctccagaaaatgtttcagttcccttgcctgacatggtgctgcctccttcatttgattgtgacaatccgacataccgttaccgatttctggaaccaacctctactgtccttgcaaggcctgttctagatgcgcatgggtgggatcatgact

SEQ ID NO: 438807 - DNA, 203 bp, Triticum aestivum
gcctgcttatgatgtcataaccaagagccttattggggggtattttactttgctggatgtggattgttctgccttgaatcactgctgagcataggtgtcactcagcaagtgtacatgtacttccgtggaagtggaaaatcccaggagttgaaacaacaggcagcacgtggtgccctgagctctgcgttctgatgaagaaaatc

SEQ ID NO: 438808 - DNA, 360 bp, Triticum aestivum
  unsure (1)..(360): unsure at all n locations
actttctatcatggttgtcnaagaaatatttcctgtagttttacaaatttgaggggacagggtttacaggagggcttaactactacagatgcatggacttgaattgggagctttctgcaccatggactggagaaccaataaaagtagcaacaaaattcatcgatggggaccttgacgttacatacaatgtaccgggagtgaaagactacattcacaagggtggcttgaaagcgagcgtgccgaatctggaggatgtggttgtcatggagggagtgagtcacttctgcaaccaggagaagcctaatgaggtttcagattacatctgcgagttcttcagcaagttctgattatatcaagaga

SEQ ID NO: 438809 - DNA, 380 bp, Triticum aestivum
ttcattcgtccgtccctgcctccagcaaactcgggcgtctcaccaccggagctgccaaccccacccgaagcggcagccatggcccccaaggcagacaagaagcccgtcgccgagaacatggtcgagaaggcggcggagaagacccccgcgggcaagaagcccaaggccgagaagcggctgccggcgggcaagacggcgtccaaggaggccggcggcgaggggaagacccggggcaggaagaagggcagcaaggccaagaagggcgtggagacgtacaagatctacatcttcaaggtgctgaagcaggtccaccccgacatcggcatctcctccaaggccatgtccatcatgaactccttcatcaacgacatcttcgagaa

SEQ ID NO: 438810 - DNA, 345 bp, Triticum aestivum
caattcttatcagaaatctcaagcttagcacagcagcggggcttcttaacagaccttggggatgatcaaacctgatggcgtccagaggggcctcatcggtgaggtcatcatccgcttcgagaagaagggcttctacctcaaaggtctgaagctccataacgtggagaagtcgatcttcgagcaggactacaccgatctgtcctccaagcccttcttcgctgggctcgtggagtacatcttctccggccctgtcgtcgctattgtctgggagggcaagagcgtcgtctccactggacgcacgataattggcgccaccaaccccctggcctttgagcccggcaccat

SEQ ID NO: 438811 - DNA, 409 bp, Triticum aestivum
gggccagcactcaccctcccatccctgggctcctgtcgcaaccccaccggcgccgccatggtgaagtactcgagggatccgtccaacccgaccaagtcggccaaggcctgtggcaaggatctcagggtccacttcaagaacacacgcgagacagcgtttgctcttcgcaggatgcctttgggcaaggctaagaggtaccttgaggatgttctcgcccacaagcaagcgattcccttccggagatactgcagaggtgtgggtcgtactgcgcaagtaaagaaccgccagccaaatgggcagggtcgctggcctgcaaagtcagcccagttcgtgttggatttgctgaagaatgctgagagtaacgctgaggttaaaggcttggacgtcgacaacctctacatttcacaca

SEQ ID NO: 438812 - DNA, 353 bp, Triticum aestivum
cggtcggtcaagaacaattctctcctagggcgccttgttgacctcctttggtgggggtgaatcctatcttggattggtcatacagggatgtttggtctttcctcttaacctgtcaggtcaaatactgcagcctttatgatgaggggtatacatccattgggagcatatatgatactgttccaaatgcacttcttagtgattcatctactgggaacagctttagaccggcatacatgctatcagatggaagacttgaaatagctgggagagcgaataacactagcaacaaaacggaaactaattctgttgcaagcaatggcatgaacaatgctgagggagagcaaatgatctca

SEQ ID NO: 438813 - DNA, 466 bp, Triticum aestivum
  unsure (1)..(466): unsure at all n locations
gtgactacaggggtgagaaggcgatgcanctgctggagagttttctgaaggtgaaggagtacgagctgctcaggaggaacttcagcgacaccggatgctttggcttcggtatccaggagcacatcgatctcggcatgaagtacgatccatctaccggcatctacggtatggacttctttgtggtgctcgagcgtgctgggtaccgcgtctcccgccgccgcaggtgcaaggcccgcgtcggtatccaccagagggtcaccaaggaggacgccatgaagtggttccaggtcaagtacgagggtgtcatcctcaacaagtcccatgcgagctaagaaggacgtagctctctttagaccttgagttaatgaagttcacctggttgctggatatgtatgttacctagaaaccgaaatgctttgtcagttttgcctgtactcaagctggatgatttctgtttgatctgcac

SEQ ID NO: 438814 - DNA, 250 bp, Triticum aestivum
gggtccacagatttggaggatgtcttgcaagtgcggatcaggctgcagctgcggttcacactgcaagtgcgggaagatgtaccctgatctgacggagcagggcagcgccgccgccgaggtcgccgccgtggtcgtcctcggcgtggcgcctgagaacaaggcgggacagttcgaggtggccgccgggcagtccggcgagggctgcagctgcggcgacaactgcaagtgcaacccctgcaactgttaagct

SEQ ID NO: 438815 - DNA, 499 bp, Triticum aestivum
  unsure (1)..(499): unsure at all n locations
tccattcgtccgcttgctctgaatcgcgagagagagggggggatagagagagagagaggtgttaggtgcagctagctaggagcaagcaagcagatccaggaggagcggagatggcggactgggggccggtggtggtcgcgacggtgctgttcgtgctgctgacgccggggctgctgttccagctgccggcgcagggccggatcgtggccttcggcagcatgcacaccggcggcctcgccatcctcgtccacgccgtcatctacttcgccctcatcaccatcttcctcatcgccatcggggtccacatctacgccggctagaccccccccactcttcttcgccgcacatcgcttctcggctctgccgcgcgttattaagctttgttgcctgccgagcttgtctgtctcttactactattattngtgatgtactgtgtgtgtagtagcttctgttgtcttctttggttgatcggagaaacaatcggaagctagtagtatat

SEQ ID NO: 438816 - DNA, 377 bp, Triticum aestivum
gaagttttctcctcgaatcttcactttccatctcgggggggcgttatctgaaacaaagcggggatcttgccagccagccagcggccatgtcgtcctcgtcggacaaccccaacacggtcaccgaccgcggcctcttcagcaagagcagcaaggacgacggcgccgacaagaagaagaagcaggaggagaagaaagaggatggggaggagggcggcagcggcttcatcgacaaggtcaaggacttcatccacgacatcggggagaagatcgaggaggcggtggggttcggcaagcccagcgccgacgtggcccggatccacgtgccccacattggcctccaccgcgccgacctcgtcgtcgacgtgctcatcaagaac

SEQ ID NO: 438817 - DNA, 433 bp, Triticum aestivum
  unsure (1)..(433): unsure at all n locations
acatgccgacgaggtcgttgaggaaaggagttctgttgatgaaataattgtgggtgaaaggcacaaagaacacaagtgcggtttccattatactcagaggagcaaatgacttcatgctagacgagattgaacggtctttgcacgatgcactctgcattgtgaagagaactttggaatccaatacggtagttgctggtggtggtgctgtagaaactgcattatctgtgtacctggagaatcttgctacaactcttggatccagggaacaactggcaattgctgaatttgcagaatctttgttgatcataccaaaggtccttgctgttaatgccgcanaagatgcaactgaccttgttgcaaagcttaagtcatgtcatcataaagctcaaacaaatgctgataagcagcacttatcaagcatgggtcttgatct

SEQ ID NO: 438818 - DNA, 296 bp, Triticum aestivum
  unsure (1)..(296): unsure at all n locations
gtccttaactccagatcagctacttgatcattggaggggtgcttagtgatcactcggcagctaatggcaggaaagacatccatcgcgctgtttctcgccgtgaacctggtcgtgttctccgtggccagcgcgtgcggnggaaactgcccgaccccgtccacgcccaccccatcgacgcccaccccgaccccagcctcgctccgcaggtgcccacgcgacgcgctgaaggtgggcgcatgtgtcaacgcgctgaacctggtcaaggcgcaggtgggcaggccgaccgcgttgccgtg

SEQ ID NO: 438819 - DNA, 303 bp, Triticum aestivum
cgaggagaaaggtggaatcaagaccggggggtttttctaaacaagtgtccggggagtgtatgccgtcagcgacgtggccaccttcccgatgaagatctacaacgacgagaggcgagtggagcacgtcgaccattccaggaagtccgcggagcaggctgtgaaggcaatcaaggggaaagaggcggggtctgccgtggaggagtacgactacctggcctacttctactcgcggtcgatcgacctgtcgtggcaggtctacagggacaacgtcggcgacgccatcctgttcggcgacaccgaccc

SEQ ID NO: 438820 - DNA, 456 bp, Triticum aestivum
ttttctgcgcgacgaggcgcagcgggcgcacgtgggccggatgaaggagcggtgcgagcgcaccaaggcggcctgggcgctcccgctccgcccctacggcttctggaccttcgaccgcttcaactcccagctctcctgggacccccagatcagccaggccgccggccgccgcgacccctacgacgacctcctcgcccgccacgccggccccgccccgccctcctcctcctgagaaccgaatccggcatcaaccgcgaggaagtgtggttgccccggatctacgcgggcagcaataaggaactcatttccctcaaaatgactgtgattgcattcccttctggttcatttttatccttgaactgccccagttggttcatctgctgagtggttactttgacaaacttcctgttcggcaagatacctgaaatgctttgtatctgttgattttcagtcttt

SEQ ID NO: 438821 - DNA, 498 bp, Triticum aestivum
tttatgcgtccgcccacgcgtccggtctacttcggcgcgtggtgtgcgctgaacgtgatcttcaacatatacaataagaaggtgctgaatgcgttcccgtacccgtggctcacgtcgaccttgtccctggcagccggctccgccatcatgctcgtgtcctgggccaccaggatcgccgaggcgccccagacggacctcgatttctggaaggctctctctccggtggcgattgcgcacacgatcgggcacgtggcggcgacggtgagcatggcgaaggtggccgtgtcgttcacgcacatcatcaagagcgcggagccggcgttcagcgttttcgtctcaaggttcttcctcggcgagcacttcccgttgccggtctacttctccctcctcccgatcataggtggatgcgctctcgcggccgtcaccgagctcaatttcaacatgattggattcatgggggcgatgatctccaacctggcgttcgtgttccggaacata

SEQ ID NO: 438822 - DNA, 371 bp, Triticum aestivum; identical to SEQ ID NO: 436151

SEQ ID NO: 438823 - DNA, 344 bp, Triticum aestivum
cttacccatacagaaatctcaagcttagcacaggaccagggcgtttgagcagaccttggtgattatcaagcctgatggcgtccagaggggcctgatcggtgaggtcatcatccgcttcgagaagaagggcttctacctcaaaggtgcgaagctccagaacgtggagacgtagttcgccgagcagcactacgccgatctgtcctccaagcccttcttagctgggctcgtggagtacatcgtctccggccctgtcgtcgctatggtctgggagggcaagagcgtcgtctccactggacgcaagataattggcgccaccaaccccctggcctctgagcccggcacca

SEQ ID NO: 438824 - DNA, 337 bp, Triticum aestivum
tttcgtttacgcgtccggctttatccaaacaagcaatcagtatcactattggcgggtgtatctccccaatttccacctatggtggcacacactatgacatcgatattttagtttggaaggaccgagcggggggcaattggtggctgcaagtgggaggtgattatgtggggtattggccatcatccatcttatcctacttggaagatagtgcttctaccatcatgtggggcggtgaggtattttcacccgatgccggacaaacttccacacatatgggtagtggacacttccccaatgaagggttcggcaaggcgagtcacatcaagaacattcaagt

SEQ ID NO: 438825 - DNA, 242 bp, Triticum aestivum
tttctcttgaaagggggatccctgctggtcttggtgttttgggaacaaaaagggttccataccccagtagatcgttcgaattagcccactgttctcgttgcaggattgattggcttcagagagatggaattcttatgcttgaactggacagattactcaggcctggaggttattttgcttattcatctcctgaggcatacgcacaggatgaggaggaccgtagaatctggaaagaaatgagt

SEQ ID NO: 438826 - DNA, 332 bp, Triticum aestivum
ctttagcttacgaaggcggcgccgcggcgacctcatctccggccaagggaaatgactaccgttccggggtctctggtgtgggagctcgtgaagaaaaacaactgcttcttgatcaagcagttcggcaacagcaacgccaaggtgcagttcagcaaggagccaaacaacctctacaatgtccactcctacaagttctctggcttggcgaacagcaagaccgtggcggtccagccatcagcgggagaggacaaggctgtcgtcctgtccacgaccaagaccaagaagcagaacacccctgccaagctccagcacaagactctgatgcgcaagga

SEQ ID NO: 438827 - DNA, 327 bp, Triticum aestivum
acggtcagcttctaacgagtgccccgcgagcacgacctgctgctgcatctacgagtacggcaaggagtgcttcgcctggggctgttgcccactcgagggtgctacctgctgcgatgatcactacagctgctgccctcataactatcccatctgcaacacccagcagggaacctgccttgcggccaaggacagtccactgtcagtgaaggctcagaggcgtaccctggccaagcctatcggtgctttctctgtcattgcaactgacggcaagaaaagtagcgcgtaaacatttgcatcaccacaatcctacagccaacggccatggtg

SEQ ID NO: 438828 - DNA, 379 bp, Triticum aestivum
cttagcttcagatcagctacttgatctgtgcttactgagcactcggcagcaatggctggcaaggcatcgatcgcgctgttcctcgccgtgaacctggtcgtcttctccgtggccagcgcgtgcgggggaaactgcccgaccccgtcgacgcccaccccatcgacgcccaccccgaccccgggctcgctcggcaggtgcccacgcgacgcgctgaaggtgggcgcgtgcgtcaacgcgctgaacctggtcaaggtccaggtgggcaggccgaccgcgttgccgtgctgcccgctggtggatgggctcgtcgacgtcgaggcggccctgtgcctctgcacggtgatcaatgccagcgtcctcagcatcgtcaagctcaacc

SEQ ID NO: 438829 - DNA, 497 bp, Triticum aestivum
tttcggtctagtcgtcgaggcaacaaggtccggagggggacaccaactccaactccatggctgccgcctccgaggtctctgtggactggaggggcaggccttgcaggcctcaaaggcatggaggcatgaaagctgctgtgtttgtcctagggatccaggcgtttgagatcatggcgattgcggcggtggggaacaacctcatcacctacgtgttcaacgagatgcacttcccgctgtccaagtcggccaacatcgtcaccaacttcatcggcaccatgttcctcctctccctgctcggcggcttcctctccgactcctacctgggcagcttctggaccatgctcatcttcggcttcgtcgagctctccgtaagccaccgtaaaaccagcaaaaaaaaggatcatttcttttgtttttctaccaaaactatcaaaggcacgggaaaaaattcatgcagggaaaggctagtgcgtgcgactttaaagttttactgactg

SEQ ID NO: 438830 - DNA, 436 bp, Triticum aestivum
ttctgacgctgctcccggggacgaccccgtggggggatcagcgccgccggcgggggcggccaacgtgagggtgaaggtgctgttcttcgcccgcgcgcgggatctgacgggcgtcgcggagtcctccgtggaggtgccctccgggagcaccgcgggggagtgcctcggccgggtgctggcctcgttccccaagctggacgagatccgccgctccatggtgctcgcgctcaacgaggagtacgcgcccgagtccgcccccgtcgccgacggggacgagctcgccatcatcccgccgatcagcggcggctgaccgaggctgaaaatgaagaaaaagggagaaagaaagaaaggtcttcctctttcttcagtacttgtctttgcttcttgatcaatgggcacgttgaatcatagtaataaagttgcgatgttcgctggc

SEQ ID NO: 438831 - DNA, 314 bp, Triticum aestivum
acgcttatgatggaatgttgcttctatactgagcttggatgagaacatggaccgcgatgtcaagttcttcacagagacagaggagaacaaccagatgcgtggcccaaggactgctgtcccgtattttctctgacttgagttgtacaattttagaagtcgctgttttaatgtgtaagggttaaagatggaccggaggtggttattgatgtagggttcagatgatagtccaatctgatgcgttttatttctggctgttctttttaaccacatgtacaatagatcgctgggagcatcattgctcctgtattccttct

SEQ ID NO: 438832 - DNA, 402 bp, Triticum aestivum
  unsure (1)..(402): unsure at all n locations
acggtttgcattctgtttgctgtggattgcagccgtgttccagtcgcttctgtacgaggtggcggggcgaacgatcaacccggtgagcggcgcggtggggctgctctgggcgggaagctggcacctgtgcgaggcggcggtccagaccgtgctccggggcggcgccatccgcccgctgccggagctcgcgggcggcgtcccggaaggcggagtcggtggaagcgatctgttcgcctcctcttccaggcgggccgtggtggggtgctccacgtattcggcggcgaagcgggtgacgccgaggaagacatgggcgccggaggcagcgtcccaccaccaggagccctcgtgcgacctgnggcttttcctcacccccggatcggccgcggcggcagagggggagcg

SEQ ID NO: 438833 - DNA, 348 bp, Triticum aestivum
gttaaggtttctcgcaaacccttcgatgaagcaggccgtgctgttcccccagccagctcaagcaggagatgcattccatcagatactgaacgggctcgctcgcaagcttccgcatggcgaagatgtcttcttgaagcccggccaggtccgtctgaactggaccgctggcccggtgggtgacctgaagccgtggtagcatctctcgcatcgcggtttggagatgtataaaaacctttttgaaaataaacattttcagacctgatatactttgcgcctttataccaccatggttgcacagtgctgaccataagtcaaatgtacatctttttcatcttctttgctgatagc

SEQ ID NO: 438834 - DNA, 379 bp, Triticum aestivum
tggcactccctaagctcctcctgcttctcttcgtcggcggtgcactgtcactcaccttcttctccggttcagaggccggcgaggtgggcgtgtgctacgggatgatgggcgacaacctgccgcagccgccggcggtggtgcagctgctgaagcagcacggcatcacgatggtgaggctgtacgacgccgacgccggagggctgcgcgcgctggccaacaccggcatcaaggtggagggtgtccctgcccaacgacaacataccggacgcggcgagcagcatgtcgtacgcggtgcggtgggtgcagagcaacgtgcaggcgtacccgggcacgtggatcgacagcgtggccgtcgggaacgaggtgttccaccaggcgc

SEQ ID NO: 438835 - DNA, 348 bp, Triticum aestivum
tttcgctcgacccggcgaccaaccccgcgatccggcgagcccgatatggggttcctggcgacctccgccatcttcttcctcgccggcttcatcgcatgcctcttctcgctcctctgctgcaaccgcggcgcctccaccaacatattccatttgaccctggtcattaccgctacagtttgttgttggatgatgtgggcaatcgtgtacctcgcccagatgaagcctttgatcaaccccatcctgagcggcgagtgagccccgatctgccccgaagacaacttaagatccactgttgatgtatcattattcggttgagaacctctattcattttgttgccataactgaaa

SEQ ID NO: 438836 - DNA, 330 bp, Triticum aestivum
ctcggtcgtggctgctgctggcgtgggtgagcggggtggctggcaacctttcgctgctggggtcggcggcgaacctgatcgtgtgcgagcaggcgcgccgggcgccgcgcaacgcctacgagctcaccttctggaaccacctcatcttcggcgtgccctccaccctcatcgtcaccggcgtcggcatccccctcatcggaaagatgtagccaccctatccatctaccaacatcgccctcgccaccgtcgaccgacgatccaactatatgcaatatacactttccttatatataccagcagcctgtacatatgtacgtgcatacacaagcg

SEQ ID NO: 438837 - DNA, 478 bp, Triticum aestivum
gtatgatggaggcaccggccgctttgggtgcgggacagatctgttcccaattgatcatgggctgtgcttgccggagaacttggaggacccttatttcgagtggatacactgggcgcaggcgtcaattccgttctccgaggaagagctcgagtacataagcaaacttgatccgatgagggatgctgcaatgctgcggggagaactgcccatgatacgggaggcttgcctccgagtccttatcctgtgcacaatcttcctcaaggaagctgctgctttcgggctttgcttggcagagataggggagatgatgaccagggaattcagaggaatggaggaggaacccagcaaactggaggttgtgtgcatggaagccaggaggaaagtagacgaatgggaacccttctcccctagtgttgaagaggacatggatttccagttctcgatggatgtgttaggagggtacagtgatgtgattcga

SEQ ID NO: 438838 - DNA, 378 bp, Triticum aestivum
ttacgcttccggcccccaatcgagccgagctcctcgcgattcccaatccccgcacgcctcctcgccctcctcctccggccccgccgccgccgccgcctcgccacaggctcacggttattcaagatggaacacaaggaggcgggttgccagcagccggagggcccaatcctatgcgttaataactgtggcttctttggcagtgcggcgaccatgaacatgtgctccaagtgccacaaggagatggtcatgaagcaggaacaggccaagctggctgcctcctccttcgatagcatcgtcaacggtggcgacggtgggaaagcacctgttgttgcggctgtagccgcgagcgcagaggtggtggttgctcaagttgacgtg

SEQ ID NO: 438839 - DNA, 434 bp, Triticum aestivum
ttttaaccgcaccttggccgaccacaacatctggaaggagtccaccattctccttgtcctccgcccgtgtagtacaataggaggtacgatgcccatcttcgtgaagacactattaggaaagacccacactcttgaggttgggagcttggacaccatcgagagtgtcaaggtgaagatctatgagaaggagggcactcgcccgatacagcagcgcctcatctttgctggcaagcagctggaggacgggcgcacgctggcagactacaacattcagagggagtctacccttcatttggtgctctgcctttgtggttgctgagatgcatggccattcaacaaccagttttattttgctgcagtcctccttgcagtagttgtgtgttgccaataaaactatcattctagtactactctgaattaagaatccctggctc

SEQ ID NO: 438840 - DNA, 426 bp, Triticum aestivum
tgttgagttgaaggcagctggcgcttcatggattcagtgtgatgagcccacccttgttcaggaccttgaatcccaccaattatctgcattctctgcagcttacgcagaacttgagtccgcactttctggattgaacgttcttgttgagacctacttcgctgacgttcccgcagactcgtacaagactcttacatcattgagcagtgtgactgcttatggttttgaccttgaacgtggaaccaagactcttgagcttgtcaagagtggtttccctgctggaaagtacctctttgctggtgtcgcagatggacgcaacatttgggctgatgaccttgctgcatctctcgccactcttcagtctcttgaggctgttgctgggaaggacaagcttgacgtatcgacttcctgctcactcatgcacactgc

SEQ ID NO: 438841 - DNA, 304 bp, Triticum aestivum
tcgctttatcatccctgataccaaagctcatcttcttctccttgaaatctttttgggtccacagatttggaggatgtcttgcaactgcggatcaagctgcagctgcggctcagactgcaagtgcgggaagatgtaccctgatctgacggagcagggcagcgccgccgccgaggtcgccgccgtggtcgtcctcggcgtggcgcctgagaacaaggcgggacagttcgaggtggccgccgggcagtccggcgagggctgcagctgcggcgacaactgcaagtgcaacccctgcaactgttaagct

SEQ ID NO: 438842 - DNA, 381 bp, Triticum aestivum
gttacttgcgcctaccactgaggagtgaggctgccacgcccattcgctagctagctagagacccatagtacaaacaataatagagcaactgagcacaccaggacacagtcggtgaagtactgtgacagtgagctaggttcaggtcatcacaaacgcctcatctccaagccgagcaccctcgccatgagcacggacgcggacgccgtgccggtggccgtggcgccggcgaagcgccctcccatcaacaagtacgccttcgcctgcgccctcctcgcctccatgaactccgtcctcctcggatacgacatctcggtgatgagcggcgcgcagctgttcatgaaggaggacctgaagatcacggacacacagatcgagatcctg

SEQ ID NO: 438843 - DNA, 357 bp, Triticum aestivum
tttcgtttacgcgtgggcggacgcgtgggtggaactgtgcctgttggccgtgttgagactggtgtcatcaagcctggtatggttgttacctttggtcccactggtctgacaactgaggtcaagtccgttgagatgcaccatgagtctctcctggaggcgcttcctggtgacaacgttggcttcaacgtcaagaacgttgccgtgaaggatctgaagcgtgggtttgttgcatccaactccaaggatgaccctgccaaggaggcagccaacttcacctcccaggtcatcatcatgaaccaccctggtcagattggcaacggctacgccccagtgctggactgccacacctcacacatt

SEQ ID NO: 438844 - DNA, 360 bp, Triticum aestivum
ttctaggctgagcaaggacgacattgagaagatggtccaggatgcagagaagtacaagtctgaggatgaggagcacaagaagaaggttgatgccaagaactccctggagaactacgcctacaacatgaggaacaccatccaggacgagaagattgcctccaagctgcctgctgacgacaagaagaagattgaggatgctgtcgacgccgcgatccagtggcttgacgccaaccagcttggtgaggttgacgagtttgaggacaagatgaaggagctggagggcctctgcaaccccatcatcgccaagatgtaccagggtgccggtgctgacatgcccggaggcatggacgaggacgcgcc

SEQ ID NO: 438845 - DNA, 395 bp, Triticum aestivum
acggttacgctttcattcagggaacaagccgtcctgctcattgtcacgttctatgggacgagaacaaattcactgctgatgagttgcaaactctaacaaacaacttgtgctacacgtatgctaggtgcacccgctctgtatcaattgtgcccccggcatattatgctcatttggcagccttccgggctcggttttacatggaaccggatacctctgacagtgggtccatggcaagcggtgcccgtggccctacacagggtggacgcaataccaggccgtttgggaacgttgctgtcaggcccctccccgccctgaaagaaaacgtgaagcgggtcatgttttactgttaaggtcggatggtcattgtttacactattatgcaaacctgaagatat

SEQ ID NO: 438846 - DNA, 438 bp, Triticum aestivum
cttacgcgtccggacacatcgccccaaagtaggtcgaatctaagcgatggcgtctcgtctgcttgcggcggcctcctcctcctcctcgtcttcctcccccctcgctcgcctcatctccagccgccgtatggccggcgccgcagatcaccacggatcgacaaaggtgaacatgtggcaggagcccttgaaccccggcaactggaaggaagagcactttgtgctaaccagcttagcgatgtggggcgctattatatatggtggattgaaggtgtttggcgggaaaaaagaagtgaaaaccgaggcggggtcagcgccagcagcagcaccggcacattaaacttcatccgagctttattttcttaccgcaatctgttttaagtatgttgttgacgataaattgagaccaagtttgtaaggctggcaaggttaaggagctgc

SEQ ID NO: 438847 - DNA, 200 bp, Triticum aestivum
ttctcctcgcgtccggcctacgcatccagagctgcaagccctatgtgaggcgaggcgtggtgggtgaggccatggatcccgattcggtctcgaaggcgttcgtgcagcactactaccacacgttcgactccaaccgcgccgcgctggtggggctgtaccaggacggctccatgctcaccttcgagggcgagaagttcggc

SEQ ID NO: 438848 - DNA, 352 bp, Triticum aestivum
tttccctcgcgtccgcgcacccgcacagcccatgggcggcctcgctggagaagagagaagatggtgagagatggaggcggcggcggcggcggccggcgtgcagctgggcacctcgaagccgcagatcgcgacccaggcggagatggcggaggcgcgcctgccgatcccctaccgcgaccagtgcgcgcacctcctcatcccgctcaacaagtgccgcgtcgccgagttctacctcccctggaagggcgagcccgagcgccactcctacgagaagtgccagtacgagctcgtcatggagcggatgctccagatgcagaagatccgcgaggcgcatgcgggcgccaaggtcaag

SEQ ID NO: 438849 - DNA, 304 bp, Triticum aestivum
cattaattctgctcagaggaagctcctcgatgagcggggcatcccggctgaagatgtgcctgttgaccagttcacccctctcggtcggatgctttacaaggcaccatctgatgggaaatggggcgaacatgagctggactacctgctgttcatcgtgcgcgacgtgaagctggtcccgaacccggacgaagtggctgacgtgaagtacgtgagccgggagcaactgcgggagctcattcagcaggcggacaccggctagggcggcgtgaagctgtccccctggttcaggctggtggtggacaac

SEQ ID NO: 438850 - DNA, 325 bp, Triticum aestivum
ctttgcttgggcggacgcgtgggcggacgcgtgggccggttccaatgcccatcttgttcttcttgaaatctttttgggttcacagatttggaggatgtcttgcaactgtggatccggttgcagctgcggctcatactgcatgtgcgggaagatgtaccctgatctgacagagcagggcagcgccgacgcccaggtcgtcgtcgtggtcgtgctcggcgtggctcctgagaacaaggcggggcagttcgaggtggccgccgggcagtccggcgagggctgcagctgtggcgacaactgcaagtgcaacccctgcaactgttaagct

SEQ ID NO: 438851 - DNA, 276 bp, Triticum aestivum
ttggtttcctgctagggttttggtccttcgttttcggcggttcatgatgggggagagggtcatgggaaccgtgaagtggttcaacgtcaccaaggggttcggcttcatctccccggacgacggcggcgaggaccttttcgtccaccagtccgccatcaagtccgacggctaccgcagcctcaacgagaacgacgccgtcgagttcgagataatcaccggcgacgacggacgcaccaaggcctccgacgtcaccgcaccaggaggaggggcgctctc

SEQ ID NO: 438852 - DNA, 331 bp, Triticum aestivum
ccttcgctatcgcccacgcgtccgcccacgcgtgcgggggtcttcttcccactcaggcctgggttcccggcccggttcggttcgttagggtttagtagtggggaagaggaggaagaatggcggacgtcgagtaccgttgcttcgtcggcggtctcgactgggccaccgacgaccagtccctccagaacgccttctacaagtacggcgacatgatcgactccaagatcatcactgacagggagacgggccgttcccgcgggttcgggttcgtcaccttcgcgtcggacgaggtgatgcgccaggcgatcgaggccatgaacggccaggacct

SEQ ID NO: 438853 - DNA, 405 bp, Triticum aestivum
ttggtttatgctccagcctgagaagtttggattctacaagcagttacctagggcatgctgtggggctcctgggtccgttgccaaagccgcttacaacttcaacgtgacagccaaatgcggggagcctggtgccactgcttgtgctgacccaacgacccattggagctgggacggtattcacttgacggaggctgcttacggtcatatcgccaggggttggctatatggccctttcgcagaccaaccgattgttcagtcctcgtgagcattccacctctgctgttgcacttgtagagcgtctgagaatagcacactaaactggagaagggaaagtagttcttccatatagttccaatggttcatacgtgtatattttcatttgattgaattcattgcaagtggggt

SEQ ID NO: 438854 - DNA, 430 bp, Triticum aestivum
ttgcttttgcgtccgcccacgcgtccgcaaaagggcacactgcaccaccgcacacagatctaaccgaaacccacccccaccggcggcgagccgccgacgagccagccatccaagatgcagtacaacaacctgggacgggcgggcctccgcgttagccagctctcctacggcgcgtgggtgaccttcggcaaccagctcgacgtcaaggaggcgaaatccctcctccaggcctgccgggacgcgggggtcaacttcttcgacaacgcggaggtgtacgccaacgggcgcgccgaggagatcatggggcaggcgatccgggacctggggtggcgccgtgccgacgtggtcatctccaccaagctcttctggggcggccaggggcccaacgacaagggcctctcccgcaagcacgttgtcgagggcctgaaag

SEQ ID NO: 438855 - DNA, 404 bp, Triticum aestivum
tcgctttcctgcctcccccggagctcgttagggttttctgttttttcgggggagaaatctcaagaggcggcaccatgctcgtgtaccaggacaagctttccggcgatgagcttctgtcggattccttcccgtacagggagctggagaacggcgtgctctgggaagtcgatggccattgggtcgttcaaggagcagttgatgtggacattggagccaatccctctgctgagggtggtggtgacgatgagggtgtcgatgaccaggccgtgaaggtggttgacattgttgacaccttccgtcttcaggagcaacctgcttttgacaagaagcagtttatctctcacatgaagcgctacatcaagaacctcactgccaagcttgaaggggatgacctagatgttttc

SEQ ID NO: 438856 - DNA, 318 bp, Triticum aestivum
ttgccaaatatcaacagcaatgggagcatctgtcttgatatcttgaaggagcaatggagccctgcattgacagtttcaaaggtgctcctttcaatctgctctctactaacggacccaaaccccgacgacccgttggttccggagattgcacacatgtacaagagcgaccgtgcgaagtatgagtccacagcgaggagctggacccagaagtatgcaatgggctgaccctggagccgcgcttggaggatgatgttggggccatcttcgcttgttacacctaatgtatctttgttcctgttctgctgctgctatatggga

SEQ ID NO: 438857 - DNA, 403 bp, Triticum aestivum
tcgggtgaacatgcgtggcatctgcttcgaggtctgtgatgttgttctccacactgatgctattcacaggggtggtggtcaggtcattcccacggccaggagggtcatttatgcttctcagctgactgccaagccaaggctgctggagcctgtgtacctggttgaaatccaggccccggagaatgcgcttggtggcatctatggtgttctgaatcagaagagagggcacgtgttcgaggagatgcagaggcaaggtaccccgctctacaacatcaaggcctacctccccgtcatcgagtcctttgggttctcaagcaccctgagggctgcgacgtccggccaggccttcctccagtgtgtgtttgaccactgggacatcatgggcttcgatcctttggacccc

SEQ ID NO: 438858 - DNA, 456 bp, Triticum aestivum
ttgtttatccccaaatccccaaccccgactgacgacgagtggaactgttccggcgctttctgccggcgtcgaccatggcggcttccaactccggcggcatccccatcaaggcggaacaggattcggatggctcggcccagagcacagctgatatgactgcttttgtgcaaaatcttctagttcagatgcaaaccaggttccaaactatgtcagagaacatcattacaaagatagatgaaatgggtgcaagaatcgatgaattggagctgagcatcaatgacctcaaggctgaaatgggcagcgatggtatgacccctactaaagtgaaggacgaagaatcaaagccagcagacagctctgcctgatttaagcagaagtagcagaagcaagtcgtattaggcttggctccatgtcaatatcatcagccattcatcactaacttaatgcatgttatga

SEQ ID NO: 438859 - DNA, 373 bp, Triticum aestivum
ctcctccgccatgatggacctggatccccgcctctacgaggacgcctctgtcagcgataacgatgttcgcaacatagtgctatcttatcttatgcacaattgttttaaggagaccgcagagaccttcctatccagcactgggctaaagttacctgttgattatactgtagatgtggataaacgtaaagcgatcttaaattttgtggtggaaggggatgccgtgaaggccatagaactgacagaagagttggcgcccaacttgctagagaatgacatggatttacattttgatcttataagtcttcacttcattgagctaattcgttccagaaaatgcacagaagcacttgagtttggccagaaaaagttgaca

SEQ ID NO: 438860 - DNA, 464 bp, Triticum aestivum
gctgttatttcagcaggcgagcgagatggtgtttgggaagaaccagatgaccagggcctactccaagcggttccaagtgaagttcaagagaaggagacaggggaagaccgattacagggccaggctcaggctcactaaccaagataagaacaagtacaacacgcccaagtaccggtttgttgtacgatttaccaacaaagatgtcactgcgcaaattgtgtacgctaccattgctggtgatattgtgatggctgctgcctattcccatgagcttcctcggtatggtcttgaagttggcctcaccaattatgctgcagcgtactgcactggtctgcttttggcccgacgtgtgctcaagtgccgtgatttggatcaggaatatgagggcaatgttgaggccaccggggaggacttctctgttgagccagctgatgagaggaggcctttacgcgcgctcttggatg

SEQ ID NO: 438861 - DNA, 447 bp, Triticum aestivum
ccctttcgttcggaagagaaaggtcattttaagtttcttgggcgggcatgaagggatcccaggtgtgtgccccctaaaatcatatctgggcatcgatttactgctatcagtcaacaccagtccgctgttcgggattatctggaagcgtacaagctggactcggagaatcctctaatcaatctctgcgttggttcgtccttgatcaacctctccctgggcttcaggcttcagaacaagaaccagtgcatcgtccaggcgtttgcgttcctctacaagtgcctgcgcatcggcagcaacaggcaggaggccctgtacaacatagcccgggcttaccaccatgtcgggctcaaaaccctggcggccatctactacgagaaggttttagccatggaggtggaagatcaccccatacccaagcttccattcgaggaggattttcatgagcac

SEQ ID NO: 438862 - DNA, 316 bp, Triticum aestivum
caccaaagctcatcttcttctccttgaaatggttttgtgttcatcagatttggaggatgtcttgcaactgtggatccggttgcagctgcggctcaaactgcaagtgcgggaagatgtaccctgatctgacggagcagggcagtgccgcggtccaggtcgccgccatggtcgtcctcggcgtggcgcctgagaacaaggcggggcagttctaggtggccgacggccagtccggctagggctgcaactgctgcgacaactgcaagtgcaacccctgcaactgttaagctgcatgcactcgtgtgatggtgtgagagta

SEQ ID NO: 438863 - DNA, 400 bp, Triticum aestivum
cgcttctctattttcctctccatctcactcactctgtgcctgcgtcgttggcgcagcgttctccccgcgactccgatggccagcaagtgggtcaggcccgaggtgtacccgctgttcgcggcgacgggcgtggccatcggcatctgcgcctttagccttcttcgcaacatcaccggcaacccagaagtcagggtcaacaagatggggagggcagcgggagtgcttgagaaccatgaggagggcaggcgctacgccgagcacggcctcagagcctatgtgcaggacaagacccccgagatcatgccaggaatcaacaagtttttcaccagcccaaaatgaagcactttagtctgtctgtgactcgcaattagtaactgttgtggtcaagtgcaaacctatt

SEQ ID NO: 438864 - DNA, 342 bp, Triticum aestivum
tttgtgttggaggtgaccttcgtggacgatctggaatggccgttcgagttcttgcccgtggaaccaccccggagcgcctccatcatcgaggttcaccaagatgaggtgtgggaggtaccgcccggtggcaaggtgctggcctactccgacaagacgcgcgtggagatgttcgccgtcggcgacaacgccctcggcatccagggccacccggagtacaccaacgacatcctgctcaacctcaccaaccggctcgtcaacaacagcaccatcgacgggtgcgtgggcgaggactcgcggaggactgcggagagcggcgaaccggaccgcgagttctggagtggg

SEQ ID NO: 438865 - DNA, 173 bp, Triticum aestivum
tactgggacaaaatgtttgacggaggcctgaagagaattcatgagaagtacacctggacgctgcactcatagaggctgatgaccctgaccggtgtgtatggattctggaagtacgtgagcaacctatagaggcgtgagactagccgataccttgagatgttctactccctgaa

SEQ ID NO: 438866 - DNA, 351 bp, Triticum aestivum; identical to SEQ ID NO: 436168

SEQ ID NO: 438867 - DNA, 404 bp, Triticum aestivum
ttggctttctaccaccagaccgaccgcacagttgaagtgagatctgcgctaagggttcatcagcaaccatgaagagcaccaagctcgcggcgatcctgatcctccaggccgtcctggtcatggggatcctctcacacgtgaacgccgactatttccccaagtgctgcaacaactgcaggtccttctcgggggtcgacgtctgcgacgacgcccacccccagtgccccaagggctgctcggcctgccgcgtggtgacgccgagccctcacaagacgttccggtgcgccgacatgaagagcaccgtcgatggcacctgcggcgggccatgcaagaagcactgatccgttcagggcttcaggctcagacgaggtgtgccgtctaaaataaagctcagatgagatgag

SEQ ID NO: 438868 - DNA, 279 bp, Triticum aestivum
ttcttttcatggcatcttccaagagtagtcttgcaagggttgcactggccatagtcaggggcgtggtggctgacatctcggcgcagaacaccccgcaggactttggcaacctgcacaaccgcgcccgcgccgtggacggcgtcggccccggggcatgggacaacaacgtggccaggtttgcgcaggactgggcggcgcaacgcgccggcgattgccggctgcagcactccggcgggccgttcggcgagaacatcttctggggttcctggcagtcgtgga

SEQ ID NO: 438869 - DNA, 307 bp, Triticum aestivum
ctcttcttttggaggagatttttaagatactgctacctggggaacctttaatattgtgcgggggttctggggactggataagaagctggctcaaagaaagcatctcccatctgttaattgattcattttttactcaaaatactccacggacttggaaggatactatgaaaagattgatcctggctttatcgacatgagaacaaaagctcgtgaagtgttgcagagagaggatgacctaaacgaaattgtcacagcttgttggtaaagatgcactgcgagaatctgacaagattactttggagacagc

SEQ ID NO: 438870 - DNA, 410 bp, Triticum aestivum
ggtttttgccaacaggtaacgatggtgtccggctccggtgtgtccgcgcgtcgcgtggtggtggatgcgcgccaccacatgctgggtcgccttgcgtcgatcgtggccaaggagctgctcaacgggcagcgcgtagtggttgtccggtgcgaggagatgtgcatctccggcggactggtccgtcagaagatgaagtacctccgcttcctccgcaagcggatgaacaccaagccctcgcacggccccatccacttccgcgccccctcgcgcattttctggcgcaccgtgcgcggcatgatcccgcacaagacgccccgcggcgaggccgcgctcgccaggctcaaggctttcgagggcgttccgccgtcttacgatcgcaccaagcgtatggtcatccccgacgcgctcaa

SEQ ID NO: 438871 - DNA, 330 bp, Triticum aestivum
tctagtttggtgaggccgaagatgacgtggtcggccttgctccatatcttcgtgctggcactgctcgggcctgtgattgaccagaacttctactatgtgggtctcaagtacaccggcccgaccttcgcatgcgccatgagcaacatccttcccgccatgaccttcgtgatggccttcatcttcaggatggagaaggtggacctgagaaatttgcggtgccaggcgaaggtggcggggacggtggtgacggtggccggcgcgatgctgatgacgctctacaaaggcccgctgatgcggatggcgtggacgagccacggacaggcccacggc

SEQ ID NO: 438872 - DNA, 273 bp, Triticum aestivum
ttgtctttgcctcgcaccaaaacacaactaccaccaggggcagctgttcgactccggggaggcagagatgggctccaccgcaaccgacatggccgcctccgccgacgaggaggcgtgcatgtatgctctccagctcgtctcgtcgtcgatcctcccgatgacgctcaagaacgccatcgagctgggcctcctggagaccctggtggccgccggcggcaagctgctgacccccgccgaggtggccggcaagctcccgtccacggcgaaccccgc

SEQ ID NO: 438873 - DNA, 460 bp, Triticum aestivum
ctctgtcttcgcctccggcatcggcacggtgtcccaaggcgagctgatcaccgtgagatccagagccgccgccgccgccgcatctgctagcgcctcactcccttccggcctcccttcccgctgcaaagatggggaggataccgtctctgaagaacttcaatgcgtttccgcacgccgaagaccacctgctgaagaagacttactcgggtgctatagtgacgattctcgggctaattgttatggttacacttttcgcgcatgagctcacgttttaccttacaacctatacgatgcatcagatgtctgtagatctgaaacgaggagaaactctaccaattcatataaatgtatcatttccatctttaccatgtgaagtcttgagtgtggatgcaatcgacatgtccggcaaacatgaggttgacttgcatacaaatatctggaagctccgtttggataagta

SEQ ID NO: 438874 - DNA, 438 bp, Triticum aestivum; identical to SEQ ID NO: 436170

SEQ ID NO: 438875 - DNA, 414 bp, Triticum aestivum
gccttctgtggtttccgccgcgatctcgtctcgatccgcactctctatctgagatttggaatcgggcgaggcctgcagctcctgccgacatggcgctcgttttgcattcgggcagtggcaacaagaatgccttcaaggcacttattgctgcagagtactgtggggtcaaggttgagctgaccaagaactttgagatgggtgtctcaaacaaaacccctgaattcatcaagatgaatccccttggcaaggttcctgttcttgagactcctgatggtgctgtttttgagagcaatgctattgcacgctatgttgctcgctcaaagggtgacaacctgctttggggtggttctcttattgaatatgcgcgtgttgagcaatggatggactttggtgccacagaggttgatcccaata

SEQ ID NO: 438876 - DNA, 432 bp, Triticum aestivum
gagaactttttcctccactgcccagaccaccattggggttgactcgatgtttgagggcgtggacttctactccaccatcacccgtgccaggtttgaggagatgaacatggatctgttcaggaagtgtatggagcctgtggagaagtgtttgagggacgcaaagatggacaagagcaccgggcacgatgttgtccttgttggtggttccactaggattcccagagtgcagcagcttctccaggacttcttcaacggcaaggagctctgcaagagcatcaaccctgatgaggctgttgcctacggagccgtcgtccaggctgccatcttgagcggagagggcaactagaaggttcaggacctgctgctgctggatgtcactcctctctctcttggtctggagacggacgggggtgtgatgacagtgttgatccc

SEQ ID NO: 438877 - DNA, 446 bp, Triticum aestivum
gattttggtatactccttaattggaggattttgtgggtcacctgtgagttttcacgcgaaagatggttctggctacaagttcttgggtgaagttgtcttacagctcgacaaaataaatcctcaggtggcatcccgcatggtgtcagcgttctctcgatggaggagatatgatgagaccagacaagctcttgctaaggcccagctggagatgatcatctcagccaatggactctctgaaaatgtctatgagatagctttgaaaagtttggcagcttagtttcctgatgcaaagaaacaatttggctctgccagtcggttcgacacttcaccattaccagggcactgaaagtgtacttaactgaatatattgtactactgtatttggcatatgtaaaataacaggctactgtagtggcaatacatttgaattatggcattattgtctt

SEQ ID NO: 438878 - DNA, 319 bp, Triticum aestivum
gccttttatcctgtccaagttctaaccccggtaccaccgtgcccttcgccgcgatctcccgcccgatccgcatggctggaatcaggctgacgcccgaggagcctgagctgccgcagggcactccgccccgcccccagctgccgctccccgtcgccggctccggcgtcacagcgggcggcggcggcagcggtggcctggagatggcttcggacgacgagcggtcagtggcagcggactcgtggtccgtgcggagcgagtacgggagcacgctagacgatgaccagcgctacgccgacgctgccgatgtgctcgccgcggc

SEQ ID NO: 438879 - DNA, 314 bp, Triticum aestivum
gttttagctggcctcctggtcgctctaccgcgccgtcatcgccgagttcatcgccacgctgctcttcctctacatcaccgtggccaccgtcatcgggtacaagcaccagacggacccggcggtgaacagcgccgccgacgcagcgtgcggcggcgtgggcgtgctcggcatcgcctgggccttcggcggcatgatcttcgtcctcgtctactgcaccgacggcatctccgggggccacatcaacccggccgtcaccttcggtctcttactggcgcgcaaggtgtccctggttcgcgcgctgctctacatgattg

SEQ ID NO: 438880 - DNA, 300 bp, Triticum aestivum
cctttgtttccgcccacgcgtccgtctacggtgtggagcctactgtgagtgctgtcttaaatggtggaaagcctggaccacacaagatccaaggaattggagctggttttatccctggtgtcttggatgttgacatcattgatgaaaccatacaggtttcaagtgatgagtccattgagatggcaaagtctctggcattgaaagaaggattgctggttggaatctcttctggtgctgctgcagcagctgcaatcaaggttgctcagaggcctgaaaatgcagggaaactctttgttgttg

SEQ ID NO: 438881 - DNA, 341 bp, Triticum aestivum
cattttctcccctgtggaggcgtcctcatctaccagagctttaccgtgaacgaagaggttgctgtctctgccgggtcgcccaggtccgtcttccactgcttcgaggccgagagtgtgcacagccaccctctggtcaaggaaggcaagctcgccaacctcctcgcatggcgggcggggaggattctctggaagagggcgcggtgctgtgcgagtgaagacatgatttgctgtcgctattccatctgtggaatttgttctgactgtcagtttgtcgtttggttactgtgaagcagccggccaggctattgctctctgaataaactattagctctaggtggttt

SEQ ID NO: 438882 - DNA, 423 bp, Triticum aestivum
ggttctttgggaagattcccaagcttctgctccataggctatttccaaatgtaagattttcagtttggatagacgcaaagcttcagcttgttgtggatccttatttactgcttgagaggtttctgtggagaaagaattctagttttgcgatatctcggcactacagacgttttgatgtgtatgaagaagcagaagctaataaagctgctggaaagtatgacaatgcatcaatcgatgaacaaatagatttctacagaaatgagggcctaacacattattctcccgccaagcttcctatcacaagtgacgtcccggaaggctgtgtgatcatcagagaacacgttcccatctcgaacctcttcacatgtctttggttcaatgaagttgagcgcttcaccgtcagggatcaaatcagcttcagca

SEQ ID NO: 438883 - DNA, 337 bp, Triticum aestivum
tgttttgccgccggcgccggcgggttcaggcgcggctactgcctcaagcgcgggcgcgccgaccaggagcggaagaagggcgtcccgtggacggaggaggagcaccggctgttcttgaaggggctgaagaagtacgggagaggcgactggaggaacatctcgcggaactacgtgacgagccgcacgccgacgcaggtggccagccacgcccagaagtacttcatccggctcacctccggcggcaaggacaacaagcgccgctccagcatccacgacatcaccaccgtcaacgtgcccgacgacgacgaccgcggcagcccctcggggtccccgccgt

SEQ ID NO: 438884 - DNA, 384 bp, Triticum aestivum
ttctcgcgtccgcccacgcgtccgcccacgcgtccgcgatcaatccatcaccacccccagaattcatccagatacgcatacacccgcccggcttctagcttacttgctttagcacttctttgcatatctcgatggagtgcgagaacgggcacgttgccgccaacggcgatggcctgtgcgtggcacagccggcgcgggccgacccgctcaactgggggaaggccgcggaggagctgtccggaagccacttggatgcggtgaagcggatggtcgaggagtaccgtaagccggtggtgaccatggagggcgccagcctgaccattgccatggtcgccgcggtggctgccggcagcgacaccagggtggagctcgacgagtccgctc

SEQ ID NO: 438885 - DNA, 352 bp, Triticum aestivum
atgtctttctccccgccgcttcttctcccgcccgccgccgccgtctccgcctccgcccccgccagtctcctggttgattccggcgccttgaaccaagatgtatctccagtactacatcaacgagaagggcgtcaaggtgtacaccaccaagaaggaatcccctctcggtgtgccgacgcagtctgcccacccagctcgtttttccccggatgacaagtacgcccgtcagcgttacctgttgaagaagaggtttggattgctgccaacccaacagccagcacaaaagtactgaagcactggatgggtcctcctaagagatctgttttctttgctgaatgctgtttggagtgta

SEQ ID NO: 438886 - DNA, 405 bp, Triticum aestivum
gattcatatctgctaagatgacattggcagaagatgtgaaccttgaagagtttgtgatgaccaaagatgagttttctggtgctgatatcaaagccatttgtactgaagctggattgcttgccttaagagagcgcaggatgaaggtgacacatgctgacttcaagaaggccaaagagaaggtaatgttcaagaagaaggaaggtgtaccggaggggctgtacatgtgagactgttcacccctctcgccgccagcattacctcctggttcacatggttgtgtaatactggaggattggagtttgtgttttgtttaaaatggttggagttttactttcctgtacttacggtttattcagcaatccccaacttaaaacagccctccaagcaatgtactgcgaccacttg

SEQ ID NO: 438887 - DNA, 330 bp, Triticum aestivum
tttttgcgtccggggaatctcagctgatgacatggaagcagtttacaagaaggttcatgctgccatccgtgctgatcccaccatggccaaatcaaccaaggcgcctcccaagactcacaagagatacaaccccaagaagctgacctatgagcagaggaaggccagcctcgttgaaaggctcaacgccctcaacaactctgcgggtgccgccgatgacgatgaggacgacgacgagtgaagagctctttgtccaccccagtgtagtcttgcaacgtgcgtttttgttaaagtccggcactctgcacaatgacctgttccattgagttctgt

SEQ ID NO: 438888 - DNA, 262 bp, Triticum aestivum
tttttatcccacccgtctccacccagataaccacgagagatatttcgtccgccccgacgaccgacgaacggcagagaaaagtgaggtgatcatgagcaccatggcgatgtcggcgctgaacccggacgcgcccatgttcatcccggcggcgttcaagaaggtggaggactactcgcccgagtggtgggagctggtcaagaccaccgcctggttccgcgaccactggttccgccagcaccagctctacgaggacctcgccgac

SEQ ID NO: 438889 - DNA, 350 bp, Triticum aestivum
tttttacagactatatttcagacgatgggactgcaatgcctctctattcacatagataacacacatgagttctctgcagcacctgtgattgcatggctaatgtataccagggagacgctccggtgcctgtattacaacatccaaaccaaccctaatgtaaacatcctggagaagtgtgggagacagaagctggaggtgttggatttggaccataacacaatcaccggtgttgaaccaagctaccagaggttcacttgtcttaaatccctttatttgaggcatgtgagcatttctgccctggatttgagccttctagttgctgcttgccccaagatcgagtcactagcact

SEQ ID NO: 438890 - DNA, 319 bp, Triticum aestivum
tttgtacgcaaccttcgagaatgcagagcgctggctgaaggaactgagggaccatacggatccgaacatagttgtcatgcttgttggcaacaagtctgatctccgccatctcgtggccgtcccaaccgacgaagggaaggcctttgcagagagggagtcactctatttcatggagacctctgcgctcgagtcgaccaatgttgaggacgcttttgcggaggtcttgaaacagatttaccgcatcgtgagcaagagggcggtcgaggcgggtgaagactcggccgctggccctggcaagggtgagaagatcaacatgaag

SEQ ID NO: 438891 - DNA, 284 bp, Triticum aestivum
gctcgcgcccgcccgatcccggatccccgatccccccctgtgcgatggcggccagcctgtggcgcgcggtgatgggctcctcctcctccccctcgtcgggcggcggcgacgacccggcggcgggcggcgtggagttctggcacggcgcggagcgcgccgggtggctgaccaagcagggcgagtacatcaagacgtggcggcggcgctggttcgtgctcaagcagggccggctcttctggttcaaggacgccgtcgtcacgcgcggctccgtgccccgcgggatc

SEQ ID NO: 438892 - DNA, 264 bp, Triticum aestivum
ctatcttcgccgtccggtccaccccgagaggagagcgcagcgacatgccggcgacgccgaccatcatcggtgccctgctggggctgggcacccagatgtactccaacgccctccggaagctcccctacatgcgccatccctgggagcatgtgctgggaatgggtctgggcgttgtgtttgtaaaccaactggtgaagtttgatgagaaggtcaaggtggaccttgacaagatgcttgagcgtgcgaaacacgccaatgagcagc

SEQ ID NO: 438893 - DNA, 413 bp, Triticum aestivum
ttctacttcacctctgagtctgtgaacgagggccaccctgtacaagctctgcgaccaggtctctgacgctgtgcttgacgcgtgcctcgcccaagacgctgacagcaaggttgcctgtgagacatgcaccaagaccaacatggtcatggtttttggtgagatcaccaccaaggccactgttgactatgagaagattgtgcgtgacacctgccgcaacattggcttcatctctgatgatgttggccttgatgctgaccggtgcaaggtgcttgtcaacatagagcagcagtctcctgacattgcccagggtgtgcacggacattttaccaagcgccctgaggatattggtgctggtgaccagggtatcatgtttggctatgccaccgatgagacccctgagctcatgcccctca

SEQ ID NO: 438894 - DNA, 348 bp, Triticum aestivum
gactccttgcaccaactggtcttttccttggaggcgcaaagttcatggtcatccaaggtgaacctggggttgtcatccgaggaaagaagggcaccggtggcattactatcaagaagaccggcatggccctgattcttggtatctacgatgagcccatgactcctggccagtgcaatttggtcgtggagaggctcggcgactacctggtcgagcagggtttctaagcccgctctgatatgctgttattttggtcgtctgggactaagtttgctctactgtgggctttgcatccatctgcttggcgtaccgcatgatatatgcagtgaataattttagcttggggtttgt

SEQ ID NO: 438895 - DNA, 309 bp, Triticum aestivum
cttacctcttctcgcgtctgctacacttcctctcccggcccggctagatctcgccggcaggagatggcggacgcgaagcagcagcaggccgcggcgcccaccggcgtctggaagacgatcaagccattcgtcaatggcggcgcctccgggatgctcggcacctgcgtcatccagcccatcgacatgatcaaggtgaagatccagttgggtgagggatctgcagctcaggtcgcaaagaccatgtatgctaatgagggccttggttccttttacaagggtttgtcagctggtttactaaggcaagcgacc

SEQ ID NO: 438896 - DNA, 247 bp, Triticum aestivum
gtccgttgtgatgcaccacgagtccctcctggaggcgcttgctggtgacaatgttggcttcaacgtgaagaacgttgcttaaggatctgaagcgtgggtttgttgcatccaactacaaggatgaccctgccaaggaggcagccaacttcacctaccaggtcatcatcatgaaccaccctggtcagatcggcaacggttacgcccccagagctggactgtcacaccttccacattgctgtgaagtttg

SEQ ID NO: 438897 - DNA, 352 bp, Triticum aestivum
gtcatgttcgccgtcggccaccccgacacgctcggggactgtcccttctcgcagagggtgctgctcacgctggaggagaagaaggtgccctaccagatgaagctcatcgacgtcagcaacaagcccgactggttcctgaagatcaatccagagggcaaggtgcccgtgtataacggtggtgatggcaaatggattgctgattctgatgtgatcactcaagtcattgaggagaagtacccaactccatcacttgttactcctcctgagtatgcatcagtgggatcaaagatcttctccaccttcgtcacgttcttgaagagcaaggatgccagcgatggctcggagaaggcgc

SEQ ID NO: 438898 - DNA, 331 bp, Triticum aestivum
cccactttttcgcccacgcgtccgcccacgcgtccgcgatcaatccatcaccacccccagaattcatccagatacgcatacacccgcccggcttctagcttacttgctttagcacttctttgcatatctcgatggagtgcgagaacgggcacgttgccgccaacggcgatggcctgtgcgtggcacagccggcgcgggccgacccgctcaactgggggaaggccgcggaggagctgtccggaagccacttggatgcggtgaagcggatggtccaggagtacccgaaggccggtggtgaccatggagggcgccagcctgaccattgccatgg

SEQ ID NO: 438899 - DNA, 473 bp, Triticum aestivum
gatttttcgaacttcctatatcctagtgctgtagacaatttccggaggcaatttgctaacttggaggaaaatggagggaagggaggggcaatcgttccatcggacaggaagcatgtttcgctccccaggactactacagttcattctacaccaattcctccaaaagatcagaagtcttcccaggttccccaaaggattccaacaggtagaccaggaagagtggttggcccggtaataccatttgagaattcatgtgctatggatccttacagtcaacgaagggtggcaaggaatccagtacttcctgcagctgctaccaatgtatcagcatacgcataccaccgaaagtcagacagttcagagagagagttacagcaggagcttgaaaaagaccgcatgcagtaccaaccgatgcagcgtttcatggatgccaagatggtctcccctgacttgaggtctaccttctattacat

SEQ ID NO: 438900 - DNA, 358 bp, Triticum aestivum
gctttttctcgaggaggacgtcgcctaccgcgccaaggacaagccctactgcagcctgctggtggggctggtgagcgcgtaccgatacgaagggcccaaggtgagcgacgacacggtcaaggcggaggccaaggcgctgggcgcggcggtgaagagcgccgccggcggcaagctggtggagaacgacgaggtggtcaggatcctcaccaccaggagcaagcctcacctcgtccagaccttcaagtactacaaggagctgcacggcaagcacatcgaggaggatctgggaagcgaggaggctctgagggagaccgtgcagtgcctggcgacgccggagaggtacttcagccaggtgatg

SEQ ID NO: 438901 - DNA, 255 bp, Triticum aestivum
ctgtcttgtgggcgcgacccccttaatccttctcccagcccttatctgtatccctctccatggccacggcggcggcggcgaagcggaagccggtgttcgtcaaggtggatcagctcaagcccgtcaccagcggccacacgctcgtcgccaaggtgctcagctccaagaccgtcctccagaaggcccgcgccgctggcggccccggcccagccgccaagcccaccaggatcgccgagtgcctcatcggcgacgaga

SEQ ID NO: 438902 - DNA, 287 bp, Triticum aestivum
cttgagtttgcatggacgaataacatgctggatttcgcatttacctatctattacagctcatccgggagtacacaaacacggtagatgatttggtgaaggacaggatagaatcgcagaaggaagaaaaagcttaagagaacgaatagaaagaactagttgcgcagcagaacatgtacgctcaattgcttcctctggccttgcctgctccgcccggcatgaagggcggtccaccttcgatgggcggaatgggcatgccgccgatgggcgggatgggtatgcctccgat

SEQ ID NO: 438903 - DNA, 271 bp, Triticum aestivum
gaccgtctttcattgcccccaacaatgcacagactgttgtgttcattcacctcactgtccgtctccagattcttttggagctggggcttccttaatctcatcaacgtcatcctcattggtgtcggatgtccatagagtcaaattgtcacgcaggagctgcatgattaaagtgctgtccttgtaggattcctcgcctaagctgtccagctctgatatagcctcatcaaaggcttgttttgcaaggttgcaggcgcggtcaggggagttcacg

SEQ ID NO: 438904 - DNA, 436 bp, Triticum aestivum
gcatggtggcggagaagccggcggccaaggggaagaagggcaaggccggcaaggaccccaacaagcccaagagggcgccctccgccttcttcgtcttcatgggcgagttccgcgaggagttcaagcagaagaaccccaagaacaagtccgtcgccgccgtcggcaaagcggccggtgagaggtggaagagcttgagcgaatcggagaaggccccctacgtggccaaggccaacaagctcaagggcgagtacaacaaggccattgccgcctacaacaagggcgagagcgctgctgctgctgccccaaagaaggcggtggccaaggaggtggaggaggaagatgagaaggagtccgacaagtccaagtcggagatcaatgacgacgacgatgatgagggtagcgatgaggacgaggacgacgaccagtgaagaagacg

SEQ ID NO: 438905 - DNA, 382 bp, Triticum aestivum
aggttctgcacacagttcccgtaatctatgagaagtatgaagatcagattgatacctatggtgagaaggggtggattgaggttaagaaacagtatgctgtgtttgatgccaaggttctgagcaaagtgccgaggggccccttgaaagacaagaagaactagaaacgagtgataccgtgtgccatcggtatggaatgatggcgactggttcgtggctgcccttgtggtatgagcaccaaatttctcaccagttgtcttgtgttatgtgtaagactgttttcgttgtttgcgactttgatgagagtagcctgggtagcttacccttcacagtaatgcagaggcagcacttgtttcgctgtaccgctgtttgatttttgatctgt

SEQ ID NO: 438906 - DNA, 339 bp, Triticum aestivum
gctttttaccggtctatgtacagggtttgatcgaacaagaggctttggaggaagctaagaatgatcttcttgattacacattaagtttcaacccaaggaagaacagcatatccaaacgcgtggagaagcctaccatgaaactgacggttgatgctgagaccgatgaggttatcggagcagccatgtgtggaccagatgcagctgcaattatgcagggcattgttgatgcgctcaaggctggagctaccaaggcgaccttcgacagcaccgtcggcatccacccttctgtggaggatgagtttgtgacgatgcggaccttgaccaggcgcgtgagcccgc

SEQ ID NO: 438907 - DNA, 359 bp, Triticum aestivum
agctcgttttccacaatctcaacagccatcggaatcaacagcagcagcagcggagcgatctcatcgaccaactctcttccaagtttcgattcaacggacatggggatgccggcggtgaggaggagggagagggacgcggaggcggagctcaacctgccgccgggcttccgcttccaccccaccgacgacgagctcgtggagcactacctgtgccgcaaggcggccggccagcgcctgcccgtgcccatcatcgccgaggtcgacctctaccgcttcgacccgtgggcgctccccgaccgcgccctcttcggcacccgcgagtggtacttcttcaccccgcgcgaccgcaagtaccccaa

SEQ ID NO: 438908 - DNA, 377 bp, Triticum aestivum
ctccgttctattcgtttcgatctatttcggcttcctctcctccaagcttcggccatggccgccacgatccagtccgtgaaggcccgccagatcttcgacagccgcggcaaccccaccgtcgaggttgatgtgtgctgctcagatggaacctttgccagggccgctgttcccagcggtgcatcaactggtgtttatgaagctttggaactgagggatggtggatctgactacttgggaaagggtgtatccaaggctgttgacaatgtgaactcgattatcgcgccagctttgattggcaaggaccctacagctcaaactgagctcgacaactatatggttcagcagcttgatggaaccaaaaacgaatggggttggtg

SEQ ID NO: 438909 - DNA, 400 bp, Triticum aestivum
  unsure (1)..(400): unsure at all n locations
cttgatcttatcggtggtagtgctacaagcgagtgacactagttcttgcaccgatcagatccaacttctgcacaggatgctggacaagctgtgggacgacgtggtggccgggcctcgcccggagacgggcctcgacaagctccgccgggccgccgccacccaacccctcgccatcaacacagctgcaggggaggcgattaagcagtcgccgtcgatgccgacgaccccgaccacgccggtgacgccgtcgtcgtccacgccgccgcgcggcggcagcgtgtggcggagcgttttccaccccgggagcaacctggccaccaagagcctcggcgccaacctcttcgaccggccgcagcccaactcccccaccgtctacgactggctntacagcgacgagacg

SEQ ID NO: 438910 - DNA, 293 bp, Triticum aestivum
gaaatttggtagaacatggatcagaacttcctccaatgcgatccatcgccgcggtaaatcgagccagacacaacgcgcaagacccccgactactttttgtaatcgtggagttgacttttttttaactgttgtgctgctggtgctcctatcatgcgcagcactgcctggctggatctgtagatctctgtccttagaaaatgggatatcttgagctgagttgtgtacccccctctcattcttttgtttggagatattggatgccgctttttatgacctcataggacatgttaaaa

SEQ ID NO: 438911 - DNA, 385 bp, Triticum aestivum
cttatttttttgttacacatcacaacgaactaaacatggatctctacatgagaattgctcctgaactccatctgaagcagttggttgtgggtggcttggaccgtgtttatgagattggaaagcaattcaggaatgaagggtttgatttaactcacagtcctgaatttacaggatgtgaattctatatggcttatgcagactacaatgacctgatggagcttactgaaaccattttgtcgggtatggtgatggagctgactggtagtactaagataaaataccatgcgaatggagctgataaccctcccatagagatcgatttcacacctccttacagaaggatagatatgatgcaggcactgaaatctatcgctgggcttgacat

SEQ ID NO: 438912 - DNA, 355 bp, Triticum aestivum
gcgctttattgataatggagaaggaagggatcggcggtctgtacaaggggcttgggcccagctgcatcaagctcatgcccgcggcggggatctcgttcatgtgctacgaggcctgcaagaagattctggtcgaagccgaggagtagagcgaagtgcgccaccggtgtcgggtccttaaagaagaggcggcaggaggattaagcctcgtcttcctttctatcaagaaaagaaaaattggatgatcaactactcagcagaagcttaggtcaaaggtatttgagacacgtctgttagatgatgaagttttggcctctaaattagttctgtgtccgagttgaaatccataaacaatatt

SEQ ID NO: 438913 - DNA, 380 bp, Triticum aestivum
tcgtcttcatctacgccgcgctggagaaagccggcaagcccggggttaaggtggtcatatccgagagcgggtggccgtcggacgaaggtttcggggcgacggcgcagaacgcgcggacgtataaccaggggttgatcaaccacgtcggcaacggcacgcccaaacggcccgggccgttggagacgtacattttcgccatgttcaacgagaacctgaaggacggggagaagagcgagaagcattttgggctgttcaatccggacacctcgccggcctattccattactttctgagtgcgacaagcgtcggatatttcgtgttcgaataagctgcctggtaatgcaaactgcatgcatttcagtcaactactcgtgtgtctt

SEQ ID NO: 438914 - DNA, 263 bp, Triticum aestivum
gattgttgtggagaactctcccttccttgagaagctgaagaagaagggctatgaggtcatctacatggttgacgccattgatgagtatgccattggtcagctcaaggagtttgagggcaagaagcttgtctctgccaccaaggagggtctgaagctcgatgagagcgaggacgagaagaagaagcaggaggagctcaaggagaagttcgaggggctgggcaaggtcatcaaggaggtgctgggcgacaaggtggagaaggtca

SEQ ID NO: 438915 - DNA, 265 bp, Triticum aestivum
gagcatgtttggcatcaagatcacctgctcccaggagacagagccaatgggaaccgccggaccgctggccctcgcccgcgacaagctcgacgacggatccggcgagcctttcttcgtcctcaacagcgacgtgatcagcgagtacccgttcgcagagctcatcgagttccacaagtcccatggcggcgaggccacgatcatggtcaccaaggtggacgagccttccaagtacggcgtggtggtgacggaggaggagaccgggaag

SEQ ID NO: 438916 - DNA, 528 bp, Triticum aestivum
agataaagcatcgtctcgtctcgtctcgtcgaggaatcaacagccatgggcggcggcaacgcgcagaagtccaagatggcgagggagaggaacctcgagaagctgaagggcggcaaggggagccagctcgaggccaacaagaaggccatgaacatccagtgcaagatatgcatgcagactttcatctgcaccacctctgaagcaaagtgcaaggagcatgccgaggcaaagcatccgaagagcgagctcgtccagtgcttccctcacctcaagcagtgatatctgcccaatcagacagagagagagataaaagagagagagagagagaagctgtcataatccacctactattatcatgttccgcaatgactgattgttgacctaagcttggggtctgaactcggtgtgctgctgtcccggctgctttggttgtgtgcccatctactatgtaatcgtcctctatcagcctgttgtgctacattatcttaatcctctgtggatttgctcctcgtgcttagtcagtatgct

SEQ ID NO: 438917 - DNA, 125 bp, Triticum aestivum
aattttgctaccgtcatttttgggaacagggagtttatggcattagccgctattggctcaaggaacaggagagacatctgagcgactccttgcatgtacggaattacaccagggacattaccttg

SEQ ID NO: 438918 - DNA, 311 bp, Triticum aestivum
aactacagctcaacacatcatttgcaccggtcgttcttgatcatcacagcaatggcctccaccgacagctggacccacgagatcgaatcgccggtggccagagcgcgcctcttccgcgccggcgtcatggactggcacacactggaccctaagctcgcaccgcacatcgtcgccagcgcccaccctgttgagggcgaaggcggcatcagcagcgtcaggcagttcaacttcacctcagccatgcccttcagcctcatgaaagagaggctcgagttcatcgacgccgacaagtgcgagtgcaagtccaccct

SEQ ID NO: 438919 - DNA, 369 bp, Triticum aestivum
tttttgcgtggggcgccgagcaacacaatcaagatgtcaactctgtcggcctcatcttctccaggaagaccgacgcggccattgacatactcaagctcatgtcctccacattcatgttcgccttgagccaagccatcgacctccgccatcttgaggagactgtcagggatgccgtcaagagctgcgcgatgatgacgggcaggaagacattgaccaccaccaacaatgggcacctgcacaatgcgcgattctgcgagaaagacctgctgctcacgattgaccgtgaggcggtgtttgcgtatgcagatgacccttgcagtgccaactacctattgatgcagaagatgcgtgcggttctcgtggagcacg

SEQ ID NO: 438920 - DNA, 206 bp, Triticum aestivum
ttcttgcgtccgcccacgcgtgcgcggacgcgggggaacctatttgcgctgagtggaagggcctgcgacaacctgctgcagaacaagactgctgtcaccaccaaagagaactacggccaaggggagagggaagcacaatgctctaccgaacagagaacactcgatggccttcaatcaccggagccgcacttccacacactggtcaa

SEQ ID NO: 438921 - DNA, 456 bp, Triticum aestivum
cggtcttgtatttgccggggttggagcatatgcagtttacaaataccggctacggagttacatggattcggagatccgcgccatcatggctcagtacatgcctttggacagccaagaaggcgcaaaccagcaacagcatgtagcgcatgctggtgatatctgagaccagatggcactgcttttgctgagcaacacagaagcgtgcagggcagcgtatgtattatcatcggtggcgtcggctttacagcgcaaagatacggtttgtacgcgaggagatttgatgtatgattctaggaagttacactgttgagaaccttcattttgcgagacacgatgaacagcataggcggatattgacacggtttaccctaccacctttgacggctctagtgtcgttgcatactactgtactacgcacgtgtcaacatcctgtgaatacttggtgttcagactact

SEQ ID NO: 438922 - DNA, 507 bp, Triticum aestivum
ggcttatctagagtttgggatttaaagtcatctgaagctgtggctaatctgccaagagaacaaggagaaatatttggcttctgccgattttctactaagtctgacaatagtcagattctctttgttacagcaatgcaaggtgattacggcaaaataatatcttggaatacaacctcatggacaagaattggatcaaagaaagtaacccgtgatgcgatttcagctttttcagtctcgcctgatggtacacttctagcaattggaactattgagggaagcatcagtgttctaggtccaagagacatgcgagtggttctaacagttaaaaaggcgcatcttggcattgttactacattagcgttttctcaagattcaagggccttgctgtcgacttcctttgactcaactacaagggtgacatcgactgaatcacccaagagcgatggtataagcctctggtccatggtactagctattatactcggaattttggtatattactatatg

SEQ ID NO: 438923 - DNA, 473 bp, Triticum aestivum
ttcacgcgtccgcattgacactggatccatcaaaactttggagtcgtgaattgatccagcaggagcttgatcatgtagttgaagaacttgaaaagattgcagttgttcatctcctacagcacagatcaatcatttccctgatagggaacgtgcagagatcgtctctgattcttgagaaggcgttcaacgttctacgcagaaatggtgttaatgttcagatgatttcgcaaggggcgtccaaggtgaacatctccttggtggtgaatgacagcgaggcgaagcagtgcgtgcaagccctccactcggcattctttgagaacggtttcttgtcagaagtagaggaagcggaccttgcacagaacatggctccagtcctagtaagctcgaatggtgccatcaatggaaactagtcgacgtcgcttttttctatttccagcaatggatgcgccggtcttaggttaagagggtgattc

SEQ ID NO: 438924 - DNA, 347 bp, Triticum aestivum
gcgttgatgcttgcgtacgtagcccttgattatgagcaggagctggagactgtcaagaacagatcctcggttgagaagagctacaagcttcctgatggtcaggtgatcaccattggcgcagagaggttcatgtgccctgaggtcctcttccagccattcatgattggcatggagtcttctggaatccatgagacgacctacaactccatcatgaagtgtgacgtggatatcatgaaggacttgtatggcaacattgtgctcaggggtggcgcaaccatgttcccaggtatcgctgaccgtatgagcaaggagatcaccgtccttgccccgagcagcatgaagatcaa

SEQ ID NO: 438925 - DNA, 409 bp, Triticum aestivum
ttgttattgaggctctaggtgtgaaaagtgctcttctgcgccacgaggtcgcttatgtattaggtcagctgcaaaataaggctgcttcagatgcactttctggtgtgctgaagaacgtcaatgagcacccgatggtcagacatgaagctgctgaggcccttggttcaattgcagatcaagaaagcattgcgcttctggaggaattctccaaggaccccgagcccatcgtctcccaaagctgtgaagtagccctcagcatgctcgagtacgagagatcagggaagtcgttcgagtttctgttcctccagactcctcaggtgcagcaggagtcctgagcccagcttcggatacatactttgatggacctgtcagagtcgacggttcggtgtggtagtggacatgatgtctg

SEQ ID NO: 438926 - DNA, 147 bp, Triticum aestivum
ctctcttttccggtgaccgtattggctatgtccaggtcccacaacggatcgagggcattgatccatcacatcgctacgccaaccacaacactgccttctttgatgtcaacatgcgtgcattgtacggtcttatgggaccagtctatg

SEQ ID NO: 438927 - DNA, 376 bp, Triticum aestivum
attggtttacagctacacggacacttcagggaaccctcgtgggttcctcaggatcaggctttgagtggctcatatggcatccacgtggtaatttgataattgcaggatcagaagactgtaacgtatggatgtggaatgctgaccacaatgcctttctgaatacgtttgctggtcacagtagcacagtgacatgtggtgattttacccctgatggtaagcttatatgtagcggatctgatgatgcaacattgaggatatgggaacccaaaagcgcacaatgcatacatgttgttcggggtcatggctatcatactcaaggattgacatgcttagccattactccggactcccaatcaattgttagtggctcggagga

SEQ ID NO: 438928 - DNA, 492 bp, Triticum aestivum
gtgctttcgtacgtgagccctagcgggttcgaggaggcagcgccggcggcggagatgtcgacgccgtcgagaaagcgcctgatgcgggacttcaagcggctgcagcatgacccaccggccgggatcagcggcgcgccgcacgacaacaacatcatgctctggaacgccgtcatcttcgggccggatgatacgccatgggacggaggcacgttcaagcttaccttgcagtttacagaagattaccccaacaagccgccaactgttcgttttgtctctaggatgtttcacccaaatatttatgcagatgggagcatctgcttggatattctacagaatcagtggagccctatatatgacgttgctgccatattgacttctattcagtccttgctgtgtgatccaaaccccaactctccagcaaattcggaagctgccagaatgttcagcgagaacaagcgagagtacaaccgcaaagtccgcgagatcgtggag

SEQ ID NO: 438929 - DNA, 380 bp, Triticum aestivum
tttaatggtgccaaacatgttggtttagttccgtcaggaaatgatgtttcatcgaacaaatccagtggtcgaaaaggaattcgaggtggaagtccaaatattggcaggcgagtcacggttggtaatgatccaactcctccttcagcatctgctctgcaggcaatagtgtggctgcgcctccaatttatcatcaggctgcttcaagtaatcctggcagataggggcatgaggcatacacttgctcctgcgatactaagcctgcttgcggcacgcataatctatgaagatgcagattcgccccttcctcctgccagtttgattgcctcgagacgggaagtggactctttgctggaacctcccatggatgtcctgcttgatcg

SEQ ID NO: 438930 - DNA, 319 bp, Triticum aestivum
tttggcgggtgagctcgcgcataacggatcgatcccagctctagaggggagcagccatggcgggggacggcgacgaggagccgccggcgacgggcggcgacaagctgatcctgcggggcctgcagttccacgggttccacggcgtgaagcaggaggagaagaagctgggccagaagttcgtggtcgacgtggacgcctggatggacctcgccgccgtcggggactcggacgacatcgcccacaccgtcagctacaccgacatctacaggatagccaagggcgtggtggaaggcccgtcgcgcaacctcttggagtcggt

SEQ ID NO: 438931 - DNA, 240 bp, Triticum aestivum
tggaatttggggatgcaaggactgtgggaaggtgaaggctggcggtgcttacaccatgaacactgccagtgcggtcactgtcaggagcactatccgtcgcttgagggagcagactgaagcataagttgctactagtgttttgtcctagtgaatcatctgggattttgcagtttagacgatactttggattcagttctgttggctgtttagtcaaggattatctttgtacttggtgcgaaa

SEQ ID NO: 438932 - DNA, 447 bp, Triticum aestivum
ttcaccccgaacccccagcccccctccccggcgccgccgcagcagcaagatggtgaagggacgcaccggccagcgcgtgaggctctacgtccgcggcaccatcctcggatacaagaggtccaagtcgaaccagtacgagacagcgtcgctggtgcagatcgagggggtgaacaccagggaggacgtggcctggtacggcggcaagaggatggcctacgtctacaaggccaagaccaagagcaacggcacccactaccgctgcatctggggcaaggtctcccgcccccacggcaacaccggcgtcgtccgcgccaagttcacctccaacctgcccgccgaggccatggggaaaaaggtcaggatcttcatgtacccgagcagcatctaaaaggttattttgaagtctggagggtttcgctcgtcccttaggtttcatttcgagtcatg

SEQ ID NO: 438933 - DNA, 428 bp, Triticum aestivum
ttcccacttctcctccggcatctgctgcgaccgcgcggttgcctacatcgtctgcggcgagctcccctgccccgccaagcaaggatgactacttcaaggcgtcttgctgacaggaagagtgcgaagtttcagaagaacatcacaaagaggggctcagtgcctgaaactactgtgaagaaggggaatgactatcctgttggacctatcgtgcttggattcttcatctttgtggtcataggatcatccttgtttcagattatcaggacagctactagtggtgggatggcttaatatcgagctaaaaacaagactatcattatcagagatttattatccatgtgattgggaggcaatatcatatctgtaccctgtatcaaacttcgaccctgatgatgttatgtagagatttaaatcttgttcagtcatgt

SEQ ID NO: 438934 - DNA, 451 bp, Triticum aestivum
gttggtatcagaaagtagaggtctctctgctgatacacttgcttccttaccttcagtaacttacaagacaaaagatatgcaagatggcaacacagaacaatgtgtaatttgtcgtgtggaatttgaggaaggtgaatctttggttgcacttccctgcaatcattcataccatcctgactgcattaatcagtggcttcaaataaataaggtatgccctatgtgtagcgcagaagtttctacctcagcaagcaagcaggcatgaccaacagtcgttggtaaaccaacttcatcttcagaaaagaaaagaaaaggaaaaaaccagttgttggcacttggtaggagtatgtagtggcatcattctagtatccctgatgtttaaaccaaaagcaaggcagcagaaacttctacagtacaaacttgcgaggggaccagggacatggagcattttttt

SEQ ID NO: 438935 - DNA, 471 bp, Triticum aestivum
gtcaactgtcgcgccggccgcactctccgccgccccggccttctctccgaatctcaccccgcagctcggcggcctccccggcgtacatcagcaagtctgcgatgaccctcgtcgggattttcctcgcagccctcatctggtgcgccgcctacgtcgccgccgccatctcctcggtcttctagtcctctctttctccggcaacccaacccccacaagccctctccctaaacctaccccgaccccccattcccaatctttcggtagcccgacgctgaccatgggtttcgcgcagctcgtcatcggccccgccggcagcggcaagtcgacctactgctctggtctgtatcaacattgcgagacggtgggaaggaggattcatatggtcaacctggatccagctgcagagcacttcagctatcctgtatctaccgacattagagagctcatatcactggacgatgtcatggagga

SEQ ID NO: 438936 - DNA, 467 bp, Triticum aestivum
ttcgttttcaaatatggtacaaggtacggtgccagtctgcgtaagcagatcaagaagatggaggtctcccagcactccaagtacttctgtgagttctgtggcaagtttgccgtgaagaggaaagcagtcggaatctggggatgcaaggactgcgggaaggttaaggccggtggtgcctataccatgaacaccgccagtgcggtcactgtcaggagcacgatccgtcgcctgagggagcagactgaagcttgatcgcggtcaatctgacaaaggagcctctggattttgtagttcagacgagactcattcgacgcaatatagcctaaattgacaacatacaatgttatttatcggcttgttggggttctgaatgtatccagctacgttacaatgtgtatctcgtttatcgtgcttagttgattgtctaagggtattcgttgtgtgtgtcgttggttcttgaatcttaa

SEQ ID NO: 438937 - DNA, 412 bp, Triticum aestivum
tttcggtttcgcgtagaacaggagaaggagcaggcggcggcggtgcccgaagaggagaagcacggcgacctagcccgagctcgcaaccatggctaggggtttgaagaagcatctgaagaggctcaatgccccgtctcactggatgcttgacaagcttggtggagcttttgcccccaagccatcatctggtcctcacaaggccagggagtgcctgcctctgatcctcatcctgaggaacagactgaaatatgctctcacctaccgtgaagtgcaatctatccttatgcaacgtcatatcatggttgatggaaaggtccgcactgacaagacctaccctgctgggttcatggacatcatttccattcccaagactggtgagaactacaggcttctttatgacaccaagggtcgc

SEQ ID NO: 438938 - DNA, 399 bp, Triticum aestivum
ttcgaccacagagcggcggcggcggcggcggcggcagcgggggagagaggagagagctccagccatggtgcacgtcaacttctaccgcaactatggtaagacattcaagaaaccaaggcgtccttatgagaaggagcgtcttgatgcagaactgaagctggttggtgagtatggattgaggtgcaagcgtgagctctggagggttcagtatgcattgagcaggatccgtaatgctgcaagacacttgctcacactggatgagaagaatccccgccgtatctttgagggtgcggctcttctccgtcgcatgaaccgctatggtctccttgctgagggccaggataagcttgattacgtccttgccctgactgctgagaacttccttgcaaggcgccttca

SEQ ID NO: 438939 - DNA, 353 bp, Triticum aestivum
ttgaggatggttttattcatgtcagaaatgcggtgaaccctgccaccctcgagcaaatatttggtttctcatctttggctggtgcaccaaatctgttggtattggagcaatttgataatgtattgtccagaaaagtaaatgaagttgtgaatgaaataaggcgacagagatgctcctacctaagactgagactatgccaaaagggcgacccatctggagatttcttccgttccctgttggttgaggacaaagcacccggtggcctttcttatgtagagttccttgtacatgttcacaggcaaatccagagcaagatgacctgacatgacctgcttcattgttgtgatgttttg

SEQ ID NO: 438940 - DNA, 479 bp, Triticum aestivum
cccacgcttccgggccggagcggttcctggccggcggggaggcgccggatgtgtccgtgctcggcgccgacggccggctcgtgccgttcgggtccggccggaggagctgccccggcaagtccctggccatgaccacggtgaccgcgtggatggccaccctgctgcacgagttcgagtgggcgccggcggcgtcctccggcgtcgacctgtcggaggtgctccgcctgtcgtgcgagatggcagcgccgctccaggtccgggtgcgcccgaggaggtgctccgcctgatgtggctctggccacaggtttgatcggcctcgccgtgtgctgctagtagtttctcgtagtcccgtgacgtgaccccgtgcttcacgaaagtgaataattaagctgccggtgtaaaatgtacgtgcgccgggcccagctcagctcagtggttggttcagagtttctttctaacttgtgtgatgtgatgtgtat

SEQ ID NO: 438941 - DNA, 270 bp, Triticum aestivum
gtcttaccagctcaggccgtcatgctcaagcttgttctacacttctggagcgacgaggattgcatcaagatcctcgctcaatgcaagaaggccataccttcccgagaaatgggaggaaaagtgatcatcatagacatagtgcttggatcttctctagagacaataactgaaaccgaactgctgatggacatgctgatgttcatatgtaccagaggacggcaacgggatgaaaaggagtggagcacgatctttacgaaagcagggtttagc

SEQ ID NO: 438942 - DNA, 197 bp, Triticum aestivum
tcctcgcgtacgcccacgcgtccgcccacgcgtccgcccacgcgtacggcgacgactccgctcggttccttctccttactccgagctgcagccatgggcaaggagaagactcacatcaacatcgtggtcattggccatgtcgactctggcaagtcgaccaccactggccatctgatctacaagcttggaggtattga

SEQ ID NO: 438943 - DNA, 261 bp, Triticum aestivum
ccctcgcttgcggccgctactcccctgcctaccccagagctcgttagggttttctcttttttcgggggagaaatctcaagaggcggcaccatgctcgtgtaccaggacaagctttccggcgacgagcttctgtcggattcgttcccttacagggagctggagaacggcgtgctctgggaagtcgatggccattgggtcgttcaaggagcagttgatgtggacattggagccaatccctctgctgagggtggtggtgatgat

SEQ ID NO: 438944 - DNA, 440 bp, Triticum aestivum
cactaccaaacacaatccaagccaatcccaccggagagaagagaagatgtcgggccgcggcaagggaggcaaggggctgggcaagggcggcgccaagcgccaccggaaggtgctgcgcgacaacatccagggcatcaccaagccggcgatccgccgtcttgcgcggcgtggcggcgtgaagcgcatctcggggctcatctacgaggagacccgcggcgtgctcaagatcttcctcgagaacgtcatccgcgacgccgtcacctacaccgagcacgcccgccgcaagaccgtcaccgccatggacgtcgtctacgcgctcaagcgccagggccgcaccctctacggattcggcggctaggccgagggcccagccagctcgcgacgccgccgtccggcagagtagtggtatctatctagttgctgtctagggttcgtggttc

SEQ ID NO: 438945 - DNA, 355 bp, Triticum aestivum
ttttgtcttctcctccccttccggttcgggttctggttcggttcgggttcggttcgagagagaggccgagtagctagcctagtctagggtttcggtagagaggaagggagatccatggcggagacggagtaccgctgcttcgtgggcggactcgcctgggccaccgacgacaacaaccttcagcaggccttcagccagtacggcgagatcctcgacgccaagatcatcaacgaccgcgagacggggaggtcccgtgggttcggcttcgtcacgttcggcagcgaggagtcgatgcgccaggccatcgaggagatgaacggcaaggagctcgacgggcgcaacatcaccgtcaacg

SEQ ID NO: 438946 - DNA, 446 bp, Triticum aestivum
tctctaggtgctcaccaacggcaggtacaagagcgtcgagcaccgggcggtgaccaacggcgagcaggaccgcctgtccatcgtgacgttctacgcgccagcctacgatgtcgagctcggcccgctgccggagctagtcgccgacggggagccctgcaggtaccggaggttcaagcacggtgagtacagccggcactacgtcaccagcaagctcgagggcaagaagacgctggacttcgccaagatcagctagaccgccaagaactataatcctatattataggcatcatactgaaggtgatagtgcgtttgtgtacaggattgctaagtaattaagattcctgaagcatctgctgaacctgaatatgcttggcagaagaactgtattcctggtaccggaatgggtaaccaagcaacaattggccaattaaaagtactttttttct

SEQ ID NO: 438947 - DNA, 409 bp, Triticum aestivum
cattatccaattgcccaaccagcacttccgcaaggactggcaaatccgtgtcaagacttggtttgaccaagccggacgcaagtcccgccgacgtgctaaccgtgtgaccaaggcattgcgcattgcaccccgccccattgatggcctcattcgccccgctgtcaggtgccccaccatcaagtacaacaccaagctccgtgctggccgtggtttcaccctcgaggaactgaaggctgctggtgtccgtcgcaaggaggccatctccattggtgtatctgtcgacttcagacgtcgcaaccgttctgaagagtctctccaattgaacgttaaccgtctcaaggcctacaaagctaaactcattgtgttcccccgcaaggctggaaaggtcaagaagggtgacactgagatc

SEQ ID NO: 438948 - DNA, 452 bp, Triticum aestivum
tgtgttggtaaaaccatcgaagctgaagctgcccatggcacagttacccgccatttccgtgttcaccagaaaggtggtgaaaccagcacaaacagcattgcttcaatctttgcttggacaagaggacttgcacacagggcaaagctagacgagaatgctagacttcttgaatttgcacagaaacttgaggaagcgtgcgtcggaactgtggagtctgggaagatgaccaaggaccttgcactccttgttcatggatcctcaaaagttacaagaggcgattacctgaacactgaagagttcattgacgcagttgctgctgagctcaaatcaagactgtgaaagacctctccctcttcaatgcttgaatagtcattactcatcgattcaagtcattttggttatgtcggcattattctgtcatgctttcatcctgaacagaacgagcttttact

SEQ ID NO: 438949 - DNA, 217 bp, Triticum aestivum
ccctttccctcgcgcgctcctccccacccccagagccccgtcgcctagctagggtttttgcctccccgccgccaccgccgcgcgcgcgcgagagagagaccacagcgaccaacccagccatgtcggtgcgtccgagcgagcgggccgacgcgcggcggaaccgctacaaggtgacggtggacgccgatgaggggcggcggcggcgcgaggacaacat

SEQ ID NO: 438950 - DNA, 387 bp, Triticum aestivum
ccctcgcgtccggcctgtacacgcccacagccccagagacacaccaagactgtgacagaaaatgcagcatatgccaggaggagtactctggtggtgaggaggtggggaacatggcgtgtaagcactactaccacatcacctgcatacagcactggctccggcagaagaactggtgccccatctgcaaatccgtcgccgccaagaccgtctagcactagcactagcagcccctgcttgtttagtgtaaacagattctcctgaaatgtctagacacaagatttgtattcttttttctactctctagaatgaaacatttgtttgtgccttcaagacttcttggcttccttcagttcacaaggttcagtgaacaaagaaaaagggaacagg

SEQ ID NO: 438951 - DNA, 270 bp, Triticum aestivum
gcttcacacaaccctctgcacccccagcaatccaccccttacccctccccggcggatgccctcccctgccgagctcgagaatggcaaacgcatcatgcggagctggtatccatgatgactgcaagctgaggtgtgtggagctcaagtacaagaggatgcaccgctgcataacctacaggctggagaaccagacggaggtcattgtggaccaaactggggagcgcgaggccacctatgatgacttcaccaagaccctccctgagaatgact

SEQ ID NO: 438952 - DNA, 315 bp, Triticum aestivum
tgatgaccctaaccggcgtgtatgggttctggaagtacgtctccaacctcgagaggcgcgagacccggcgctacctcgagatgctgtacgccctcaagtaccgcaccatggccagcaccgttccactagctgttgagggagactccgcgagcaagtaatctggccacctcctggccgaaagaagggtgacttggatttctgaaagattgagatttgagaatgatttggtttacgtcctaggcgctgcccctttcaagatttaaggttgagtaattggtgtgctagttttgtttagtagttggagtgagtcgagac

SEQ ID NO: 438953 - DNA, 371 bp, Triticum aestivum
ggttgcttgagaagcgccagcagggacgtacactggactcgcacattgaggagcagttcagtggtggaaggctgctggcctgcatttcgtctcgccctggacagtgtggcagagctgatgggtacatcctggagggcaaggagctggagttctacatgaggaagctccagaagaagaagggcaagggtgccacagcttaggctgaagagctgctgcatgttactcgttggattttcttagatgttgcgtccatgtcatgtttgcagacatactgaacaccattttctgtaaacggttcgagtcctaggttgaactgagaatgttttgcctgttttggttgtgttgtgatctaaagctatccagattctttt

SEQ ID NO: 438954 - DNA, 407 bp, Triticum aestivum
ttattatcctcgacaccaaagctcatcttcttctccttgaaatctttttgggttcatcagatttggaggatgtcttgcaactgtggatccggttgcagctgcggctcagactgcaagtgcgggaaggtgtaccctgatctgacggagcagggcagtgccgccgcccaggtcgccgccgtggtcgtcctcggcgtggcgcctgagaacaaggcaggtcagttcgaggtggccgccggccagtccggcgagggctgcagctgcggcgacaactgcaagtgcaacccctgcaactgttaagctgcatgcactcgtaccgtcgtacgtacgtgtgatggtgtgagagtatacgtgaataacgagcgtctgatctgatggagtcgagcaagggtgcgtgtgcatgtgcgtgt

SEQ ID NO: 438955 - DNA, 133 bp, Triticum aestivum
cacatcaccatactcaccgggatcttctactgggcggcccagctgctcggctctaccgccgcctgcttcctcctcaagtttgtcacccacggaaaggccatcccgacgcacggtgtggcggcgggcatgaacg

SEQ ID NO: 438956 - DNA, 357 bp, Triticum aestivum
gcgcaatcgtcaacatcggctccggtgctgcctctgttgtgccgtccgatccactctactccgtctacgccgccacgaaagcgtacgttgaccagttctcaagatgcctctatgttgagtacaagggcaagggcattgatgtgcaatgccaggtgcccttgtacgtggcgacaaagatggcatcaatcaggaggtcttccttccttgtgccatccgcggacacctatgctcgtgctgctattcgccacattggctatgagccgaggtgcacaccgtactggccacactctgttctgtgggtcttgatctcccttctcccagagtcacttgtggatagtacacgcctcagcatgtgca

SEQ ID NO: 438957 - DNA, 401 bp, Triticum aestivum
aaggatccaaacaaggcagttctattgttctgggcagctattaatagcggtgaacgaattgaggctgcattgaaggatatggctactgtactgaaacaagcaaatcgggctgaagaagccgtcgaagcgataagatctttccgtgaccgttgtccaaatgaagctcaggagtctcttgacaatattcttcttgacctatacaaggaaacacatggacatgaagctgcggtggcgatgaagacgatattaacatgaggttgcggcggcgatgacatcgacatcgacacgaagctgcggcggcggtgacgacatcgacatcgacacgaagctgcggcggcggtgatgacgacgacatcatcacggtgctgtggcggcgacgatgacgacatcgtcacagtgct

SEQ ID NO: 438958 - DNA, 273 bp, Triticum aestivum
gggggctcgtccctgtccctgccgcctctagctgccggtccagccgtgtgcgtcctccggtccgccggggacttcgccggcggcgccttcgtcggatctatctttggatatggacaaggtttgctatctaagaagggtttgaagggctcactcggcaatgcagggtcttctgccaaaagttttgcagttctttctggcgtccagagtttggttttgtgcttgttgaggaagctgcgtgggaaagatgatatcatcaattccggcattgctggt

SEQ ID NO: 438959 - DNA, 464 bp, Triticum aestivum
gctcccaccgcagggggcactttctgtcgacccccgccccttttccggtgcgcgcctgttgctgcagacgagaagcggctgaggcgaagaggaatcgaccatggcgacccgtatccagtttgagaacaactgtgaagttggtgttttctccaagctcacaaatgcctactgtctggttgcaattggaggatcagagaatttctacagtacatttgagtctgagcttgcagatgtcattcctgtggtcaagacctctatcggtggcactagaataattggtcgcctctgcgttggaaacaagaatggacttctcttgccacacacaaccactgatcaagagcttcagcatctgaggaactgcatacctgatcaagtggttgttcagcgcatcgatgagaggctgtctgcccttggaattgcatatactgcaatgaccatgttgcgctcacacacccttgacctga

SEQ ID NO: 438960 - DNA, 268 bp, Triticum aestivum
acaagaccttccggatcaagcagaagctggccaagaagcagcgccagaaccgccccatcccctactggatccgcatgaggaccgacaacaccatcaggtacaacgccaagcgcaggcactggcgccgcaccaagctcggattctaatccggggatgacggcgatgacacccgttgctgccgacgggagaagggtctagggtacctagggcttatgatgtctcgctgcttttgcatgctagcaagtgactccgggatgccagttttaag

SEQ ID NO: 438961 - DNA, 370 bp, Triticum aestivum
cccctgcttcggttttgttcagtatgagcaggacgaatcagtacagtatgctatcaatgaactcaatgggatgcttttgaatgacaaaaaggtttatgttgggccttttgttcgtaaacaggaaagggaaaatgtttttggcagtcccaagttcaataatgtctatgtaaagaatctatcagaatctaccactgaagataatctgagagaattgtttggtaattttggacctataactagtgttattgtagtgcgaggcgatgatggtaaatccagatgctttggattcgtgaactttgaaaatccggatgatgctgcatgtgctgttgaggatttgaatggcaagaaatttgatgataaggaattgtat

SEQ ID NO: 438962 - DNA, 306 bp, Triticum aestivum
ctttgctttttgagccagagaggaacgatctgggggagtacttcggtgagcagctctgtggtttcacattcactgccaatggctgggtgcaatcttatggatccaggtgcgtcaagccaccgattatctatggtgacgtgagccgccccaaccccatgactgtgttctggtccaagatggcacagagcatgactgctcgcccaatgaagggaatgttgacaggccctgtcacaatccttaactggtcttttgtcagaaatgaccaaccgaggtttgagacttgctaccagattgctcttgcaatca

SEQ ID NO: 438963 - DNA, 339 bp, Triticum aestivum
atcaactctagaagcggggggcttctttgaagtggtttgatcttatcataccgggaagttctcaatgaagcacaggtttttgatctctctgaagagtcccctgacaaggtgctgcacaggttgtatgccaacttccaaaggctcaagtccaacggtgaccttcttgctattcaaatagagaagagcctgagactaattgttgctggtggtgatggcacggcaagttggctgcttggagtagttagtgatcttaagcttacacactcaccccctgtcgctactgtgcctctgggaaccggaaacaaccttcctttttcatttggatggggaaagaagaac

SEQ ID NO: 438964 - DNA, 493 bp, Triticum aestivum
cccctggctagacagtgctgagaccatccgcaagggacttgttcttggtgtcaacgtcaagattatcacaggtgaccaacttgctattggaaaggagactggtaggaggcttgggatgggcacaaacatgtatccttcttctgcattgcttggccaaagcaaggacggttcacttgagtcacttcctgttgatgagctgattgagaaggctgatggatttgccggagtcttccctgagcacaagtatgagattgtgaagaggctgcaagagaagaagcacattgttggtatgactggcgatggtgtcaatgatgctcctgctcttaagaaggccgacattggtattgctgtcgatgatgctacagatgctgctcgaagtgcttcagacattgtgcttaccgagccaggtctcagtgtcattatcagtgctgtcctgaccagcaggtgcatttttcagaggatgaagaactacacgatctatgcagtttccatc

SEQ ID NO: 438965 - DNA, 455 bp, Triticum aestivum
ctatacctggcaggcagccgcaacccgagcctggactacggtttttagggcacggagatcgtcatggcttcctactgctctgagctccagtaccttgccaacccggtgaccaaccatgtccagagtgctgagcagcacaaccaggacgtgaactctctgggccttgtctcggccaggaagaccgccgaggccgtggacatcctcaagctcatgtcctccacatacatggtggcgctgtgccaggccatcgacctccgccacctggaggagaacatcaagacctccgtgaagaactgcgtgacgcaggtgtcgaagaaggtgctgaccatgaaccccaccggcgacctctccagcgcgcgcttcagcgagaagagcctcatcaccgccatcgaccgcgaggccgtgttcagctacgccgacgacgcctgcagcgccaactacccactgatgcagaa

SEQ ID NO: 438966 - DNA, 428 bp, Triticum aestivum
ttccatgcgtccgcggacgcgtgggtgattatggaaggttagttacctggtgttggatccagcatggaagcacgggaaagattttacacttgattaccttttaccttccactttggggtgccattctctacaatgggtttacgtactatcaagtaaaccgcatgctgaacaatgcgacacggatggctgttggcatgagtgatcgatcaagtcaatctgacgtgagggcggacaagaaggcatttaaccggtggggttattaccctctgattttaatcggttcatgggctttcgcgacaatcaatcgcctgcatgactttgctaatcctggtcacaagatattttggctgtccatccttgatattggatttgctggacttatgggcctttctaattcgattgcttatggtctcaactcttcagtgcgc

SEQ ID NO: 438967 - DNA, 406 bp, Triticum aestivum
taaatgcacggcagcaaatgtacagtcattggctggggtgaacacgcttggcgtgtccatggcacgcatcgactacgcgccgggaggccagaacccgccgcacacccacccgcgtgccaccgagatcatcttcgtcaccgaaggagtcctcgaggtgggcttgatcaccaccgccaacaagctcttcactaagactgtcaccgtcggagacgtgttcgtttttccgcgtggcctcgtgcacttccagcagaacagggggcgtggccctgcatccgtcatcgccggcttcaacagccagctccagggcacacaagtcatcaccaccacgctcttcgctgccgagccgccagtgcctagcgacgtgctggccaaggccttccgggtcagtaacgaggacatcgacgcc

SEQ ID NO: 438968 - DNA, 324 bp, Triticum aestivum
ttaaagatggttctgttgttgaagctgatacagatattgttggtataggagcaaaaccatctgtcagccccttcgaagctgtgggagttaacatcgaagttggtggaatagaggttgattccatgtttagaacaagtatacctagcatctttgctattggagatgtggcagcttttccgctcaagatgtatgatagaatagctcgagtggagcatgtggatcatgccagaaagtctgcacaacattgtatagaaacactgttaacatcccaggcagaagcgtatgactaccttccgtatttctattctcgagtttttgagtatg

SEQ ID NO: 438969 - DNA, 458 bp, Triticum aestivum
gtcttcgataactcctggtggctggccaacaaccgggagcttttggttaagccgggggagttttagccggagaggttcttgggcgaggagagcaacgtggacgccacggtcggcggcaaggtggacttccggttcctcccgttcggcgtggggcggcgcagctgccccggtatcatcctcgcgctgcccatcctggcgctcatcgtcgggaagctggtgaggagcttcgagatggtgccgccgccaggcgtggacaagctcgacgtgagcgagaaaggcgggcagttcagcctgcacattgccaaccattccgtcgtcgcattccaccccatctcaccctgagcaattgcatcttcaacccaatagcctgatccacaagcacaatttttcttcagattacaaatacagtagattacacgaaagtatgtcagttgatttatggggattacatttttttt

SEQ ID NO: 438970 - DNA, 396 bp, Triticum aestivum
atcttaattattgtgcttgctaacatgtaccaggggcctgttatgattacccctggagttgatgcccaaggtgtggctattgcaccagagaagatgcaggagcactttgaggacttctatgaggatatctatgaggagctgagcaagtttggtgaggttgagaccctgaatgtgtgcgacaaccttgctgaccacatgattgggaatgtctatgtccagttcagggaggaagagcaggcagtggctgctcacaatgccctccaaggccgcttctactctggtcgcccgatcattgtggagtactcccctgtgacagacttccgggaggcgacctgcaggcagtttgaggagaacagctgcaaccgtggcggctactgcaacttcatgcacgtgaag

SEQ ID NO: 438971 - DNA, 481 bp, Triticum aestivum
gtatagctgcgcaaggcgcacgcgctgctctcggacgcgaggttccgcgccgccgtcgccgttagcacagcgcgcaagctcgacggggggctcgtgccgctcctcgacggcatcgctgccggcgcctcggtcgtcgacctgcaggacgtgttcatgcgcctgacgttcgacctcacggcgatgttcatattcggtacggatcccggctgcctggccgctgacttcccgcgagtgccattcgccgcggccatggacgaggccgaggcggtgctgttctacaggcacgtgacgcccactgcctggcggaggctccagacctacctaaacatcggccatcacaagaagatgaccaaggctcagcaggtgctcgacgcgtctatcgccgagttcgtctcgctacggcgagagcgcgcggccagtgccgacgccaacgccgatggaagcgacgacgccgctgatcttctcacgttgtacatggcat

SEQ ID NO: 438972 - DNA, 459 bp, Triticum aestivum
ccgatctctcttggccgccgcgaagaaaaggagcttatcatgtcttcaaaacgtatcctgaatgaactcaaggacttgcagaaagatcctccgacatcatgcagtgcaggtccttctggcgaggatatgttccattggcaggcaaccattatgggtcctcctgatagtccctatgctggaggtgttttcttagtgaatatccatttccccccggactaccccttcaagcctccgaaggtatcgttcaagacaaaggtcttccatccgaacatcaatagcaatggaagcatatgcctcgacattctgaaggagcaatggagtcctgctttgacaatctctaaggttctgctttcaatctgctcactgcttaccgaccctaacccggacgaccctctcgtccctgagattgcccacatgtacaagacggatcggtccaagtacgagacgacagcccgcagc

SEQ ID NO: 438973 - DNA, 447 bp, Triticum aestivum
  unsure (1)..(447): unsure at all n locations
ttccgtgattccctcctcatagatccggcaggcgcgcatgctacggccccgagctgcgtcagaaggcgccatggggctctgggactcgctcctcaactggctccgaagcctgttctttaagcaggagatggagctctccctggttggcctacagaatgctgggaagacatctctagtcaattcaattgctaccggtggctacagcgaggacatgattccaactgtaggctttaatatgcggaaagtcaccaagggaaatgtcacaattaaactttgggatcttggagggcaacgtagattccggactatgtgggagcgctactgtcgtggagttactgctattttatacgttgtcgatgctgctgaccgggatagcgttccgattgccaaaagtgaattgcatgacctgctgacanaacagtctttatctgggatccccttacttat

SEQ ID NO: 438974 - DNA, 362 bp, Triticum aestivum
tcgcttcgccgccgccgccgccgccgctcccgagcggtctggttgctcgccgccggccatttcgcgccgcaactccgccatgaagttgaacatcgcgaaccccaccacggggtgccagaagaaggtcgagatcgatgacgaccagaagctgcggaacctttatgacaagaggatctcccaggaggtagttggtgatcttctgggtgaggaattcaagggttatatcttcaagatcatgggtggatgtgataagcagggcttcccgatgaagcaaggagtgctaacttctgggcgtgtccgccttctgcttcacaggggcacgccttgcttccgtggttttggcaggcgtaatggtgagcgca

SEQ ID NO: 438975 - DNA, 327 bp, Triticum aestivum
ccctggcatattgctgatgctgagacgacaataaagctgaaactagattgggagaagggttatttcaggaaaggatgtgtttcggaggccatggagcagtatgaggaggcaatatctgcttttcaaatagctttgcagcacaatccacaaaatacagaagtcgcgagaaagatcaagaggcttactcagttagcaagggaacagaagcgagctgttgatgtggagaacctgcgttccaatattgacatcaggaagaacttgcagtcattgaaaaaggagctggctacaaagtatggagatgcagaaatgggacaaaatatattctca

SEQ ID NO: 438976 - DNA, 188 bp, Triticum aestivum
cgccaagagcaagaacaggaaatacctgaggaagccgaagaaggtgaagaagagcaacggccagatgcacgccaccaacgagatcaaggagaagaacccaaccacgaacaagaacgagggcaagaggctgcgacaccagagcaggacaggctaccacaacatgtacaaggagtaccgtgacaccacac

SEQ ID NO: 438977 - DNA, 367 bp, Triticum aestivum
ctgttctttcattgacatccgtctgccaatgttggggtatgtttcctgagaaaagcgcccagtctatgaccacaacaagaaggctggtgcgatgaatgctctagtccgttcatctgctgtcatgtcaaatggacctttcatcctcaacctggactgtgatcattatgtctacaactcccaagctttccgtgaaggcatgtgcttcatgatggaccgtggtggtgaccgtattgcctatgtccagttcccccaacggtttgagggcattgatccatcagatcgctacgccaaccacaacacagtcttctttgatgtcaacatgcgtgcattggatggtctcatgggaccagtctatgtcggcactggc

SEQ ID NO: 438978 - DNA, 312 bp, Triticum aestivum
acatttgtagctgctgggcaagctccggcacgagagcgtggtggatgtcgtcgcgtgctaccactccaaagaggagaagctcgccgtctacgaacacgtgcccgggcgcagcctcttcgagctcctgcacgagaacagaggcgagggcagaatgccgctgccgtggccggcgaggctgtcgatagcgaagggcatggcgcgcgggctggcgtacctgcaccagtcggtgccgtttttccaccggccgccgcacggcaacctcaagtcgtccaacgtgatcatcctgtcgacgcccaacggcaagcaccagca

SEQ ID NO: 438979 - DNA, 360 bp, Triticum aestivum
tacttccttaagcgctcgctcgaggaggacggcgccgcgcacttcaccggcgaattccgcaagcttttggtgcctcttgtaagcgcataccgctacgatggcccggaggtgaacacatcgttggcacactctgaagccaaaatactcaatggaaagatcaacgagaaggcctacagtgatgatgagatcatcaggattctcactacaaggagcaaagctcagctacttgcaacattcaacagctacaatgatcagttcagtcaccccatcactaaggacctcaaggaagaccccaagaacgagttcctctcaaccctgagggcgatcataaggtgtttcacttgccctgacagatacttt

SEQ ID NO: 438980 - DNA, 287 bp, Triticum aestivum
  unsure (1)..(287): unsure at all n locations
ggaaggggngcttcagtgcgcctcgcgttcggtttctgtccagaattcttggacatgataaagtttgggtcttagatggaggtttccctcagtggcaagcttctggattcaatattggaagcagctgccttgatgatgcagttctgaaatccagagctgctaatagtgctgttgaaacagcttataatggtgaattggcaaatgctgccacatttcagacagagtttcgacatcagctattgtggacactagaaaaggtcaaacacaatgtagctgctaaggctcac

SEQ ID NO: 438981 - DNA, 419 bp, Triticum aestivum
  unsure (1)..(419): unsure at all n locations
tggttcgcttcggaccatcgaaggccaaagcgngggtttggtcatgactggactgagcttgctcaacgctggtctgaccacccagatgctgctgagcctgttccgggtgaagggcatcgtccactggggcatcgctggcaacgccaacgaggacctccagatcggcgacgtcaccatccccgaatactgggcccacgtctccctctggaactggcagcggttcggcgacggcaaggataacgagctgtcactggaggccgccggcgactacacccgggagtacggcttcctcaacttctccgactacaccgtggggcagagcaacccggcgctatcagccaaccagctcaacagcatctggtaccagccggaggagatcttccccaagtccggcgagccggaggagcggcagcacgcgt

SEQ ID NO: 438982 - DNA, 358 bp, Triticum aestivum
  unsure (1)..(358): unsure at all n locations
caacactggcatcattgntgttgctgccaccaacagggctgacatcttggattccgctttgcttagacctgggcgctttgacagacaggtgagtgtcgatgttcctgatgtacgtggaaggacagagattctcaaggtgcacggtagcaacaagaagtttgatgctgatgtttcccttgaggtcattgcaatgagaacacctgggttcagtggagcagacctggcgaatcttctgaatgaggcagccatattagcaggccgacgtgggaagaccggaatttcctcgaaggagattgatgattcaattgacagaatagtggctggtatggaaggaactgtcatgacagatgggaagagc

SEQ ID NO: 438983 - DNA, 470 bp, Triticum aestivum
agccacatacgctgctacgcgctcgcgctttcctggagcatgtcgctcattctcgccgacaagtacgccgacgtgatctactctatcgtgttgcaggatgattttttgccaagaacaccaacaccattggaatatattttcggctctatattctgcttgccctgcttgttattcctattttgcttgagagatacatttaaacaagacaagaaaaagtttaaagatccaagaagattgtatgctcctggtcggatgtatcatatcgtcgagaggaaattttgcagctgtgcaagatacccacctgaggtgagaactgctattccagtggaaggacggtttgagcatattgtgttatcgtgcagtaccactgctgatcatggcattatttggattgagcgagaatcagccttggctttagagctaatgaaggaaaaagagaaggcaacaactccacctgctgaacaaaagat

SEQ ID NO: 438984 - DNA, 348 bp, Triticum aestivum
aacaaggccttggctctcatagccctccgggcaagactatatgaattggaaaggcataggctccatacagaccggtcgaagctccgatcagagcagattggaagtggtgacaggtccgagcgcatcagaacatacaacttcccacaagggcgtgtcactgaccatcgtgtcggggtcacgcaccactccatagtggacgtcatggagggagagagcctggacgtcttcatcgaagcgctgctgctgcaagaagagatggatgcaattgcttcgtttgcttcgtgagccctaatttttgtggatttcttcctggagcgacaaaccgcatcataaacacactgaacactg

SEQ ID NO: 438985 - DNA, 359 bp, Triticum aestivum
ttgaactccccctgcgttaccttcccactggattcctcgttatgagaccgttaataccaatttggtggaggtggtactactgggcaaaccccgtgtcctggaccatatatggcgtcatcgggtcgcagtttggcgataacaccagcccagtgtcggtcaccggtgggagcctcgcggtggtgaagcaattcttggaggacggtatgggcattaagcacgatttccttgggtatgtcgtgctcgcgcatttcgcgtacgtcatcggcttcttcttggtgtttgcttactccatcaaggtgttgaacttccagaaacgttaggaatgcaggcgtcccaatccatagtttgtgtgtatatct

SEQ ID NO: 438986 - DNA, 235 bp, Triticum aestivum
cgggctaccatatcaactagtttcaattgtctctggtgctcttaatgatgctgcagctaacaagtatgatttggaagcatggttccctgcatcaaaaaccttccgagaattagtgtcctgttcaaattgcacagattatcaggcaaggagacttggaataggctatggccagaaaaagaatgatgagcaatcgaagcagttcgttcatatgttgaattccacgctgactgcaact

SEQ ID NO: 438987 - DNA, 337 bp, Triticum aestivum
tagttgcgcaggcaagggaggaggagagcgggggcgaatatgagtgaaactgacgctgcataagcgcctggcctcgagcgtcctcaagtgcggcaagggcaaggtctggctcgaccccaatgaggtcaacgagatctccatggccaactcccggcagaacatccggaagctgggaaaggatggttgcatcatcaggaagcctcagaagatccactccaggtctcgtgcaaggagggcacatgaggccaagcagaagggccgtcactctggatatggtaagcgtaggggtaccagggaggctaggctccccaccaagatcctgtggatgcggaggatg

SEQ ID NO: 438988 - DNA, 322 bp, Triticum aestivum
ctacaggctggagaaccagaaggagggcattttgttccaaactggggtgcgctaggccacctatgaggagttcaccaagaccctccctgagaatgactgccgattcgcggtgttcgacttcgacttcaccaccccggaggatgtgccaaagagcaggatcttctatatcttctggtccccggacaccgcaaaggtgaggagcaagatgacgtacgcgagcaccaacgagaagttcaagaggaccctggacggcatccagatcgagatgcaggccactgaccccagcgaaatcagcctggacgtgatcaaggagcgcgcgcac

SEQ ID NO: 438989 - DNA, 379 bp, Triticum aestivum
  unsure (1)..(379): unsure at all n locations
ctgctaactccagagaccgagcgaggaaagttgcggggggatacctgagagtcagggagatatggctgggattggtcctatcaggcaggactgggagccgatagtggtgcggaagaaggcgcagaacgccgccgacaagaaggacgaaaaggccgtcaacgctgcccgccgctccggcgccgagatcgacaccaccaagaagtacaacgctggaacgaacaaggctgcatctagcggaacttccctcaacaccaagcggctcgacgacgacaccgagaacctttcccatgagcgtgtttcaagtgacctgaagaaaaaccttatgcaagcaaggctggataagaagatgacccangcacaacttgctcagatgatcaat

SEQ ID NO: 438990 - DNA, 423 bp, Triticum aestivum
gctttgattttcgctgaagcttctgctcaggcatgtagcttctaagacagtggctcctaacgtggataagctggttgcccttgttcaccgtcctaatgaatcgttcttccttgctccccaggcagacaaagttacggttgtatacccaatgaggttccaggattcgattgatatcgtcttggcaacttcgtttctgcaggaatttgtagaagcaaggcggactgctgcacttaacaatgccccttcctgtatgtggtctccagtaccacctcttgagttaaaaggcgtgaatgctgatgcacttgatgcaaatgctggttttgttacttttgttgttttccctcggcatgttgagggtagaaagctagacaaaacagtttggagtttgttaacctttcatgcttatgtaagctaccatgtaaa

SEQ ID NO: 438991 - DNA, 241 bp, Triticum aestivum
tctatgaacgtgctgggaaggtgcaatgtcttggcagtccagaccggacaggcagtgtcacaattgttggcgccgtctctcctcctggaggagatttttcagatcctgttacctctgcaaccctcagtattgtgcaggtcttctggggactggataagaagctggctcaaagaaagcatttcccatctgttaattggctcatttcttactcaaaatactccacggctttggaaggatacta

SEQ ID NO: 438992 - DNA, 295 bp, Triticum aestivum
ccttggatcgttcatttcatggactctcatcattgatgttgttgaagaggatacaccagttgaggaaaaagtcattgagattatatgcaagaagctgccaaaactgcgggtactagccgttgctttcagcaagaaacatcatggaatcaggaaacccaataagttctcggtcccaacatctattgctcagttaaagcacctacgctatcttgctttcaagacataccactcatgctttgtaactttaccaagaacactaactaaacttcaccatatccagctgctagatttttac

SEQ ID NO: 438993 - DNA, 486 bp, Triticum aestivum
  unsure (1)..(486): unsure at all n locations
tccatgcgtccgcagcgagatcgtgccggacacaggcgttttctatgattttgagaagtttgcaccgacggcggccaccgtgagctcttcactgttgcttgggatcgcagggctcccggataccaagttcaagagtgccatagataccgcattggtagatggtgaatgtaacacaatggagaagcccggggaccggatgtcctgttaccttaccaaggccctggggaatgttggagctgagctggctcatcaagttcctggaagagtgtccacggaaatagatgctcgattggcttacaatacccaaggaatcgtccagagggtgcatgaactgttgcagatatacaatgaacatgatatcccatcagaacgtctgttattcaaaattcctgctacatggcaaggtatagaagcgtcaagattactngaatctgaaggaactcaaacacatctaacattcgtttacagttttgcacaagcagcagc

SEQ ID NO: 438994 - DNA, 327 bp, Triticum aestivum
aggctgaggcagcagaagcaccatggattccctgtgtcactcctacgtcattgtccttgtgctcctattcattggaggatccgatgccaacccagccgcccgtcgccacagtcagctggatgtaaaccacaagaagcagccactacagacattcaggccttacaacattgcccacaggggttccaatggcgaaatacccgaggagacagctgcggcatatttgagggctatcgacgaaggtgcagacttcattgagactgatatacttgcatcagaggacggtcatctgatatgtcttcatgatgtaacactggataacacaaccga

SEQ ID NO: 438995 - DNA, 451 bp, Triticum aestivum
cggactcgtgggtacagtatttgttcgagtgcttccgacattgtgcttacggagccatgtctcagtgtcattatcagtgctgtcctgaccagcaggtgcattttccagaggatgaagaactacacgatctatgcagtttccatcaccatccgtattgtgcttggctttatgcttattgccctgatctggaaatttgatttcgctcccttcatggtccttatcattgccatcctcaatgatggtactatcatgacaatatccaaggacagagttaagccatctcccttgcccgacagctggaagctcaatgaaatcttcgccactggtgttgtgctcggaacctaccttgccctgatgactgtcgtcttcttctgggttatccacaagacggacttcttcacaaacaaattcggtgtcaggtcaatcagagacagtgagtttgagatgatgt

SEQ ID NO: 438996 - DNA, 391 bp, Triticum aestivum
  unsure (1)..(391): unsure at all n locations
ccttaaatatgaggaagcgaggcggatctttctggcaaggttatgtaaatgattatgatttttaggataagataaatttcgctgtattcccttcactgcaaggagggccgcataataaccatattgctgctttagcgataacgctgaagcaagttgcgacgcctgaatataaagcatacattcaacaagttaagaaaaatgctcaagctttggcatcggccttgctcagaagaaaatgcagattggttactggtggcactgataatcacttggtgctttgggacctcagaacttttggcttgaccgggaagaactttgagaaggtctgtgagctgtgccacatctctataaataagacaccgatatatggngataatggctcaatatctcc

SEQ ID NO: 438997 - DNA, 391 bp, Triticum aestivum
ttcgctgccgcagccgccacctcctccgcaggcagcccactgcgaagcgaggtcgaataagccatggcagacgccaaggccacgacggcggtcaccctccgcacccgcaagttcatgaccaaccgcctgctcgcccgcaagcagttcgtgctcgaggtcatccaccccggccgcgccaacgtctccaaggcggagctgaaggagaggctggccaaggtgtacgaggtgaaggaccccaactgcatcttcgtgttcaagttccgcacccacttcggaggcggcaagtcctccggattcggtctcatctacgacaacctcgaatctgccaagaagttcgagcccaagtaccgcctcatcaggaacggccttgctaccaaggtagagaagtcac

SEQ ID NO: 438998 - DNA, 197 bp, Triticum aestivum
gtcatagcttcagatttccttccccatggctccgagcaagatctgcatcaatggtttcggccggatcggcaggcttgtggccagggttgcgctccagagccccgatgtcgagctcgtcgccgtcaacgaccccttcatcaccaccgactacatgacctacatgttcaaggatgacactgtccatggacagtggaagc

SEQ ID NO: 438999 - DNA, 375 bp, Triticum aestivum
cggttgcgtgggcgagcacggagcacgtgatgaagggcctgtttgagtcggccaagacgtacgtgaacgcggcgcaggcgtacgtgcacgtcaaggatgtcgccgaggcgcacgtccgcgtctacgaggcgcccggcgcgcacggccgctacatctgcgccgagggcaccacgctccaccgcggcgagctctgccgcgtcctctgcaagctcttccccgagtaccccgtacccaccaagtgcaaggacgaggtgaacccaccggtgaaagggtacaaattcacgaaccagaggctcaaggacctggggatggagttcgtgccggtgctgcagagcatatacgagacggtgaagagcctccaggagaaagggatgc

SEQ ID NO: 439000 - DNA, 156 bp, Triticum aestivum
caaatacaacgaccctacctacatgatccgagctattccgagtaatgcagcagacaatgtctactgcacactgctggctcacagtgccatccatggcgcaatggcgggatacagcttcactgctgggatggtcaatggcagacatgcctacatacc

SEQ ID NO: 439001 - DNA, 396 bp, Triticum aestivum
ttccatcgtccgcgaccggcgacctcgcttgcaccggatcaaccagctagggtttcgtcttcgtcgccttctccgcggagcttggagttttcggcgagatgttcgggcgcgggccgccgaagaagagcgacagcacgcgctactacgagatcctgggcgtgcccaaggacgcgtcccaggacgacctcaagaaggcctaccgcaaggccgccatcaagaaccaccccgacaagggaggcgacccagagaagttcaaggagctagctcaggcttatgaggttctgagtgatcctgagaagcgagagatctatgaccagtatggtgaggatgccctcaaggagggaatgggaggtggaggaatgcatgatccttttgacatcttccagtcattctttg

SEQ ID NO: 439002 - DNA, 471 bp, Triticum aestivum
  unsure (1)..(471): unsure at all n locations
caggacagcagggctgcatgcgngtttttatttcgcccacatttagagcggaggctgtagccccggatgtcgtcggccgggagggcgagggccgcgagcctggcggcggtggcggtgcggatggtggtgggggcggcagcgcggcccgcgccgagcgcggcgctgatgatggcggcggtgcggggggaggacacggagttcgggacggcgtcctggtgggcgtacgcggccctgtccgccttcctagtgctgctggccgggatcatgtcggggctcaccctgggcctcatgtcgctcggccccgtggatctggagatcctcatgcgcagcggcaccgacgccgagaaggcccaggccgctgcgatccttccggttgtaaagaagcagcaccagcttcttgtcactctgctgctgtgtaatgcttgtgccatggaggctctccctatattccttgacaggattttcaatcct

SEQ ID NO: 439003 - DNA, 439 bp, Triticum aestivum
gcacaaggtgggactgcttctcggccccttctagatcagccatctgctgatccatacacagcggctttcacgaaactcagcgtgctcgctgagcaaagaggggatgcttatgcaaacgccgatgtaagggttcctcttgaagagcttgcagctaaaaagggccatgatgacgtctctcagctaaccccaactgatattgctgtcgaggccctgcaaaagattaagaattttgccactgagcattccatggccagtggcccattcgacgacttataaattgccgccaggagaccaacaatgcaatccttgtaggatttcggcccaattttgtttgtaccgtgtatcttcatttttgtttcgctcaacattattgattcattctttatactgaaaaaggagctgtgctgaagcatgctctgaaacataaaaaaatagcgga

SEQ ID NO: 439004 - DNA, 427 bp, Triticum aestivum
gatatgacagagctggggatgcgttcaacaaagggtaagtctatgttcgcaacgttcaagcagtgtgcgcggtatctcagtcccctgtttgagttctgcaggaagaaggttcttcctgatgacatccgcaaagcattgctctttattgtggactgctgcatgaagcgtgattatttgcaagcaatggaccaatacatcaagctggccattggcaacgcgccatggcctattggagtcactatggttggtatccacgagcgttctgcacgagagaagatttacacgaatagtgtggctcatatcatgaacgacgagaccactcgcaagtaccttcagtcgatcaagaggcttatgaccctttgccagcggcgttatcctgccctgccctccaaatcagtggagttcaacagcctggcaaatgggagtg

SEQ ID NO: 439005 - DNA, 182 bp, Triticum aestivum
ccacacgctcgtcgacaaggtgctcagctccaagaccgtcctccagaaggcccgcgccgctggcggccccggcccagccgccaagcccaccaggatcgccgagtgcctgatcggcgacgagaccggctgcgtcctcttcaccgcccgcaacgaccaggttgatgttctgaagcctggcaaca

SEQ ID NO: 439006 - DNA, 404 bp, Triticum aestivum
gccctaggacgcaccttctccgacagggagacgctcgggggcctcatcgccgcctccgtcttcgtcgtcttcctcacgtctgtcggtgggatcatcttctccgcgctggcgctcggcgccgccgtcgtctgcgcgcacggggccttccgcgtgccagaggacctgttcctcgacgaggtgcccgaccagggtctcgtaggaaacggcgccaccctcaacctcctctccttcatcaacggcgctgctggaggaggaggacgcgtctgagccagcctcatgtcctcagctctctgatctgctacgcggaagagacaagtaaagtctgtggctggttgattcgctttttcagaaacgaaatacttttacttgtttgagatcgtactacgcgttgtctttaggagcgt

SEQ ID NO: 439007 - DNA, 238 bp, Triticum aestivum
gaccatccacgttgaggatgcgcagggccaccagtttgccacccgtctgggcaacgtgttcaccatcggcaagggcaccaagccgtgggtgagcctccccaagggcaagggtatcaagctcaccatcattgaggagcagaggaagcgggatgccgctgcccaggctgctgccaaggcctgattctgaggcgttgagtcgttttgctatagccagttatcttcaaggatatagacctat

SEQ ID NO: 439008 - DNA, 371 bp, Triticum aestivum
gcaagagattcagggagttgggccagaacaaggttgtccttgccaaggtgtcgccgcggtgcctcgccgtccgggccaaaagctggtccgactccgcccaccgcttcttgcagcgctgcgcggacgccgggaacctcgacgcatgctaccttcttggcatgatccggttctactgcctggggagccgggggtcgggagcggcgctgatggcggcagcggcggtgggtggccaccgggaggcgctctactcgctggccgtcatccagttcaacggcagcggtggcagcaaggacgaccgcgacctccgcgcgggcgctgcgctgtgcgcgcgcgcggcgtcgctcggccacgtcgacgcactccgcgagctc

SEQ ID NO: 439009 - DNA, 359 bp, Triticum aestivum
gcgcggggccgcctcgcggaggagcgcatggcctggcgcaagaaccacccccatggattcgtcgcgaagccggagacggtggccgacgggtcggtgaatctcatgatctggaactgcaccatccccggaaagcaggggactgattgggaaagtggatactacccacttactctccacttcagtgaggactaccctagcaaacctcccaagtgcaagttcccgcagggttttttccacccaaatgtctatccttcagggacgggctgcctctcgattcttaatgaggatagtggttggagacctgccatcactgttaagcagattctagttggaatacaggatttgcttgatcaacctaa

SEQ ID NO: 439010 - DNA, 414 bp, Triticum aestivum
gactcgctgaaccccttcatgcacgcgcgcggggtggccttcatggtggacaactgctcgacgacggcgcggctggggtcgaggaagtgggcgccccgcttcgactacatcctgacccagcaggcgttcgtgacggtggacaaggacgagcccatcaaccaggacctcatcagcaacttcatgtcggaccccgtccacggcgccatcgaggtgtgcgccgagctgaggcccaccgtcgacatctcggtgacggccgacgccgacttcgtgcgccctgagctccggcagtcctcctaggctcctcgcccccttgcacctaagttaagtaagctgcgccgggccggtcggggcctggcacgagagttggtttttgatggatggacattcatggactgtaatgtatgtgtgcgactg

SEQ ID NO: 439011 - DNA, 193 bp, Triticum aestivum
gaggtaaggatggtgagagtcagtgtgctgaacgatgctctcaagagcatgtacaacgctgagaagcgtgggaagaggcatgtcatgatcaggccttcttccaaggtcattatcaagttccttatcgtcatgcagaagcatggatacattggcgagtttgagtatgttgatgatcacaggtctggcaagatcg

SEQ ID NO: 439012 - DNA, 437 bp, Triticum aestivum
acgcggcgacgggggggggttgtttaaaggacacctacgtttaggaccgcgccaccgaggagcagctcgtcacgccgtggaccgtctctgtcgcgagtggttacaatttgttgagggatccacgctacaacaaggggcttgccttcacagagaaggagcgcgagacacactaccttcgtggccttctgccaccaaccgtcatatcccaggagctgcaggagaggaagatcatgcataatattcgccagtaccagctacctctgcagcgttacatggctatgatggaccttcaagaggggaatgagaggcttttctacaagctcctcattgacaatgttgaggagctgcttcctattgtgtacactccaactgttggtgaggcctgccaaaagtacggatctatatttagtcgtccgcagggtctttacatcagcttg

SEQ ID NO: 439013 - DNA, 305 bp, Triticum aestivum
tgctcattctgcttcacgtcctgcttgtcgcggcggcagcgagagccccggcggtgcatgcgtggtgcatggagggccactacatgacctgcaagatcgccgacggtttcctgacgagcgaggcgttgacggtggtgaaggccctcctgccgtaaagatccaacggcgagctcgcggaggtgtgctcgtgggcagacagacagcgcttccggtaccggtggtacagacgactacactgggccgacaccccgggagactgcaagttcagctacgccagggactgccacgacaccaaggggaacaag

SEQ ID NO: 439014 - DNA, 414 bp, Triticum aestivum
cggtcgcgtgggttcctgcccattctgcaaccatgggagcagcgttgaatgccggattgatctgaagaatctgattggtgaggccaattgtcaaatctgccaggaaagcttcagcaccactgcaaatgcgctcactgaagctattgatgtatacagcgaatggatcgatgagtgcgagcgtgtcaacactgttgaagatgacgatggtgcatgagcaagtgtaactataatactctatgatctcaacgtgttgatgtcatttactgccaccgtcagccatatctgtagtagcattgtaacaatgtactggctgacttaaacgttagtaggcagtttgtcccgtgcttaatacacaaccgatgatattgtgtacctgtatttgtaaaccttggtatagcggctgagattacacct

SEQ ID NO: 439015 - DNA, 383 bp, Triticum aestivum
ctcctcgccgccaccgccgctcccgtccgtccgtcctcgccgcccctccgccgtccccccgggtttccaggtcgccggccttcgccccgtcagccagccgtcgcgtccatggcggaggtagcgcccgtcgatcaggggaagaaggaggaggaggagttcagcacggggccgctgtccattctcatgctcagcgtcaagaacaacacccaggtgcttatcaactgcaggaacaacaagaagttgcttggtcgcgtgagggcatttgatcgtcattgcaacatggttcttgagaatgtcagggagatgtggactgaggttccaaagactggtaaaggcaagaagaaggctctcccggtgaacaaggacaggttcataagcaagat

SEQ ID NO: 439016 - DNA, 346 bp, Triticum aestivum
gcgtatgacccagtacctggacgacattgccatcctcaccggaggaactgtaatcagagacgaggttggactcacacttgacaaggcagataatacagttctaggaacggctgcaaaggttgtccttacaaaggagtcgacaacaattgttggtgatggcagcacccaggaagaagtgactaagagggttgcacagatcaaaaatctcattgaggcagcagaacaagactacgagaaggaaaaactcaacgagaggattgcaaagctcgccggtggtgttgctgttattcaggtgggagcacaaacagaaactgaacttaaggagaagaagttgagagttgaggat

SEQ ID NO: 439017 - DNA, 379 bp, Triticum aestivum
cggacgcgtgggcggacgcgtgggcggacgcgtgggcggacgcgtgggggttttaactcgcatccattctcaaggttagcaggagaccggccatggcgccgtcgcagcccaagtcagggctcttcgtgggcatcaacaagggccacgtcgtcaccaagcgcgagctgccgccacgcccgtccgaccggaaggggaaaggtaccaagagggtgctgtttgtccggaacttgattagggaggttgctggatttgctccctatgagaagcgtatcactgagcttcttaaggttggaaaggacaagcgtgcactcaaggtcgccaagaggaagcttggtactcacaagagagcaaagaagaagagggaggagatgtcaagtgt

SEQ ID NO: 439018 - DNA, 318 bp, Triticum aestivum
cactcccacatgtgctactccaacttcaacgacatcatccagtccatcatcaacatggacgctgatgtgatcaccattgagaactcgcggtctgacgagaagcttctctccgtcttccgcgagggtgtggtgtacggtgcaggcattggcccgggtgtgtacgacatccactcccccaggatcccgtccaaggaggagattgccgaccgtgtcaacaagatgctcgcggtgctcgacaccaacatcctgtgggtgaaccctgactgcggtctcaagacccgcaagtacgccgaggtcaagcctgcgctcaccaacatg

SEQ ID NO: 439019 - DNA, 315 bp, Triticum aestivum
cccacttttccggccgacgccgccgaccctcgcgacgccgccacttctcctcggggcgcaaccatggtgacctccaccaagaagacgaagaagtcgggggacaacatcaacaacaagctgcagcttgtcatgaagagcggcaagtacacgctcggctacaagaccgtcctcaggaccctcaggaactccaaggcaaagcttgtgatccttgctaacaactgccctccgctccgcaagtctgagattgagtactatgctatgttggcgaagatcactgtccaccactaccatggaaacaatgttgatttgggaact

SEQ ID NO: 439020 - DNA, 394 bp, Triticum aestivum
ggatacttgaacgagatattcacatggtggcatcggattccaaagcacatgaatttcctgaagcatttctgggagggtgatgaagaggaggtgaaggcgaagaagacccagctgttcggtgccaacccaccgatcctctacgtcctccactacctgggccgcaagccatggctatgcttccgggactatgactgcaactggaacgttccgatactgcgggagtttgccagtgacatcgcgcacacccggtggtggaaggtgcatgacaagatgcccaagaagctccagagctactgcctcctgaggtcgaggctgaaggcagggctggagtgggagcggaggcaggcggagaaagccaacttcaccgacgggcactggaagcggaacatcaccg

SEQ ID NO: 439021 - DNA, 329 bp, Triticum aestivum
gatctctgctgtcgagaggaactacgcatccatcccttccgcccccagctacctcgcttgctccacgcatcgtctttgaaggagaggaagatgacgagcgtatggaagaccaaggttctccccgggctcaacaagatcttcgacaaggatggcaagaaggccgccgccgccgagttcttgaaatccttcaacaaggaggagattgacaaggagattgaggacaagaagacagaactagagcccaaggttgtggagaccattgaagcatctcctccagaaattaagggcttgatgaaggataagaaaacatccaagatcaagaagaactc

SEQ ID NO: 439022 - DNA, 293 bp, Triticum aestivum
gtcggcgccagtacaatgcttcagttctacactgatgaggctgctgggcgcaagatgtccccaaatgctgttctgatcatgagcatagggtttattgccgtcgttgccgtactccatgttttcggcaagctgtaccgcacccctaattaggttccatatatacaacctgagtttatgtgtctatgaatagcgaagtcgtagactttgcataggaaatgactgtcgggtcctgaaaagatttaccttataatactgagatgatattgtcgaatcttttgcaaggtgtttgtcta

SEQ ID NO: 439023 - DNA, 291 bp, Triticum aestivum
gagtctgacatggtcaagctggaggaagctgtccgaagcatcaagatggagggccttctgtggggtgcttccaagctcatgccagttggatatggcatcaagaagctccagattatgatgaccatcattgatgacctcgtctctgtcgacactcttattgaagaccatctctgcgttgaaccagccaacgagtacatccagagctgtgacattgttgccttcaacaaaatctaaatcttcctgaggcaagtgatggcggtgggtggacaatgcagcagcacaatatatcta

SEQ ID NO: 439024 - DNA, 286 bp, Triticum aestivum
caatcatccccaattgacacaaggagggcactttataagaatattgtcttgtctgggggttcaactatgtttaaggatttccacagaagattacagcgggacctgaaaaagattgtggatgtacgggtccgtgcatctaatgctcgacttggtggagatgcgaaggctcaacccgtggaagtaaacgtggttagccatccaattcaaagatatgcggtttggtttggcggatcggtgcttgcttctacagcagaattctatgaggcttgccacacaaaagcagagt

SEQ ID NO: 439025 - DNA, 318 bp, Triticum aestivum
  unsure (1)..(318): unsure at all n locations
tgtgcttgccttctctctcgtgagccgagctagctgtgagaatatcatgaagaagtggataccggagcttcagcattacgcgcccggcgtgccggttgtgctggtaggcacaaaactggatcttcgtgaagacaagcactatttgctggaccaccctggcatgatacccgttaccacagcacagggggaggaacttcgtaagcaagttggtgctttatattacatagagtgcagctcaaagacacaacagaatgtcaaagctgtgtttgatgctgctatcaaggtagtaatccagcccccaactaaacaaaanaaaaa

SEQ ID NO: 439026 - DNA, 472 bp, Triticum aestivum
ttggagagcgagctaggccgagacgatgagctccccagcggcggccgtgaaggtgatcggcgcagtggacagcccgttcagccaccgcgccgagatcgctctgcgcctgaaaggagtcccttacgagctcatcccagaagacctgagaaacaaaagcgagctgcttctggccaacaaccccgtccacaagaaggttccggtgctcctccagggcgaccgcgccgtctgcgagtccctccttatcgtcgagtacgtcgacgaggccttccctggcccacccctcctccccgccgacccctacgagagggccatggcccgcttttgggccagcttcatcgacggcaagtgctcgaaggcctactggctggcgctgtgggcggagggcgaggcgcatgaagggtttgtgaaggagacaaaggagaacttcgcgctgctggaggcgcagctggaagggatgcggttcttcggcggc

SEQ ID NO: 439027 - DNA, 444 bp, Triticum aestivum
ggcctctctctgtttgctctcgcgtccgccgcgcccatcctcgtccgcgcctgcgccccgaccgtgctcgccgcctcccgcccgatccaccggtccaccaccgcgccggcggcatggcggatcagctcaccgacgaccagatcgccgagttcaaggaggccttcagcctcttcgacaaggacggagatggttgcatcaccaccaaggagctgggaacagtcatgcgttcgctggggcagaacccaacggaggctgagctccaggacatgatcaatgaagtcgacgctgatggcaatggcaccattgacttcccagagttcctcaacctgatggcccgcaagatgaaggacaccgactcagaggaggagctcaaggaggccttcagggtgttcgacaaggaccaaaacggcttcatctctgctgctgagctccgccacgtcatga

SEQ ID NO: 439028 - DNA, 294 bp, Triticum aestivum
gtgaaaggttgacgccatcaagaagatctctgagtatgtgtcgcagctgagaagagtcggcaaaggccacggagtgtggcacttcgaccagatgctgcttgaggaggcagcttgaaggacacggacacgacgactacgggcaatggaggatgtaggtgtgatatgtcaagtagtggacagataagccaaccactggatgtggttttgagggatttttgcagtggggtttgtagggtgctatgccgcgctgggtttgggatttgaaataaaacgaaggagatgtgccacgctctt

SEQ ID NO: 439029 - DNA, 422 bp, Triticum aestivum
ggcggggcaggtgcgaagatgacggcaagcccatggcgaagccttacaagttctcaaacctgaggctgagggagctggggttggagttcactccgctgaggcaaagcttgtacgagacagtgacgtgcttgcagaaaaagggtcacctgcgtctccccattgttcccatagcacagaagcgcgcgtacttgtaacagggcaggacaggggacaagcccatctcataaaacaacaagagcaaagctgcagcagcaaaagaaaatactgtcaggattttggagcttcagcataaaattaattgcgtatttctacaaagcaaagtgtggcatgtaaatagaactaaaaccacgacgagtattttggaagggaggggcattatttattttgtaatgaatgtacttctacacattatttataaattc

SEQ ID NO: 439030 - DNA, 425 bp, Triticum aestivum
tgcaaatatctgcgggcttcatgattttcttcgctgtcctaggaaaatttggagccctgttcgcgtccattccactgcctatatttgctggcatgtactgtgttttcttcgcatatgtcggtgcctgtggtctgagcttcctccagttctgcaacttgaacagcttcaggaccaagttcatcctgggcttctccttcttcatcggcatatcagttcctcagtacttcaacgagtacgcctccgtctcgggccatggcccggtgcacacgggcgcaagatggttcaacgacatgatcaacgtgcccttctcgaacaagccgttcgtggcggtgctggtggcctacttcctggacaacacgatgcacctgcaccagagcgcggtgaggaaggacaggggctaccactggtgggacaagttcaggagc

SEQ ID NO: 439031 - DNA, 431 bp, Triticum aestivum
  unsure (1)..(431): unsure at all n locations
cccacgcgtccgcttggcccaggatgggccccagggcgacgagacacacgtgacaacacgtgtcatgggaacgcatggttatgcggctccagaatacatcatgacgggccacttgactaccaagagcgatgtatatagctttggtgtagtgctcttggagctcatctccgggctacggtctgtggaccgtgcacgacggccgagggagcagaacctgatggcttgggctagaccatatctcaagtgctctgacagattgtacaaagtcatggacccatcgcttgagtgtcaatactcatgcaaaggcgccgaagcggcatcactggtggcatacanagtgtctcagccagaacccaaagtctaggcccaccatggggagggtggtcaaggccctcgagcccgtcctcagcatggaagacttctttcatatg

SEQ ID NO: 439032 - DNA, 439 bp, Triticum aestivum
ttgaagatggttatgcctggtgacaacgtaaccgcaatctttgagttgatgttgcctgttccgctcgaaccaggtctaagattcgcgctgagggaaggagggaggaccgtcggcgccggagttgtcgccaaagtcatgagctaataacaataatatgttccagacctttctctttttttttggcgtagtgaattttagcgaacaaatgaatgttgatatgaaggatttgtccgaccggaaacacgagataaacgagagtcgagagcaaggggactggcatggatgcatcttgtgtggatgcattcagccaaccaacttcctacggataatggtttgttaccattcccaagaattgctattttttcttctcatgttgggtagtttgctgtatcataccgcagcttgttacctagacacgcttctctggcatatattagct

SEQ ID NO: 439033 - DNA, 373 bp, Triticum aestivum
cttcgaccaggccacctacgacaagctgctcaccgaggtgcccaagtacaagcagatcacgccctccgtcctctccgagcgcctcaggatcaacggctcgctcgctcgcagggccatcaaggacctgatggagagggggctcatcaggatggtgtcaatccactccagccagcagatcttcaccagggccacaaacacctgatttacctcatgtgttggctgcctgttttctagtccagtagactgagatgtcgctgttatattgacgttcattatgttcagcgaggcactttggcacttcgtgccacaagtatgttgaattgcttttgagtttttggtacaatctaagacgcaatgaaatctaccttatatt

SEQ ID NO: 439034 - DNA, 475 bp, Triticum aestivum
tgcgcttcgctctcagatcccttctcctccgtctcgcccgcgtgttggggtaggagccatggcggaccagctcaccgacgaccagatcgccgagttcaaggaggccttcagcctcttcgacaaggacggagacggctgcatcaccaccaaggagcttggaactgtgatgcgctcgctggggcagaaccccactgaggcagagcttcaggatatgatcaatgaagtggatgctgatggcaatggaacgattgactttcctgagttcctcaacctgatggcgcgtaagatgaaggacactgattccgaggaggagcttaaggaggctttccgcgtgtttgacaaggaccagaatggtttcatctcggcagctgaactccgccatgtcatgaccaaccttggtgagaagctgacagacgaggaggtggatgagatgatccgtgaggctgatgtcgatggtgacggccagatcaattac

SEQ ID NO: 439035 - DNA, 422 bp, Triticum aestivum
tcgccggagtccctcccggacgccgcgccccaaccccaccgcttcaccgtcccggtcatcgacctgtccgccgcggtcaccacgcgagccgcggcggtcgcgcaggtgaaggaggccgcggagacggcgggcttcttccaggtggtgggccacggcgtgccggaggcggccacggcggcgatgctcgcggcggtgcgcggcttcttcgagcagcccgtggaggccaaggcgccgttctacacccgcgacctcggccggcgcgtccggtaccagagcaacctcaacctgttcaagtcgcgggcggccaactggcgcgacacgctcttcatggagctgccggcgccggaggagatcccggcggcgtgcaggagcgccgcgccggagtacgcgcggctggtgcagcaggggctgggccgcacgct

SEQ ID NO: 439036 - DNA, 378 bp, Triticum aestivum
gttacgacacccctcccccaaatggtgagagcctagagatgtgtgcagacagagccgtttcctatttcaaagatcaggttgttccacatctcacggctggaaagcatgtgatggttgctgcacatgcaaactcacttcgatcaatcataatgcatctagacaaattgacttcccaggaggtaatcagcctcgagttgtcaacaggcattcctatgctctacatatttaaggaaggcgagtttattagacgggggagcccggtaggaccttctgaagcaagtgtttatgcttatacaagggtaagggtctattccattttctatccctcgacagaacaatttgtatccacagtatatattaaaacaaactgattgacac

SEQ ID NO: 439037 - DNA, 333 bp, Triticum aestivum
cccacgcgtccggccattctatccctgttggtggtcttgcttactatgtaactgcaccatcaagtatggctgatattctggcgaatccattccatgcattgttctatgtggtcttcatgctgtcagcatgtgctctcttctcaaaaacatggattgaagtctctggttcatcagccaaggatgttgcgaagcagctgaaggaacaacaaatggtgatgccaggccatcgtgagtcaaacctgcagaaggaactgaacagatacatccctactgccgctgcatttggtgcagtgtgcatcggcgcattgactgttctcgctgatttcatgggcg

SEQ ID NO: 439038 - DNA, 456 bp, Triticum aestivum
aaggactccaacaggcagtccaagcagctggaagaactcactgggaagatgagggagtgcaagcgcttaatcaaggaatttgatcgtgtactcaaagatgaggagaaaagcaatacttctgaggtcaacaaacagctaaatgacaagaagcaattcatgatcaaggagttgaattcttatgtcaccatgaggaagacgtaccaaagtagccttggtaataagaggatcgaactattcgatgctggtaatgaccaggtagctgaagataacgttcaaatggcatcagaaatgtcaaatcaacaactgattgattctggaatgaaacaaatggaccaaacagaccaagctattgagcgttcgaaaatggttgttgcacaaactgttgatgttggagctcaaactgctacaactctaacacagcaaactgaccaaatgaagagaattggcaatgagcta

SEQ ID NO: 439039 - DNA, 253 bp, Triticum aestivum
catgtgcccggacgcctacagctacgccaagggcgagcagaccagcaccttcacctgcccacctggaaccaactaccagatcgtcctctgcccttagaataggacgcgttgaaggatcaaaagtataataaccgggatcaataaggaacaatgactactctgagtagtctacttatatgtatgtgccatgtcacgtatatgcatatgcatgactgtgcttgtatgttgaccaataataaataaatggttaaat

SEQ ID NO: 439040 - DNA, 341 bp, Triticum aestivum
cgccgcctcctctctcgtcccggcgcgcttggagctggacctacccgcgcgccgcccactatgatcatctccaagaagaaccgcaatgagatctgcaagtacctcttccaagagggggtgctgtatgccaagaaagactacaacctggcgaagcacccgcagattgacgtgccgaacctccaggtgatcaagctcatgcagagcttcaagtctaaggaatacgtcagggagaccttctcgtggcagcattactattggtacctcaccaacgatggcatcgagttcctgcgcaacttcctcaacctgccatctgagatcgtgcctgccacgctcaagaagtc

SEQ ID NO: 439041 - DNA, 432 bp, Triticum aestivum
cctacgcgtccgcccacgcgtccgcaagaacgatcgtgcgctaccagtgccgtctccatttgagcatgtgcatgcggcggcgcccttcgacgagagcatgacgctcctcgatcatgagaccgacaagctcttctatgaggccttggccgcccatgaccatatggggatcggcacggttgtgcgggaatgccgtgggctgttcaatggtctggagtcactcaccgactgctgtggtggtgacgggacgacggccagggccatcgtcaaggcctacccgcatatcaagtgcaatgtgttggaccttccacaggtgatcgacaaagtcccgagtgatggtgttgttaactatgtcgctggcgacctcttccataccgtcccacctgctcaagccgtcatgctcaagcttgttctacacttttggagcgacgagga

SEQ ID NO: 439042 - DNA, 367 bp, Triticum aestivum
gtaagccatggacgacaagtacctccgcgacatggtgggcagcttcctcctcggcgggcgtgacacggtggcctccgcgctgaccacgctcttcctccacctgtccaagaaccctcaagtcgcggcagccattcgcgcggaagccggcggcgacaagccgtccacgtacgagcatctcaagagcctgcagtacacgcacgcggtgctgtacgagaacatgcgcctgttcccgcccgtgcagtttgactccaagttcagcgctgccgccgatgtgctcccggacggaacctacgtggaaggagactcgcgcgtgatgtaccacccgtacgccatgggccgcatgccgagcatctggggcgccgattac

SEQ ID NO: 439043 - DNA, 471 bp, Triticum aestivum
tgttgtaacatctcgcatgtcagacacagaggaggagaatcctgaggagaacgatgaaggattgacagggcttgagggggagcttaaagggtggagggtaggggagacctttgaagggttcacagggacatcctcattgtcgacaacgaatgatgatgatgcatctagcacgaatacagaggctgtgttcgtcatctcgccgaatggcaagttcaagcggaacatcaagtcatggatgcgtggtgcacttctgggaagtggctcattcgggatggtgtatgaggggatcagtgatgaaggtgcgttctttgctgttaaggaagtatctttgcttgaccaaggaagcaatgcacagcaatctattctttcacttgaacaggaaatcgctctccttagtcagtttgaacatgaaaatatagtccagtattatggaactgacaaggaagaatcaaaactctacatttttattga

SEQ ID NO: 439044 - DNA, 445 bp, Triticum aestivum
cacaacttcccccaccggccaccagacgccgcagacttccccaaaatccccacccaagctcgaatctgatccgacgcgcatcgaatcgagtgagatgagccgcccggacgacggacataggtctttcttccctgtgggaaaccccttccgggtcatccttccagggggacctcacctgcctaggaagctccaggcgctgctcaagtcatacgaggatgccctggccttgagcttgaggaagctaaagccagagaatgccttggaggtcctcaccttgtcctggatgaggcttgctgtcgattgcttgtcagagctgcatgccaacataggcaccctgataaccgagctcgagctgcctgtctcggattgggatgagaagtgggtggacatttacttaaacagcagcgtgaagctgctggacatctgcatcgcgctaagctcggag

SEQ ID NO: 439045 - DNA, 457 bp, Triticum aestivum
cctacgcgtccgcaaaaccagaccaaatcttcggcgagcccatcggcacattctgagagcggagaggaagcaggaggcggcggatcaaggagaggagactagaagatgggtggcggcatggaggtgaacaagaaccgctggatcgaggagtggaacgccggccgggagaacctcgagctcaacttccgctttacccgccgcagcctcgccgtcatcggcctcttcggcctcgccgtccccatcctcgtctacaagggcatcgttcgcgaattccatatgcaggacgaggacgccggccggccgtacaggaagttcctgtgagcgtcgcctccggtggatgtcgagactccgagccgtctgcagggtttcggtcagggagaaggaatctccattcggtttgtttcccgtactgttgtagtcagaccggagtattttgttctcacatgttgtgcgatat

SEQ ID NO: 439046 - DNA, 392 bp, Triticum aestivum
gtcttctccaagaacctcaagcttggcatccaggaggactcccagaacaggaccaagattgctgagcttctgaggtaccactccaccaagagtggtgatgagctgacgagcctcaaggactatgtgaccaggatgaaggagggacagaacgagatctactacatcactggtgagagcaagaaggctgtggagaactctcccttccttgagaagctgaagaagaagggctatgaggtcatctacatggttgacgccattgatgagtatgccattggtcagctcaaggagtttgagggcaagaagcttgtctctgccaccaaggagggtctgaagcttgatgagagcgaggacgagaagaagaagcaggaggagctcaaggagaagtttgaggg

SEQ ID NO: 439047 - DNA, 453 bp, Triticum aestivum
gctcgacgcgctgaccgccaaggcggcgcccgggctgtcctcgcccgagcgctccgtctcgtccacggtcaccgagtcgacgtccacggcctcggcggcggcggagcagcacggcaactcgggcagctccgcgtccgcctccgcgtccgtcaaggaggagtgcttcacctcgtccgaggagtcggaggagttccagatcgacgagagcttctggtcggagacgctgtccatgccgctggacgacatcaacgacgtctgcatggagccccacgacgcgttcggcaagcccacgggcgccgccgacggcgacatggactactggctcaaagtgttcatggagggcggcgacgacgacaacaacaacaacggcgcgctagacttaccgcagatttagggagggagagagctctagtttcgtcgctgctcccgattgatcgttcttttttctctctc

SEQ ID NO: 439048 - DNA, 466 bp, Triticum aestivum
ctcacgcgtccgggactgggcggcgcagcgcgccggggattgcctgctccagcactgcggcgggccgttcggcgagaacatcttctggggttccgggcagtcgtggacggccgccgacgcggtgaagctgtgggtggacgagaagcagaactaccatcttgacagcaacacctgcgacgccggcaaggtgtgcgggcactacacgcaggtggtgtggcgcaagtcgacccgcatcggctgcgcgcgcgtggtctgcgccgggaaccggggcgtcttcatcacctgcaactacaaccccccgggcaacttcaacggcgagcgcccgttcgcgttccttacccttggcgccgaagccaagtagtacgtacgtgtgaatgtgatcatgcatgtgtacgtacgtgcgtgtctttatgtgtgtgtggtttgaatatttatacgtctacgaacgctacgtacgtacgtaaat

SEQ ID NO: 439049 - DNA, 439 bp, Triticum aestivum
tcgctcacgcgtccgcccacgcgtccggacaaagaggactttgatgatttctgttctcgggcctcggagttggcagagcaggcgaatggagcaccgctcttcactgtcgtgcagtcagttcagccgtcgaaacagatgtacaaccaggatgacgggtccggctgttcaggctacggcgtctccgacaacatcgacacggaggacctcgatggctccggcgaaacaggagaagacgagtggcagattctctgaatgaaagggaagtttaacttcagttgttcggttaaaccttcacatgacccctgtgtgaagtaaagacttcaaaaacctcgtgtgaaatctagggtttccagttctacggaacaagcgggtgtgctgcttgttccgcgtagctgggaggctggaaaaggtaggagccgttatgctgatcatcggatcg

SEQ ID NO: 439050 - DNA, 426 bp, Triticum aestivum
gaaatagttctccatctcaaccttctcttctcccttgtcttctctcccgcgcgttacctcgaaccggaagcgaactctacatccatcctcgaccgatggatccatgggtcagcagccagccttcccttagcctcgacctgcacgtcggcctcccgccgatggggcacccgcaccaccaccaggcggcgcccatggtcgcgctggccaagcccaaggtcctcgtcgaggagaacttcatgcagctcaagaaggaccctgaggttgcggttcttgagtctgagctacagcgggtgagcgaggagaaccggcggctgggcgagatgctcagggaggtggcctccaagtacgaggccctgcagggccagttcaccgacatggtcacggccggcgcccacgccggcggcaacaacaacaactacaacaacc

SEQ ID NO: 439051 - DNA, 479 bp, Triticum aestivum
gtcaatgctggtgccggtgtgggtgccggtgctggtgcccttgatgcattgcgacagcttccacagttccaagcactgcttgcattggtccaggctaatccccaaatcctgcagccaatgcttcaagagctggggaaacaaaatccacagatcctgcggttgattcaggaaaatcaggctgagtttctccgcctggtaaatgaaacacctgagagtggtgctggcgggaatatactaggcgcgctagcagctcaaatgccacaggcagttcaagttactccagaagaacgggaggccatccagcggctcgaggggatggggttcaaccgtgagcttgtgttggaggtcttctttgcatgcaacagggatgaagaactggctgccaattatcttttggatcatggccatgagtttgaggaacaacaatagatgttagattggtcttgctgttgaaagacagaagagtcagtgacagaagc

SEQ ID NO: 439052 - DNA, 330 bp, Triticum aestivum
gtttaacccagtaaactactgccacccatccgccggcgaaatggcccacggccgcatcctccccctggcgctcgccgtcctggccacggccgccgtggccgtcgcctcctcctccttcaccgactccaacccgatccggcccgtcaccgagcgcgccgcctcgacgctcgagtccaccgtcctcgccgcgctcggccgcacccgccacgctctccgcttcgcgcgcttcgccgtcaggtacggcaagagctacgagagcgcggcggaggtgcggaggcggttccggatcttctccgagagcctcgaggaggtgcgctccaccaaccggaa

SEQ ID NO: 439053 - DNA, 385 bp, Triticum aestivum
ggtttctggagctgatcgttcgtcgataatcttgccactttctggtttgaagcagttccatgagatggtgggacactttgtagatataatgaaggacagacttgaaggaatgacgggcgcgaacgtgcgcactgtcgagcccagccagagatgattagctcgaccttgtggcacttactgctgttatgcctcctctaggatttgtgtaagtgatgtggtgtgtggttgcgtagatcacgcagtattaattcatctgatggggataataatgtttgatgtttagttttttctttcttctgaattccgtggcgaggattgatttgcttgggaccttttctgttgaggaataataagcagtataatgttcgtgggtggtatatgttgg

SEQ ID NO: 439054 - DNA, 375 bp, Triticum aestivum
gtcttcctcctccccaactactcctctcctccgcgcatcgcatcgcaccgggggtcacctgagatcacatacacaatggtgaaggctgtggctgtgcttaccggcagtgagggtgtcaagggcaccatcttcttcacccaggagggagatggcccgaccaccgtgacgggaagcgtcactggactcaaggaagggctccacggcttccacgtgcacgctcttggtgacaccaccaacggctgcatgtcaactggaccacacttcaaccctgctggtcatgtgcatggggcaccagaagatgaaatccgccatgctggtgatcttggaaatgtgacagctggagcggatggtgttgctaacatcaatgttactgac

SEQ ID NO: 439055 - DNA, 337 bp, Triticum aestivum
cttttctccatttccacacagcctttagctaattattaagctaccactcttcctagctaagcatctttttgagttatccgtggtgatcggatggacagcgcgaggagctgtctcgtggacgacgtgagcagcggcgcgtccacgggcaagaaggcctctccggcgccagccgcgccggcgaccatgccgctgcagcgggtcggcagcggggccagcgcggtcatggacgcgccggagcccggcgccgaggcggactccgcccgcggcgggcggctgccgtcgtccaagtacaagggcgtggtgccgcagcccaacgggcgctggggcgcgcagatct

SEQ ID NO: 439056 - DNA, 185 bp, Triticum aestivum
cttcattctatgaagcttttggccttactgtcattgaggccatgacatgtggtctgccgacaattgcgacatgccacggtggccctgctgaaatcattgtgaatggggtgtctggtctgcacattgatccttaccacagtgacaaggccgcagatatcttggtcaacttctttgagaagtgcagc

SEQ ID NO: 439057 - DNA, 374 bp, Triticum aestivum
caatgacaagggcaggctgagcaaggaggagatcgagaagatggtccaggaggctgagaagtacaagtcggaggacgaggagcacaagaagaaggcggagtccaagaatgccctggagaactactcgtacaacatgcgcaataccatcaaggacgagaagatcgcctccaagctgccggccgacgacaagaagaagatcgaggatgccatcgatgctgccatccaatggctggacacgaaccagctcgctgaggcggatgagttcgaggacaagatgaaggagctggaggccctgtgcaaccccatcatcgccaagatgtaccagggtgctggtgccgacatggagggcggcatggacgacgacaccccagctg

SEQ ID NO: 439058 - DNA, 457 bp, Triticum aestivum
tttacgcgtccgcccacgcgtccgtacagagcacttattccagatttgtaccgtgggaaggttgctttggaggtagctgaagcacaacatctgatggaaggactagactggcagggtgcaatcaaggatattcaggcttcagttaaatggctgaaggaaaatggatcacccaaggttggtgttactggttattgcatgggaggtgctttggcaattgcaagtggagttttggtcccagaggttgatgctgttgttgctttctacgggacgccatcttcggagcttgctgatgcttccaaggcccaggctccaatccaggctcattttggggagcttgacagttttgttgggtttgcagatgttaccgcggccaagtcgttggaggagaagctcaaggcttctggagtggcacatgaagtccacatataccctggatgctcacatgccttcatgaacg

SEQ ID NO: 439059 - DNA, 360 bp, Triticum aestivum
  unsure (1)..(360): unsure at all n locations
gagataattgctgagaggcaccagttacctatccaggattttgttgttcgcaacgacatggcttgtgggtcaacaatcgggccaatactggctagcggtgttggtattcgtactgtggatatcggagcgccacaattgtccatgcacagcatcagggagatgtgcgccgttgacgacgtcaactactcatatgaacatctcaaggcatattttgaagaattcactgaattggataacaaagtcaaagtagactgctgaggtgtagtagacgaccatataattgggtcagcagaacctgtacttctacaatcacaactacaatgcataataattagtaatgtcagattatgtatgttngtg

SEQ ID NO: 439060 - DNA, 406 bp, Triticum aestivum
gcatcggcggcagacacggccacggccacggccagggcctcggcggcggtgctcaccgcgccgctgtcgctggaagggggcctcgcggcggagctccagccggcgaacctcgtgcagcgggtgctcagcctcttcgggaacgtcaggccgggggccgatctctcgcacttccagctgcctgctacgttcaacctgccaaaatcgcagctccagttgtacggggaaatagtctactgcgacggagatgactacctgagcagatgcggcaaaggcaaggacagcctcgagcgcttcacggcgatcgtcgcatggagcatctcgacgacgaggccgcccatcttcggtttcgcgccctacaacccggtcctcggagagacgcaccatgtctccagagggtcactccatg

SEQ ID NO: 439061 - DNA, 402 bp, Triticum aestivum
ggatcttctgggtgggcccgtccatcggcgcggcgctggcggccatctaccacgtggtggtgatccgtgccatccccttcaagagccgcgactagtccaccaatcaaccagccgcgaatggaatcttatctctgttcatggtcggtcgatcgatcatgtggtggtggcggtggttgctctcgcgcgcgtagtacgtggatcatgtctcggccgcgcacgctgtaatcatctatatctaccgtgctgttcctcccctcctcggtgtgtgtgcctgtcggcagcgtcacctgttcaagtctgcgagttgcactttcccttccttgtgtattgcactacgcacgcgatttaatcgggcgtgcatatctatgcaaattattacgtattatgaaggaaggacgatcg

SEQ ID NO: 439062 - DNA, 444 bp, Triticum aestivum
agagcctgatgagttatggggcaagaatgtggcggagaggctcgcttctgatgggcagagactggcgagcatccaagagagcatcgaggaactgaagcggaagatgggtggcccggccaaggggcactcggaatacgagagcgtgagcagtcagctgcgcgagacggaggggctggtgttggagcagatgaacctcaacagcaagttggcaaagaaggccgagaattaccctgcgctgttggatagcatgaacgcggagcgggaaggtggttttccaagcaagaggaagatgttggagcaggtgcggaaagggtcggacaaggtggcgaggctggagctggagcttcagaagatacagtacgtgctgctgaagctggaagaagagcacgagtacacaaggctcaaggtgtcggagaagcgcacccgggtgctcctcaaggatta

SEQ ID NO: 439063 - DNA, 437 bp, Triticum aestivum
tcttttctccatcccagccaaacttttctctcgccctcgaagcagcagccgccgcagcatccatggcacccaaggccgccgagaagaagccggtggagaagacccccgcgggcaagaagcccaaggcggagaagaaggtgccggcgtccaaggagggcggcgacaagaaggggaagaagaaggccaagaagagcgtggagacgtacaagatctacatcttcaaggtgctcaagcaggtgcaccccgacatcggcatctcctccaaggccatgtccatcatgaactccttcatcaacgacatcttcgagaagctcgccggcgagtccgccaagctcgcgaggtacaacaagaagcccaccatcacgtcccgcgagatccagacctccgtccgccttgtccttcccggcgagctcgccaagcatgccgtctccgagggc

SEQ ID NO: 439064 - DNA, 408 bp, Triticum aestivum
tcttttacgcgtccgcggattgttggttacctctcactgcgtgtgaaacagctagacgtccgatgtgaaaccaaaacaaaggataatgtctttgtgactgttgttgcttctgtccaataccgtgcccttgttgataaggcatctgatgccttctacaaactgagcaacacaaagcaacaaatccagtcgtacgtctttgatgttattagagccactgtcccaaagctggagctggacgatgcatttgtgcagaaagatgacattgcaaatgctgttgaagaggagcttgaaaaggcaatgtctatgtatgggtatgagattgtgcaaactctgatagttgacattgagcctgatgtgcatgtcaagagggcaatgaatgagatcaatgcagcttttaggatgaggtcg

SEQ ID NO: 439065 - DNA, 138 bp, Triticum aestivum
taacttgaccggagagaagacacggtcccccggggaggaggtggacaaggtgtttgttgctatgaaccagggtaagtacatcgacgcgctgttggagtgcctcaaggagtggaacggctagcccctgcctctctgcta

SEQ ID NO: 439066 - DNA, 441 bp, Triticum aestivum
atcgttttctcctgcccattctgcaaccatgggagcagcgttgagtgccggattgatttgaagaatctgattggtgaggctaactgtcaaatctgccaggaaagcttcagcaccactgcaaatgcgctgactgaacctattgatgtatacagcgaatggatcgatgagtgcgagcgcgtcaacactgttgaagatgatgatggtgcatgagcatgtgtaactataatactcgtatggcctcaatgtgttgatgtcatttactgccaccgtcagccatatctgtagtagcattgtaacaatgtactggccgatcgaaacgttagtaggcagtttgtcccgtgcttaatacacaaccgatgatattgtgtacctgtatttgtaaaccttgatatagcggctgagattacacctaatctcggtacctgcaaaagaattatactt

SEQ ID NO: 439067 - DNA, 391 bp, Triticum aestivum
cgcgtccggggaatctcagctgatgacatggaagcagtttacaagaaggttcatgctgccatccgtgctgatcccaccatggccaaatcaaccaaggcgcctcccaagactcacaagagatacaaccccaagaagctgacctatgagcagaggaaggccagcctcgttgaaaggctcaacgccctcaacaactctgcgggtgccgccgatgacgatgaggacgacgacgagtgaagagctctttgtccaccccagtgtagtcttgcaacgtgcgtttttgttaaagtccggcactctgcacaatgacctgttccattgagttctgtttgtcctgctggagttatagattgtgttatctgggttatgtgccgtgctggcatttggatcttaa

SEQ ID NO: 439068 - DNA, 348 bp, Triticum aestivum
ctcggttgtggcgactggaatagaaactgaaattggaaatgtgggtggatggcggcgtcattggcgctcattagggtggtcactatcatcatcgcggagtcaatcttcaaattggaaatgttttccttcgtttcgttcttttttttatagagggaagatctggctttaaagaagaagaattcctgcacctgtccatgcaatacaaaaagggcgtcccgtggtagtgttgttgaaccgctaatagcaaaattcactccgttactgtaattagaacccaatgccttcagataagggctcagatagcttatgtttaagctttcacctggatatattttggtcattcatgga

SEQ ID NO: 439069 - DNA, 362 bp, Triticum aestivum
cctctccatctcactcactctctccctccgccgccggcgcagcgtcctccccgcgactccgatggccagcaagtgggtcaggcccgaggtgtacccgctgttcgcggcgacgggcgtggccatcggcatctgcgcctttagcctccttcgcaacatcaccggcaacccagaagtcagggtcaacaagatggggagggcagcgggagtgcttgagaaccatgaggagggcaggcgctacgccgagcacggcctcagagcctatgtgcaggacaagacccccgagatcatgccaggaatcaacaagttcttcaccagcccaaaatgaagcactttagtctgtctgtgactcgcaattagtaact

SEQ ID NO: 439070 - DNA, 292 bp, Triticum aestivum
tttcctacgcgtccgcaaagacaagtcaacctcaccgaggagatggaaggagaagggagaagatgtcgggccgcggcaagggaggcaagggactcggcaagggcggcgccaagcgccaccggaaggtgctccgcgacaacatccagggcatcaccaagccggcgatccgtcgtctggcgcggcggggcggcgtgaagcgcatctcgggtctcatctacgaggagacccgcggcgtgctcaagatcttcctcgagaacgtcatccgtgacgccgtcacctacaccgagcacgc

SEQ ID NO: 439071 - DNA, 303 bp, Triticum aestivum
tcgattatcatccctgataccaaagctcatcttcttctccttgaaatctttttgggtccacagatttggaggatgtcttgcaactgcggatcaggctgcagctgcggctcagactgcaagtgcgggaagatgtaccctgatctgacggagcagggcagcgccgccgccgaggtcgccgccgtggtcgtcctcggcgtggcgcctgagaacaaggcgggacagttcgaggtggccgccgggcagtccggcgagggctgcagctgcggcgacaactgcaagtgcaacccctgcaactgttaagct

SEQ ID NO: 439072 - DNA, 429 bp, Triticum aestivum
ttggttggtcaattgaagtgactattaaagttgtgaagacagaatttcatactggtagacttattttgtccttttcgccccaattagctcagactactattacaaattctaatacaaactatgttcatcgtgagatagtcgatctacgtgatggctctgagtttgtgattaaagtgccttattgctacaactctatgtacatggatactgaccaagctcaaaatgatttattcatgatgatgcaggtcaatgtattaaatgaattggtagctccagacacttgcgcacaaagcgtagaaattttgtatgaggttaggggtggagtagacatggaatttcaagttccagttcctttcaatgttgtaccagttcaacagatagttcctcagagtggtggagaaggccaagctgagttagttcttgattctt

SEQ ID NO: 439073 - DNA, 393 bp, Triticum aestivum
cttattcgtccgtaccccgattccccttcccctgtgcgatcgatactctctagggttcatcggcggtcacaccaagcaaggatgactacttcaaggcgtcttgctgacaggaagagtgcgaagtttcagaagaacgtcacaaagaggggctcagtgcctgaaactactgtgaagaaggggaatgactatcctgttggacctatcgtgcttggattcttcatctttgaggtcataggatcatccttgtttcagattatcaggacggctactagtggtgggatggcttaatatcaagctgaaaacaagacgatcattatcagagatttattttatccatgtgtctgggaggcaatatcatatctgtaccctgtagcaaacttcaaccctgatgat

SEQ ID NO: 439074 - DNA, 386 bp, Triticum aestivum
cctcacgcgtccggcaagtgaacggtggacaccagtgcacacagttgagagtatagttttgagcattatttcgatgctctctagtccaaacgatgagtctccagcaaatattgaagcggctaaggactggagagaaaagagggccgaattcaagaaaaaggtgaggagccttgttcgcaaatctcaggaaatgctctgaaaaaggaggatcatccgggggagtccacaagcgctgcaattctcttgctttcaccaaatggggcacctgatgccagcacttgaacttctcccctgtttattttccgttcagcgtcggtcgaaggctgttgttggtcttgtctctccgagacactcggggtgctgcctattatgaactctcgatttta

SEQ ID NO: 439075 - DNA, 248 bp, Triticum aestivum
tcggtctgaacctcgacaatcgcgaggttctgaccgaggcatgtgcacgcgccgaggcctaacggcatgaacgccgcctgcgggttcttgcacgccgtcgacaccccgttcttgaaccggtccgggtcgaaccggtcaaccgtcgggccccaagaagcggcgtcgtggtgcatggaggataccggcacgaagaggtcggtgcccttgggcgcgagcagctggcccagccaaatgtcgcggaaccgcga

SEQ ID NO: 439076 - DNA, 349 bp, Triticum aestivum
gttcggtgggcaagaactcgagcatcttgtcggcgtggtccggcacgacgcccttggccgcgtccgccgcgcggaaccgctcctcccacctggccagcagcggcgtcctcgccgggtcgatcagccggcgcccgatgatcttgtcgatcgcgccgaaccagccgaggtagccgccaagcacgacgtcgacgaacccgatggcgtcgccgccgaagaacgccttccccttggagcactccgcgaacgcgccctccagggtctccagcgccgccacggcccgggacaccgcctgcgcccgctcctcctccgtcttgcacgagaagagcatacccgttcacgccgacccgac

SEQ ID NO: 439077 - DNA, 333 bp, Triticum aestivum
cttctttgctcagggagatcgaagctcggtacggcgtctgctacgatgctcggagcaatgaagcttgttctcaggagggagaagagcagagctgcggggacattttcgtgtgacttggccggttacttctcgacgtcgtccagctgccagaggctgtccggtaaagtcgccgtgatcaccggcgcggccagcggcatcggcaaggcgacggccgtcgagttcatccggaacggcgccaaggtcatcctcgcggacatccaggacgacgcgggccgctccgtggcggccgagctcggcccggtcgcggagtacacccgctgcgacgtgaccgac

SEQ ID NO: 439078 - DNA, 447 bp, Triticum aestivum
tcggtctcgacccgtgttctgatcacaaccgaggtgtgggctcgagggctggatgtccagcaggtctctcttgtcattaattacgatctccccaacaatcgtgagctttacatccatcgtattggtcgctctgggcgttttgggcgcaagggtgtggcgatcaactttgtgcgcaaggatgacatccgtatccttcgggacatcgagcagtactacagcacgcagatcgacgagatgcccatgaacgtcgctgatcttatctgagctctggaccggatcaatccctcccctctctttgtctcggtgcgatgtttggggaatttggttgcgttgcgatgtttggatgtatttctggtgctgcaacttgagatttcttttgttgcttttgggaacatgggaagtgtatatattctttctcggattgaccaccagctcatgtaaaacact

SEQ ID NO: 439079 - DNA, 491 bp, Triticum aestivum
  unsure (1)..(491): unsure at all n locations
ttgctcccccacccccacccgccttccttcctgcgcgacttgcctgcccgccctcagtcagccggccatggcgctcctcaccgatctcctcaacctcgacctcaccgactccacggagaagatcatcgccgagtacatatggatcggcggatctggcatggatctcaggagcaaggccaggaccctccccggcccggtcaccgatcccagcaagctgcccaagtggaactacgacggctccagcaccggccaggcccccggcgaggacagcgaggtcatcctgtacccacaggccatcttcaaggacccgttcaggaagggcaacaacatccttgtcatgtgcgattgctacaccccagctggagtgccaatccccactaacaagagatacaacgctgctaagatctttagcaaccctgatgttgccaaggaggagccatggtacggtattgagcaggagtacaccctnctacagaaggacatcaactggc

SEQ ID NO: 439080 - DNA, 469 bp, Triticum aestivum
cctcacgtttccgcccacgcgtccgcccacgcgtggcggccacgcgtccgcccacgcgtccgacagcatcctctcagtccttagcttccttccctcgccgccacccaccaaggaaaggaggatgtcttgctgcggcggcaactgcgggtgcggcgccagctgaagtgcggcaacggctgcggcgggtgcaagatgttccccgacgtggaggccaccgccggcgccgccgccatggtcatgcccaccgcctcccacaaggggagctccggcgggttcgagacgggcggagagaccggcggctgcgactgcaccacctgcaagtgcggcaccgcgtgcggctgctcctgctgcagctgcaactgagccggcgcccaggaggccggccggcagaggcgagcacgaggatgaggaggacaagcaagcaagcaccatcaccaccagtttaccaccacccagcgtatcatcacca

SEQ ID NO: 439081 - DNA, 490 bp, Triticum aestivum
aattcagtagacatggatatggcaaaacgtatggggatggatgcaaaaattgattacccagctgcctgcaacgcaatggagacgttgcttgttcataaagatcttatgaagactccagaactcaatgacatactagtagcactcaagacagcaggagttaatctttattgtgggcctgttgcgcataaagtattgggctacccaaaagcagattcattacatctggagtacagttctatggcttgcacagttgagatagttgatgatgtacaatcagcaattgaccatatacatcgctatggaagtgcacatacagactgtgtggtcactacagatgataaagtagcagagacctttctacgtcaagttgatagtgctgccgtattatacaacgcgagtacaagattctccgatggtgctcgttttggactcggtgctgaggttggcataagtacaggccgtatacatgcacgtggacctgtgggtgttg

SEQ ID NO: 439082 - DNA, 318 bp, Triticum aestivum
tcgcccacgcgtccgctcatcatcatccccgataccaaagctcatcttcttctccttgaaatctttttgggttcacagatttggaggatgtcttgcaactgtggatccggttgcagctgcggctcagactgcaagtgcgggaagatgtaccctgatctgacggagcagggcagcgccgccgcccaggtcgccgccgtggtcgtcctcggcgtggcgcctgagaacaaggcggggcagttcgaggtggccgccgggcagtccggcgagggctgcagctgcggcgacaactgcaagtgcaacccctgcaactgttaagct

SEQ ID NO: 439083 - DNA, 491 bp, Triticum aestivum
tttcttacgcgtccggaacgccctcgcctacaaccggaacctgctggtgcggcaggtgggcaacgagggcacgccgctgcgcccccgccagcgcctcgaggactacctctttgcgctcttcaacgaggacatgaagcccggccccacctccgagcgcaactacggcctctaccagcccgacggccggatggtctacaacgtcggcctcgcccagcagcagaccacgtcggcggcctccctctccctcgccgcctcctccgcgccccccgccatggatgttggaaaggacttgacgagcctgtgcctcatctcagctctggccatcctgctcacctcccaggctttcttactgggatagcaaaagcacccaagagtgcggccatatgcatgcaagcaaaatggccttgacttttgtggaccaaaagccttgcagaccaaagggcagagatggtgcaccatttgaagggggcacaaggaaagcatatgcggtg

SEQ ID NO: 439084 - DNA, 477 bp, Triticum aestivum
tcgttttgcccgcccccgccgccgccgccggctccttccgcaggagctccctcctcgcaggcgagatggtgtacatcaagaaccagaagacaagggcgtactccaagcgtttccaagtcaagttcaagagaaggcgccagggcaagactgactacagggccaggctgaggctcacaaaccaggacaagaacaagtacaacactcctaagtaccgttttgttgtgcgatttaccaacaaggatgtcactgcacaaattgtttatgctaccattgctggtgatattgtgatggccgctgcctactcccatgagttgcctcgctatggtcttgaagttggcctcaccaactatgctgcagcttactgcactggtctgcttttggctcgtcgtgtgcttaagaaccgtgatcttgatgaggagtatgaaggcaatgttgaggccactgctgaggacttctctgttgagccttctgatgaga

SEQ ID NO: 439085 - DNA, 434 bp, Triticum aestivum
gctgaaggtggtgaagggcaacccgaacccgcgcagctactacaagtgcaccaccgtggggtgccccgtgcggaagcacgtggagcgcgcgtcccacgacctgcgcgccgtgatcaccacgtacgagggcaagcacaaccacgacgtgccggccgccagggggagcgccgcgctctaccgccccgcgccccgggcggcggacagcaccgtgagcaccggccactaccttaacccgcagccgtccgccatggcgtaccaaaccagcacgggaggccccaacgtcgccgccgccgggacgcagcagtacgcgccgaggcccgacgggttcggcggccagaaccagggctcgttcggcttcaacggcagcttcggcttctccgggcccgggttcgacaacccgacggcgtcgtacatgagccagcaccagcagcagc

SEQ ID NO: 439086 - DNA, 450 bp, Triticum aestivum
tctgttcttggccccagaaatcatcaaaggcgaaggccatggaagtgcggtcgactggtggacctttggtatcttcttgcacgagcttctatacggcaagacaccattcaaggggtcaggcaaccgcgccacgctgttcaacgtggtcggtcagcagctaaagttccccgagtcgccgtcgacgagctacgctggcagggacctcatcagggggctcctggccaaggagccgcagcagcgcctcggcgtgaagaggggcgcgacggagataaagcagcacccgttctttgagggcgtgaactgggctctcatccggtgcagcacgcccccagaggtcccgaggcccgttgaggcggagctgcccatgaagtacggggtgtcggaggcagtcgcgagcaccaacaagagggtggtcggcgcggacgccaagtccggtgggaagtaccttga

SEQ ID NO: 439087 - DNA, 444 bp, Triticum aestivum
tctcctacgcgtccggtagggtttccagttgcaaggggcgccgccgccgccgccgccatgggacactcgaacgtctggaactcgcaccccaagaactacggccccggatcgagggtttgccgtgtctgcggcaactcgcatggcctgatccgcaagtacgggctgatgtgctgcaggcagtgcttccgcagcaacgccaaggacattggcttcatcaaggtatgcgacgccacactgtccatggatttcctaaatttgatggccgccgagtaatactataccgttaagaatggaaacctcaaaggaagcaaggactaggaaattatcaacgaactgtggtgcttcatcgaggctgatctttatcctataagctatgtaatgaactgctattatgtttgaatcctggtgacaaaaccgtgaaacatagttagtgactgctgtttg

SEQ ID NO: 439088 - DNA, 270 bp, Triticum aestivum
gtctcagaccctgtcggacgcgagcaagcaggcgtacatgcgtggcaagagggtcctggagatcaaccccaggcaccccatcatcaaggagctccgtgacaaggtcgcccaggacagcgatagcgagggtctgaagcagacggcgaggctggtgtaccagacggcgctgatggagagcgggttcaacctgccggaccccaaggactttgcctcgagcatctaccggtcggtgcagaagagcttggacctgagccccgacgcggccgtgga

SEQ ID NO: 439089 - DNA, 419 bp, Triticum aestivum
tttacgcgtccgaggatctcatactagattacgttaaccagctgtgcaaccgtctgccaagccccatgggagaatcagctgtggactgtgccagccttggatccatgcctgacattgagttcaccattagtggcaagaagtttgcgctgaaaccagaagagtatatcctgaaggttggcgaaggagctgctgcccagtgcatcagtggattcacagccatggacatcccgcctcctcgcggtcctctctggatcctgggagacgttttcatgggcccctaccacaccgtcttcgactacggcaagctgcgtgtcggattcgccaaggcggcctgaaagggtggtcgagcgagcgccccaccgcggaggcgaacacttgcgccgggagagagcttagcttttttactccgaatttgaccg

SEQ ID NO: 439090 - DNA, 244 bp, Triticum aestivum
gatcgctcgagccctccgccgccgccgcgacttcagctctctccttccttctccgatccaagatgaagttcattgctgcctatctgcttgcttacctctctggcaacgccagcccctctgcagaggacctgacatccattcttgagtcagttggttgtgaaattgacaatgagaagatggaactcatgctgtcccaagtgaagggcaaggacatcaccgagctcttggctgctggtaggcagaa

SEQ ID NO: 439091 - DNA, 358 bp, Triticum aestivum
ccttatctccaaaccctagtagcgccgccgccgccaggtaagaggcgagatggtgtccggctccggcgtgtgcgccaagcgcgtggtggtggacgcccgccaccacatgctcggccgcctggcctcgatcgtcgccaaggagctgctcaacgggcagcgcgtggtggtggtcccatgcgaggagatctgcatgtccggcggcctcgtccgccagaagatgaagtacctccgcttcctccgcaagaggatgaacaccaagcccttccacggtcccatccacttccgcgccccggtcaagatcctctggcgcaccatccgcggtatgattccgcacaagaccgcgaggggcgaggccgcg

SEQ ID NO: 439092 - DNA, 351 bp, Triticum aestivum
cggacgcgtgggcggacgcgtgggcggacgcgtgggttcggctccacttccatgactgcttcgtacagggatgcgacgcgtccgtgcttctggacgcggcgccgggcagcaaggcggagaaggacgcgctggcgaacaagagcctgcgcgggttcgaggtgatcgacaagatcaaggacaccctcgaggctcagtgccccggcgtcgtcacctgcgccgacatcctcgcgctggcggccagggacgccgtgctcatggtcgggggcccctactacgacgtgcctcagggccggcgcgacgggagacgctccgtcgacaccgacacgctgaccgggctcccgtcgccgttcc

SEQ ID NO: 439093 - DNA, 319 bp, Triticum aestivum
ttctccccacgtgccgcatacgccggcgccggcctggggcctggaggagtttccggccgctatggtggcccctgcagcggcggcgaaggccaagcaggggcacgtgcgggagtggtaccacagcgacagcgacagcgacgtgttcgccgtgccggagatcacgtcgccgccggccaagcgggcgcggccgtcgtcgttctggtgcctgtgagccagctagcgcggcggcaaaccacccacgccgtcgcagcaaccgggcgagctacgtacctgtggctcgatcgatccatcactagtgtaatctttgctcgttccccgc

SEQ ID NO: 439094 - DNA, 504 bp, Triticum aestivum
tccacgcgtccgcgacactatggaggagaacctcaagaggcagctcttcgggttgccatccagatacagagattcagtgagggcaatcaggccagggctgcccctcttcctctacaactactccacccaccagctccacggcatcttcgaagctgcgagctttggcggagcgaacatcgacccggcggcgtgggaggacaagaagtgcaacggcgagtcccgcttccctgcacaggtgagggtggccacaaggaagatctgcgacccgctggaggaggacgccttccgcccgatcctgcaccactacgacgggcccaagttccggctggagctcagcatcaccgaggccctctcccttctcgatatatttgaagacaaggacgaggcctgatcgaggctgcatgcctactgctgatcagggagggactgttgaggaaggaacaacgcaataagatcgatcggagcatatatatatacatacatacatacgattaatatcattat

SEQ ID NO: 439095 - DNA, 238 bp, Triticum aestivum
ttcacgcgtccgcggatccgtaacttcgggaaaaggactggctcgtgttcgacgacatgggcgcctacaccaccgcctccggctccaacttcaacggcttctccacctcggacatcaagacctacttggcctactccagctgatatggaactagtcatgtggccacgtactacgtagcacacgccattcgatttgttttcgcagtacacaaaatgaagagctgtaattaagctcgtac

SEQ ID NO: 439096 - DNA, 330 bp, Triticum aestivum
ttatcaattggttcagaaaggttcaggtgccctgaggtgctattccagccatctcatgttggtatggaagttcctggtatacacgaagcgacatacaattccatcatgaagtgtgatgttgatatcagaaaggatctgtatggtaatgttgttctcagtggaggttctaccatgtttcctggaattgctgatcgcatgagcaaggagatcacggcccttgctcctagcagtatgaaggttaaagttattgcaccacctgaaaggaaatacagtgtctggatcggtggctctattttggcctctcttagcactttccagcagatgtggatc

SEQ ID NO: 439097 - DNA, 315 bp, Triticum aestivum
gccatggcgcccaacggagacaacaccgtggccaacgtccacagcggcatcgacagcaccaacaagacgctgctcaagagcgacgccctctacacctacatcctcgacaccaccgtcttcccccgtgagcacgagtgcatgcgcgacctgcgcctcatcaccgacaagcacccatggggctacatgcagtcgtcgtcggacgaggcacagctgctggggatgctgatcaagatggcgggcgccaagaagacgatcgaggtgggcgtgttcacgggctactcgctgctggccaccgcgctggcgctcccggaggac

SEQ ID NO: 439098 - DNA, 385 bp, Triticum aestivum
tttggttgttaagatccaagaagagcttgacattgatgtgcttgtgcacggagagccagagaggaacgatatggttgagtacttcggtgagcagctctctggtttcacattcactgccaatggctgggtgcaatcttatggatcaaggtgtgtcaagccaccgattatctacggtgatgtgagccgccccaaccccatgactgtgttctggtccaagatggcacagagcatgactgctcgcccaatgaagggaatgttgacaggccctgtcacaatccttaactggtcttttgttagaaatgaccaaccgaggtttgagacttgctaccagattgctcttgcaatcaagaaggaggtcgaggaccttgaggctggtggtattcag

SEQ ID NO: 439099 - DNA, 176 bp, Triticum aestivum
ttcacgcgtccgggcattcttggtcaggaagtgattaagtcaatatcttgtaaaggcgatccgatcaagaatttcttttacttcgacgacgctgatggtaaaggggccatggaggacatccccccaactcctgaagactgaatcacgtgatacgtactcccttcgttccaaaatag

SEQ ID NO: 439100 - DNA, 417 bp, Triticum aestivum
gtttttcggcactgtttttgttgcagcaacttgctggcataaatgctgttgtgtactactctacatcagtgttccgcagtgcaggcattgcatctgatgttgcagcgagtgctcttgttggtgctgccaatgtttttggcaccatgattgcatcttcactgatggacaagcaagggaggaagagccttctcataacaagcttttctggaatggcggcgtcgatgttactcttgtcattgtccttcacctggaaggctttggcaccttattctggcactcttgctgttgttggcactgtcctgtatgtgctgtcattcgctcttggagctggccctgttccagctttgctccttcctgaaatatttgcctccagaataagggccaaggctgtagcattatcaatgggcatgcactggg

SEQ ID NO: 439101 - DNA, 423 bp, Triticum aestivum
ccctcgcgtccggcagcatacacttgatctctcttcctatatccaattaatcttagtcaagctaactgctagcttcgaagaaataggaatggcggctattgctgcaaagctgcaggtttttgtggcttgtgccttgctgctcctcgctgcggggtgccaggccagccctttctggccactggagatcggctactaccacgacaagtgcccccaagcggaggccgtcgtcaagggcgtcatggagaaggccatctcccagaaccccggcaatggcgctgccatgatccgcatgctcttccatgactgtttcgtcgagggctgtgatgcttccgtcctcctggacccgactccgttcagcccgacgccggagaaactcagcccgccgaacgacccttccctgcgcggcttcgagctgattgacgc

SEQ ID NO: 439102 - DNA, 388 bp, Triticum aestivum
tttacgcgtccgctggggatcggcaccatcatgcgtgagtgtcatgacctcttcaaggggcttgaatcactgacagactgctgtggtggagacggaaagacggcgagggccatcaccaaggcccacccacacgtcaagtgcaccgtgctggatctccccaaggtgatcgaaaaaactccatccgactgcgtagtcaactatgttgccggtgaccttttccacaccgtcccaaaggcccaggcagtgatgctcaagcttgtgctgcaccactggagtgacgacgattgtgtgaagatcctaacccagtgtaagaatgccattccttcccgtgaggaaggagggaaggctgattgtcattgacattgtggttgaaccatcactaggacct

SEQ ID NO: 439103 - DNA, 345 bp, Triticum aestivum
ttcgcatctccgacgacatggcccgcaccaagcagactgcgaggaagtccaccggcggcacggcgccgaggaagcagctggccaccaaggccgcccgcaagtccgccccggccaccggcggcgtcaagaagccccaccgcttccgccccggcaccgtcgcgctccgcgagatccgcaagtaccagaagagcaccgagctgctcatccgcaagctccccttccagcgcctcgtccgcgagatcgcccaggacttcaagaccgacctccgcttccagtcctccgccgtctccgccctgcaggaggccgccgaagcgtacttggtggggctcttcgaggacaccaacc

SEQ ID NO: 439104 - DNA, 505 bp, Triticum aestivum
ttataccgagcagacgccatggaccgcgagtggggctccatgcccggcagcggcggcgccgccaccgcccagaatgaggccatcgaccggcgggagcgcctgcgccgcctcgcgctcgagaccatcgacctcgccaaggacccctacttcatgcgaaaccatctcggcagctatgagtgcaagctctgcctgacgctccacaacaacgaggggaactacctcgcgcacacgcaggggaagcggcaccagaccaacctcgccaagcgtgccgcccgcgaggccaaggacgcgcccgcgcagccccagccaaacaagcgcaagctcgcgccccgcaaatctgttaagattggcagacctggatatacagtaactaaacagtatgatcccgacacgaagcaacactcatttctctttgagattgagtatcctgaaatcgaagataatagcaagcccaggcaccgtttcatggcatcatatgaacagaaaatccaatcttgggataaga

SEQ ID NO: 439105 - DNA, 326 bp, Triticum aestivum
gtctttcccgtccccagccaacctcccatgcgcgtcttgcgtcgcagcggctgttccactccctcgccatgggcaagattaagatcggaatcaacggtttcggaaggatcgggaggctcgtcgccagggtcgccctccagagcgacgatgtcgagctcgtcgccgtcaacgacccctttatcaccaccgagtacatgacctacatgttcaagtacgacaccgttcacggccactggaagcacagtgacatcaagctcaaggacgacaagacgctgctctttggcgagaagccagttaccgtcttcggcgtcaggaaccctgaggag

SEQ ID NO: 439106 - DNA, 393 bp, Triticum aestivum
tagtactctcgcctcgcttgactcctccttggaagcacacagagagaggagtgcatggcgtcgtccggcggcaagctcttcaccctggaggaggtcgccaagcacagctccaaggacgactgctggctagtcatcggcggcaaggtgtacaatgtgaccaagtttctcgatgaccaccctggaggcgacgacgtcttgctgtcttcaacagccaaggatgcgaccgacgacttcgaggacgtggggcacagcacgaccgcccgggcgatgatggacgagtcctacgtgggcgagatcgacgcgaccacgatacccaccaaggtcaagtacacgccgtccaagcagccgcactacaaccaggacaagacccccgagttcgtcatcaagatcctc

SEQ ID NO: 439107 - DNA, 471 bp, Triticum aestivum
tttatgcgtccgggcaactctaccaggccctttaagttcattttctgttactccatctttcttttccgttccatattcttcaataccatttggtgccacatccgttgttaattcaatagataggactccagtggcatttttggcaaaattgtttagatattggagggggtcaattgaagtgactattaaagttgtgaagacagaatttcatactggtagacttattttgtccttttcgccccaattagctcagactactattacaaattctaatacaaactatgttcatcgtgagatagtcgatctacgtgatggctctgagtttgtgattaaagtgccttattgctacaactctatgtacatggatactgaccaagctcaaaatgatttattcatgatgatgcaggtcaatgtattaaatgaattggtagctccagacacttgcgcacaaagcgtagaaattttgtatga

SEQ ID NO: 439108 - DNA, 361 bp, Triticum aestivum
ggtgtgggggctcgccgccagcaagcggccgttcctctgggtcgtcaggcccacgctcatccgcggctacgagtccggccagctgcccgacgggctcgacgagcagatccgtgatcatggcaggctcgtcagctgggcaccgcaggtggaggtgctcgcccaccctgcggtaggcgccttcatcacgcacagcggctggaactccacggtggaagccgtgtcggagggcgtgccgatgatatgcctcccgttgcacggagaccagttcagcaacgccaggtacgtgtgcgatgtctggaaggtgggagctggagatcgaggcgtcgtcggcggctgggcagaacctggagagagggaagat

SEQ ID NO: 439109 - DNA, 361 bp, Triticum aestivum
  unsure (1)..(361): unsure at all n locations
ttctcgcgtccggcagagcaaaggtgcgatggcgccgactgtgaaggtctacgggtgggcgatgtcgccgttcgtggcgcgcgcgctgctgtgcctggaggaggccggcgtcgagtacgagctcgtccccatgagccgcgaggccggcgaccaccgccagccggacttcctcgcccgaaaccccttcggccaggtccccgttctcgaggacggcgacctcaccatcttcgaatcgcgcgccgtcgcgaggcacgtgctgcgcaagcacaagccggaattgctgggctccggctcgccggagtcggcggcgatggtggatgtgtggttggaggcgngaggcccaccagcaccagaccccggc

SEQ ID NO: 439110 - DNA, 465 bp, Triticum aestivum
tggacgcgtgggtttctttcttgcttctgcctttccccctcctcctcattgactccgccgccgtctcactcgcaagtcacagcatcccccgtctgctatctcttgggagagttgggagcggaggagcgacgcaggccgacgcagcggcgcaggcgagcaaaggccgcgaggcagcaaggcgccctccggctgaagagcagcgattcagacagcgacatcgtgcctcttgtcgactatctcaacacccagtactatggggtcatcggcctcggcacgccgccgcagaatttcacggtgatattcgacaccgggagctccaacctgtgggttccctcgtcgaaatgctatttctcgatagcatgctacctccaccccaaatacaagtcgagcaagtcaagcacttacaaagcagatggtgagatttgcaaaatcacatatggctctggcgcaatctctggatttttc

SEQ ID NO: 439111 - DNA, 405 bp, Triticum aestivum
tccacgcgtccgcccagaatccgccactaccggccgagcagtgaagtagagcggcgagcggcgaggagggaccatggcgtcgttgccagaggaggaggaggccttcgagcacacgctgctggtggtgcgcgaggtgtcggtgttcaagatcccgccgcgcaccaccagcggcggctacaagtgcggcgagtggctgcagacggacaagatctggacgggccgcctccgcgtggtgtcgtgcggcgaccgctgcgagatccggctcgaggacccgggctccggggacctcttcgccgcctgcttcgtgctgcccggccagagggacagcgccgtcgagaccgtgctcgactcgtcgcgctacttcgtgctccgcatcgaggacggcagggggaagcatgccttcgt

SEQ ID NO: 439112 - DNA, 470 bp, Triticum aestivum
atcagggagtcagctcgacggtccaggaggaggaagcatgcgcagctgactgaccttgagttgcaggtcgagcaacttaaaagtgaaagtgcaaccctcttcaagcaactgacagaggcaaatcagcagttcaccaccgcggtcactgacaacaggatcctcaaatcagatgtagagaccttaagaatcaaggtaaaaatggcagaagacatggtggctagaggcgcagtgtcatgcggcctaggacagcagctcggattggcaccatttctgaactccaggaagatgtgacaaagccttggtgagcgttctcacaggcacagggttgaacttgaaagggaaccatgcactcttcagaggtttctagctctagctcttcaagttcagacatcggcggtacgaagcactgcaagtctagagtgctcgaataaccggatgcccgcttgcccagcgaggcggccagatgtgtg

SEQ ID NO: 439113 - DNA, 464 bp, Triticum aestivum
tgttagtcatggcatcttccaagagcagtctggcaatgttcgcactggccatagtcatggccgtggtggctgacgtctcggcgcagaacaccccgcaggacttcgtcaacctgcacaaccgcgcccgcgccgtggacggtgtcggcccggtggcgtgggacaacaacgtggccaggtttgcgcaggactgggcggcgcagcgcgccggcgattgccggctccagcactccggcgggccgttcggcgagaacatcttctggggttccgggcagtcgtggacggccgccgacgcggtgaagctgtgggtggacgagaagcagaactaccatcttgacagcaacacctgcgacgccggcaaggtgtgcgggcactacacgcaggtggtgtggcgcaagtcgacccgcatcggctgcgcgcgcgtggtctgcgccgggaaccggggcgtcttcatcacctgcaactac

SEQ ID NO: 439114 - DNA, 346 bp, Triticum aestivum
tatgcaccaaccgggcacgatgcgggcgatctcgtcggcggcgggagggatgctgcgggcgcggctgagcgcggcggcgcgcctccgcggcgggcacggcgacggcggtggccgctggacgacgcccggccacgaggtgcggcccaaggggtacccgatgaaccgcacgccgccgccgccgggcgagtcgcgcaagtgggaggactgggagctcccctgctacgtcacctccttcctcaccgtcgtcatcctcggcgtcgggctcaacgccaagcccgacctcaccctcgagacctgggcgcaccacaaggcgctcgagcgcctccagcagcaggagctcgccgcc

SEQ ID NO: 439115 - DNA, 411 bp, Triticum aestivum
ctttttaggaaaaaaaggcctccgcaaaccctaaggtcacggtcggcggcggcggcggcagagatggaccccgactcagtggcgaaggcgttcgtcgagcactactaccgcacgttcgacaccaaccgggcggcgctggtggggctgtaccaggagggctccatgctctccttcgagggcgagaagttccagggagccgccgccatcgccaccaagctcacctccctccccttcaccaagtgcgcccacaccgtcgtcactgtcgactgccagcccgccggccccacgggcggcatgctcgtcttcgtctccggatccctccaagtcgacggcgagcaccacatcaagttctcccagatgttccacttgatgccaatcggaccagggaacttctatgtgcacaacgacatg

SEQ ID NO: 439116 - DNA, 367 bp, Triticum aestivum
tcggtacaagtacccggagctgaagcgcgccacgcgagggttccgcgatcgcgagctcctcggccgcggcggcttcggcaaggtgtaccgcggcgtgctccctggcacgcccaccaccgtggatcaacgtgaatcgtcgataaccaacattccgcgcatgtggctcaatggaggtactgggacacccctcaagcactggaagacaagttcggcggattcttaaataggcagattgtagatgattacaaacaatttcgccgaggtgtgctttaagaacttctgcgacagggtgaagaacagggtcacctttaacgagccacatacatattgtggtttctcctacggagaggggattcatgctcctggg

SEQ ID NO: 439117 - DNA, 427 bp, Triticum aestivum
gttgttataagcgctcaaggacatgggcatgaaagtgtataggttctccatctcttggtcgagaatactgccagatgggacgggaaaagtaaaccaggcaggtatcgactactacaataagctgatcaactcgctgatagataacgacatagtgccatatgttacaatttggcactgggacacccctcaagcactggaagacaagtacggcggcttcttaaataggcagattgtagatgattacaaacaattcgccgaggtgtgctttaagaacttcggtgacagggtgaagaactggttcacctttaacgagccacatacatattgttgtttctcctacggagaggggattcatgctcctgggaggtgctcgccggggatggattgtgccgtcccagaaggagactcgctcagagagccatacact

SEQ ID NO: 439118 - DNA, 434 bp, Triticum aestivum
tcgtttcaacctccacaagcgcctccatggctgtaccttcaagaagaaggcacctaatgccatcaaagagctcaggaagtttgcacagaaggctatgggcacaacagacgtcaggatcgacgtgaagctcaacaagctcatctggagcagtgggatcagaagcgtgccccgtagggttcgcgtgaggattgcccgcaggaggaacgacgaggaggacgccaaggaggagctctactcactcgtcactgttgccgaggtgcctgctgagggtttgaaggggctgggaaccaaggttgtcgatgacactgagtagaatctttctttatctacatcgttagaatgagctgttattttgcattgcaccagcatgttttttgtatcccatggaagttttggagtatggaatatcgcaagctatctattttccttcatct

SEQ ID NO: 439119 - DNA, 428 bp, Triticum aestivum
tccacgcgtccgctcccctctcgctctctccaccaaccaagaacagcaggaactcgacctcggagcagcaacgaatccgccgccgcccggcaaaagggatccaaagctccaatggctggcaagtacatcgtcgccggcctcgtcggctcctgtgtcatctcgtatgcctgtgactacatcgtttctcagaagaagatcttcggtggcaccatcccagggactgtgtccgacaaggagtggttgaaggcgacggagcagaggttccaggcctggccccgggtcgctgggccgccggtcatcatgaaccccatcagccgccagaacttcatcgtcaaggacctcaacccctgaggctcaagatcttaaggtttgcggtcggttggaacctttaccctgatggcgatgcctgttgctaaatctacctatgt

SEQ ID NO: 439120 - DNA, 292 bp, Triticum aestivum
tcgttataccaaagctcatcttcttctccttgaaatctttttgggttcacagatttggaggatgtcttgcaactgtggatccggttgcagctgcggctcagactgcaagtgcgggaagatgtaccctgatctgacggagcagggcagcgccgccgcccaggtcgccgccgtggtcgtcctcggcgtggcgcctgagaacaaggcggggcagttcgaggtggccgccgggcagtccggcgagggctgcagctgcggcgacaactgcaagtgcaacccctgcaactgttaagct

SEQ ID NO: 439121 - DNA, 256 bp, Triticum aestivum
gttgtttttgacattccggaatcgatctgtagcagtttggaatttccgaggtgaactagtaacatcatttgaggatcacctgctgtggcaccctgactgcaataccaataacatatacataaccagtgatcaagatcttattatttcttactgcaaggctgattccactgattcatcttcagaagaaaatgctggctctataaacattagcaacatactgacagggaaatgcttggctaaataaaggctggcaatt

SEQ ID NO: 439122 - DNA, 172 bp, Triticum aestivum
gttggtgaaggggagcgagaacccccgcagctactacaagtgcaccttccccaactgccccaccaagaagaaggtggagacctccctggagggccagatcaccgagatcgtctacaagggcacgcacaaccacgccaagccgctcaacacgcgcaggggctccggcggcggc

SEQ ID NO: 439123 - DNA, 287 bp, Triticum aestivum
ctggatcaaggcgctggatgcctcattatctgggaggatcagaagacagaggccatcttccctgctacactagaaaccatttcaaatgtcggaaaggttgtggacagtctttacatgaggtcggataagatcatggcttgaaagttgctaagcatgtgataggctgtttggtatgggttcagccttttcagttcctttgctttctttaagacatgtaatcctgcatattggcacttgattttgcatgttggtcgttatattggatcatagaaaaatacatcttgctc

SEQ ID NO: 439124 - DNA, 413 bp, Triticum aestivum
tcgtttgtttgttcaccatgttattatttggaccgggcttgtagcttgcttgtgatagtattttcttgtctactgtggtacctactgttaattaccttttttttctttctttctcaggatccacaagttgtcactggctcacatgatacaactatcaagttctgggatcttgtagctgggaaaactatgtgtactcttacacaccataagaagtctgttcgggccatggcactgcatccaaaagagaaatcatttgcatcagcatctgccgacaacataaaaaagtggagcctgcccaaaggcgaatttctgcacaacatgctgtcccagcaaaaaacgattctgaatgcaatggctgttaatgaggatggtgtcctggcaactgcaggggacaatggaagcatgtggttttg

SEQ ID NO: 439125 - DNA, 431 bp, Triticum aestivum
tcgttcttgtgtttgctaacaagcaagatcttccaaatgccatgaatgctgctgagatcactgataagcttggcctgcactcccttcgccagcgacactggtacatccagagcacttgtgctacaacaggggagggactgtatgaaggcctggactggctgtccagcaacattgccagcaagccctaaattttcgtcaagattttgaaggagctaggagcgctttggatggacgattgaatcaccgggtacctagggattgtgttgggagggatggtgctatgctattcccgtatgtactgtgtattttcctgagatcaacagttactgagccagctccggctgaggtttcactgtcatactattgttttattgtattcgagccctaagatgtttgcgaagcaaacagctaaagagagtcctggtcaattt

SEQ ID NO: 439126 - DNA, 238 bp, Triticum aestivum
tttagctttttgtacttgacgagtctactatgaaagacgagaggtttgctttagtcgctgcaaaagtaatcaatcctaccatgttcgatcaagttctgagaaattttactccagatgcaccggctggaacatctgctcggccaagacaagaagatgcccaagagttcctaagttttgtcatggatagaatgcatgatgaactgttgaggcttaatggcaatggttgaaattcaaagga

SEQ ID NO: 439127 - DNA, 445 bp, Triticum aestivum
tttgtccgtttacgcgtccggccagcagaggttgaggcaccagaggaagaggcaccaaagccaaagcccaaaaatccccttgatctactgccaccaagcaagatggtacttgatgactggaagaggctatactcaaacactaagagcaacttccatgatgttgctgttaaaggtttctgggagatgtatgacccagagggctactctctctggttctgtgactacaagtaccaggaagagaacaccgtgtcctacgtgaccctgaacaaggtcggcgggttcctgcagcggatggatctgtgccgcaagtacgcttttggcaagatgctcgtgattggttctgaggcgcccttcaaagtcaaggggctgtggctcttccgtgggcaggacatccctgagttcgtcatgaatgaggtctatgacatggagctctacgagtggacta

SEQ ID NO: 439128 - DNA, 401 bp, Triticum aestivum
ttcacgcgtccgcccacgcgtccggcctcgtactgctccgagctccaattcttaggcaaccctgtgaccaaccatgttcagagcgcggagcaacacaaccaagatgtcaactctcttggtctcatctcctcaaggaagactgcagaggccattgacatattgaagctcatgtcctcaacattcttggtcgcgttgtgccaggctatcgacctccgccaccttgaggagaatgtcaagaatgctgtcaagagctgcgtgaagacagtggctaggaagacactgagcactgataacaatggccatcttcacaacgcacgcttctgcgagaaggaccttctgctcacaatcgaccgtgaggccgtgttcgcgtacgcagatgacccctgcagcgccaactaccc

SEQ ID NO: 439129 - DNA, 409 bp, Triticum aestivum
ttcggcggcggcagcgaagaagaagaagagaagaagaagaaagatgatctacgacgtgaactcccccctgttccgctccttcctcagccagaagggcggcgcgtcctccgacaagaggaaaatggaagagcagaagccgaaagaccagaggttcaaggccaacgagaacaagcctgtaatgaacgaatgagcatcgcctggacagtccggtgcctgcaaggcctagctgccaatcatgtgacactcctatgttaaaatgagtggtgtgaacatctgcttggtcgttctgaaaactatccaagtatccagtactgtgttttaagttcctatatatctgaactgcatgcctggaatgataaattaggagaatttatcttgcgatgtcttctcatggagcattcaagttttg

SEQ ID NO: 439130 - DNA, 353 bp, Triticum aestivum
ttttgaatgctgaacagaagataatttctggcttccctgaagctgcaacacttgctcgctggatatgccaaagttaccggttccatctgggggtcgagttatttagacaggcagatgaagctggggaatctttattgagaatgctctgggatcatgaagatgctattttgtgctgttctttcaaggaaaagcctgtatttacgttcgcaaacgagatgggaattaacatgttggaaacatctttcgttgcccttcaagatctctcgttggacaagatatttgatgaagctggtagaaaggcactatactccgagatcccaaagctgatggagcagggctttgtttacctgcca

SEQ ID NO: 439131 - DNA, 315 bp, Triticum aestivum
tttgccctttagaaacgccaccaaacccaaactcgagcccccctcttccgtccgcccgtcccaacccgacccgatctcccccctcctcctccgtcgccatgggccgcaagctcttcgtcggcggcaactggaaatgcaatggaactgtcgaacaggtagagagcatcgacaatactctgaacgctggacagatcgcctctacggatgctgtcgaggctgtcgatagcccgccctatgacttccttcccaccgtcaagggtaagctgcgcccagagatccaagttgctgctcagaactgctgggtgaagaagggcg

SEQ ID NO: 439132 - DNA, 372 bp, Triticum aestivum
ttcatcgtttcgcgcccgcaccccaggaagctcaagaggctgtcctgagaagctcaaatggctcccaaagttgctgttgccaagaagggcgatgccaaggcccaggctgccaaggttgccaaggctgtgaagtccgggtcaatcaagaagaccgcaaagaagatccgcacgtctgtgacatttcaccgtcccaagaccctgtccaaggccagggaccccaagtaccccaggatcagcacccctggcaggaacaagttagaccagtaccagatactcaagtacccgcttaccactgagtctgcgatgaagaagattgaagacaacaacacccttgtcttcatcgtcgacctgaaggcagacaaaaaaaaagat

SEQ ID NO: 439133 - DNA, 330 bp, Triticum aestivum
atttgtcctgtctgatcagctatttgatcatttgatctgtgcttagtgatcactcggcagcaatggcaggcaaggcatcaatcgcgttgttcctcgccgtgaacttggtcgtgttctccctggcaagcgcgtgcgggggaaactgcccgaccccgtccacgcccactccatcgacgcccaccccgaccccggccccgctcggcaggtgcccacgcgacgcgctgaaggtgggcgcgtgtgtcaacgcgctgaacctgatcaaggtccaggtgggcaggccgaccgcgttgccgtgctgcccgctgctggatgggctcgtcgacctcgagg

SEQ ID NO: 439134 - DNA, 277 bp, Triticum aestivum
ttcatgacggatctgggcagggactgggacatcgactacgaactcctcgtcaagctcaccatcgacctccccatcatcggcaacttcaccatcccgctcgaaaccgccggcgagttcaagctgcccaccctcagcgacttcttcggcggcgccgccaagaccgaggaggccaccgcctagccataagctcgatctagctcgcagcttgctctgcatccgcatgcctgtactctaccgttgccgcaataatgagagcaaatattttcggatttctttc

SEQ ID NO: 439135 - DNA, 461 bp, Triticum aestivum
tatccctcatcgagggcggcggcatcggcaccgccatcgagacgaccacctcgcacatcaaggtggagccggcggccaacggtgggagcgtcgttaaggtggagtcgacctacaagctgctgccgggcgtggaggtaaacgatgagatcaccaaggccaaggagtctgtcacggccatcttcaaggccgccgaggcctacctcgtcgccaacccggacgcctacaactgaaccagctgagagggaacacatatggttatgattatgattatgctggccctggtatgatttttgtgtgcttttttcctgatctaataaagccgctccaatcgcaagtagtgacgcgggagcactgagcagagtgtggacttgacaagttaaaaaggtcgtgtattcagtatttgtaactatcaaagggtgccatgctgttgtttgatgatgttgttgcttgcttatgtatct

SEQ ID NO: 439136 - DNA, 338 bp, Triticum aestivum
ctcgtcgagagcacctccgggagccgggatctccagatggtgagaattggtcttcgtgttcttacacgacccatgccagagagactaccaactatgtacaggaccctgggggagaactacaatgagagagtgctgccttcaatcattcatgaaacactcaaagctgtggttgcccaatacaatgccagtcagctaatcacacagagagaggctgtgagcagggagatcaggaagattctgacagagagggcgaagaacttcaacatcgctctggatgatgtgtccattaccagtctcagctttggtaaggagttcactcatgccattgaagccaaaca

SEQ ID NO: 439137 - DNA, 362 bp, Triticum aestivum
aacagatgcctcaggaaacggtctcttttactcgcaagggagatttctagatgttgacacaggcatcattgccacaaataagcagttgatgccatcactgctgaagtctgtccaggaggccatcaaggagaaaagccaggccccttccccattgtagaagcttttttggtttgaaccttccctattgtacttggattgatccaaaacaatgatcgcaatgccacaccttattcacactgtttatgtgtaaatgacctttttgttgggacaaaggcaatccttgctgtatcacatttgtacatctaaggagtggtgacagccatgtcttaaataaaagaggcatctgcctgcagttataaaaa

SEQ ID NO: 439138 - DNA, 447 bp, Triticum aestivum
ttataatggcacctacaagaattcatgtaacatgttcactagttcatgggcaaaccccaactggaaggatccataaaggagtttgttctacttggatgaagaattcaactccctcggaagagagcaaagaatgcagttgggctccaattttcgtgaggcagtcaaacttcaaattgcctgctgatcctacagtgcctattataatggtgggccctgggactggccttgcacctttcaggggcttcttacaggaaagattagctttaaaagagaccggggtggaactgggccgtgccatcctgttcttcgggtgcagaaaccgccagatggacttcatatacgaggacgagctgaacaactttgctgaatcgggagccctctccgagttagtcgtcgccttttctcgtgagggtcctacaaaagagtacgtccaacacaaaatggcag

SEQ ID NO: 439139 - DNA, 408 bp, Triticum aestivum
tgtttccgttgacgcgtgggcgccgagaaatgggggatgctgaggcagaagccgagggcgtgctgcggggcgccgggcgtgggggtgtacaacttcaacctgacgtccaagtgcggggagccgggagcgtacgcgtgcgacgacccgtccaaccactggagctgggacggcatccacctcacggaggcctcctacggccacatcgccaggggctggctctacgggcccttcgccgacccacccatcgtcggcaaccggaacctcgagtagtactgtagcagcagtggtacagggcttgtttttgcgtacatgccacctgcacatgggttttactactgtatgtagagaaagaaaggaaaacaagtcaaagaacacacatgccttgtgcagattaattgattgctaatt

SEQ ID NO: 439140 - DNA, 392 bp, Triticum aestivum
ttcacgcgtccgcccacgcgtccggccacgtgtccgcttttgcgtccgggagagtgatagaggcatcttctattcacaagatacgcggctgccatggcgagaaccctttttggtttcgtcgccgcccccgcgctcctcctcgccgtcttcatgccggccctcgccgccgcgcaggcccccgcgccggcgcccaccagcgacgcgtcctcggtcgaccagggcgttgcctactttctgatgatcctggcgctggtgctcacctacctcatccacccgttggacgcctcctccccgtacaagctcttctgagcctgtacatgcgcagaggcttctcattcttttgttcatctttctgttgtccgtcgatcgataagctagtggattcttgagag

SEQ ID NO: 439141 - DNA, 376 bp, Triticum aestivum
ttgatatttcccccgagccgaggtcaagtcgcctcgtggcgtgctgcgtttctcctcctgccccgctcctcccccattcgccgtccgcggttctctccaccgaacaagctcacacatcaagacaataaatagagcctcgtttgtttggggccaatcaaaccaaacaacaagttcatgtctgatctcgacgtccaggttccaactgcttttgatccgtttgctgaggcaaatgctgaggactccggcgctggtgctggatcaaagaactatgtgcatgtgcgtgtccagcagcgcaacggaagaaagagtctgactactgttcagggcttgaagaaagattacagctacaacaagattctcaaggatctcaaaaagg

SEQ ID NO: 439142 - DNA, 493 bp, Triticum aestivum
tttccgtttccaaactcaaatcaggcggacaaatcatctctgctcgatgcaataattgagcatgcgaaaccctcttcagcttcaggtgcaggcctcaagcatgagtaggctcggagctcccggtgcagttcttcccctccttgcagaatctcaaactgagggccgtagcaattcacctctatcatctccaaccgcttcacaagggcttctggacgcagcaggcccagaagacagcttggtctttgagcaagaagttataaagctgatggaaacaagcatcacaaatgcaatgcagtaccttcagaacaagggcctctgcctgatgcctatcgctcttgcttcagccatatccaaccagaaaggcacttctgcagctgcaatccctccagaaaggtgaaaacagaaagcacatcatgctcctcccatcggcccgcggaaacaactgtcgaaatgtgctagagttcatagaagttgtgagaaaacaaaaatccga

SEQ ID NO: 439143 - DNA, 457 bp, Triticum aestivum
tttccgtttcgagagcgggtatgagcagaagaggaaggtgatgaacaagaagtatgaggtgtacgaaaagcagatgaaagcagcaaggaagactgggagcaaggctgcacatgataaggttaaagaccaagcaatgtcaaaggcccataaagaagttgccaaggggaaggggaaaggaaagaatgtggcaaatgatgatgataacgtgaagccagcggatctgccacaaaagtggcatgactacaaagtcgagttccacttcccagaacccactctgctcacaccaccactccttcagctcattgatgtgggtttcggctaccccaaccgtccggacttcaagttgccagatgttgatgctggcattgacatgggaacacgtgttgccattgttgggcccaatggagcaggaaagtctactattctaaatttacttgctggtgatcttaacccatcc

SEQ ID NO: 439144 - DNA, 358 bp, Triticum aestivum
atctttttgatttttctcggccttgtgctggataccgcgcgcctcagcaaattcccgctgccgctgtcggccaccgcgcaccagatgttcatgagcgcgtcgagcgccggccacggcggcgaggacgattccgccgtcatcaagactttccccggcatcacgctgccgtccgcccgctgattcgaacgacgtacctgccatgaccgcttccgcttcccgtcccctgctcggctgcatcggcgacgatttcaccggcgcgaccgatctcgcgaacatgctcgtcaagagcggcatgcgcaccgtgcagacgatcggcgtgcccgccggcgacgccgcagtcgataccctgatcgacgcc

SEQ ID NO: 439145 - DNA, 291 bp, Triticum aestivum
gtctcaaccccgtggacgtggtcaagaccagggtgatgaacatgaaggtggcgcccggcgcgccccctccgtacgccggggccctggactgcgcgctcaagacggtgcggtcggagggcgtgatggcgctctacaaggggttcatccccacggtgtcgcgccaggggcccttcaccgtggtgctcttcgtcaccctggagcaggtgcgcaaggtcttcaaggacgtcgagttctaatgcagtgcagaccaccgcacggcgcggcgccatggatccatgatgatgacgacaa

SEQ ID NO: 439146 - DNA, 473 bp, Triticum aestivum
cctgaagaaggagggtgccaagtccctcttcaagggggctggtgccaacatcctccgtgccattgctggtgctggtgtgctctccggctatgatcagctccagatcctcttcttcggcaagaagtacggctcaggcggtgcctagaggggacgaaatgatgacgaacaagagaagtttgttcccagtcctacccttcgaggatctggtgaacttttatctttttaacgttggaaggcaataattattgtagagggtggattttcccaacattcgtttttggtggaggcatcgaactccagaggttgtcgtaggttggcggcagcgttctcaaaacatttactatcatagggttgagtttgagttcgagtatgtgccctgaatcgttaccgggcaattttccttaaatacattgtcctccaatccgactgatattatggtcaagtttatgctattggtgtcaacatcctattcc

SEQ ID NO: 439147 - DNA, 419 bp, Triticum aestivum
tttaaattctccgatgcggccctgtttcgatgtttcagagcctctgccacaggtggtgtgggcgactatccccctcagaagtggccgataaagtgaagcacttcttcaagtactatgccataaaccggcacaagatgacggtcttgacaccatcctatcacgctgagagctattcaccagaggataacaggttcgatctccggcagttcctatacaactcgacatggccgtaccagtttcgcaagattgatcaacttgtacaagatatcgacaaagatggcaaatgggtggaagatcgtcgcgcagactcgcagctgagacaacgcggagccgctaggcctgcccagggaggtggaatgggagtcgcggccgcgggatctgccaatcccggtgctgggctgtaagaaatagggcatgcc

SEQ ID NO: 439148 - DNA, 424 bp, Triticum aestivum
ctttatgcctcttttgaggacagcactgtatgggaaaggtattgagatatactgcgctcccacggctgattcaaggccagtttggcaagcttccatgacacacatcgccatggaggggggatgctttgtgttgtcggcaaaccagttctgccgcagacaggactaccctccgccatccgagtacgcctttgccggtttaggagaagagccttctccagacaccgttgtttgccctggaggcagtgttatcatttcgccgtcgggcgaagtcctggcaggtcccaattacgacggagaggcgctcatcacagccgaccttgacatgggagagatcgttagggccaagtttgattttgacgtggtgggccactactctcggcctgaggtgctgagcttggtagtggatgaccagccgcaccgcccg

SEQ ID NO: 439149 - DNA, 434 bp, Triticum aestivum
gtctattcgcggtgttcgacttcgacttcaccgggccggttgatgtgccaaagagcaggatcttctatatcttctggtccccggacaccgcaaaggtgaggagcaagatgacgtacgcgagcaccaacgagaagttcaagaggaccctggacggcatccagatcgagatgcaggccactgaccccagcgaaatcagcctggacgtgatcaaggagcgcgcgcactaaggcaaatcatcccaatgcctcgcaatatggatttatgtcaaatatagatttggcggtgtgactcttgaaactttcttgatgattcgtggctttgttaccgtgtcgaaaggccctcctcccgtggtccgtgtgaccacggagggcttgctctatcatgtaatctgttctttttcttctgcccatttatatgccgggccttatgctgct

SEQ ID NO: 439150 - DNA, 216 bp, Triticum aestivum
gtctatttcggcctgtcgcgccttgctccgctgccggatacagaggggagcgcccctggccacgtgtccaccgtcgtcaagggcaccccgggttatcttgacccggagtatttcctgacacacaagctcacggacaagagcgacgtgtacagcctgggcgtggtgttcctggagctgctgacggggatgcagcctatttctcatggaaagaacttg

SEQ ID NO: 439151 - DNA, 467 bp, Triticum aestivum
ttcgtccgtttcctttccatacctgaaggccctgaaggagctcgaagtgtccgcagcgcacaccttcatctttgaggattccgcttcagggacacgcgcaggcgttgccgcgggaatgcccgtcgtcgccgtctcgacgaggaacccggtgaagtccctacaggaagctggggccgcattgatcgtcagtgactatgaagaccagaagctgtggaacgcgctcgaggagattgatagggaggaagcgaagctaaagactggtggggcctgaaaaagatgatggtgatgaacagttgattagaccattgcaaatttacccattcttattatttataagggaatctacgccctgaagttattatggtaggacagagctcatctaggtattttgagctattagtttgatatatgcttcttttggttctctagtagagaatcaaataaaaaacttttgtgtcccacacatg

SEQ ID NO: 439152 - DNA, 303 bp, Triticum aestivum
tttttccgttcgcctccgtccgttgtagcacaagcagaagcaccttgcgccgtcgcctccgtccgttgtagcacaagcagaagcaccttgcgccgccgcctccgtcgtctcagcagaagcagcgatccccatcgccaacaaccaaagaaagcatggatacgcaggtgaagctcgcagtggtggtcaaggtgatgggccgcaccgggtccaggggtcaggtgacccaggtgagagtcaagttcctggacgaccagaaccggctcatcatgaggaacgccaaggggcctgtccgggagggcgaca

SEQ ID NO: 439153 - DNA, 353 bp, Triticum aestivum
gtcacctgctcctccaattggaactctcacatctgcccttgcaaatgctactccagagcaacaaagaacgatacttggcgaaagcctctatccacttgttgagaagcttgaacaccaacaagctgccaaggtgacgggcatgcttctggagatggaccagacggaggtgctgcatctgctcgagtctccagaggctctcaagtccaaggttgccgaggcgatggatgttctccgcaacgtggcccagcagcaaaacccgaatgcccctaccagccagctcgcgggtctaaccttgagcgacggcattatctcttagtttagagtcagtttgcggtctcatgatgctatagatt

SEQ ID NO: 439154 - DNA, 404 bp, Triticum aestivum
ttcttccggtatatcctcataactatggtttcggtccgaggacactttgtgaagacatcgatccaatggatgtgttggtcctgatgcaggagcctgttattcctggttcttttctccgagctagagcaattggccttatgcccatgattgatcagggtgaaaaggatgacaagatcatagcagtctgcgccgatgatcctgaataccgtcactacaatgacatcagtgagctgtctcctcaccgactgcaagagatcaagcgcttctttgaggactacaagaagaatgagaacaaggaggtcgctgtcgatgcgttcttacctgcgaccactgtccgcgaggccattcagtattcaatggacctgtatgcacagtatattttgcagagcttaaggcagtagcat

SEQ ID NO: 439155 - DNA, 447 bp, Triticum aestivum
tttccggttttttacagatataaatatggattacgagcggaatgatgctgaggttcaggctgagggtgtattaaattctagattacagcatttaactcatacacttgataaggtaaggtatgttatgagatgtatattcggggaccccaagaatgccccccctcctctggtgaggcttaccgggagaagtctagtgtctgccatctggaaaggggaaggctcattagttgatgagctccttcagtcaattgaacatcatgttgacgaagatgtacttactgatctcaaggacaaaattcggcttcatgatccatctgattctgaagacatcgagggagacatccgaaattctctgttatggttgcgtgatgagttgagaactctttcatgcacatacaagtgccgtcatgacgcagctgctgatttgattcaaatgtatgcttacac

SEQ ID NO: 439156 - DNA, 339 bp, Triticum aestivum
gtttcatcattctgggacttggcgattttgtcttctacagtgtgcttgtggggagggctgccatgtatgatctcatgacggtctatgcgtgctacctcgccatcatcgctgggcttggctgcaccctcatcttgctgtcgatatgcaggcacgcattgcccgcactcccgatctccatcatgctgggagtcgtgtcctacttctcgacgcggttgttgatggagccactcgttgtcggtgcttcgaccaatttggtgatgttctgaggtctgactaatgtcctgtcgttgatgttacatgtgtgtcaagctgaaaagcaactgtgaacatcatgtggga

SEQ ID NO: 439157 - DNA, 360 bp, Triticum aestivum
atgaaccctgcacgctccttcggccccgccgttgccagcggcgacttcaccaacatctggatctactgggccggcccgctcatcggcggtggcctcgccggcgtcgtctaccggtacctgtacatgtgcgacgaccacaccgccgtcgccggcaacgactactaagccagccatgggaagatcattcggtctttggtttccataatgtcttcggcaacataagaagtgcgtacgtggtggtcactctcaggattgtctggatgatgtgaggaacgtcatgttgtttggttccgatcgaaagcccgcgaggctgtggcacttggatgatgcatgtttctgtatctgtactgtgatggatgt

SEQ ID NO: 439158 - DNA, 335 bp, Triticum aestivum
tctctctcctctccggccggccagccagtctgtgcttcttcttctccagcgagcgagcgagctaggctcggaggtgagcgaaaatgccggtcagcaggatcgccgtggggagccaccgtgaggtgtacgaggtgggcgccctcaaggcggcgctcgccgagttcatctccacgctcatcttcgtcttcgccggccagggctccggcatggccttcagcaagctgagccccgacggcgcggcgacccccgccggcctcatctcggcggcgatagcccacgccttcgcgctgttcgtggcggtgtccgtgggcgccaacatctccggcgggcacgtg

SEQ ID NO: 439159 - DNA, 389 bp, Triticum aestivum
  unsure (1)..(389): unsure at all n locations
acttagagctcaaccaagatagcgagccaagatctgcagagccacaggcgaccacacaccggcgaccatggccgtggacctcatgggctgctacacccctcgccgtgccgacgaccagctcgccatccaggaggccgccaccgccggcctccgcagcctggagctcctggtctcctccctctccggcgcggcgccgtccaaggcgccccagcagcacccgcagcagccgttcggcgagatcgccgaccaggccgtctccaagttccgcaaggtgatctccatcctcgaccgcaccggtcacgcccgcttccgccgcggccccgtccagtcggcgccgtcgccgccgacttctccagcaccggtcgctccacctnctcccccacctttga

SEQ ID NO: 439160 - DNA, 398 bp, Triticum aestivum
cctacgcgttcgccgtttattcccctccggcgcagccgcccccgtgtcctgtgcgcaccttctcgaagcctcctccctccctcatggcggaccagctgaccgacgagcagatcgccgagttcaaggaggccttcagcctcttcgacaaggatggcgacggttgcatcaccaccaaggagctcggaaccgtgatgcggtccctcgggcagaaccccacggaggcggagctgcaggacatgatcaacgaggttgacgcggacggcaacggcaccatcgacttcccggagttcctgaacctgatggcgaggaagatgaaggacactgactcggaggaggagctcaaggaggcgttccgcgtgtttgacaaggaccagaacggcttcatctcggcggcggag

SEQ ID NO: 439161 - DNA, 391 bp, Triticum aestivum
ttgcccctgacgaggagattaacgaagcattgaggaactgcttcatcgaccgtgaaacaagtttcaaacaagtacagaagctctgcatgcctttcatcaggttcaagaaagatgaagcaaggaatgttggtccccaggctctaaatttgaagcttccttttggtgaaataaatgtgcttgaggagaacctggagctgatcagaaggcagttgggtcttgagcatgttgaggtcctgtcggcatttgatggagctgctcgtgccaaagctggaaagcatgcttctctgctggacaagaatccgccttcccctggtgagccggttgcaatattcatgagcaagcaggagtttgaagcgcagaattaagcccagattaatcttctcacagaact

SEQ ID NO: 439162 - DNA, 452 bp, Triticum aestivum
gtaggaagtcaatgccaacttcaccgcctccggtttcagaacgcgaagtggaacaagagccggagcccgaaccagaaccagagccagtaaaagaggaagcacctgctgctgaaccaacagacttgctgggtctgaatgaaacacaccctgctgtggccgagatagacgagaggaacgctctagcgctggcaattgttccaatagatgacgtgcccaaggccgctcctgcttttgaaaatggagtcacaggctgggaactggcccttgtcactgcacccagttcaaatgaaactgctgtcgcttcaggcaaaaaattggctggtggactggacttgctcacccttgacagcctatacgaagacgcgaaccgacgagcgagccagcccgcaggttacaacccctgggagaccaccggtgccgccccggccccgatgatgcaacaaccagcagca

SEQ ID NO: 439163 - DNA, 363 bp, Triticum aestivum
gcatgcaatggatagccacacatatcatagatacgacacagatttaacttaatggataacgaaacgtcaggtagaacagactacccagacccaacggacttgacatggcaagagtacattcatacgagttcaacaggggcacgacggcctcaaaagtccattcacttcgtcgcagggtggggtgatactttggctggttatttaggtgataacggttctgggctcggcgcatccatggtcaccagctggccgtccaggctctagcccatggcgtacttctgtgtccaggagcgtgccgtggactcatacttggcccgatcagtcttgtacatgtgagcgatctcaggcaccaggggatcatca

SEQ ID NO: 439164 - DNA, 432 bp, Triticum aestivum
ttcacgcgtccgtccccatctcgctctcgcggccgagagatcgaatcggagaagaaggagcggagaggcctctgctgccctagctccgccgcccccgcaccggccatggcgctcgccgctcgcctcgtatcccgctcccgacagttatattctgtccaagctgctttggccaatggaggcgtcactcaagtccgctcatttgccaaggaggcagctcctgtcagcggagatgacctattgaagggcatcttttttgaggtgaagaaaaagtttgagaccgcacttggggtccttaagaaggagaagatcacgatagacccagatgacccaacagcagttgctaactatgcccaagtcatgaggactgtaagagaaaaggcagatcttctttccgatcctcagagaattaaacatactattgagactttcacg

SEQ ID NO: 439165 - DNA, 444 bp, Triticum aestivum
ctcacgcgtccgcggacgcgtgggctcgcgccgccgccgccgcagcttcctccccgccgtcacgatgccgtcgcacaagaccttccggatcaagcagaagctggccaagaagcagcgccagaaccgccccatcccctactggatccgcatgaggaccgacaacaccatcaggtacaacgccaagcgcaggcactggcgccgcaccaagctcggattctaagcgggggatgacgacgatgacacccgttgccgccgacgggagaagggtctagggtacctagggtttatgacgtctcgttgtttttgcaagctagcatgtgactccgggatgcctgttttaagatttcgcttgtgttgaaagatattattatttactgcttgtagcctacctgggataccatcatattttgctgattatggaactacttttatcctgcttaaaaa

SEQ ID NO: 439166 - DNA, 373 bp, Triticum aestivum
cgttcgcgttgtgtccacacacatcagaaatgggaagccgtctcatgttttcaatgctgctggtgtcactggaaggccaaatgttgactggtgtgagacccacaaacaggacactatccgcaccaatgttgtaggcaccttgaatcttgctgatgtttgtcgtgagcaggggttgctcatgattaattatgctacaagttgcatatttgagtataatgctgaacaccctgaagggtctggaattggttttaaagaggaggacacgcccaactttgtaggttcattctattccaaaaccaaagccatggtggaagagttattgaaggactatgataatgtctgtactcttagagtcaggatgcccatatcatca

SEQ ID NO: 439167 - DNA, 310 bp, Triticum aestivum
ttcacacgcgcgacatgagtgcagaactaagcagccagctgcagagacaggctgcggaacaggtcaagggtcctgacctgagccaaatgatctcaagagctgaggcgacggacatggacaatgatgacaacgaggatggcaacgatgaaagagacgagccaaaggacatcgcgctggtgatgacacaagcggccatctcaagggccaaggctgtgagggctatcaagtatgccaatggagacattgtcactgccattatggaggacacaacttacgagtatggcgacagttgtggaactagttgaaccat

SEQ ID NO: 439168 - DNA, 377 bp, Triticum aestivum
gtcgccgccgccgctcccagctcgcgctccctggcccagctgccgccgccgccgcctcgtcggagttcttcctacccctttcgccaacatgggtaagacacgtggtatgggagctgggcgcaagctcaagacccaccgcaggaaccagaggtgggctgacaaggcatacaagaagagccacttgggtaacgagtggaagaaacccttcgccgggtcatctcacgccaagggcattgttttggagaagatcggtattgaggccaagcagcctaactctgccatccgtaagtgtgctcgtgtgcagcttgtgaagaacggaaagaagattgctgccttcgttcccaatgatggttgcctgaacttcatcgaggagaatg

SEQ ID NO: 439169 - DNA, 360 bp, Triticum aestivum
gtgtttccagcaaacgaaatattgtcgaaaattgaagcagcagcaggacccatgggcttcaacgtacagaagcgcaactacaagctgaagttgcaaggagagaatcctggaaggaaaggtcagctggcaattgcaacagaggtttttgaagtgacaccctcactctacatggtggagctccgcaaatcgaatggcgacaccctcgaattccacaagttttaccatagtatctcgaatggcctgaaggacgtcatgtggaagccagagggtagcatagccgaaggcgatgagacccgccaccggaggtctccatgatcatatctaaatgttaggagatagtagaagataaaactagtcagg

SEQ ID NO: 439170 - DNA, 366 bp, Triticum aestivum
gcgggccggtttagagtaccacttcagaatgatcagctgcagagcggcagagattgaggcatccaagctggggtgcgagcccggggaggcgctggccgtcaacctggccttcgcgctctcgcacgtgcctgacgagagcgtctcgccggcgaacccccgcgacgagcttctccgccgcgtgcgcgccctcggcccgcaggtggtggcactcgtggagcaggagctgaactccaacaccgccccgctggccacgcgcttctcggacgcgtacttgcactacggagccattctcgatgcactggactcgacggtcagccgggatagcgcggacagggcgcgggcagaggaggcggtggcaaacatgtc

SEQ ID NO: 439171 - DNA, 354 bp, Triticum aestivum
ctaaaccctaccatcttcggattcctctccaccggcggcctcccccgtcagatcaccatggtgagtcgacggagaagaagcagttgaacccgatgcgggagatcaaggtgcagaagcttgtcctcaacatctccgtcggggagagcggcgatcgcctcactcgcgctgccaaggtgttggagcagctgagcgggcagtcgccagttttctccaaggcgaggtacactgtcaggtcttttggcattcgtcgtaatgagaagattgcctgctatgtgacgatcaggggtgagaaggcaatgcagcttctcgagagtgggctgaaggtgaaggagtacgagcttctgaggaggaact

SEQ ID NO: 439172 - DNA, 372 bp, Triticum aestivum
  unsure (1)..(372): unsure at all n locations
cccccgccggcaccccttccccgcatcgtctcccacgccaagaccgccgccgttcgtcaagatggtgctgcagaacgacatcgacctcctcaacccgccggcggagctcgagaagctcaagcacaagaagaagcgcctcgtgcagtcccccaactccttcttcatggatgtcaagtgccagggctgcttcaacataacgactgtgttcagccactctcagnaccgtggtggtgtgccctggctgccagacggtgctctgccaacccaccggaggaaaggcgaggctcaccgagggatgctccttccgccggaagggcgactaagctgcacgcctgtttatgggaaaaatgaagccccgctgaaccttacttt

SEQ ID NO: 439173 - DNA, 299 bp, Triticum aestivum
ttttggctttggcaaatgctgaggatgctggggcaggctccggcccaaaagattatgtgcatgtgcgcatccagcagcgcaacggcaggaaagagtctgaccactgtccagggcctgaagaaggagttcagctacaacaagatcctcaaggatctcaagaaggaattctgctgcaatggcacagtagtccaggatccggagctaggccaggtcattcagcttcagggtgatcagcgtaagaatgttgctactttcctagtccaggctgggattgcgaaagaaggagcctcatcaagatc

SEQ ID NO: 439174 - DNA, 426 bp, Triticum aestivum
gttcttcaccctggaggaggtcgccaagcacagctccaaggacgactgctggctagtcatcggcggcaaggtgtacaatgtgaccaagtttctcgatgaccaccctggaggcgacgacgtcttgctgtcttcaacagccaaggatgcgaccgacgacttcgaggacgtggggcacagcacgaccgcccgggcgatgatggacgagtactacgtgggcgagatcgacgcgaccacgatacccaccaaggtcaagtacacgccgcccaagcagccgcactacaaccaggacaagacccccgagttcgtcatcaagatcctccagttcttggtccccctcgcgatactgggcctggccgtcgccgtacggatctacaccaaggcggagtctgtctagcaccggcgtcttataccagtcagtcagtcagt

SEQ ID NO: 439175 - DNA, 390 bp, Triticum aestivum
ctgttcaagaactcaagatggccaaccacgttgcacttctcctcctgctgtctctccagctcaccgcgtcattctctcagcagcccggcgacgacccggacctccggaccctcctcaagatcaaggagcagttcggcgaccaggccgcactggtgtctttgctgcccggcaccgaccagtgcaactggccgtacgcctactgcaaccagcaccgccgcgtcgtcgccatcttcctccagaacgtcaacatcacctccacgatcccaccggccatcggcgacctcgaccagctccacaccatcagcatccacagcatcccgggcctccatggccccatcccggacacattcggcaagctctcgcacctctccatcttcaacatcatgcgca

SEQ ID NO: 439176 - DNA, 353 bp, Triticum aestivum
atttgttgtttaggccaagaggagggccgaaattgcaagggtgaggtagcttcatacgctcaaagggcacgtggagtccgtcgtcaagctgaagggtctcgacatcgagacgatccagcagtcctacacggtctgatgctctgagctgcccatgagcgaagagtggatcctcttctttgctatgaacttcactactgtaatcgaccgtgcgcgtggtactgagacataactactctagttaaacgttgcccgctggtgacatagtttcgcaccacctaagtaaccgcgtcgccgtttttttttgtttgatttttttttacgttttcagatagtatgtatattatgtttttttt

SEQ ID NO: 439177 - DNA, 240 bp, Triticum aestivum
tcggtgtttatctaacatcatccacatgcagaacaagaccctcaagttatatactggaaattatgaccagtatgttcaaactcgctctgagcttgaagagaatcaaatgaagcagtacaaatggcaacaggaacagatagctaatatgaaggagtacattgcccgatttggtcatggatctgcgaagcttgctcgtcaggctcagagcaaagagaagactcttgcaaagatggagcgtgg

SEQ ID NO: 439178 - DNA, 352 bp, Triticum aestivum
gtttgtgtaccccatggaccagctctccaccgacggtgccgtcttccaccgcgcctgcttcaagtgccaccactgcaagtccaccctctcctttagcagctactcctcctttgaaggagtgccctactgcaagccccatttcgcgcagctgttcaaggagaccgggagctacaacaagagcttccagtcacaatcccccgcgaaatctgcgacggagaagttgactcctgagctgaccagatcgccaagcaaagctgcgggcatgttttcgggaacgcaggacaagtgcgccacttgtggtaaaacagcataccctcttgagaaggtgacagttgaagagaagtcctaccac

SEQ ID NO: 439179 - DNA, 388 bp, Triticum aestivum
tcgtccacgcgtccggctacccttgccgcaagataaaccatgggtggggtacttggtttgatacagattgatcaatcaactgtagccatcaaggagacttttgggaagtttgatgcgatcctgcaacctggatgccactgcttgccatggtgcctagggcagcagattgctgggtatctttctctgcgtgtgcagcagcttgacgtccgatgcgaaaccaagaccaaggacaatgtctttgtcaacgttgtggcatctgtgcagtaccgtgctcttgctgacaaggcatctgatgccttttacaggcttagcaacaccagggagcaaatccagtcctatgtctttgacgtgatcagggctagcgtttcaaagatgaacttggatgatg

SEQ ID NO: 439180 - DNA, 443 bp, Triticum aestivum
  unsure (1)..(443): unsure at all n locations
tcccacgcgtccgcaaactcgttgcacaagaattcctcccacccccaccgtctcgccgccgccaccacagctagataagaaaaaaagagagagcagaactcgttgggagtgctcgagatctgtgtcgggagagggggaattcttgagatcggaatcggaacaagcgggcgcgctcgggatcggggttaccatacaatttttcccaggaacctttagtgaatgtgctaatggagtcaaagggtggcaaaaagtctagcagtagtagttccctgatgtacgaagctcccctcggctacagcattgaagacgttcgacctgctggaggcgccaagaagttctctgctgcatactcgaactgcgcgaagaagccatcctgatatncgttttggcatccccttcccgtagtttaggatttttatgcaattttattctgactcttttct

SEQ ID NO: 439181 - DNA, 376 bp, Triticum aestivum
tatcagaagatcatgttcgcgctgacctccatcaagggtgtgggccgccgcttctccaacatcgtctgcaagaaggccgacatcgacatgaacaagagggctggagagctttccgcggaggagatggaccgcctgatggcggtggtgcacaacccgcgccagttcaaggtgccggactggttcctcaacaggaagaaggattataaggacggcaggttctcccaggtcgtctccaacgccgtggacatgaagctcagggatgaccttgagaggctcaagaagatcaggaaccatcgtggtcttcgtcactactggggcgtgcgtgtccgtggtcagcacacaaagactaccggcaggagaggaaagactgttggtg

SEQ ID NO: 439182 - DNA, 254 bp, Triticum aestivum
cctacgcgtccggccgctactcccctgcctcccccagagctcgttagggttttctcttttttcgggggagaaatctcaagaggcggcaccatgctcgtgtaccaggacaagctttccggcgacgagcttctgtcggattcgttcccttacagggagctggagaacggcgtgctctgggaagtcgatggccattgggtcgttcaaggagcagttgatgtggacattggagccaatccctctgctgagggtggtgg

SEQ ID NO: 439183 - DNA, 304 bp, Triticum aestivum
gtttttgtgcatgtgccagtacgcgcgcgaccccaacctgaagcagtacgtcgactcccccaacggcaagaaggtcatggccgcctgcaaggtgcccgtgccatcatgctagatcgacgcatatatgatcgatccacacgagagagcccagcgcgcacgcgctcctctctggcctctcgctgcatgtttcatgtgtgttgatgtgtcagtgtttgcttgtttcccaacactgtctagctaccctgacgatgtacgtggaccgatgtgtatctgaatttacgcaataatgacgaagtttccagct

SEQ ID NO: 439184 - DNA, 392 bp, Triticum aestivum
tttgtaagctcgaggtccatttagctgctcaccgaatcaaggatgagctgcgccgccccaaaagcccccgccggagaggagaagaagacgtcatggccggaggtagtgggaaagtccatcgaggaggccaaggagatcatccttaaggacatgcctaacgccgacatcgatgtccttcctgctggctcggcgatgaccctcgacttcaggaccaaccgtgtccgcattatcgttgacactgtcgcgaccaccccttccattggttagcaagctttgcgagcgagatacaaaatggatgcacttatgcattctgatgaataagtagttttaataatcatggatgaataaatacacgcagatcaatggcgtgtgtcgatgtacttatggtgcaa

SEQ ID NO: 439185 - DNA, 428 bp, Triticum aestivum
tctacgcgtccggaacgccctcgcctacaaccggaacctgctggtgcggcaggtgggcaacgagggcacgccgctgcgcccccgccagcgcctcgaggtctacctcttcgcgctcttcaacgaggacatgaagcccggccccacctccgagcgcaactacggcctctaccagcccgacggccggatggtctacaacgtcggcctcgcccagcagcagaccacgtcggcggcctccctctccctcgccgcctcctccgcgccccccgccatggatgttggaaaggacttgacgagcctgtgcctcatctcagctctggccatcctgctcacctcccaggctttcttactgggatagcaaaagcacccaagagtgcggccatatgcaagcaagcaaaatggccttgacttttgtggaccaaaagccttgc

SEQ ID NO: 439186 - DNA, 318 bp, Triticum aestivum
gttgtacatcggaatagagctgtggcaggttaagtcaggaactttgtttgacaacattctcatcactgacgatgctgccttggccaagacatttgctgaagagacctgggccaagcataaggaggctgagaaggctgcttttgacgcggctgaaaagaagaaggaagaggaggatgcttccaaggctggtgaggacgatgatgacttggatgatgaggatgccgatgatgaggacaaggatgacaaggctgggtctgatgtcgagtctgatgacgagaagcacgatgagctttagatggatggtgaggatgagaggag

SEQ ID NO: 439187 - DNA, 200 bp, Triticum aestivum
ccttcgcgtccgcccacgcgtccggcgagagctgggctgatgaacccgcgggtgctcctcctggacgaagccaccagcgccctggacgctgagagcgagcaccttgtccaggatgcaatggactcgttgatgagagggaggacggttctcgtgatagctcaccggctctccaccgtgaagaccgccgacaccgtcgccgt

SEQ ID NO: 439188 - DNA, 306 bp, Triticum aestivum
cttacttttccgcccacgcgtccgaaaggatcaatatggaattgaacctcggacatttgaacaacatattggcgaggctgtttttattccagctggctgtccttaccaagtaaaaaatctccagtctacggttcagttggctctggattttttgtcgcctgagagtttgcgggagtcggctcgtatggcccaagagatacgctgcctgccaaatcatcatgatgcaaaactgaagatgcttgagggtggaaaaatagctttatatgcagcaagttccgctgtcaaagaaattcagaaaataaccct

SEQ ID NO: 439189 - DNA, 203 bp, Triticum aestivum
tttattagagaagttccaaactcatttcagtgagtacatcaagaggggaatctcagctgatgacatggaagcagtttacaagaaggttcatgctgccatccgtgctgatcccaccatggcccaatcaaccaaggcgcctcccaagactcacaagaggtacaacccctagaagctgacctatgagcagaggaaggccagcctcg

SEQ ID NO: 439190 - DNA, 244 bp, Triticum aestivum
tttcttacgcgtccggagatcctgaagctgcgcgaccgcctcaacaagatctacgccaagcacacgggtcagaacatggacaagatcgagcagtgcatggagcgtgaccttttcatggaccccgaggaggcgcgcgaatgggggcttatagacgaggtcatcgagaaccgctcggcctgcctgatgcctgagggcctcagtgccgttgacccgcctcaccacggagggggcgccggcgccaacg

SEQ ID NO: 439191 - DNA, 321 bp, Triticum aestivum
tctatcacgcgtccggcctcctgcgcctccacttccatcgccttcccaagatcgcagatccgctccggtgagaatccgtcgccatgtcttccagcgaggtcgcctgcacccttgccgccctcatcctccacgatgacgggatccccatcacttctgagaagatcgcgacggtggtgaaggctgccggaatcaaggttgaggcctactggcccgcgctcttcgccaagctcctggagaagaggagcgtcgatgacctcatcctttccgtcggatctggtggagggtggtgctccagctgctgctggtgctgccccggctgct

SEQ ID NO: 439192 - DNA, 346 bp, Triticum aestivum
cttcgcgtccgactggccatagtcatggccgtggtggttgacgtctcggcgcagaacaccccgcaggacttcgtcaacctgcacaaccgcgcccgcgccgtggacggtgtcggcccggtggcgtgggacaacaacgtggccaggtttgcgcaggactgggcggcgcagcgcgccggcgattgccggctccagcactccggcgggccgttcggcgagaacatcttctggggttccgggcagtcgtggacggccgacgacgcggtgaagctgtgggtggacgagaagcagaactaccatcttgacagcaacacctgcgacgccggcaaggtgtgcgggcactacacgc

SEQ ID NO: 439193 - DNA, 327 bp, Triticum aestivum
gtctggtttggcattgttgagggtttgatgaccacagttcatgccatgactgcaacccagaagactgctgatggtccttccagcaaggactggagaggtggaagggctgccagcttcaacatcattccaagcagcactggtgccgcaaaggctgttggcaaggtgctcccagagcttaacggaaagttgactggaatggccttccgtgttcctactgttgatgtttctgatgttgatctgactgttagacttgcgaagccagcaacctatgatcagattaaggctgctatcaaggaggagtctgagggaaacctcaagggcattttg

SEQ ID NO: 439194 - DNA, 468 bp, Triticum aestivum
gtctcgtgcgaccccgacacgtgtgcgttgctggtagttacagtgatagtgagccatggcgacgatgagggccgccgccgcgctgcttggcgccgtggtgctgctgtgcgcgctccgtcacggcggggcgcagcggtacgaggccatctacagcttcggcgactccatctccgacaccggcaacctctgcgtcggcggctgcccgtcgtggctcacaaccgggcagtcgccctatggggagaccttcttcaagcgccccaccggccgctgctccgacggccgcgtcatcgtcgacttcctcgccgagcactttgggctgccgctgctgccggcgtccaaggccggcggcgacttcaagaagggcgccaacatggcgatcatcggcgccaccaccatggacttcggcttcttccagtccatcggcctcagcgacaagatctggaacaacgggcccctggacacccagat

SEQ ID NO: 439195 - DNA, 322 bp, Triticum aestivum
gtattacaaagcgaagctatcggatttcgggctagccaaagatggaccagaggaagacgagacgcacgtctccacccgggtcatgggcacgcagggctacgccgcaccggagtacatcatgacagggcatctgacggccaagagcgacgtgtacggtttcggcgtggtgctgctggagctgctcaccgggcgcaagtcggtggacaagagccggccgccgcgggagcagaacctggtggactgggcgcgcccctacctcaacgactcccggcgcctggaccgcgtcatggaccccaacctcgcggggcagtatgccggcggg

SEQ ID NO: 439196 - DNA, 427 bp, Triticum aestivum
ttctcacccccgccgccggtgccgcctcctcgcgagatctcgaccatggagggcagcagcggcctcgacgcggcgatcgagtcgctcctgaacacggagaagcagtgccgcctcgccggagatgtggccggcacccggaaggccgccgtcgacatcgtcgagctctgcttcaaggacgccgcctggaagacgctcaatgaccagatcgtcgtcctctccaagcggaggggccagctcaagcaggctattactgctgtggttcagaaagcgatggagtacattgacgtgacaccagacgtggagacacgtattgagcttatcaaaacattgagcagcgtcgctgctggaaaaatatatgtggagatagagagagctagattgatcaaaagacttgcaaaaatcaaagaggagcagggaaagattgatg

SEQ ID NO: 439197 - DNA, 325 bp, Triticum aestivum
tttaggcaacatcccttactttgagacatctgcgaaagaagggacaaatgtagaagacgcttttcagtgcattgtaaaggatgctctgaagaatgaaccagaagaagaattgtacattcctgacactgtcgatgtggtgggtggcaaccgcacccaaagatcatcaggctgctgctaagccatgccacgccatggccgtagcaaccattgaacatgctgtctttcctgcctgtataatatcatgttattctgtattccatttgtgacttgaccaatcaccccttcggtacgaaatcaaggatcgatgatctgtcctgttctgtct

SEQ ID NO: 439198 - DNA, 271 bp, Triticum aestivum
ttgtttggatcaaagccaccgatttcggatgatgtcttagccacggcatttcaggtggagaaggatctcattcactggctccaatctcagttctgggggaacaccaactactaaatattctcttttatctgggcatatgagaagttaatatgtaatgatatatactcccatcatggagtagaataaatgacatgcaatatgatgcatgcatggttgcgagctgtgaattttcatttcctttctgaatcgtgacaagatatgttttttgtcg

SEQ ID NO: 439199 - DNA, 342 bp, Triticum aestivum
tgttctcctttccccaacccaaaccaggagcgccctccctcccccagccgcccgccccctccccacccaggaaaccagccatgaagggggccaaatccaagggcgccgtcaaggccgacaccaagttggcggtgaagagcaagggggcggagaagccggccgccaaggggaagaagggcaaggccggcaaggaccccaacaagcccaagagggcgccctccgccttcttcgtcttcatgggcgagttccgcgaggagttcaagcagaagaaccccaagaacaagtccgtcgccgccgtcggcaaagcggccggcgagaggtggaagagcttgagcgaatcgg

SEQ ID NO: 439200 - DNA, 386 bp, Triticum aestivum
ttcagctggaccttcacaattatacttaacttttcagtctccatggcattatatgccttggtcatattctatcacttgtttgctaaggagctggcacctcacaagcctcttgctaagttcttgtgcatcaaagggatagtcttcttctctttctggcagggctgtgcgttggatgttttggctggtgtaggggttattcaatctcaccatttctggctggacgtggagcacatccaggaggcaatccagaatgtgttgattatcctggaaatggtcattttctcagttctccagcagtacgcgtatcacgttgctccgtacagtggcgctgacaaggcaaaattcgagaagaagaatgaatgacccgccaagcaacataagcagct

SEQ ID NO: 439201 - DNA, 377 bp, Triticum aestivum
aaaattgctcgttcagtggcagcgtcctccttggttaaagctgctgtatttggacgagacccgaactgggggcgtattgcttgctctgtcggctattcagggattcattttgatgcagatcaacttgatatttcccttggagctattccactaatgaaaaatggccaaccactcccttttgacagatctgctgctagcaagtatctcaaagatgctggtgacatccatggtacagtgaacattgatgtatcagttgggaatggaggaggcactggaaaggcgtggggctgtgacctaagttataagtatgtcgaaataaatgctgaatacacaacgtgaaattcgtattctccatgaaaactgcatttcttgataca

SEQ ID NO: 439202 - DNA, 194 bp, Triticum aestivum
tgttacgcgtccgatcgccgtcatcggcggcacagggaagtacgagaccgccaagggcttcgccgccatccgcacactgcaccccggcgaccagcacgccaccgacggcgtcgacagcctcctccagttcgatattcacctctcctgagctgagctgcttccctaactagtggtatcagattatatgatgctct

SEQ ID NO: 439203 - DNA, 357 bp, Triticum aestivum
ttgtctgcaagaagctctgtggagcgtcaattgaccatagtggagacagcacggataatgctgcgcgtgcttgctgaaggggataaaaacaggcaaaatcctaatacatcgtgttggagacaacggacaacaactcatatacaacaagctgcccagtgatattgctgaacggcatgttctacttatggatcctgtgctcggtactggtaactcagcaaatcaagctatacagcttcttagaagtacaggagttccagaggaccacatcatgtttcttaatcttatctcggctcctgaaggaatccattgtgtctgcaagcgattccctgatgtgaagatcgtaacatcggagatcga

SEQ ID NO: 439204 - DNA, 300 bp, Triticum aestivum
atcccccaagcaccagagcctcctcaacctcccggcgccggcgcatcgacggcatggcccgcaccaagcagacggcgaggaagtccaccggcggcaaggcgccgaggaagcagctggcgaccaaggccgcccgcaagtccgccccggccaccggcggcgtgaagaagccccaccgcttccgtcccggcaccgtcgcgctccgggagatccgcaagtaccagaagagcaccgagctgctcatccgcaagctgcccttccagcggctggtgagggagatcgcgcaagacttcaagaccgacc

SEQ ID NO: 439205 - DNA, 271 bp, Triticum aestivum
ccttgcgtccggacggtttgcgctcgcggatgccatggctgtgaaggaggcggtgtgtacggagatcatccaggagaacgagcttgtcaccacggagctcgaggagatcaccagttggtggtttgtcgatgccatgctcagtatcgacattgagcatttggacaacatgaacaagagcatggagcatgggttcctcggcttccgtaacaccatcaactccttcaatgcttggatcgataagatgaaggcttccaaggttgttccttgatgc

SEQ ID NO: 439206 - DNA, 312 bp, Triticum aestivum
gataaccttggatgtgccactggccaccccagcttcgtcatgtcctgctcattcactaaccaggttattgctcagcttgagttgtggaacgagaaggccaccggcaagtacgagaagaaggtgtacgtcctccccaagcacctcgacgagaaggtcgcggccctccactcgggcaagctcggcgccaggcttaccaagctcaccaagtcccagtctgactacattagcatcccagttgagggaccttacaagcctgcggcctaccggtactagttgtgtcagcgcgactagcggctggcctgagcctgagtc

SEQ ID NO: 439207 - DNA, 371 bp, Triticum aestivum
tttttccgcactagagggtgttcatggcgtgtgtggcatgtcaaatgatgaattcaagctttgccagcctgcggcggcagtggataacccgacagagaatccgtcggctgagtgttgtgctgcgcttgggaaggccaatctatcatgcatttgccgctacaaaggtatcgctggcatatggctgagaatgtaccacatcgacgcaaagcgcgccatggctctgcccggcaagtgtggtctcaccatgcccaacaactgctcatgatcattggatgtactactcatgagctgatgagcatctaggagtcggttgttctacatctgcatcgacacttatatatggctaaataagtggaggagcacttgaaaaa

SEQ ID NO: 439208 - DNA, 274 bp, Triticum aestivum
gtggttacagaaggagctcaaggatctgcagaaggatccccccacctcatgcagtgcaggtcctgtgggtgaagatatgttccactggcaggcaacaataatgggcccatctgacagcccatattctggtggagttttcctagttactatccacttccctcctgattatcctttcaaaccaccaaaggtggcattccgcaccaaggtgttccatccaaacattaacagcaacgggagcatttgtctggacatcctcaaggaccaatggagcccc

SEQ ID NO: 439209 - DNA, 394 bp, Triticum aestivum
gtttcgtcgtcctcacgcgaccagcagcttgactccctcccgcaccgcacgcacgagcagcaggaagatgcagatcttcgtcaagaccctcacggggaagaccatcaccctcgaggtcgagagcagcgacaccgtcgacaacgtcaaggccaaaatccaggacaaggaagggattcctccggaccagcagcgtttgatatttgctggcaagcagttggaggatggacgcacgcttgctgactacaacattcagaaggagtcgactcttcacttggtcctcaggctcaggggcggcacgatgatcaaggtcaagactctcactgggaaggagatcgaaatcgacattgagcccaccgacacgattgacaggatcaaggagcgcgttgaggagaaa

SEQ ID NO: 439210 - DNA, 219 bp, Triticum aestivum
cggtctcgtgggcggacgcgtgggcggacgcgtgggcagctaccctggctgggtcactcttcacattgcactgctcccagatccatatcgacatgcccacgctgtctgatgaggataaagatgttatgaaaaaatggggtgctccaaacaagattgacttcctctctctttcttatacaaggcacgcagaagatgtgcggcaagcacgggagttcctct

SEQ ID NO: 439211 - DNA, 319 bp, Triticum aestivum
tttatgcagtcgccgtcgatgccgacgaccccggccacgcctttgacgccgtcgtcgtcgacgcccccgcgcggcggcagcgtgtggcggagcgttttccaccccgggagcaacctggccaccataagccttggcgccaacctttttgaccgcccgcagcccaacttccccaccgtctacgactggctttacagcgacgagaccaggaccaggagcaaccaccgttaaataagagccgtcggccgaagaagaagagagggtgctcatcatcttctgcgacgctcgccatgtttgctgctcttttggttatctaatcctg

SEQ ID NO: 439212 - DNA, 347 bp, Triticum aestivum
cccactcgtccgcggcggattagggtttcacttgcatccattctcaatgttagcaggagcgagtgggagtccggccatggcgccgtcgcagcccaagtcagggctcttcgtgggcatcaacaagggccacgtcgtcaccaagcgcgagctgccgcctcgcccgtccgaccgcaaggggaaaggtacaaagagggtgcattttgtcaggaacttgatcagggaggttgctggatttgctccctatgagaagcgtatcactgagcttcttaaggttggaaaggacaagcgtgcactcaaggtcgccaagagaaagcttggtactcacaagagagcaaagaagaagagag

SEQ ID NO: 439213 - DNA, 313 bp, Triticum aestivum
ctttctcgccctcccccgcccgccaccggcagccatggcgacggagctggcctacgcgccgccgatgaagtcggggaagctcgggttcgagggcacccaggaggtgcagcaccgcatccgcatcaccctctcctccaagtccgtcaagaacctcgagaaggtgtgctcggatctggtgaagggcgccaaggagaagcagctcaaggtcaagggccccgtccggatgcccaccaaggtgctcaacatcaccaccaggaagtccccctgcggagaaggtaccaacacctgggatcggtttgagatgcgggtgcac

SEQ ID NO: 439214 - DNA, 363 bp, Triticum aestivum
aattttctcctccccatcccctccatccctcgaaccatccgtccgtcggccatggccaccgccgccgcgtcccaggtggccttctccgcgcccgtcggccgctcggaccgcgccgtcaggagctccggaatccagggcatcaacagtctcagcttcagcaacaaatcatggatcggcaccgcattggcgtgcgacagcaaggccgcggcacattcgaggcatctctgcagggcggtccagcagtcgagcaagagcaaggtcttcgtcgcgccccttgacctggagagcgccaaggagccgccgctcaacacctacaagcccaaggggccttacacggccaccattgtctcggttgagcgggcg

SEQ ID NO: 439215 - DNA, 359 bp, Triticum aestivum
gtggctattcagtgatggtagtggtggttgccttcaccgtctacgatttgacgctacttcttcttacatctggtagagatcctggtataatacctcgcaatactcaccctcctacacctgaaagcatctatgggagcaattatattagaggtcaaacaccgctccgtttgcctcggacaagggatgttgatgcaaacggaattaatgtgaaggttaagtattgtgacacctgcttgctttaccgaccgccttgatgctcacactgttctatttgcaataactgcgttgaacggtttgatcatcattgcccatgggttggccaatgcattgagcagcgtaattatcggatcttctacatg

SEQ ID NO: 439216 - DNA, 376 bp, Triticum aestivum
cacgcgtccgcccacgcgtccgcggacgcgtgggtgcctctgttcagccgtacctgcatgagtcccggcaccagcacgcgatgaagcgggctcggggaacaggcgggcggttcctcaacgcaaaggagaagtctgaagcttcaggcggaggcaatgcatcagcgaggtctggccacgccggcgttcccccggatggcggcatgttctcgaagcacgaccacaccttaccatccggtgacttccattaccgcgcgagagggggcgcctagggtgggcacgcagttgccccctggcaaatcatccttggcttatgcgtgtggcgaatgaccgtcaactcggtccagtgatattgtacaattgaatttagagtctgtgc

SEQ ID NO: 439217 - DNA, 437 bp, Triticum aestivum
cggatttgtgggcagcctcctcctccctcacccgccgctcgccgcccgccgaggttggtcgccggacgccatggctcccaccaagaagtcgaagaagagcacggagaacatcaacaacaagctgcagctggtgatgaagagcggcaagtacacgctcggctacaagaccgtcctcaagacgctccggagctccaaggggaagttgattatcctcgcaaacaactgccctccgctcaggaagtctgagatcgagtactatgctatgctgtccaagatcagcgttcatcatttccatggaaacaatgttgaccttggaactgcctgcggcaagtactaccgggtctgctgtttgagcattcttgaccctggtgactcggacatcatcaccaccgttcctcagtgaagacaagcttacctatcctagcctaagatgatgt

SEQ ID NO: 439218 - DNA, 394 bp, Triticum aestivum
ctcatttctcctaccacctcggcaccaccagcccaagcagagccatggcgcccaacggagacaacaccgtggccaacgtccacagcggcatcgacagcaccaacaagacgctgctcaagagcgacgccctctacacctacatcctcgacaccaccgtcttcccccgtgagcacgagtgcatgcgcgacctgcgcctcatcaccgacaagcacccatggggctacatgcagtcgtcgtcggacgaggcacagctgctggggatgctgatcaagatggcgggcgccaagaagacgatcgaggtgggcgtgttcacgggctactcgctgctggccaccgcgctggcgctcccggaggacggcaaggtggtggccatcgacaccgaccgcgagtgcta

SEQ ID NO: 439219 - DNA, 426 bp, Triticum aestivum
ctcgtctcgtcgaggaatcaacaaccatgggcggtggcaacgcgcagaagtccaagatggcgagggagaggaacctcgagaagctgaagggcggcaaggggagccagctcgaggccaacaagaaggccatgaacatccagtgcaagatatgcatgcagactttcatctgcaccacctctgaagcaaagtgcaaggagcacgccgaggcgaagcatccgaagagcgacctcgtccagtgcttcccccacctcaagccgtgatatctgccaaatcggacggagagagagataaaagagagagagagaagctgccgtaatccacctagtattatcatgttccgcaatgactggttgttgacctaagcatgggtctgaactctggtgtgctgctgtcccagctgctttggttgtgtgcccatctactatg

SEQ ID NO: 439220 - DNA, 393 bp, Triticum aestivum
ggtccttcgttttccgcggcgcaacgatgggggagagggtcaagggaaccgtgaagtggttcaacgtcaccaaggggttcggcttcatctccccggacgacggcggcgaggaccttttcgtccaccagtccgccatcaagtccgacggctaccgcagcctcaacgagaacgacgccgtcgagttcgagataatcaccggcgacgacggacgcaccaaggcctccgacgtcaccgcaccaggaggaggggcgctctccggcggctcccgccctggcgaaggcggtggtgaccgcgggggccgcggcggctatggaggcggcggcggtggctacggcggtggcggtggtggctacggaggcggtggtggcggctacggcggcggtggtggcggct

SEQ ID NO: 439221 - DNA, 413 bp, Triticum aestivum
ctatcgcaacacgtttgcaaacctggcaatccccctcttctccattgccgagccggtcccacccaagaccatcaagcacaaggacttgtcctggacggtctgggaccggtggaccgtaacaggcaacatcacgttacgggagctcctggagtggctcaaggagaaggggttgaacgcatacagcatatcgtgcggcacgtcgctcctgtacaactccatgttccccaggcacaaggagcggttggacaggaaggtggtcgacgttgccagggaggtggccaagatggaggtgccatcgtatcggcgccatctggatgttgtggtggcctgcgaggatgatgatgacaatgacgttgacatcccactcgtatctgtctacttccgttgaaaggattccctctgaattgacatca

SEQ ID NO: 439222 - DNA, 463 bp, Triticum aestivum
gttgtagggcttcggtacacagataccgagcggggaagacgaggtatgcccattaccggcaaactgacgaccttctggcagactcagggtggcactgcagcttttgctttcggtacataaatgattatgtcttcaaaatgaaagcctacagccatgtggaccggatcaggttcagctacttcttgaacccgaaaagaattcagcatgtgatatgccaaggggctgatctctttgatatgcttccggaggagtacacgttccaagagatcatcgccaagcttgggccgatcccaagtacgtattcggcggttcatcttcccgcctatctgctcgagaaggctgatcagtacagatatcttcttcctggcaactgcatgagagaaagtgggtagcctccgctgtttgcatcaagatgtgatgcccccttggggaagagcgtggcttagcggttgtatttgatacc

SEQ ID NO: 439223 - DNA, 487 bp, Triticum aestivum
ggttttatcacattctactcgacgacaaagcctcttgacaaatcttggcatgtccttgggctcgggtataatccaagcatcagcatggaggagattagaaacgctgctgttgtgcatttcaatgggaacatgaagccttggctggacattggtatgaaccagttcaggcagctctggacaaaatacgtggattacgacgactcgttcattcgtcaatgcaattttgcaccgccatagaagaaggaagccttgacatttattctgcagaaatggaaaaggtttggagattggaactggggaacatttcagctggaacagcgccgaacatcttttactgtcagatgactgccgtcctgaaaccggttttcatttctaattcgaaaacaatcacttgcgattctacttgcctgagattagtcttgtgaatgtgtaaaattgtgatacgaattctatgtctcatgctatacttagtactgagtgctggata

SEQ ID NO: 439224 - DNA, 522 bp, Triticum aestivum
cctttgcaaccacacagattatgccacttcactaacagatgcgatagcgaagatattagacccagtgagtgctctttcagccattgatgaagtgagcaagttcagggagtgccaagggaggtttgggaccaggttggcagaagaagctgcggcgagaatggggccaacccaatggtggtttcagtttggaggggatgttcctgcattgcagaaatgtgcaatgagaatttgctcacaatgtgtctcctctagtgggtgtgagagaaattggagcgcttttgctttggtgcacacaaagcaaagaagtcgtcttctatatgacaagctccacaagctagtttctgtacgctacaacttaaagatacgtgctgaagaagatcaagagaaagagagagatatagataaagaaattgatccaagtgcattgctaatggataccacaatgtttgatgaaacaaacccaataatggagtggctgaatgaggatgtagaggatccgattgtggatggagctgatgcagc

SEQ ID NO: 439225 - DNA, 408 bp, Triticum aestivum
gttatgtctgtcggagggaaccgtcatgttctttatgcaagttatctttcacagaaccaacagaactacagatctttttcggcttcgtccgaccaagagaggatagaagctgcaaacaggataatacatggtctgccaaggtgtgtgaaaattgtagaagttgggcctcgagatggactgcagaacgaaaaaaatacagtgccaacacctgtaaagattgagctcataaagagattggcaacctctggattatcagttgttgaggcaacaagttttgtctccccaaaatgggtgccacagctagctgatgcgagggatgttatggaagtggttcggaatattacgggtgtaagctttcttgtattgaccccaaaccttaagggatttgaagcagcagctgcagcaggt

SEQ ID NO: 439226 - DNA, 502 bp, Triticum aestivum
tctctcaagtgaatcgctgctatggtgaacgctgacggaagtacggccgtgcatgcgtctggaagtacttcacagatttgtgtgattatttgcctctcacagctcttatagaaaaccacgtggtttgcctccatggaggtctctgtccatcattagatacattggacaatattcgttctcttgatcgcatacaagaggtcccgcatgaaggacctatgtgtgatcttttgtggtctgatccggatgaccgatgcgggtggggaatttcaccaagaggagcaggctacacatttggacaagatatagcacaacaatttaaccatacaaatggtcttagccttatttcaagggcccatcaacttgtgatggaagggttcaactgggcacaggagaagaatgttgtcacagttttcagcgcgccaaactactgttaccggtgtggtaacatggctgcgattctcgaaattggggagaacatggatcagaacttcctccaattcga

SEQ ID NO: 439227 - DNA, 469 bp, Triticum aestivum
cccattcgtccgcccacgcgtccgcgaactcttagcctgaagacctcgttgagaaaacagtcgagtgcaagatggtgaagcttgcatttggaagcttgggcgactcgttcagcgccacgtccgtcagatcctatgtcgcggagttcatcgccaccctcctcttcgtgttcgccggcgtcgggtccgccatttcctacgggcaactgacgcagggtggcgcgctggaccccgctggccttgtggcgatcgccatcgcccatgccttcgccctcttcgtcggtgtggccatggcggccaacatctccggcggccacctgaaccccgccgtcacgttcggcttcgccgtcggcggccacgtcaccatcctcactgggctcttctactgggtcgcccagctgctcggcgccaccgtggcatgcctccttctgcagtttgtcacccacggccagcctatgccgacgcacgccgt

SEQ ID NO: 439228 - DNA, 425 bp, Triticum aestivum
gtcatggtcgtggtggccggcgtctcggcgcagaacaccccgcaggacttcgtcaacctgcacaaccgcgcccgcgcggcggacggcgtcggccctgtgacgtgggacaacagcgtggccaggttcgcgcaggactacgcgaacaagcgcgccgccgactgccggctgcagcactccggcgggccgttcggcgagaacatcttctgggggtccgggcagtcgtggacggccgcgaacgccgtgaagtcgtgggtggacgagaagcggaactaccacctcaacagcaacacctgcgatgccggcaaggtgtgcgggcactacacgctaggtggtgtggcgcaagtcgacccgcatcggctgcgtgcgcgtggtctgcgccgggaaccggggcgtcttcatcacctgcaactacaaccctccgggca

SEQ ID NO: 439229 - DNA, 412 bp, Triticum aestivum
ccgcttctcccctgcctcccccagagctcgttagggttttctcttttttcgggggagaaatctcaagaggcggcaccatgctcgtgtaccaggacaagctttccggcgacgagcttctgtcggattcgttcccttacagggagctggagaacggcgtgctctgggaagtcgatggccattgggtcgttcaaggagcagttgatgtggacattggagccaatccctctgctgagggtggtggtgatgataggggttgtggatgaccaggccgtgaaggtggttgacattgttgacaccttccgtcttcaggagcaacctgcttttgacaagaagcagtttatctctcacatgaagcgctacatcaagaacctttctgccaagcttgaaggggatgacctagatgctttcaaga

SEQ ID NO: 439230 - DNA, 516 bp, Triticum aestivum
gttattgcggaccagctcaccgacgaccagatcgccgagttcaaggaggccttcagcctcttcgacaaggatggagacggctgcatcaccaccaaggaacttggaactgtgatgcgctcgctggggcagaaccccactgaggcagagcttcaggatatgatcaatgaagtggatgctgatggcaatggaacgattgactttcctgagttccttaacctgatggcacgtaagatgaaagacaccgactccgaggaggagcttaaggaggctttccgtgtgtttgacaaggaccagaatggtttcatctcggcagctgaactccgccatgtcatgaccaaccttggtgagaagctgacagacgaggaggtggatgagatgatccgtgaggctgatgtcgatggtgatggccagatcaattacgaagagtttgtgaaggtgatgatggccaagtgagctgccatactaagctagttctatctcgatgttagcagctagtagccttgaaaactgacagca

SEQ ID NO: 439231 - DNA, 455 bp, Triticum aestivum
ctttttctctacatctcggtgctcaccgtgatgggcgtggtgggcaacccgtcggggtccaagtgcggcacggtgggcatccagggcatcgcctggagcttcggcggcatgatcttcgtgctcgtctactgcaccgccggcatctccggcggccacatcaaccccgcggtcaccttcgggctgttcctggcccggaagctgtcgctcaccagggcggtgttctacatggcgatgcagtgcctgggcgcgatatgcggggctggggttgtcaaggggttccagaccacgctgtaccagggcaacggcggcggcgccaactccgtcgcgcccgggtacaccaagggtgacgggctgggcgccgagatcgtcggcacgttcgtgctggtttacaccgtcttctccgccaccgacgccaagcgcagcgccagagactcccacgtccccattttggcgcc

SEQ ID NO: 439232 - DNA, 496 bp, Triticum aestivum
tctttctcttgtccccctcctcctccgccggaactagggttttagcggtcctcgcgccgtcgccctcgggagccatcagccatggacgactcggcccagctgcagcggttcatcgagcaagagaaggagaggatgatggtgagcgagatgatcggcaaggtgacgagcgagtgctgggacaagtgcatcacaggcgctcccgggagcaagctgagctccggcgagaccagctgcctgagcaactgcgcgaagaggttcatcgacatgagcgagatcatcgcgaaacgtttcggtgtgcactagaacaaggccgccacatgcacgtgtgcagttgcttcctggccttttgagctatgtgtccttcggtgtgagcggattttggtgtggcgttaaagatgcataggtatgttcagtgggggtttaactgagcaccgaagtatgcctgtcattgtcgtcatccttgtagtaattctcgcactctgggttgaacttttga

SEQ ID NO: 439233 - DNA, 424 bp, Triticum aestivum
cccacttttccggccgccgccgcctcgccaaaatccggcgtcaactgatcggcggcagccatgagtaagctccaaagtgacgctgttaaggatgccatcacccagattgttggggaggcgagagaaaagaagcgcaagttcactgagactgtggagcttcagatcggtctcaaaaactacgacccacaaaaggacaaacgtttcagcggctcagtgaagctgccccatatcccccgcccaaagatgagggtgtgcatgcttggtgatgcccagcatgtcgaccaggctgagaaaatgggacttgactacatggatgttgaaagtctcaagaagatgaacaagaacaagaagcttgttaagaagctagccaagaagtaccatgctttcttggcatcagaggccataatcaagcagatccctcgtc

SEQ ID NO: 439234 - DNA, 242 bp, Triticum aestivum
ctttttcgtcatcttccatgtcatctgcgcccatgtcgggccgcggggaggtcggcaagggcctcgccaagggccgccccaaggtcctccggaacgtcatccaggacatcatccagggcatgaccaagacgccgacccggaggctcgctatgaagcgcatcttgaagctcatctacgaggtgacctacgaggagacccagagcttcctcaagaacttcatccagaacgtcatccgctacacc

SEQ ID NO: 439235 - DNA, 354 bp, Triticum aestivum
agattattatgaccatcattgatgacctcgtctctgtcgacactcttattgaagaccatctctgcgttgaaccagccaacgagtacatccagagctgtgacattgttgccttcaacaaaatctaaatcttcctgaggcaggtgatggcggtgggcgcacaatatatctacagttttctgttgccgtgatggtgtcgtagctaaagcaagcataacatatctgccctgtgaggtttttggaccttagatcgagttgattcgtagtattactactgagtgttatttgcttcgtatgaaatgagacaatgtggttggattcctgttgctattctcttctgtctgccgtcttcatcgg

SEQ ID NO: 439236 - DNA, 435 bp, Triticum aestivum
ccctctcgtccgccgaacccaaccctcgaccgcagcgactcacagcggcgcaaccatggtgctcgagtcgacgatgatctgcatagacaactcggagtggatgcggaacggcgactactcgccgtcccgcttccaggcgcaggccgacgccgtcaacctcatctgcggcgccaagacccagtcgaacccggagaatacggtgggcgtcatgacgatggccggcaagggcgtgcgcgtgcttgtcactcccaccagcgacctcggcaagatcctcgcctgtatgcacgggctggaagttggagctgaagcaaacttggccgcagctattcaggttgctcagctggcgctaaagcatcgccagaataagaggcaacagcagagaattattgttttcattggaagccctgtgacatacgacaagaaggtcttggagac

SEQ ID NO: 439237 - DNA, 383 bp, Triticum aestivum
gcttttcttcctgctcccgcagcgcctcctcgaatccaagagatcaagtcgctgttgttgtgccactccccctccagccgccgtcatgcagaacgaggtgcgtgacatggtggacctctacgtccccaggaagtgctcggccaccaacaggatcatcacggacaaggaccacgcctctgtccagatcaacattggtcacgttgatgagaatggcctctatgatggccgcttcaccacctttgctctctctgggttcgtccgtgctcagggtgatgctgatggctccctggacaggctgtggcacaagaggaaggctgagatcaagcagctctagatgccgctagtagttttacctggaacttgtgtccttcccatgtctacct

SEQ ID NO: 439238 - DNA, 418 bp, Triticum aestivum
cccactcgtccgaaggcaaagaacctcgagctgcttctcacagctgggattggctcggaccatattgatttgccagctgctgctgctgcaggcttgacagtggctgaggttactggaagtaacactgtctctgtggcagaagatgagctcatgcgcatcttgattctgctcaggaacttcttgcctggctatcaacaggttgttaaaggtgaatggaatgttgcaggcattgcccatagggcttatgatcttgaggggaagaccgtcggaactgtcggggcaggtcgtattggcaggctcttacttcagcgccttaagcccttcaactgcaacctgctctaccatgacagacttcagatcaacccagagcttgagaaagaaattggggcgaaatttgaagaggacctggatgctatgc

SEQ ID NO: 439239 - DNA, 433 bp, Triticum aestivum
gtttctttaagctcatgataaagtacgacttgatagaattgctcaacaattgtttgaacgcattgggaagtcagtcgcagatgataattttaagcaatgggaagggttgctcgagttactaggttcagacattggtagtgcaggtggtcttgagttccttcacaggtaccgggatttcaagagatcccttcaacaggcactagaaggaaggactggcgaggctgctcggcagaccgtggagtttcttatacagctaatgagaaatccttctacaccacaacgtttctggctgccccttctacatgactcggtgaaactactcaactgcaaaccctgccctttactgaatgttgctgagacgaccttgttgctcaataaactacaagagttgtccatggccaagctgcgtcctgacttctgcagtaatcaccta

SEQ ID NO: 439240 - DNA, 417 bp, Triticum aestivum
catgtttgttgggacacggatgagttccttacagacatttcagaagctaccttgattatgtcaagtgtagttaagaacgatggacttgcacctggtggcttcaacttcgacgccaaattgcggagggagagtactgatgttgaggacctgtttattgcccatatctctgggatggacaccatggcccgtggcctccgcaatgttgccaagctgattgaggatggttccctggacgagcttgtccgcaagcgctaccagagctttgacactgagattggcgccatgatcgaggctgggaagggagactttgaaacgctagaaaagaaggtcttggagtggggtgagccaaccgttccatccggcaaacaggaactggctgagatgctgttccaatccgctctgtagatgacagcccac

SEQ ID NO: 439241 - DNA, 420 bp, Triticum aestivum
ctctttgtctcatctcctccaggaagaccgccgaggccattgacatactcaagctcatgtcctccacattcatggtcgccttgtgccaagccatcgacctccgccatcttgaggagaatgtcaaggatgccgtcaagagctgcgtgaagatgacggccaggaagacattgagcaccaccaacaatgggcacctccacaatgcgcgattctgcgagaaagacctgctgctcacgattgaccgtgaggcggtgtttgcgtatgcagatgacccttgcagcgccaactacccattgatgcagaagatgcgtgcggttctcgtggagcacgccttggccaatggtgaggccgaacgcgacgtggagacatccgtctttgccaagcttgccgcgttcgagcaggagctccgtgcagtgctaccaa

SEQ ID NO: 439242 - DNA, 377 bp, Triticum aestivum
cggactcttgggcccaggttaaacaacccatccggagccggagaacgccagaagaatccagaggcacccccgagtttgttggcgatgttgcgcgcgggaggaagccggctcgtcgcccccggactccggcggctcctcggcccgggggccggggagagggctgcgccggggctggcggcggcgggggcgggggcgagggcgtaccacgagcgggtggtggaccactacaacaacccgcggaacgtcgggtctttcgacaaggacgaccccaacgtcggcaccgggctggtcggcgcgccggcctgcggcgacgtcatgaagcttcagatccgtgtcgacgaaggcaccgggaagatcgtcgacgcctgcttcaagac

SEQ ID NO: 439243 - DNA, 294 bp, Triticum aestivum
atcctttataccaaagcccatcttcttgtgcttgaaatctttttgggttcacagatttggaggatgtcttgcaactgtggatccgggtgcagctgcgggtcagactgcaagtgcgggaagatgtaccctgatctgacagagcagggcagagccgccgtccaggtcgccgccgtggtcgtgctctgggtggatactgagaacaaggcggggcagttcgaggtggccgccgggcagtccggcgagggctgcagctgcggcgacaactgcaagtgcaacccctgcaactgttaagct

SEQ ID NO: 439244 - DNA, 425 bp, Triticum aestivum
ccctctcgtccgcccacgcgtccgctgaagcattgcgtctccagttagaacttcaaaagcggctccatgaacagcttgaggtgcaaagaagtctgcagctgagaatcgaggagcaagggaagtgccttcagattatgatcgagcagcaatgcaatcctgctgcagacaaggcgctggatgcttcaacctcggcagaaggaccaaagttatcttctgaccccccagaatcttctaccgtgaaggatgttccaaacaacagtcaaaatggaacaaccgagcaagcaggtgataaggaatgaagatctaaccatgctcgcctgaagttgtgaaccccactagccatgaatttgactggttgctgccaaactagaatcaagtcggtcttttatctttctgggagaaaggggtgagcatttctatgaact

SEQ ID NO: 439245 - DNA, 437 bp, Triticum aestivum
ctgttctctccctctctttctctctcgtccgcggcgatacgatccgagatggcgatgagggcgtggaggcggagcgcggcggcgagggccccggcgcacctgtgcctgtggctggcgctcgtcgccgccaccctggtgctcgcccagggcaagaaatccaacctttctgaggtgacgcacaaggtctacttcgacatcgagatcgacggcaagcccgcaggtcgggttgtcatgggacttttcggcaaggctgttcctaaaaccgcagagaacttcagagcactctgcacaggagagaaaggtatgggcaacagcggcaaacctctccactacaaggggagttcgttccacagaattatccccagcttcatgatccaaggaggcgacttcactcttggtgatggaaggggtggtgaatcaatctacggcacaaagtt

SEQ ID NO: 439246 - DNA, 408 bp, Triticum aestivum
catcttcccctggcaggagctcgacgtcctccgccagctccacgacgccgacatgcggcggcgaaagtggcgtcggaagcgcgcggagcagaaagtgtacatggagctgagcgacgccatggacatcctgcggcacatctgcacggacggctgcacggaggtcggacccgtggggcaggcgccggccaactcgccgtgcccggcgtacgcgacgtgccggggcctgcagctgctcatccgccacttctcccggtgccaaagccgggccacctgcccccggtgccagcgcatgtggcagctgctccgcctacacgccgcgctctgccgcgttcccgacggccactgcaacacccctctctgcacgcagttcaagctcaaggagcagcagaaggaggcggtgtcggcttc

SEQ ID NO: 439247 - DNA, 423 bp, Triticum aestivum
cccttttgtccgcccacgcgtccgcccacgcgtccgcccacgcgtccgcccacgcgtccgggaatttctgataatgatgctgggagcgcggagtctgtcgaaaagttagatctgctgaaagatacaaaagtttctctctctgccaaccatctgcagaagttacgtctatcttttcaactatctacaccacttggacgcacatttaaaccccaccaggttttcttgaagttaaagcatgaaagcaaggttgaacacttatttgtggtgccaggttctgcgaggcaattcaaaattgttctagattttcttggattggtagagaaattttactacctttctggaacatatgacctcgagctttcagttggtgatgcttcaatggaaaattcgttcctacgagttcttggccaactggagttggac

SEQ ID NO: 439248 - DNA, 339 bp, Triticum aestivum
  unsure (1)..(339): unsure at all n locations
gccgttattccttccttatagagacagcgtgtaggcgccgggcgagcaggccaccaccgcaaccctagccagcccaactaccggcgtcggctggagaggactagctgctgctcgagagagagagagagagagagatgtcatcgggacggtacatggcctactcgccctccccgtccaccacgccgcactccccgcgcatctccggcctccgcgcctnctncgccggcgtcgacgaccaggagaagtaccttgcggagctgctcgcggagcgccacaagctcaacccgttcgtcccagtgctcccccatagcatacggctgctgaatcaagaaattttac

SEQ ID NO: 439249 - DNA, 383 bp, Triticum aestivum
tatgccaattctgcacctgccggggttccatactttacaaccattgccccgtcacttgttgggtcaacgggtgcattacctccccaacatgtgaggcaatatgcaataaaccgtcctgaaggtagcagtagtgatggtctggacggtaattggaaatggaaaagaccaagagggtttgatcttaattctggtcccgcgagtatagatttagaagggaaggatgaaagaatactttcatcggttagacaaaatttgatgacgccacagcaggcctttgtggaggagcaaacgagaatgtaccaattgcctggtgtaggaataaagaggaaggaacccgagggcagttgggatcccgacagatcatcatacaagcaattgtcatg

SEQ ID NO: 439250 - DNA, 373 bp, Triticum aestivum
ctatgtgtgggctctgtggttgatgctaattcgtgggagtttgttttcaacaacgcatctgaggcaccaaaatggctaaaagataactcatagttatccttaaaagaaaaatatcgatctgatagaagcacgtgggtggcattatatcctgtccctttcttgttctctggaagtttgaagtttcctgcacagactgaagagattagaaagcaccaccagcattttccccagctagttgttcagaagacatcaagtaacaattggaaccgacggatgcatctacagctctcacttggttcattatcagaggtttggaccacttcgctcaatattactggtccattatcgaattggtcttttgctgacaacacac

SEQ ID NO: 439251 - DNA, 331 bp, Triticum aestivum
ctcttttgtaggcgcttcccggtgacaacgtcggcttcaacgccaagaatgttgccgtgaaggatctgaagcgtgggtttgtggcatccaactccaaggatgaccctgccaaggaggcagccaacttcacctcccaggtcatcatcgtgaaccaccctggtcagatcggcatcggctatgccccagtgctagactgtcacacctcgcacattgctgtcaagtttgctgagctggtgaccaatatcgacaggcgatctggtaaggagctggaggccctgcccaagatcctcaagaatggagatgctggtatagtgaatatgattaccaccaa

SEQ ID NO: 439252 - DNA, 282 bp, Triticum aestivum
cacatttttagtgagagctttgcgctgaaagttcatcagcaactatgaagggcaccaagctcgcggcgatcctgatcctccaggccgtcctggtcatgggagtcctctcgcacgtcaacgccgacttcttccccaagtgctgcaacaactgcaggtccttctcgggggtcgacgtctgcgacgacgcccaccccaagtgtcccaagggctgctcggcgtgccgcgtggtgtctacgagccccgaaatgtggcgctgcgcggatatgaaatccaccgtcgacg

SEQ ID NO: 439253 - DNA, 330 bp, Triticum aestivum
gttctttttctcaacccccgagagtccgccgcgcccacccgccagccccgatggcccgcacgaagcagacggcgaggaagtccaccggcggcaaggcgccgcggaagcagctggcgaccaaggcggcgcgcaagtcggccccggccaccggcggcgtgaagaagccgcaccgcttccgccccggcaccgtcgcgctccgggagatccgcaagtaccagaagagcaccgagctgctcatccgcaagctgcccttccagcgcctggtgcgggagatcgcgcaggacttcaagaccgacctccgcttccagagctccgccgtgtccgcgctcc

SEQ ID NO: 439254 - DNA, 157 bp, Triticum aestivum
gatggcggtgccgcttctgacgaagaagatcgtgaagaagagggtcaagcacttcaagagggcccatagcgaccgctacattggccttaagcaaagctggcgcaggccaaagggtattgattcccgtgtcaggagaaagctcaagggatgcaccttg

SEQ ID NO: 439255 - DNA, 433 bp, Triticum aestivum
ctttttactgcggctcttcttcggctctcctgctcctcctactcctccgcgcagttcgccggccaccaccaccacccaccgagagaatggcaggcaacggagccatcgtcgagaaggacccgctcaactggggcgcggcggcggccgagctcaccggcagccacctcgacgaggtgaagcggatggtggcacatatccgcgagcccgtggtgaagatcgagggcgccagcctccgcgtcggccaggtggcggccgtggcccaggccaaggacgcgtcgggcatctccgtggagctcgacgaggaggcgcggccccgcgtcaaggccagcagcgagtggatcctcagctgcctcgccggcggcagcgacatctacggcgtcaccaccggcttcggcggcacctcccaccgtcgcaccaaggacgggcccgccct

SEQ ID NO: 439256 - DNA, 449 bp, Triticum aestivum
atcttgttatcagctgatcatggaaacgcagaggatatggttaagaggaacaaagctggccagccgatgctcgacaagagcggcagcatccagattcttacatcgcacacgcttcagccagtccctgttgctatcggaggccctggtctccacccaggagtgagattccgctccgacatccagacacccgggctcgccaacgtcgccgccaccgtgatgaacctccatggcttccaggctcctgctgattacgagacgaccctcatcgaagtcattgacaagtaaaaaaaaaaacactgcgccctctgaagccaaaattgctgcagccgattttgtcgctatagttttggggtgggtcaaggaatgatcgcatcattgaataatttgagatttgccagcacgcttgctcgaactcatatgtaacattgagaaaggtggattttacttgc

SEQ ID NO: 439257 - DNA, 510 bp, Triticum aestivum
gccatggtcagcactcaccctcccatccctcctctccggccgcaaccccaccgccgccgccatggtgaagtactcgagggatccgtccaacccgaccaagtcggccaaggcctgtggcaaggatctcagggtccacttcaagaacacacgcgagacagcgtttgctcttcgcaggatgcctttgggcaaggctaagaggtaccttgaggatgttctcgcccacaagcaagcgattcccttccggagatactgcagaggtgtgggtcgtactgcgcaagtaaagaaccgccagccaaatgggcagggtcgctggcctgcaaagtcggcccagttcgtgttggatttgctgaagaatgctgagagtaacgctgaggttaaaggcttggacgtcgacaacctctacatttcacacatccaggtgaaccaagcccaaaagcagaggcgccgtacataccgtgctcacggacgcatcaatccttacatgtccaacccctgccacattgagctgat

SEQ ID NO: 439258 - DNA, 362 bp, Triticum aestivum
cttgttcgtgtctaaattcgacaagactgggggcatgagcaaagcagttgaatatgataactttattgagtgttgccttacagtcaagggtctgactgagaagttcaaggagaaggacacagcttattccgggtctgcaactttcagttacgaggcattcatgttgactgtgctccctttcatcatcgcatgatgactccgcagttcaatacaaagactgagctttgagtgtgttgttccatgtgtcgaaacgtttttccatcggaggtgtagtttgtctgaattcgagtgatgttgctgcgttcctgataaggtgataccctggagattggaaactgcctatggatggtttggaactctga

SEQ ID NO: 439259 - DNA, 528 bp, Triticum aestivum
ccctttatctgtacccctatggaagccgcgggcccgtgggcgcccactacctggcggcgaagtacaacgtgagatggggcgacctgggtggctcggaacactaggaagagagcgtggtttcacacgggaggtgatgatttctgtttttggcggcgattgattctgctgccgtcgcaatttgtgcaaaaggccttgcattgcatgcccagctagtgggagtggtgcaaggaacagatctgaataagtgtgagcggttggcgatgcttgtgttcatcgatcgaccgtgaatatatttgttggtaccactggcttacatattctgtgattcttaagaggcgaagccgagagcagaaagctcattcatcttggctgttcatcggctcatttggttgtctggctgggctgctgtattggaactgctgattgtgtaactgcagaagctgttgcttctttaccgatgccggtgttctgttggacatactcggtggtacagtaagacttattattgaaatcatcttttttttactg

SEQ ID NO: 439260 - DNA, 468 bp, Triticum aestivum
cttgttgccgccgccactccgccgctgccgccgccgagatgggtcgcgtgatccgcgctcagcgtaagggtgcgggctccgtcttcaagtcccacacccaccaccgcaagggccccgcccgcttcaggtcgctcgacttcggcgagcgcaacgggtacctcaagggcgtcgtcaccgatgtcatccacgacccggggcgtggtgcgccgctggccaaggtgaccttccgccacccgttcaggtacaagcaccagaaggagctcttcgtcgccgccgagggtatgtacaccggccagttcgtctactgcggacgccgcgccaccctctccgttggtaacgtcctcccgctccgctccgtgcctgagggaggcgtcatctgcaacgtcgagcaccacgtcggcgaccgtggtgtcttcgccagggcctccggtgactacgccatcgtcatcagccacaaccctgacaacg

SEQ ID NO: 439261 - DNA, 503 bp, Triticum aestivum
cttacgcgtccgcccacgcgtccgcccacgcgtccgagctgtcctactgtcacatacacacacacacaagtgctagctagctaatcgatcagccagccatgtcggaggagaagcaccaccacctgttccaccacaaggagggcgaggacttccagcccgccgctgacggcggcgtcgacacgtacgggtactcgaccgagacggtggtgaccgccaccggcaacgacggcgagtacgagcggatcaccaaggaggagaagcaccacaagcacaaggagcacctcggcgagatgggcgcagccgcggccggagccttcgccctctacgagaagcacgaggcgaagaaggacccggagcacgcgcacaagcacaagatcgaggaggaggtggctgccgccgcagccgtcggcgccggcggcttcgtcttccacgagcaccacgagaagaagcaggaccacaaggaggccaaggaggccagcggcgagaagaagcaccaccacttc

SEQ ID NO: 439262 - DNA, 461 bp, Triticum aestivum
cggactcgtgggcgggaggaggagagcggcggcgaagatggtgtcgctgaagctgcagaagcgcctggcctcgagcgtcctcaagtgcggcaagggcaaggtctggctcgaccccaatgaggtcaacgagatctccatggccaactcccggcagaacatccggaagctggtgaaggatggtttcatcatcaggaagcctcagaagatccactccaggtctcgtgcaaggagggcacatgaggctaagcagaagggccgtcactctggatatggtaagcgtaggggtaccagggaggctaggctccccaccaagatcctgtggatgcggaggatgcgcgtcctcaggcgccttctgcgcaagtaccgtgaggccaagaagatcgacaagcacatgtaccatgacatgtacctgaaggtcaagggtaacatgttcaagaacaagagggtcctcatggagagta

SEQ ID NO: 439263 - DNA, 497 bp, Triticum aestivum; identical to SEQ ID NO: 436137

SEQ ID NO: 439264 - DNA, 490 bp, Triticum aestivum
atctttccctcgctgccgctgcgtctcgtctccaccaccccacttgcccccggactcaggaggatcgtcggagatgtcggacaccgatgagcaccacttcgagtccaaggccgactccggcgcctccaagacctacccgcagcaggctggcgccatccgcaagggtggacacatcgtcatcaaggcccgtccctgcaaggttgttgaggtctccacctccaagactgggaagcatggtcacgcaaagtgtcactttgttgccattgacatctttaatggaaagaagcttgaggatatcgttccttcatcccacaactgtgacgtcccccatgttgaccgccaagattatcagctgattgacataactgatgatggatatgtcagccttctcactgagagtggtaacactaaggatgacctgaagcttcccactgatgatgttctgcttggccagatcaagactggatttgctgatggcaaggacctgatc

SEQ ID NO: 439265 - DNA, 476 bp, Triticum aestivum
atacttgcgtcgctggtgtatatgccatcggtgatgtggcgactttccccatgaagctgtacgacgagccgaggagagtggagcacgtcgaccatgctcggaaatcagccgagcaggcagtaaaggcgatcaaggccaaggagtccggcgagtccgtggcggagtacgactacctgccctacttctactcgaggtcgttcgacgtcgcgtggcagttctacggcgacaacgttggcgagacggtgctgttcggggacaacgacccagcggcgcctaagcccaagttcggcacctactgggtcaaggacggcaaggtcatcggtgtgttcctagagggtggctccgccgacgagaatcaggccatcgccaaggtcgccagggcccagccgccggtggccgacgtggaggcgctcggcaaggaaggccttgatttcgccaccaagatctgaagattcctcttatctattctacgcgtg

SEQ ID NO: 439266 - DNA, 516 bp, Triticum aestivum
atttttgctctgatcttctctgcactgcttgtgagatgactgttgtctggatacagaatcagctccgaaaaaaccaaacgaaagagctcatcttggattatgcgaatcggctctgtgagcgtcttccgagccccaacggggaatcaaccgtcgactgccaccagatctcagagatgcctgatcttgctttcaccatagcaaacaagactttcaccttgacgccagagcagtacgtagtgaagctggagcaatcaggccaggccatttgcatcagtgggttcatggcgttcgacgtgccgccccctcgtggcccgctctggatacttggagacgtcttcatgggcgcctatcacaccgttttcgacttcggcgagagcaggattgggttcgccaaatccgcatgaggacttggtgtatcagggctcagggccggtattgtacatactgcaagcacgtgcaagttgcaagggcaacaataaacttatacggagtattagtagaaaggaacaaatgaac

SEQ ID NO: 439267 - DNA, 535 bp, Triticum aestivum
atcattcttgacaccaaagctcatcttcttctccttgaaatctttttgggttcatcagatttggaggatgtcttgcaactgtggatccggttgcagctgcggctcagactgcaagtgcgggaaggtgtaccctgatctgacggagcagggcagtgccgccgcccaggtcgccgccgtggtcgtcctcggcgtggcgcctgagaacaaggcaggtcagttcgaggtggccgccggccagtccggcgagggctgcagctgcggcgacaactgcaagtgcaacccctgcaactgttaagctgcatgcactcgtaccgtcgtacgtacgtgtgatggtgtgagagtatacgtgaataacgagcgtctgatctgatggagtcgagcaagggtgcgtgtgcatgtgcgtgtggtttacttcgctcgctctccgcctatgctctgcccttggtgtccttgtgtgtatgtgtgtgcatgtgtccctgtaattgcttcatctatctccactatggatggagtgatgaatatgtaagaatgaatg

SEQ ID NO: 439268 - DNA, 365 bp, Triticum aestivum
cccacgtgtccgtgaggagtgagaagagatggctccggtgaagctgtacggcgcgaccctgtcgtggaacgtcaccaggtgcgtggcggcgctggaggaagccggcgtcgagtacgagctcgtccccatcaacttcggcaccggcgagcacaagggccccgaccacctcgccaggaacccctttggccaggtgccagctttgcaggatggtgacttgtacgtgtacgaatcacgtgctatttgcaagtatgcgtgccgcaagagcaagccagagctgttgaaggagggcgacatcaaggagtcagctatggtggatgtgtggctcgaggtggaggcccatcagtacaccgccgcgctgagcccca

SEQ ID NO: 439269 - DNA, 346 bp, Triticum aestivum
ccttctcggaggcgtccatctgcacggcggagggcgcctcgcagttcaagaggatcgccaatttccaggactaccacggcctcccggagttcagacaggcgatggcccagttcatggggcaggtgagggggtggaaggccaggtttgacccggatcgcgtcgtgatgagcggcggcgccaccggcgcgcaggagacgctcgccttctgccttgccaaccccggcgaggccttcctcgtgcccacgccttactacccaggattcgaccgcgactgctgctggaggtcgggagtgaagctgctgccgatcgagtgccacagctacaacgacttcaggatcaccaggga

SEQ ID NO: 439270 - DNA, 162 bp, Triticum aestivum
tcggaccatatcaaagctgcggcggtgcgcgcataggaggcgaatcagctttggaaccaagccggcgacgccaccatgggtatctcgcgtgacttcatgcacaagcgccgggccaccggtgggaagcagaaggcttggaggaagaagcgaaagtctgagctc

SEQ ID NO: 439271 - DNA, 318 bp, Triticum aestivum
  unsure (1)..(318): unsure at all n locations
attatttcattattctgctcgatcagcaggtgcccacgcgacgcgctgaaggtgggcgcgtgtgtcaacgcgctgaacctggtcaaggtccaggtgggcaggccgaccgcgttgccgtgctgcccgctgctggatgggctcgtcgacctggaggcggccctgtgcctctgcacagtgatcaacgccaacgtcctcaacatcgtcaagctcaacctccccatcaacctcagactcatcctcaaccactgcggcaagaaagcgcccaccgggttcatgtgctaagcgatctagncaggcgtgccatgcagcccacgcatg

SEQ ID NO: 439272 - DNA, 411 bp, Triticum aestivum
gtgtgttagaggcatctattctcacaagatacgcggctgccatggtgagaaccctctttggtttcgtagtcgccgccgcgctcgtcctcgccgtcttcatgccagccttcgccgccgcgcaggcccccgcgccggcgcccaccagcgacgcatcctcggtcgaccaaggcgttgcctactttctgatgatcctggcgctggtgctcacctacctcatccacccgttggacgcctcctccccgtacaagcttttctgagcctgtatatgcgcagaggcttctcattcttttgttcttctttctgttgttcgctgatcgataagctagtggattcttgagagattggttatgtgagattcgatttgaattcattaattcgttgctcttgtactctggtggattcgcacgcatg

SEQ ID NO: 439273 - DNA, 328 bp, Triticum aestivum
cccactctttcgcccacgcgtccgcccacgcgtccgcggagagcttcatcttgaaatctgcttgaaggatctgcaggatgacttcatgggtggtgctgaaatcattgtttccccccctgtcgtctccttccgtgagactgttctggagaagtcctgccgtaccgttatgagcaagtcccccaacaagcataaccgtctttacatggaagctcgcccattggaggagggattggctgaggctattgatgatggccgcattggcccgcgtgatgatcctaaggtgcgctccaagatcctgtctgaggagtttggttgggacaaggatctc

SEQ ID NO: 439274 - DNA, 307 bp, Triticum aestivum
cccactttttcggcctaccatggtggtgacggggcgtacgtgagccctagcgggttcgaggaggcagcgccggcggcggagatgtcgacgccgccgagaaagcgcctgatgcgggacttcaagcggctgcagcatgacccaccggccgtgatcagcggctcgccgcacgacaacaacatgatgctctggaacgccgtcatcttcgggccggatgatacgccatgggacggctgcacgttcatgcttaccttgcagattacagaggattaccccaacaagccgtcaactgttcgttttgtctctagga

SEQ ID NO: 439275 - DNA, 460 bp, Triticum aestivum
ccctctcgtccgcggacgcgtggggtggaaacaggttcatcaagaccgctgcttatggtcactttggccgcgatgatgccgacttcacctgggaggtggtgaagcccctcaagttcgacaaggcatctgcctaagaacaagacatcacattggggttattcttggtctgctgcctctcaagttcgacaaaggcgggatccttttgctcctgggaagtaagaagaagcattcgacatcaccgcgacgtgctacactggtcgtgccgtctagtgatcagtgctaagttttcttactggtgtatcatttcatatatttttccttttctttttgagtctgctgaaactgctgagtgatgtgcaatttgctctgtcacttcgtcactttcacttttcatattctgttttgtgtagtttcccctcataatgctctcctcataatgctctttcttccagagtttaaa

SEQ ID NO: 439276 - DNA, 407 bp, Triticum aestivum
aaacttccctgatcctggtcggtgttgggacattgttgacaaatacggagtgacaatattttatactgcaccaacacttatccgttcgctcatgcgtgatggttccgtgtatgttgatcggtactcacgtaagtctctccgagttttaggaagtgtgggtgagccaattaatccaactgcatggaggtggttctataatgttgtcggtgactcgagatgccccatatcagacacctggtggcagactgaaactggtggttttatgattacacctttacctggcgcttggcctcagaaaccaggatctgctacatttcctttctttggtgtacagccagtgattgttgacgagaaagggcgggaaatgcccggagaatgcagtggatacctttgcataaagaagtcat

SEQ ID NO: 439277 - DNA, 364 bp, Triticum aestivum
ggagatctttcgcgtgagggtaatgacttgtacagggaaatgattgagagtggtgtcattaagcttgacgacaagcagagtgagagcaagtgtgctcttgtgtacgggcaaatgaatgagccccctggtgctcgtgctcgtgttggactgactggtttgactgtcgctgagcatttccgtgatgccgaaggacaggatgtgcttctcttcattgataacattttccgtttcactcaggcaaactctgaggtgtctgctctgcttggacacattacatttgctgagggataccaaccaacccttgctaccgacctgagagggctgcaggagcggattaccaccacaaagaagggttctattacat

SEQ ID NO: 439278 - DNA, 330 bp, Triticum aestivum
tcttaccttattgacactgtccgcagaaggatgatgatgacctccggagaggccgtcaagtacaagagctccttggatgctttccagcagatcctgaagaaggagggtgccaagtccctcttcaagggggctggtgccaacatcctccgtgccattgctggtgctggtgagctctccggctatgatcagctccagatcctcttcttcggcaagaagtacggctcaggcggtgcctagaggggacgaaatgatgacgaacaagagaagtttgttcccagacctacccttcgaggatctggcgaacttttatctttttaacgttggaaggca

SEQ ID NO: 439279 - DNA, 471 bp, Triticum aestivum
cctttttgtccggcgattgccgtggccatgcagcccgtgacggtctacattgacgccagcggttttgagttccagttctactccggcggcatctaccgtggcccctgctccgccaatgtgaaccactccgtcaccatcgtcggctactgcgagggtcctggccagggaaacaagtactggattgccaagaactcatggagcaacgactggggtgaacaaggatatgtgtacctcgcaaaggacgtgccctcgtccacgggcacatgtggcctcgccacctcgcccttctaccccacggcttgaccacaggcagcactatgtgtgatatctaaggaattgcttccgtttcgttgtgataatgctaaattactatttttgttatacttccctttaatttgatcaataagcggtagaccgtgcgtgcgatagcatggcctgagtgtaataaatcgtcgtgtgaattacactttc

SEQ ID NO: 439280 - DNA, 415 bp, Triticum aestivum
ccttattgtcatcatcctcggcgacagcggggttgggaagacttccttgatgaaccaatatgtgaacaagaagttcagcaaccagtacaaggctacgattggcgccgatttcctcaccaaggaggtgcagttcgaggacaggctcttcaccctacaaatatgggatactgccggtcaggagaggtttcaaagtcttggtgttgcattctaccgcggagcagattgttgtgttctagtttacgatgttaactcgatgaaatcatttgataatctgaacaactggcgtgaagagtttctaattcaggctagcccatcagatcctgataacttcccttttgttctgctgggtaacaaagttgatgtagatggcgggaatagccgtgtggtctctgagaaaaaggcaaaggcatggtgt

SEQ ID NO: 439281 - DNA, 256 bp, Triticum aestivum
cctactcgtccgggcgagcgcggcgtgcagctgtcgggcgggcagaagcagcgcatcgccatcgccagggcggtgctcaaggacccggccatcctgctgctggacgaggcgacgagcgcgctggacgccgagtcggagagcgtgctgcaggaggcgctggagcggctgatgaaggggcggacgacggtgctggtggcgcaccggctgtcaacgatccgcggcgtggaccgcatcgccgtggtgcaggacgggcgca

SEQ ID NO: 439282 - DNA, 360 bp, Triticum aestivum
cgtcgacgccgagaagctcagggagatcggcttcatcgcctactccatcggcaagccgctcgacggctggctcaaggacatgcccgccgtggcctaagttcacctcgtcggccggccggatcggaggaagagcaagaagtggtttgaccgtgattcattctttatagtttgcattttgcaggagaagcatccacattttctctctcggccataagaatttagtaaatcttcatgtcttgttaagtttccgatacatgtttgcgccaccccgtctgtagatcttacttataatcaaatcctcgggcccctgtgctgcctgaggaggtttttccgctgtatcccatgaacgaactttgtagc

SEQ ID NO: 439283 - DNA, 364 bp, Triticum aestivum
cgtctttctgcaggagtacaacatcaccaagaagatcgagcacgccgtcaagtcgatgcagtacgactcggtctccatctccgcggtcgaccccgagttctactcggagcgcttcctcaagttcatccagaccgtcttccccgagaactcgtagcgcctcggcccaccaccatccctcaaccagtgaacgctccatttccctgccatggcatgatcctgtgtagagaacgaggaacgagggcgtccgcagagggtcttctggagggctggaatttttttttcaagcatgagcacaaaccatgtctttattctgggaataaaggtggcatggctgggttatggagcatggagaatccaccggtgt

SEQ ID NO: 439284 - DNA, 168 bp, Triticum aestivum
cgttttcttgggtccgccgtcgcccgagcactccgtctcctggccgaagcgccgtcgttccaccggcgcagtcgccatgggtaaggtgcacggatcgctggcccgagccgggaaggtgcggtgccagacgcccaaggtggcgaagcaagacaagaagaagcagccgct

SEQ ID NO: 439285 - DNA, 474 bp, Triticum aestivum
tgtgcacaccacaccactcctccactccactccactccccgccagcacttcacgtacctagccagccagcaatggcgatgcagccgggcggcgagggggagacgctgatgcagcggtgcaagccgtacgtggcgatgatctcgctgcagttcgggtacgccgggatgaacgtgatcaccaaggtgtcgctgaaccacggcatgagccactacgtgctggtggtgtaccgccacgccttcgccaccctctccatcgcgcccttcgcgctcttcctggagcgcggcaaggcccgcccgccgcggatgacccccctcgtcttcctcaacatcttcctcctcgccctcatgggccccgtcatcgaccagaacttctactacgccggcctcaagtacacctcgcccaccttctcctgcgccatgagcaacatgctccccgccatgaccttcgtcatggcggtcatcttccggatggaga

SEQ ID NO: 439286 - DNA, 460 bp, Triticum aestivum
tttttacccggagggaggaagcagcagcagcaggtcagcgagggaggagtagaggggatggcggacaagaagggcggagcgccgaggaaggaggaggtcgtcacgagggagtacaccgtcaacctccacaagcgcctccatggctgtaccttcaagaagaaggcacctaatgccatcaaagagctcaggaagtttgcacagaaggctatgggcacgacagacgtcaggatcgacgtgaagctcaacaagctcatctggagcagtgggatcagaagcgtgccccgtagggttcgcgtgaggattgcccgcaggaggaacgatgaggaggacgccaaggaggagctctactcactcgtcaccgttgccgaggtgcctgctgagggtttgaaggggctgggaaccaaggtcgtcgatgacactgagtagactcttttctttatctacatcgttagaatgagct

SEQ ID NO: 439287 - DNA, 384 bp, Triticum aestivum
ccttccgagtctccacccatacccagccgccgccggcggaaagagcacggcgagatgagctcggggatgggcaaggtggtgtgcgtcaccggcggctcgggctacatcgcctcctggctcgtcaagctcctcctccaccgcggctacaccgtccgcgccaccgtccgggacaccgccgaccccaagaaaacattgcacctgcaggccctggatggagccaaggacaggctgcacttgttcaaagcaagcttgttagaagaaggctctttcgatgctgccatcgccggttctgactgtgtgttccacacggcttctcccttttatcacaatgtcaaggatcccaaggctgagttacttgacccagcagtcaatggaacactcaat

SEQ ID NO: 439288 - DNA, 443 bp, Triticum aestivum
ttgtatagagagccatggcctatgccctttctcaccagtggcaagcaggttcaaggcaacaggcagccattacagcttctgaactagacaggaacagctggagctggaattggctggagagatggatggccgtccgcccgtgggagagtcggttccttggcatgtacgcagcagatggaattgccattgataccggagcgcacaatgctgagggaaatgcaaccaaggctccatacaggaaacctgtgaaaaagcaggtttcagctcttcattcaagtgtgttgatccagaaggcccgcccctcgaactcggagggtggtggctccttgtcgaacccgtctgccggttcggcgtcagctaaaccgaaacggaagctgccaccaaaggaaggttctgatgaagtctcgtctcgtctttcgggacttggtgcccggagcagtagt

SEQ ID NO: 439289 - DNA, 469 bp, Triticum aestivum
ttgtcgcgtggggtgggcgccaacatcctggtcggcggcgccttctccggcgcgtccatgaaccccgccgtctccttcggccccgccctcgtcagctgggagtgggggtaccagtgggtgtactgggtcggccccctcatcggcggcggcctcgccggcgtcatctacgagctgctcttcatctcccgcacccacgagcagctccccaccaccgactactaagcagcgagcttaggatcggagtcgccgtccatccgtccgtgtgatgcttcgtctcccccttccttcccgtcatcagtcgttttagtttctcgcgcggtcgccgcatgccatgatgcatgtatgcggagctcgcctcgtttgctttgaatcaatcagtcctgggatccgtcgatcggtcggtcagtcgagtcagtttgtggtgcgtgcgtggagctgtaaaagcgtggatgatctcgatctgggatga

SEQ ID NO: 439290 - DNA, 415 bp, Triticum aestivum
tcgtgtacctcctcccctcctgcccccgagcaccggagccgtcgccgacggcgccggcggcggcgactgcagccatgtcgctgatcgcgggtgaggagttccagcacatgcttcgtgtgctcaacaccaacgtctacggtaagcagaagatcatgtgcgcgctgacctgcatcaagggtgtgggccgccgattatccaacatcgtctgcaagaaggccgacatcgacatgaacaagagggctggagagctttccgcggaggagatggaccgcctgatggcggtggtgcacaacccgcgccagttcaaggtgcccgactggttcctcaacacgaagaaggattataaggacggcaggttctcccaggtcgtcttcaacgccagggacatgaagctcaaggatgaccttgagaggct

SEQ ID NO: 439291 - DNA, 430 bp, Triticum aestivum
gttggagctgtgccggtgggcgcgggagcgcgggctgaagcgggcggcagtcaccaacgcgccgcgcgccaacgccgagctcatgatcgggatcctcggcctggccgacttcttccagctcgtcgtcgccggcgaggactgtggcgagggacgctccaagccctgccccgacccatacctccgcgcgctcgccctgctcggcgcgtcggcggagcggtctctggtgttcgaggactccgtcgtcggcgtgcaggccggcgtggccgcggggatgccggtcgtggctatcgcgagcgagagccgggaggccaaggtcgtcgccgccggcgcgtccatggtcgtcagggactaccgcgacgccaagctctgggccgcgttggacgccgtcgccggagctcccaagatagattcagagctgagcctgagcgcg

SEQ ID NO: 439292 - DNA, 383 bp, Triticum aestivum
tttctatgccttccttcgcacccgaacgcaagaaagacagacagcaacgcggcgtggggaaaagcaggagcgaagcgagggatcgggaggaacaccggcgaggccatggcgcggcggggcacggaggcgttcccggacctgggcgcgcactgcgacagggaggactgcaaccagctcgacttcctgcccttcgactgcgacggctgcggcaaggtgttctgcacggagcaccgcgcgtacgttgagcacggctgcccgcgcgcggccgaccagggccgcaccgtcgtcgtctgcgaggcctgcggcgactccatcgagcgcgacggggcggacaagacggatgcggagatcctcgagacgcacgcgcggtcgcgccggggctg

SEQ ID NO: 439293 - DNA, 429 bp, Triticum aestivum
ttgtacaaaactagggggattgtcctgaggcaaaatatcccagtcgaggtacatgcatcgcaggtttacaccagaacaatgtttgagaaatttggtgaagcattgtacgtgtgtgggtcgtatgatctagtagaagtcaagccccaattggattacattgctaggcacataaaattccagtcaagggaaaagtggtgcaagaatgagtttgtcatctccgtgagtgagacagccgatgagttcaggtgcgagtgtggaacatttgagcactatggaatggtttgcagtcatgcgcttaaggtcatgatgcacctaaaactgcatgagctccctccgaaacatgtgctcaagcgatggactagagatgcaagagatatactactgccggagtatttgcgctaccagaaggaccatgggcctctgaagtat

SEQ ID NO: 439294 - DNA, 464 bp, Triticum aestivum
ttcgcaaggagcttgggactgagtacttgactggggagaagacacgatctcctggcgaagaggtggacaaggtgttcatcgccatgaaccagggcaagcacatagacgcgttgctcgaatgcctcaaggagtggaatggtgagccgctacctatctgctgaacgacgtatgagaaattgaagagaagatagtgtgcttcagatttcaaagaatccggatgttcttagttgacaagtgataataatgcttttcattgtattctctagaaatgttatgttttgaaacttgctcttacagagctgttcttttgttgccaaaaatttcaactagattgtttaagtggtatataaccaatacaacttctatgatgtaaggtaacagcgtacaatatatggtaagtattcgtgataaatgtactggttccttttttgagatcaaatggtccggtggaggcacacggcatt

SEQ ID NO: 439295 - DNA, 335 bp, Triticum aestivum
tcttcgcgtccgccaagctccagacgcctgctcctgccccggcgccgccgcacgctccagagaccgcaggcatgggcgtcttcaccttcgtgtgccgcgactccggcgccgagtggtcggccaagcagcacaagggcgagctcgaggcctccgccgccaccccctacgacctgcagcgccagctcgtctccgccgcctgcgccgaggacaagtccggcggcgtccagtcctccttcaccatggtctcccccaagtccgccatcttccaggtggtcattggtggtgcctctgctggtccgatcggtggtggtggtgctgctggtggtgccgcagca

SEQ ID NO: 439296 - DNA, 333 bp, Triticum aestivum
ttcatcgcgtccgcccacgcgtccgcccacgcgtgcgcacgacgcgaccgcgaaccaaaccctaccgcgaacacgtcggcgatgagctcctccaacggcaacggcgggaagaagccggcgccgtccggcgggcgcgggggcatccgcaccctcgccgacatcaaccgcggcccctccggattcccaggcgcaggcggcagcggcagcgactccgatgagccccaggagtactacaccggcggcgagaagagtgggatgcttgttcaagatccaacaaggagaaataatgtggactcaatctttgagcaagctagagtgatgggtgctcagcaa

SEQ ID NO: 439297 - DNA, 441 bp, Triticum aestivum
tttagaacccatgacccacttggagtctattgcttcctctgcagtgcgggctgctattaaagttaaggcttcggtcatcatttgcttcacctcatctggacgggctgcaaggctaattgccaagtacaggcccaccatgcctgtcctctctgttgtcattcctcgtctgaaaacaaatcaattgaagtggagcttcacaggtgcatttgaggcaagacaatcactcatagttagaggtctctttcccatgcttgccgatccacgtcatccggctgaatctactagcactacaaatgaatcagtgttgaaggttgctcttgaccacggcaaagcatctggtgtgatcaagtcgcatgaccgcgtcgtcgtgtgccagaaagtgggagattcctctgtcgtgaagatcattgagctggacgactaggcaaaattagcctttgc

SEQ ID NO: 439298 - DNA, 350 bp, Triticum aestivum
tgtctacgcgtccgctctgaacgaccatttcgtcaagctcgtctcgtggtacgacaacgagtggggttacagcaaccgcgttgtcgatctgatccgtcacatggccaagactcagtagagcgttctgatttcctttggtcagaggtgtccctgctttgtctatgcgaagaataaatgtggatggtgtcgccagacgacgcctggttcatgttagttggacatgagttaccttctgttttccgcatcaactagtacttctgtaatggagttgctaatcaagtactcttttttggttgtggtttgtgaagattatataaatcgttcagtccagtacttgtgtttgcctgaat

SEQ ID NO: 439299 - DNA, 494 bp, Triticum aestivum
  unsure (1)..(494): unsure at all n locations
ttctactaccccgtggcccagtaccacttcgacctgagcggcacggccttcggcgcgctggccaagtcgggcctcaacgagaagctccgccactcgggcatcatcgacatccagttccggagggtgccctgcaacttccccggcctcaagatcaacttccacgtggtggacggctctaacgcggtgtacctggcggtgctgatcgagtacgaggacatggacggcgacgtgatccaggtggacatgaaggaggccaagtcggggtcgtggatggccatgcgcgagtcctggggatccatctggcggatggactccaaccaccgcctccaggggcccttctccatgcgcatcaccagcgactccggcaagaagctggtggccaacgatgtcatcccggccaactggaggcccaacaccgactaccgctccttcgtncagttcagctgatccgaccgacccatgggcagccacgtgcgcctgcatcatgcatgcat

SEQ ID NO: 439300 - DNA, 307 bp, Triticum aestivum
atttgttctcccaaatggatcaaaaggctgctcccgtcaaattcgcaaaagtcacaaaagtcctcggacgtaccggttcccgcggtaacgtcacccaagtccgtgttaccttcatggacgacgatacccgttccatcatgcgaaacgtaaagggccccgtccgcgaaggcgacattctgcccctccttgagtctgagcgtgaggcccgccgtctgcgataaactgcgcatgtggggtagaacatggtctgcgacgatgagcacattgagaaccagttagagcaaaataaaatcgacctttccatgtt

SEQ ID NO: 439301 - DNA, 128 bp, Triticum aestivum
tcgtgaagcgactcacttgagagtgccaggaaggagatcgttctgtggttccctgagggcattgccgagtggaggagcagccagtacaactggatctacgaggcctaagatgcgtcatgagtggttga

SEQ ID NO: 439302 - DNA, 313 bp, Triticum aestivum
tgtacttggaccctgcttctctgccgtcctcgccgctgtgagctccgatcggcaatcttttctccgttcaagatgaccatcatcatcgagcagcctcagtttgatgcggtggcggagaggaaggtcgccggcgaccagggggagctcgtgctcgacggcggcttcaccgtgccggactccaacgccttcggccacaccttcagggactacgacgcggagtcggagcggaagaagacggtggaggagttctatcgcgtgaaccacatcaaccagacgtacgagtttgtgcagcggatgcgggatgcatatgggc

SEQ ID NO: 439303 - DNA, 361 bp, Triticum aestivum
ttttacaagcccgagcctcctccagaaggccgtcttcctgatgctacccaaggctctgaccacctcaggcaggtgttttccactcagatgggtttgagtgaccaggacattgttgctctttctggtggtcacaccctgggaagatgccacaaggagagatccggctttgagggagcctggaccgccaaccctttgatcttcgacaactcttacttcactgagctccttagtggggagaaggaaggccttcttcagttgccgaccgacaagaccctcctgactgacccggccttccgcccacttgtggacaaatatgctgcggatgaggatgctttctttgctgactacgctgaggcacacc

SEQ ID NO: 439304 - DNA, 348 bp, Triticum aestivum
tcgttttcaatctgctctctactaacggacccaaaccctgacgacccgttggttccggagattgcacacatgtacaagagcgaccgtgcaaagtatgagtccacagcgaggagctggacccagaagtatgcaatgggctgaccctggtagccgcgggtggaggatgatgttggagccatcttcgcttgtaacacctaatgtatctttgttcctgttctgctgctgctatatgggattgtactgtccacctgactgaattcaagtgtcatattgtgaagtgatggcaaaaggcctctaatgggtctatgggtgcacccattcaacaaattaatagagatgggaactgaa

SEQ ID NO: 439305 - DNA, 455 bp, Triticum aestivum
tgatttgctttatggtgtgcgatttgagtccttaaccagccatcagatgaccaatacaattcaaaagaagttcaaagtatcatcaactcagctgctgtaccaatcatgcccataccaagcattgaccctgttcattgttggtccattcctggatggatttctgactaacaaaaatgtctttgcttttgcatacacacctcaagttctgttcttcatcgtgctgtcgtgtctgatatcagactcggtgaacttcagcactttccttgtgattgggaagacatctcctgtaacttaccaagtccttggccatctaaagacgtgcttggttcttgccttcggctatgtcttgctgcacgatccgtttagctggagaaatatacttggaatcctgattgcagtggttgcgatgggattatattcatacttttgcacccgtgaagctccaaagcccactg

SEQ ID NO: 439306 - DNA, 334 bp, Triticum aestivum
tcttcgcgtccgcccacgcgtccgcccacgcgtccgcccacgcgtccgcccacgcgtccgctagctagccatggcatcttccaagagtagtcttgcaatgtttgcactggccatagtcatggccgtggtggctgacgtctcggcgcagaacaccccgcaggacttcgtcaacctgcacaaccgcgcccgcgccgtggacggcgtcggccccgtggcatgggacaacaacgtggccaggtttgcgcaggactgggcggcgcagcgcgccggcgattgccggctgcagcactccggcgggccgttcggcgagaacatcttctggggttccgggcag

SEQ ID NO: 439307 - DNA, 340 bp, Triticum aestivum
ttggttggcttctcctccccactcagtcctcggttcccggtccggtcccgttccgttcgttagggtttagtagtagcggggaagaggaaggaatggtggacgtcgagtaccgctgcttcgactgcggactcgcctgggccaccgacgaccagtccctccagaacgccttctccaagtacggcgacgtcatcgactacaagatcatcactgacagggagacggaccagatcccgcgggttcggtttcgtcaccttcgcgtcgtacgaggcgatgcgccaggcgatcgaggccatgaacggccagaacctgaacggtcgaatcatcaccgtcatcgaggcgc

SEQ ID NO: 439308 - DNA, 335 bp, Triticum aestivum
ttcgcttgactccttggaagcagagagaggaggaggaggaggaggaggaggagaccatgtcgtcgtccggtggcaagctcttcaccctggaggaggtcgccaagcacagctccaaggacgactgctggctcgtcatcggcggcaaggtgtacaatgtgaccaagtttcttgatgaccaccctggaggcgacgacgtcttgctgtcttcaactgccaaggacgcgaccgacgacttctaggacgtgggacacagcacaaccgcccgggcgatgatggacgagtactacgtcggcgagatcgacgcgaccacgatacccaccaaggttaagtacacg

SEQ ID NO: 439309 - DNA, 390 bp, Triticum aestivum
tctatctttccagttcaccggccgttatggagatgaagcccgccgcgcagccggtcaccggcgtccccgtcggcgcggcgccggccgcctggtcctccggcctcttcgactgcttcgacgactgcggcctctgctgcgtgacctactggtgcccgtgcatcaccttcggcaaggtggcggagatcgtggacaggggctccacgtcgtgcggcaccagcggcgcgctgtacgcgctcctgtgctcgctcacgggctgccagtggatctactcgtgcacctaccgctccaagatgcgcgcccagtacgcgctcccggacgcgccctgctgcgactgctgcgtccacttctgctgcgagccatgcgcgctcgtgcagcagtacaaggagctca

SEQ ID NO: 439310 - DNA, 368 bp, Triticum aestivum
gacacgtgggagcagagcaccctcaagggctggtcctgcaagactgtttatgatgttacggccagggcggcgttcctggtgaggtgcaaggccaactctgaggccaccctcgggacctacaagggcgacgccacccttgccgagggcgcctcagagagcctccatgtcaaggactacaagtactgatctgccccccgctggatggtttgggcattcctgcttactacctccgtctgaaaataagtgtctgacacttatttttggacagagtagtatctagatggtttcatagtcttgatatctttaaatatcaacccttgtttttaataatataagcttctacttatagttaatttttgacgttgaat

SEQ ID NO: 439311 - DNA, 412 bp, Triticum aestivum
tttctttcccatccctgtggtctgtcctgttgccaaacgctcctttgatccccgtttgctacggcaaggcagcaaacgcgattacgcaagcttaggtttcgtctctccttcctctgtccccgccccacctcgtgccccaccctacctccggcgcgcgacgagcgcgagcaagagcgcttggtagatagatcccgatggcctcgcgacgccagacgctcctcaaggtcatcatcctcggcgacagcggggtcgggaagacgtccttgatgaaccaatatgtgaacaagaagttcagtaaccagtacatggccaccatcggcgcggatttcctcacgaaggaggtgcaatacgaggacaggctcttcactctgcagatatgggatactgctggacaggaaaggtttcagagtct

SEQ ID NO: 439312 - DNA, 344 bp, Triticum aestivum
ttgtttttgggtttgttcactttgctgaaagatcaagtgctctgaaggcagtttaaggaagtgaaaaatacgaaatcgatgggcaagtgcttgaagtttccatggccaaacctttgagtgataagaaacctgaccactcgttcaagcctggtggagctcccagctatcctcttccaccttatggtggctacatgggagacccatatggtgcctatggtggcggccctggattcaaccagcctatgatctatggtagaggaccagcaccagctggaatgaggatggtgccgatggtgctccctgatggtcgccttggctatgttctgcaacaacctggtggaatg

SEQ ID NO: 439313 - DNA, 439 bp, Triticum aestivum
ttctttattcagtttttgacaatgaagaaaatcaacatgtgcttgtgccgctcgtgactgggatggccgaatctggagctgtggaagaagggaagttcaggtactacaaattttctgtcgaggaaggtgtggctgagaaagttgcgtctggttgtgcaaatattgaggtaaagatagagtctgatacaagtggcggtgacactgatatttatgtttcaaggcatcctttagtattcccaactcagcaccgtcatgagtggtcatctcatgagatgggatctaaggttcttatactcaaaccaaaggatgctactttggtcagtggcctttacagtgttggggtttacggtttcaaggccacagcgaagtttcaactttctgtagctatcaaggatgttattgatagccataggattggtgagcagggtagtgtgtcatc

SEQ ID NO: 439314 - DNA, 366 bp, Triticum aestivum
gccaagcgcaagctccgcggcttcggggccgttaagaactgttttccccttatgccccgcctcgcgtggcactcggccgggaccttcgacgtggccaccaagaccggcgggcccttcggcaccatgaagtgccccgcggagctcgcgcacggcgccaacgccggcctcgacatcgccgtcaggctgctcgagcccatcaaggagcagttccccatcctctcctacgccgacttctaccagctcgctggagtcgtcgccgtcgaggtcaccggcgggcccgaggttcccttccacccggggagacaggacaagcccgagcctcctccagaaggccgtcttcctgatgctacccaaggctctgaccac

SEQ ID NO: 439315 - DNA, 346 bp, Triticum aestivum
actccgtggccactgccccagacggcggcatggtttacgcggtttttgcgttcattaccgccggtatccagcatggcttcttcgagctgcagcccaaggaagggcttgccatggtgaacggcacagcagtgggctccgggcttgcatccatggtgcttttcgaggctaacatcctcagcctccttgccgaggttctatcagccgtcttctgtgaggtcatgaacggcaagccggagtacactgaccacctgacacacaagctaaagcaccaccctggacagatcgaggctgccgccatcatggagcacatccttgaaggaagctcctacatggcactcgcaaagaa

SEQ ID NO: 439316 - DNA, 400 bp, Triticum aestivum
ttttcctgtcagccgtcttctgcgaggtgatgaacggcaagttcagagtacacctaccactttacccacaaattgaagcatcaccccgggcaaatcgaggctgctgccatcatggagcatatccttgaaggcagctcctacatgatgctggcgaagaagctcggtgagcttgacccattgatgaagccaaagcaagataggtatgcactccgcacatcgccgcagtggcttggccctcagattgaggttatccgtgcttccaccaagtcgatcgagcgggaaataaactccgtcaacgacaacccactcatcgacgtctcccgtggcaaagctatccacggtggcaacttccagggcacacccatcggtgtgtccatggacaacaccaggcttgccattg

SEQ ID NO: 439317 - DNA, 332 bp, Triticum aestivum
tatacacaatgaccctctccaagtcgctggcgcttttcaatcttttgttcagcttgtctccttgatggcgctccctatgatgatggagatcggtctggagagagggttcaggaccgcgttgagcgactttgtgctcatgcagcttcagttagcgtccgtcttcttcacattctccctcggaaccaagactcactactacggaaagacgctgctccacggaggagccgagtacagagccaccggacgtggattcgtggtgttccatgccaaattcgccgagaactatcgactgtactcacggagccatttcgtcaagggcatcgagctgatga

SEQ ID NO: 439318 - DNA, 421 bp, Triticum aestivum
tttgttatcacacaacagagcggcagcagttcccgggccgttctcgccccgttcggcgccatggacttcgtcttcgtggagaagctcctcgtgggcctcctcgcggccgtggtgggcgccatcgtcgtgtccaagatccggggccgcaagctgcggctgccgccgggccccttcccggtgcccatcttcggcaactggctgcaggtcggcgacgacctgaaccaccgcaacctggcggcgatggcgcgcaagttcggcgaggtcttcctcctccgcatgggccagcgcaacctggtggtggtctcctccccgccgctggcccgcgaggtgctccacacgcagggcgtggagttcgggtcccgcacccgcaacgtggtgttcgacatcttcaccggcgagggccaggacatggtgttcaccg

SEQ ID NO: 439319 - DNA, 327 bp, Triticum aestivum
ttcttaaaaaaaagatggcccggtggtcgtcgtgcatggcgctgctcgtcctcgccgtcgccgcgcagctcggcgcgtccgacctgtcgccgggctactacggcagcagctgccccagcctggagagcatcgtgcgcggcgtggtgacgcagaagatggacgacaccatccgcaccatcggctccaccatccgcctcttcttccacgactgcttcgtcgagggctgcgacgcgtcggtgctgatccggtcgacgccggggaacccgacggagatggacgccgacgacaacaagtcgctggcgttcgagggctacgagacggtgagga

SEQ ID NO: 439320 - DNA, 405 bp, Triticum aestivum
tttgacgcgtgggttgaagacttgctttttatatctaagtatctttccagaagaccataaaattagcagagatcggttgataagaagatggatttctgaaggctttatccaagtaaaagatgaaactgatagccagcttgagcttggagatagctacttcaacgagctagtaaacagaaacatgatcatgccgataaacatacatgctgatggtagggttgaagcttgttccatacatgatatcatgctggatcttatatatgaattagcaagtggagagaactttgttactatactggatgttatcaaggaagacacacctttggaaagaagttccgcagattgtccctccagaagagcatgacaggtctcaccaatgctcatatggctaccacaagcatgtca

SEQ ID NO: 439321 - DNA, 341 bp, Triticum aestivum
agagctttgagcgaaggggttttttcaacattttttatcacctttcccgcggcgatccttgtcctcctggccgtcctgttcacggggatcctcgcccagccatcgggctatttccccaagtgctgcgacaactgcaggtccttctcagggatcgacgtctgtgacgacgcccatcctgagtgccccaagggctgcttgcagtgccgcgtggtgcagacgagccctaccaagacgttcaggtgcgccgactaccgcggagactccgacgacacgtgcggcccgccctgcaagaaaaactgatgggttaagatcagatcacgaaatgtttcgcccaaaataag

SEQ ID NO: 439322 - DNA, 410 bp, Triticum aestivum
gcgtccgcaggcaggcaggctagccgggctccttcccatctcttctcttctctcctctcccccgaagagtcaaagacacagggagagagaggactcctccgcatctgcatccgcgcacacgaattcgagagggagaggagcgataatggggagggctccgtgctgcgagaagatgggcctcaagaggggcccctggacgccggaggaggacaagatcctggtcgcccacatccacagccacggccacagcaactggcgcgcgctgcctaagcaagccggcctgctgcggtgcggcaagagctgccggctccggtggatcaactacctgcggccggacatcaagcgcggcaacttcaccgacgaggaggagcagtcaatcatccagctgcaccagctgctcggcaacagat

SEQ ID NO: 439323 - DNA, 364 bp, Triticum aestivum
tttacattgttaggtcttgcaagtgaagctaggagacagaaaccatgtttgtttcctgtgccttggctgcactgcttgctgtggtggtactcgtggtctgctctccggcgcctcgtgttctcgccactgaccccacccagctccaggacttctgcgttgctgatataatgaaccctgtgattgtgaacgggttcgtgtgcaagaacatgaagatggtgacggcgaacgacttcttcttgcccgggcttaacaagccgggcaagttgaacgctcagggctcggcggtgacaccggtgacggtgcggcagctgccagggctgaacacgctgggcatctcattggcgcgcatcgacttcgggcccaa

SEQ ID NO: 439324 - DNA, 330 bp, Triticum aestivum
acttttcttccttgattaggtctgtaagctcttcatgggcgttggtttactcgttgaagctcgtggtgctgctcgtcgctctcatggtggccatggcggtcacgggccaaaactcggagcaggactccatggacacccacaactcggtacgcgccgacgtgggccttggggaggtgacatgggacgctacggtggcagccttcgcgcaggactacgcggatcagcgccgcggcgactgccagctgatccatactcctgatggccggccgtacggggagaacctctactgaggcggctggaccgagtggacagcgacggacgccgtgaatt

SEQ ID NO: 439325 - DNA, 316 bp, Triticum aestivum
ttcttcgcgtccgcccacgcgtccgtagagagctctcctttccatacctcttccttcgctccaccaggagtctagggttagagagagagagagagagcgagacgagcaaaaacaatctctcgccccactgttataccaagttcgcatccatctcactgttatacatccttgtatcacaatgggtggcctatccatggagcacccttgggcattcgccttcggcctactaggcaacgtgatctctttctcgagccttctggccccgataccaacattctaccggatcttcaagagcaaatccacggaggggttccag

SEQ ID NO: 439326 - DNA, 374 bp, Triticum aestivum
catgtcaaatgagctgtacaacacgatggcttgtttgactgattgtttttatgatggaatcgcaattggtggggatgttttccctggctcaactctttcagatcacattctgcgttttaacaacataccccaggttaaaatgatggttgttcttggggagcttggaggaagtgatgagtattcactcgtcgaagccttgaaacaaggaaaggttcagaaacctgttgttgcttgggttagtgggacatgtgcacgcctattcaaatctgaggtccagtttggccatgctggtgcgaagagcggcggcgagttggaatccgcacaagctaagaatcaggcactaagggatgctggggcagttgtcccgacttcat

SEQ ID NO: 439327 - DNA, 381 bp, Triticum aestivum
tcttttaacgtagggaagcacaagcacactgcagcagggctctcaccgtctttagctccgtctaccaggccgtgctggacgccgagcacgagctctgggcgaccacattctcctacatcaagtccatggcgctcaagtcggcccttgacctccgcctcgccgacgccatccaccaccacggtggcgccgccaccctccctcagatagccgccagggtcgcggtgcacccgtccaagatcccctgcctgcgccgtctcatgcgcacgctcaccgtctcgggcgtcttcagcgtcgtccagcagcaggacgtcgtcgttcctgctgcccccgtgagcaacggcagctgcaacggcgccgtcgtcgccgagcccttgtacgccc

SEQ ID NO: 439328 - DNA, 372 bp, Triticum aestivum
ccgggggacgagcggcaggggctcgcgaggctcaaggactacctcagccgcttcggctacctccccgcgccgccggccaagttcaacgacatgttcgacgccgacatggagtccgccatccggacctaccagcagaacttcggcctggaggtcaccggccagctggacgcggccacggtcaccaagatgatgtccccgcggtgcggcgtcgccgacatcatcaacggcacctccgccatgggcaagacggtccacggccggaacctctactcctacttcccggggtccccctcgtggccgcgctccaagaagagcctcaggtacgccatcacggcggccaccgagacgaccatcgaccgggccacgctgagc

SEQ ID NO: 439329 - DNA, 327 bp, Triticum aestivum
ggcagcagcagccatggggaggcttgttcgacttcgttgtgcgattcctgcagctggcgcggccgggcaggggccatggtcagggacagccggcgcgggtgggggtcgcggtgaggggcggcagggcggcggcgcgcggggtgcggtgccgggccggcggcctgatcgagccggacgggggcaggctggtggagctggtggcccccgaggagggcggccggcgggcggcgctgcgccgggaggcggcggcgctgccgcaccgcgtgcgcctgggccgcgtggacaccgagtggctgcacgtgctcagcgagggctgggccagcccgc

SEQ ID NO: 439330 - DNA, 272 bp, Triticum aestivum
ccacatggaggaagtcatcaggttctttgaaatgcatcacaaggggaaatataaggtgtataacctttgctcagaaaggctgtacgatgcatctctttttgagggaaaggttgcatgctttccttttgacgatcataattgtcctccgatacaacttgtcatatcattttgccaaagtgcatactcatggctgaaggaagacataaaaaatgtggtggttatccattgcaaagctgggaaagcaagaacagggttgatgatctccatccttc

SEQ ID NO: 439331 - DNA, 326 bp, Triticum aestivum
tcccacgcgtccggcagatcttcgtcaagaccctcacggggaagaccatcaccctcgaggttgagagcagcgataccatcgacaatgtcaaggccaagatccaggacatggaggggatcccgccggaccagcagcggctgatcttcgccggcaagcagttggaggacggccgcacccttgccgactacaacatccagaaggagtcgaccctccatctcgtcctcaggctccgcggaggcatcatcgagccatccctgcaggcgcttgcccgcaagtacaaccaggagaagatgatctgccgcaaatgctatgcgcgcctgcaccct

SEQ ID NO: 439332 - DNA, 359 bp, Triticum aestivum
ccgctggagtgtggtcaagcgggggggggatgtccaggtgcttgttgaatcaccacacaaattccaaaatgcacttgaagctgtgaagactctaagagcagagcccaaggccaatgatcagtatttgcccccatttgtgatagttgatgagagtggcaaatcggttggtcctatagtagacggtgatgcagtcgtgactttcaatttcagagctgatcgcatggttatgcttgcgaaagcactcgagtttcctgattttgataaatttgaccgtgttcgtgtaccaaaaattaagtacgctgggatgcttcaatatgatggtgagttgaagcttccaagcaagtaccttgtttccccac

SEQ ID NO: 439333 - DNA, 431 bp, Triticum aestivum
catggagttcgacgagcgctgcctcaaggtccagttgcccaaatttgattgcctcctctttgacctcgacgacactctgtacccgctgagctcggggatctcatcacacgtcaagaccaacattgaagcttacatgattgagaagctgggtattgatgagagcaagatcgaaaaccttggcaacctgctgtacaagaactatggcaccacgatggcgggcctcagggcaattggctacaacttcgactacgatgagtaccacagctttgtccatggaagactgccctacgacaacatcaagccagaccccgttctgaagcagattctcaagaacatgcgcatccgcaagctcattttcaccaacggtgacatgatccatgccgtgagagccctcaagaggctgggcctggaggactgcttcgaggggatca

SEQ ID NO: 439334 - DNA, 290 bp, Triticum aestivum
ccaagtgcggcaccgttggcatccagggcatcgcctggagcttcggcggcatgatcttcgtgctcgtctactgcaccgccggcatctccggcggacacatcaaccccgcggtcaccttcgggctgttcctggccaggaagctgtcgctcaccagggcggtattctacatggtcatgcagtgcctgggcgccatatgtggcgccggcgtggtcaaggggttccagaccacgctgtaccagggcaacgggggcggcgccaactccgtcgcgccggggtacaccaaaggggac

SEQ ID NO: 439335 - DNA, 350 bp, Triticum aestivum
cattccacgagcagatcgacaggggcgggaatttcttgattatgtttctacctttcaccgatgaagagtagcacgctggtggcgatcctggtcctccaggccgtcatggtcatggggatcctcgcacactcacaggcagcggacacggacgacgatttccccaagtgctgcgaccactgcaactcctggtcgggggcccagttctgcgacgacgtcggccccaagtgccgcgacggctgcgtcaactgccgcgtggtgcagacccgccccgtgaagacattccggtgtggagatggacgctccgcctacccatacattccctgcccgccgtcgtgcaaaaagaactgatc

SEQ ID NO: 439336 - DNA, 404 bp, Triticum aestivum
tctccactccacttttgtacgaagaacactatttaaatatggcttcccagatcaacacggaggtggatgccctggtggagaagatcaccggcctccacgccgccatcgccaagctgccgtcgctcagcccatccccagccgtcgacgcgctcttcaccgagctggtcacggcctgcgttcccccgagcccagtggacgtgaccaagctcggcccggaggcgcaggagatgcgggagggcctcatccgcctctgctccgaggccgaggggaagctggaggcgcactactccgacatgctcgccgccttcgacaaccctctggatcacctcggcatgttcccctactacagcaactacatcaacctcagcaaactggagtatgagctcctggcgcgctacgtgccc

SEQ ID NO: 439337 - DNA, 356 bp, Triticum aestivum
tgccaatttattaattggcgatggtcaagtcgtgaagattgcagattttggtgtctctcgtcaacgatcgcaagagggagatatgactgccgaaactggcacctacagatggatggcacctgaggtgataaaccataagccttatgatcacaaggcagatgtcttcagcttcgctattgttctatgggagttggtcacttcaaaggtcccgtatgagaacctgacacccttgcaagcggcactgtcagtaaggcagggacttcgcttggtgattccctcgggcgtgcatccaagaatatctaaattgattcaacggtgctggggcgaaaaccccaatacacgacctgttttctctg

SEQ ID NO: 439338 - DNA, 404 bp, Triticum aestivum
ttttcttcacgcgtccgaaagcatgctgctggaacctacaaaagcctggtattttaccttgaagcctgtgaagctgggagcgtatttgaggggcttctgccaaatgacatcggtgtctatgcgaccaccgcgtcgaacgcggaggagagcagttggggaacgtattgccccggcgagtaccctagccctccgtcggaatatgacacctgcttgggcgacctttacagcatttcttggatggaagacagtgatgtacacaacctgagaactgaatctctcaagcagcagtatgacctggtcaagaagagaacggcagctcaggactcatacagttatggttcccatgtgatgcaatacggttctttggacctgaatgatcaacatctcttcttatacatcgggtc

SEQ ID NO: 439339 - DNA, 156 bp, Triticum aestivum
ttttcttcaggcctgatggctaaacccatgtcacgggtgtatacctgaacttgggaggtgctcacggctcctgtacgtgtgcacactgttctgatctgcacccagcatgatgagactgacaccaatgatgagattgctgcagacctcaaggagcat

SEQ ID NO: 439340 - DNA, 325 bp, Triticum aestivum
tttgaggcttttggcaggccggggacgatggcgccgctgctcaaggacgagctggacatcgtcatcccgacgatccggaacctggacttcctcgagatgtggcggcccttcttccagccgtaccacctcatcatcgtgcaggacggcgaccccacgaggaccgtcatggtgcccgagggcttcgactacgagctctacaaccgcaacgacatcaaccgcatcctcggccccaaggcctcctgcatctccttcaaggactccgcctgccgctgcttcggctacatggtctccaagaagaagtacgtctacaccatcgacgacgatt

SEQ ID NO: 439341 - DNA, 217 bp, Triticum aestivum
  unsure (1)..(217): unsure at all n locations
gtccgctttcattaacattncatggacaggaccttatagaggtttcagaattggcgcccaactacgggaggcggtatggtttgctcggcttaaatggttgtgggaaatctacccttctcaccgcaataggctgcagggaactccccattcctgaacacatggacatacatcatcttactcgtgagattgaggcttctgacatgtctgcgctgcaagc

SEQ ID NO: 439342 - DNA, 372 bp, Triticum aestivum
tttgtcataacttgggacgctattttgagaaatcaacgattgattccatgcccctggatcattcaaaagagcatatcggaactaccgtccagcatttgattagcttggctcaaaacacttctgagctttaccatgaattgcacgcgctggataggtttgagcaggattttcaaaggaaatttcatgaagaggagtctgtaccagcagccaggcgagagagcgttatgatattgcacagtgaactaaagcgccaaaggaagcttgtgaaaactttgaagaagaaatccttgtggtccagacctttggaggatgttgtggaaaagcttgttgatatcgtcacttttctggataaacaaatccgggatgcattcg

SEQ ID NO: 439343 - DNA, 258 bp, Triticum aestivum
caggtgcgtggcggcgctggaggaggccggcgtcgagtacgagctcgtccccatcaacttcggcaccggcgagcacaagagccccgaccacctcgccaggaacccctttggccaggtgccagctttgcaggatggtgacttgtacgtcttcgaatcacgtgctatttgcaagtatgcgtgccgcaagaacaagccagagctgttgaaggagggcgacatcaaggagtcagcaatggtggatgtgtggctcgaggtgga

SEQ ID NO: 439344 - DNA, 413 bp, Triticum aestivum
tctgacgcgtgggtttcaggactataccgccaagctatcttacttcggcctcgccaaggatgggcccaacggcgacgccacccatgtcacgacacgtatcatggggacacatggatatgccgcaccagagtacatcatgacggggcatctgacggctaagagcgacgtttatagcttcggcgtggtgctcctcgagctattatcgggccggcggtccattgaccgtgctcggcgttccagggagcaaagcttggttgactatgccagaccgtacctcaagaagcaggacaagctgcaccgggtcatggatccggctttggaatgccagtactcgtgtcagggggctgaactggccgcacgagtagcgtacaaatgcttgagccaaaactcaaagtcgaggcccaccatgaaag

SEQ ID NO: 439345 - DNA, 467 bp, Triticum aestivum
ttttcgcgcgcgcgctctcacgggctcggatcgggaggactagggttcgcgagctgctgccctccggcggtctccacggcgttggcgtcggcggcggcggcggagaagagaaagagggatggaggggctcctgcacaagctcaaggggctcgacgcctaccccaaggtcaacgaggacttctacaagcgcacgctctccggcggcgtcgtcacgctcctctccgccctcgtcatgctgctcctcttcgtctccgagaccaggtcgtattattattcagcaaccgagactaagttagtggtagacacatcaagaggagaaaggctaagagtaaattttgatattactttcccgagtattccttgcacccttctcagtgttgatacaagggatattagtggcgagcagcaccaggacattaggcatgacattgaaaagaaaagattggactcacatggtaatgtcattg

SEQ ID NO: 439346 - DNA, 453 bp, Triticum aestivum
  unsure (1)..(453): unsure at all n locations
tgtttaggtgcgcggcatcgagctcatcgcctcggagaacttcgtctgccgcgccgtgctcgacgccctcggcagccacctcaccaacaagtactccgaggggcacccgggcgctcggtactacggcgggaaccagcacatcgacgccatcgagcgcctctgccacgagcgcgcctgcaccgccttcggcctcgaccccgcctgctggggtgtcaatgtccagccctactcatgcacctccgcaaacctggctgtctacacagggcttctcctacccaatgaccgtatcatgggccttgagccgccgtctggtggccatgtcagccacggatactacacgcctagtggtaagaaggtgtctggcgcctcgatattctttgaaagcttgtcatacaaggtgaatccacagactggctatattgattatgacaagctngaggaccgggcaatgga

SEQ ID NO: 439347 - DNA, 382 bp, Triticum aestivum
ttcttcacgcaagtacacaatgatggacgtcagcctcctggagaaggccctcctgggcctcttcgcggcggcaatgctcgccattgccgtcgcaaagctgaccggcaagcgcttccggctgcccccggggccctccggcgcccccatcgtgggcaactggctccaggtgggcgatgacctcaaccaccgcaacctcatgggcatggccaagcgtttcggcgaggtgttcctgctccggatgggcgtccgcaacctggtggtcgtctccagccccgagctcgccaaggaggtcctccacacccagggagtcgagtttggctcccgcacccgcaacgtcgtattcgacatcttcaccggcaaaggccaggacatggtgttcacc

SEQ ID NO: 439348 - DNA, 434 bp, Triticum aestivum
tttttctcttcaacctgagaagtttggattttacaagcagtttcctagggcatgttgtgggtctcccgggtctgttgccaaagccgtttacaacttcaatgtcacagccaaatgtggggagcctggtgccactgcttgcgctgatccatcgacccattggagctgggacggtattcacttgacggaggttgcttatggtcatatcgccaggggttggttatatggcccttttgcggaccaaccgattgttcagtccctgtagtccacctctactgttgcacttgtagagcgtctgaaaatggtgcactaaactggagcaggaaaagtagttcttccataaagttccaatgttcaatacgtgtatatttttatttgattgaattcattgcaagtggggtacaaaggtaaaataggggatgccagaagaatgactt

SEQ ID NO: 439349 - DNA, 391 bp, Triticum aestivum
tttttcgcgtccgcccacgcgtccggctgcacacctgatctcatctcatctcagtcttcccccacattgccattccctccttgcgagtagcagcagcaatggccagcctcgccgacctcgtcaacctctacctcagcgactgcaccgacaagatcatcgtcgagtacctctgggttggaggatccggtatcgacatcaggagcaaagcaaggacggtgaacggccccatcaccgacgcgagccagctgcccaagtggaactacgacggctccagcaccggccaggctcccggagaggacagcgaagtcatcctctacccccaggccattttcaaggacccgttcaagaggggtgacaacctccttgttatgtgcgactgctacacacccca

SEQ ID NO: 439350 - DNA, 294 bp, Triticum aestivum
gttctctcccgcccgacgccgggcaccgtccagtgcttcggccggaagaagaccgccgtcgccgtggcctactgcaaacccgggcgcggcctcatcaaggtcaacggcgcccccatcgagctcatccgccccgagatgctccgcctgaaggccttcgagccgatccttctcgccggcaggtcccgcttcaaggacatcgacatgcgtatccgcgtccgcggcggagggaagacgagccagatctactccatccgccaggccatcgcgaagtctctcgtcgcctactaccagaag

SEQ ID NO: 439351 - DNA, 406 bp, Triticum aestivum
ccgttatatggttgcaaaccagttgtatgagctctgcgaggcagttggtcctgagcctacaagagcagacctggtgcctgcatatgttcgcctcctccgtgataatgaggctgaagtgcggatagcagctgccggaaaagttactaagttctgtaggatattaagtccacagcttgcaattcagcacattctgccgtgtgttaaggaattgtcatcagattcgtctcagcatgttcgctcagctttggcttcagtcatcatgggaatggcccctgtcttggggaaggatgctaccattgaacaacttcttcctatttttctttctttgctgaaggatgaatttcctgatgttcgactcaacataatcagcaagcttgatcaagttaatcaggtcattggaattgac

SEQ ID NO: 439352 - DNA, 272 bp, Triticum aestivum
cccttctcttcggcggcggcttgagaccgttcgagcgagctttggtttgtcgcggcggcggaaggaaggaagggagtcgggaagatgagccgcagccttgggatcccggtgaagctgctgcacgaggcggcggggcacgtggtgacggtggagctcaagaccggcgaggtctaccggggctccatgatcgagtgcgaggacaactggaactgccagatcgagaacatcaccttcaccgacaaggacggcaaggtgtcgcagctggagcacgt

SEQ ID NO: 439353 - DNA, 289 bp, Triticum aestivum
cccttctcttcggcggcggcttgagaccgttcgagcgagctttggtttgtcgcggcggcggaaggaaggaagggagtcgggaagatgagccgcagccttgggatcccggtgaagctgctgcacgaggcggcggggcacgtggtgacggtggagctcaagaccggcgaggtctaccggggctccatgatcgagtgcgaggacaactggaactgccagatcgagaacatcaccttcaccgccaaggacggcaaggtgtcgcagctggagcacgtcttcatcaggggcagca

SEQ ID NO: 439354 - DNA, 362 bp, Triticum aestivum
acgccaccatgggtatctcgcgtgactccatgcacaagcgccgggccaccggtgggaagcagaaggcttggaggaagaagcgaaagtatgagctcggccgccagccagccaacactaagctttcaagcaacaagacagtgaggagggtccgtgttcgcggaggtaacgtgaagtggagggctctccgtcttgacactggtaacttctcatggggtagtgaggctgtgacccgcaagacccgtctcctggatgtggtttacaattcgtcaaacaatgagcttgtgaggactcagacccttgtcaagaatgccattgtgcaagttgatgctgcccccttcaagcagtggtacctgactcattat

SEQ ID NO: 439355 - DNA, 333 bp, Triticum aestivum
cgcacgtgtccaacccccacagcgggtttttttaagcagtttctccgttggccgccgcggcgggcggcgcgacgacgtcgacgaggcgcgggccgggcggcgggggccggccgatggacgacgagaacctgaccttcgagacctcggcgggggtggaggtggtcggcagcttcgacgccatggggatccgcgaggacctgctccgcggcatctacggctacggcttcgagaagccctccgccatccagcagcgggccgtcatccccatcatcaccggccgcgacgtcatcgcccaggcccagtccggcaccggcaagacctccatgatctccc

SEQ ID NO: 439356 - DNA, 281 bp, Triticum aestivum
atgccccttcccttctcttcggcggcggcttgagaccgttcgagcgagctttggtttgtcgcggcggcggaaggaaggaagggagtcgggaagatgagccgcagccttgggatcccggtgaagctgctgcacgaggcggcggggcacgtggtgacggtggagctcaagaccggcgaggtctaccggggctccatgatcgagtgcgaggacaactggaactgccagatcgagaacatcaccttcaccgacaaggacggcaaggtgtcgcagctggagcacgt

SEQ ID NO: 439357 - DNA, 306 bp, Triticum aestivum
cctctctccatggcctcctccggcgggcacacggtgcccctgctcgcccgacttccagccgaggcggcggaggcgtacaccaccgacgggacccttgacttcgacgggaacccggcgctcaagaatcgcacgggcggatggcgcgcgtgccgcgcagttctcggaaccgagttctgctactgcctagcgttctacggcatctcctacaacctcgtcacgtacctcaccggcgtcctgggccagagcaacgtcgccgcggcgaggaacgtgtccacctggcaggccacctgcttcctcatgcccctc

SEQ ID NO: 439358 - DNA, 324 bp, Triticum aestivum
ttgttaggaaaccctgtgcgcaagaaggtgggaaggcatacttgatcatttttattctgtagacatcacagaacaggaagctaagaaggggctagtttgccgtgtgcattcaactgaaaaaagcaaatttaagctgctttattttgagctcgaagaaaatggtgggttgagccttgcacttcaggaagatagtgtaaaggccagcaaagtttcttctgcaggaatgtactttcttgggttccctgtgtattcgcttgagcaaaataactcagttctttgtttgcacatcaccatggcagggttacattcttaaacaacacgatt

SEQ ID NO: 439359 - DNA, 337 bp, Triticum aestivum
ttgtttcaaacaacgcgtgtgacgtgtgcctggccgttcgtgtgcgtctccgagggcgacagggaaggaaggaaggaaggggatgagctccttcgtcggcgccgccttctggtctgcgtcgccggtgccgccggaggacgacgtctgctacgtatgccactaccgctttcggatcccctgccaggccaactgctcccactggttctgcggagagtgcattattcgtgtttggaaccatggagctgctgtacagccttgcaagtgtcccatttgccgacgccttataaatttgctggtacctgctaatgtatcacacgatcacaatgatgatccccaa

SEQ ID NO: 439360 - DNA, 273 bp, Triticum aestivum
tctgagaacaacttacaccgactatgccggtggtattgatcctaaaaatctatcccggtcaagtagtggctacatcgggaaattgaggtcaaatttcctcggcaccaaattcatcatgtacgacacgcagccgccttacaatgccagtaaactctgcccgcaggaacggaccagtcggcggttctcctccaggaaagtctccccaaaagttccagctgcaactggcagctacccgatcgctcaggtgaactatgagctgaacgtgctcggcac

SEQ ID NO: 439361 - DNA, 313 bp, Triticum aestivum
tggctactacggcccgacgatcatcatgggtgcgatggatgagaggtcgctgacgttccacactaaccggcggcggtacggcccctacggggacgagtacggcacctacttctccaccagcttcgccgacgggcgggtcgtggggttccacggccgggagggctggtacatcgactgcatcggcgtgcatgtccagcggggcaaggtgccgtcgtccctcaggcgggccagcagcaggagcccgtcgccggcgccgcggtccgactacgacccgagcgacgtggacgaggaggttccctacgcggtcatggtg

SEQ ID NO: 439362 - DNA, 328 bp, Triticum aestivum
tctttaggatcctgtcaaatgtttgtacaggctttgaagtaaccaacaagtagctcgatcagaaatcattcgcgcctaagaggacgtttatgactggatggtttttgaagactgccaactggaagagctcaccttgcatacacatgaatgcacggagcaaacgtcgcggctcttcattatgcttcattatgctgtggatgcttgtgttacccaacctctggataatatgcagcggcagtattcataaacacgttctcctgccagggttcagtggctcagaaatggattacatcgataacaatggaatatttctgctctctaatggatc

SEQ ID NO: 439363 - DNA, 323 bp, Triticum aestivum
ttctttctcaaccaagccaaggccaagagctcagtgaagcacccgcggccatggagggcaaggaggaggacgtgcggctgggcgcgaaccgctactcggagcaccagcccatcggcacggcggcgcagggcggcggcgcggacgagaaggactacaaggagccgcccccggcccccttcttcgaggccggggagctcacctcctggtccttctaccgggccggcatcgacgagttcctggccaccttcctcttcctctacatctgggtgctcaccacgatgggcgtggtgggcaacccgtcggggtccaagtgcggcacggtc

SEQ ID NO: 439364 - DNA, 221 bp, Triticum aestivum
tcccacgcgttcgcggacgcgtggccggtgaaccctgttgccacgcccaaggcgcagggggtgttccacgtcgacatgatcatgctcgcgcacaaccccggcggcagggagaggcacgagagggagttcgaggccctggccaagggcgccggcttcgccggcatcaagaccacctacatctacgccaacgcattcgccatctagttcaccaagtagatcca

SEQ ID NO: 439365 - DNA, 112 bp, Triticum aestivum
tttttattgccatgaaccacactgatgtcatggtgaccagcacattccaggaaattgccgcaagcaaggatagcgtgggccaatacgagcctcacatggctttcaccctccc

SEQ ID NO: 439366 - DNA, 289 bp, Triticum aestivum
tgtttaagaagaagaagaagaagaagaaggagaagaagaagaagcaagaagaagaagaagaagaagaagaagaagaaggagaagaagaagaagcaagaagatggcggacgaggggaccgccaactgcatcgacatcatgctcgccatgatcctgccgccgctcggcgtcttcttcaagttcgcctgcgggatcgagttctggatctgcttgctgctcaccttcttcggctacctccccggcatcatctacgccgtctgggtcatcaccaagtaggactgcatgcaggag

SEQ ID NO: 439367 - DNA, 225 bp, Triticum aestivum
tcgttcgcgtggggggaactctcgggttccttgggggatccttgatcaagctcatccccatcaaggagtacatgaggctcacctacacccctgtgaagggccctctgaaggaggtggcgcatgcgtacgccgactccgtcgcgccgagggacggcgaccctgcaaaggtccccgacttcctggaggggatggtgtacagcgcgacggagggcagcatgatgaccg

SEQ ID NO: 439368 - DNA, 225 bp, Triticum aestivum
gaggctccttgcgcaactttgggctatctgggcaattatctcgcggagttgactttgaccgattacagctgcctgaaataccacccttcggtggtggcagcctcagcagagttccttgcaagatggacactcgaccaatgatacctggcatggaactgtactctcgagcattacacctgatacaaaagctgcgatattcaaggatgcgtacgcgatctatgggag

SEQ ID NO: 439369 - DNA, 284 bp, Triticum aestivum
tgtcacgcgtgcggcctctctctgtttgctctggcgtccgccgagcccatcctcgtgcgcgcctgcgcccggcccgtgctcgctcgctcgccgactccctcgcctcgatccaccgcgccggcggcatggcggatcagctcaccgacgaccagatcgccgagtgtcaaggaggccttcagcctcttcgacaaggacggagatggttgcatcaccaccaaggagctgggaacagttatgcgttcgctggggcagaacccaacggaggctgagctccaggacatgat

SEQ ID NO: 439370 - DNA, 234 bp, Triticum aestivum
ttcttttagattgttcctgccactgctatccctgagggttggatgggtctggatgttggcccagattccatcaagactttcgcagaagccctggacaccaccaagactgttatctggaacggtcctatgggagtctttgagtttgagaagtttgccgcaggcactgatgcaatcgcgaagcagttggctgagcttactgggaagggtgtcacgaccatcattggtggaggtgac

SEQ ID NO: 439371 - DNA, 235 bp, Triticum aestivum
ttgcttcgcgtccgccgtcacaagacggactggggggaacaacaagagcggcatcatccatggcgtccactcgcgtgctccacctcatcgccctcgtcctcgccgtcgccaccgccgcagatgcggccaccatcaccgtcgtcaaccggtgctcctacacggtgtggccgggcgcgctgccaggcggaggcgtgcgtctcgacccgggccagtcttgggcgctgaacatgcccgc

SEQ ID NO: 439372 - DNA, 226 bp, Triticum aestivum
ttgctaggaccaaaggattcttgccagtggtgtgcatgttgttgtcggcacacctggtcgtgtgttcgatatgttgcgcaggcaatccctccgtccagataacatcaagatgtttgtgttggatgaagctgatgaaatgctttcacgtggtttcaaggatcagatctatgatatcttccagcttcttccatcaaagattcaggttggggtgttctcagcaaccatg

SEQ ID NO: 439373 - DNA, 254 bp, Triticum aestivum
ttgcttattcatgttcgagacattcaatgccccagggatttatgtggctattcaagctgttctttctctatatgccagtggtcgtactacaggtattgtgcttgattctggcgatggtgtgagccatactgtgccgatttatgagggatatgcacttcctcatgctattctgcggctggatcttgcgggccgtgatctgaccgattgcctgatgaagatcctcacagagaggggctattgcttcaccacaactg

SEQ ID NO: 439374 - DNA, 260 bp, Triticum aestivum
tctatggacctaggatgaacatcgatgatggccgtgttgttagtaacttcattgctcaggccattcgtggtgaagcactgactgtccagaagcctggaacacagaccaggagcttctgctacgtcgctgatatggtcaatggtcttatgaagctgatgaatggagacaacaccggacccattaacattgggaacccaggtgaattcaccatgctggaacttgccgagaatgtgaaggagttgatcaacccagaagtgaca

SEQ ID NO: 439375 - DNA, 326 bp, Triticum aestivum
ttagcggctgatcgtggaggcaagccagggcggcgccgacgaggtgcgcgtcgacggcctgcccggcggcgcgagggccttcgagatctgcgccaagttctgctacggcatggtcgtcacgctcaacccgtacaacgtggtcgccgcgcggagcgcggcggagcacctgggcatgacggaggacgtggacaagagcaacctcgtgttcaagatcgaggtgttcctcaactcgggcgtcttccggagctggaaggactgcatcatcgcgctgcagagcaccatcgcgctgctgccgtggtccgaggacctcaggctcgtcgcgcgct

SEQ ID NO: 439376 - DNA, 364 bp, Triticum aestivum
ttgctctcacgcgtgcgcccacgcgtccgttccatggccaagactggtgagaactacaggcttctgtatgacaccaagggtcgcttccgccttcactctgtcagggacgaggatgctaagttcaagctctgcaaggtcaggtctgtccagtttggccagaagggcatcccatacctcaacacctatgatggccgcaccatccgctacccagacccactcatcaaggccaatgacaccatcaagcttgacctggagaccaacaagattgttgacttcatcaagtttgacgtcggcaacgtggtcatggtgactggtgggcgcaacactgggcgtgttggtgtgatcaagaacagggagaagcata

SEQ ID NO: 439377 - DNA, 183 bp, Triticum aestivum
tcttttcgcgtgcgctctccgcgaccttcacggggggccggacgttcctcaagtgcaaccagctgcccgtgctcggcgccagcctccactggacgtaccacgcctggaacggcacggccgacatcgccttccgggcgccgtacggcgccgacgggtgggtcggctggggcatcaaccccagcg

SEQ ID NO: 439378 - DNA, 359 bp, Triticum aestivum
tctcacgcgtccgattctatgtgggtgataaccaaaatatgacttagtggacaagctcttgagttcaagcaactcaatgtccatgcatgggaggcttttgacaaggggcaggatttccatatgcaagcagctccatctcaagctgaactactgtacaagagtttcaagatcaagaaggagaagttgaaatctgaaagcaaggacaaaattatggagaagtatgggaatgctgcatctgacgaaccaatccctcgtgagcttcttcttgggcaaagtgaaaaagagattgagtatgaccggactggtcgcataatcaaaggacaggatgtagctcttgctaagagcaaatatgaagagga

SEQ ID NO: 439379 - DNA, 190 bp, Triticum aestivum
ttatttatggctggcacaagaattctggcgagaggcggatattctgacaaagcttcatcatccaaacgtcgtagccttctatggcgtggtgaaggacgggccgggcggtaccctggcgactctgaccgagttcatggtgaatggttctcttcggcatgtcttgcagcggaaggacaagtgtcctgatctc

SEQ ID NO: 439380 - DNA, 247 bp, Triticum aestivum
ttttcgcgtgggcgcggccacaacctacggagcttgcctgatggcgtgcgcaactgctacacgctccggtccctggtgtccggcctcaagtacctgatccgcgccagcttcctgtatggaaactacgacggcctcaacaggccgcccgcgtcgtttgacctccacatcggcgtcaacttctggaagacggtgaacatttcaacgtggggggcagaccagggaaacactgcagtggtggaagccatcg

SEQ ID NO: 439381 - DNA, 365 bp, Triticum aestivum
tcattttccctgcctccagcaaactcacacatctgaccaccggagctcccaatcccacccgaagcggcagccatggcccccaaggcagacaagaagcccgtcgccgagaacaaggtggagaaggcggcggagaaaacccccgccggcaagaagcccaaggccgagaagcggctgccggcgggcaagactgcgtccaaggaggccggcggcgaggccaagacgaggggccggaagaagggcagcaaggccaagaagagcgtcgagacgtacaagatctacatcttcaaggtgctgaagcaggtccaccccgacatcggcatctcctgcaaggccatgtccatcatgaactccttcatcaacgacat

SEQ ID NO: 439382 - DNA, 290 bp, Triticum aestivum
tctcaaggcctgggctggcaaggtggaggacgaggttattgccaggaaggcgttcctggtgaggtgcaaggccaactctgaggccaccctgggtacctacaagggcgatgccaccctctgcgagggggcctctgagagcctccacgtcaaggactacaagtactgatctgccttcggtgcggtggcctgtttgggtgtcctgcttaccagtattatcgtttggttttcagagtcttgatatatacttcggatatccaacctagtatggaacttgtgctctcaaaatagct

SEQ ID NO: 439383 - DNA, 216 bp, Triticum aestivum
tatcgactgcacactccacccccgcgatgccgctcctcctccccctcctcatgctgctcgccgccggcgcggcgggggcagagtcggcgaccccctcgctgcacattggcgtcaactacggcgccaacgccgacaacctcccctccccgacctccgtcgccaccttcctggtcaccaagaccaccatcgaccgcgtcaagctcttcgacgccaacc

SEQ ID NO: 439384 - DNA, 248 bp, Triticum aestivum
agcgaaagagagagcgagaggagcctcgggcgccatgggattcatcatggagttcgcggagaacctggtcctgcggctgatggaggacccggagcagcgcgacgaggcgcagcgggcgcacgtctaccggatgaaggagcggtgcgagcgcaccaaggccgtctgggcgctcccgctccgcccctacggcttctggaccttcgaccgcttcaactcccagctctcctgggacccccagatcagccagg

SEQ ID NO: 439385 - DNA, 310 bp, Triticum aestivum
ttgctgccacgcgtgcgcgagatctccgcccgggacccgtttctccgccgccaaggcccagcgccgccgccgcccggccctccctgtcgcaggcgacgccggcgccgccatgtgcaagtctggagccctggatctcgcgtctggccttggcgggaagatcgacaaggaacaagtcaaatcggcggtcgacgagtatgagaaatatcatggatactacggagggaaggaggaatcgaggaaatccaactacaccgatatggataataaatattatgatcttgctactagcttctatgagtatggctggggt

SEQ ID NO: 439386 - DNA, 223 bp, Triticum aestivum
ttcttttcacgcgtccgagcagccgccgccagcaggggcgcataggctcgacaaaccctaaccctagtccatagctagcttagcttccttcctctcgatctagctagagccatggcgccgaccaagggcgaggggccggccatcggcatcgacctcggcaccacctactcgtgcgtcggcgtgtggcagcacgaccgcgttgagatcatcgccaacgaccagg

SEQ ID NO: 439387 - DNA, 237 bp, Triticum aestivum
tggtctcaggagttctacatccggcggctgggcgggcggtctatcagctcggagggcgagaggcagcgggtgatccagcgcctgcaagcggcgatcgagcggcgcgcgtccgagggcgtgaggctggagctgcgcatctccgaccgccgcgggctgctggcctacgtgacgcgcgtgttccgggagaacagcctctcggtcacgcacgccgagatcaccacccggggcgacatggcc

SEQ ID NO: 439388 - DNA, 304 bp, Triticum aestivum
gcgtgcgcccacgcgtccggacaagcggtgctgtaaggcgatatccgagctcatcccacaggagattgcacacatcgagaagaggacgggcaagaaggacaaggacaagaagcccgggatcatcgtggtccagggccccaagcctgggaaggccacagacatggcacggatgcgccagatcctgtcgaagctgaagcacacaccaccgccacacatgaagccacctgcaccacccgacgtggcacccgtcgggaaggacggagctccggccgccgctggaaaggacggagctaaggcggcagcg

SEQ ID NO: 439389 - DNA, 339 bp, Triticum aestivum
ttggaacatacatcttcagactttgttgagaaacaggagatagctcgcttcctccctgccctgccctgccctgctctagcaccggcctgagctcgcgcgtggtgttactgctgagtttggccggaatggggcggtcgccgtgctgcgagaaggagcacaccaacaagggggcctggaccaaggaggaggaccagcggctggtcgcctacatcagggccaacggcgagggctgctggcgctcgctgcccaaggcggccggcctgctccgctgcggcaagaagctgcgcctgcgctggatgaactacctgcgtgccgacctcaagcgcggcaacttcaccg

SEQ ID NO: 439390 - DNA, 369 bp, Triticum aestivum
ttttgacgcgtggcggcggcggcgcgttgcacaggagaaggagcaggcggcggcggtgcccgaagaggagaagcacggcgacctagcccgagctcgcaaccatggctaggggtttgaagaagcatctgaagaggctcaatgccccgtctcattggatgcttgacaagcttggtggagcttttgcccccaagccatcatccggtcctcacaaggccagggagtgcctgcctctgatcctcatcctgaggaacagactgaaatatgctctcacctaccgtgaagtgcaatctatccttatgcagcgtcatattatggttgatggaaaggtccgcactgacaagacctaccctgctggtttcatggacatca

SEQ ID NO: 439391 - DNA, 244 bp, Triticum aestivum
tacacacatcatctcctccacctctctcaaccaagccaaggccaagagctcagtgaagcacccgcggccatggagggcaaggaggaggacgtgcggctgggcgcgaaccgctactcggagcaccagcccatcggcacggcggcgcagggcggcggcgcggacgagaaggactacaaggagccgcccccggcccccttcttcgaggccggggagctcacctcctggtccttctaccgggccggca

SEQ ID NO: 439392 - DNA, 297 bp, Triticum aestivum
tgtccatgcaaggtattgtctcaattggagtgacagctgcaaaggtgcttgttgaagatatatcccatgaataccgccgtaggaggaaagaagagactgatgtagctcgaagtaggatagaaacatatgtaaggtcttcactccgtacagcttttgctcaaagaatggaagaagcagattcaaagcgatcatcgaggaaccctaccccagttatgtctatccttgcaaaggacattggtgacctagcaattaaggagaaaaatctgtacagtccaatattgaagacatggcatcccc

SEQ ID NO: 439393 - DNA, 339 bp, Triticum aestivum
tttgtacagggactggtactggaaggcgtacctgccggaggacgcggaccgggaccacccggcgtgcaacccgttcgggccgaacgggcggcggctcaggggcctgccgttcgccaagagcctcatcatcgtgtccgggctggacctcacctgcgaccggcagctgggctacgcggagggcctccgggaggacgggcacgacgtgaagctggtgcaccgcgagaaggccaccatcggcttctacctgctgtccaacacgaaccactaccacgaggtgatggaggagatcgccgagttcgtccgagctaacctcctgtagtacatacaccagcccagtcg

SEQ ID NO: 439394 - DNA, 289 bp, Triticum aestivum
ttgtctggactgtgtagcgtgttgcaggagagaagcccaagctttggcggagccatggcggaggaaacgggggcgacggcggcttcagggccggcggcgggcggagagggcaagatgacgatggtggtcggggtggacgagagcgagcacagctactacgcgctgcagtggacgctcctccacttcttctccccgggccagcagcagcagtaccgcctcgtcgtcgtcacggccaagcccaccgccgcgtccgccgtcggcctcgccggaccaggtgccgcggacgtgc

SEQ ID NO: 439395 - DNA, 293 bp, Triticum aestivum
tcttccagctcaagctcaagaagcttcaccaatctccctagcaagctcaagaagcttcatcagctagattagattagcgcataacattcttggcctctccaatcctctgtctctgtctctactcagctagctaccagatccccggaaaccggagagcgcagatggcaagcagatccgccgagcttctctcgaggatggccgccggcgacggccacggcgagaactcgtcctacttcgacgggtggaaggcgtacgacatgaaccccttccacccgcaggacaaccgcgggggc

SEQ ID NO: 439396 - DNA, 278 bp, Triticum aestivum
  unsure (1)..(278): unsure at all n locations
ngctgaaaaatttgtgattttggacttgctggggccaccttagaaactgattttatgactgagtatgttgtgacaagatggtacagggcaccagagcttctgttgaactcctttgaatatactgcagcaattgatgtgtggtctgtgggctgtatatttatggaactgatggatcggaaacctttgtttccgggaagggaccatgtccatcagctacgcctactaatggagcttattggaacaccaaatgaggccgatttggattttgtaaatgaaaa

SEQ ID NO: 439397 - DNA, 273 bp, Triticum aestivum
tttcgcgttcggcagaacaccccgcaggacttcgtcaacctgcacaaccgcgcccgcgccgtggacggtgtcggcccggtggcgtgggacaacaacgtggccaggtttgcgcaggactgggcggcgcagcgcgccggcgattgccggttccagcactccggcgggccgttcggcgagaacatcttctggggttccgggcagtcgtggacggccgtcgacgcggtgaagctgtgggtggacgagaagcagaactaccatcttgacagcaacacc

SEQ ID NO: 439398 - DNA, 326 bp, Triticum aestivum
tcttccacgcgtccgcccacgcgtccggggggcataattctttcagaagtgggtcccacagcaagtgaagatgcgctgaaccttatttcgtggctttgctcatgggacccacgtaaacggccaaccgcagtggaggttttgcagcatcccttctttcagccatgcttttatgtccccccttcacttcgtttcagatcgaccggatatgcaacaacaccaccatcagttggggctaaaggagctatggaccagaagaatgctaggcgataccctgtggggactttatccaatgggagaccggcagtcaataactcgtacttgagcac

SEQ ID NO: 439399 - DNA, 229 bp, Triticum aestivum
taagccaaggccaagagcccagtgaagcagcggccatggagggcaaggaggaggacgtgcggctgggcgcgaaccgctactcggagcaccagcccatcggcacggcggcgcagggcggcggcgcggacgagaaggactacaaggagccgcccccggcccccttcttcgaggccggggagctcacctcctggtccttctaccgggcggggatcgccgagttcctggccac

SEQ ID NO: 439400 - DNA, 260 bp, Triticum aestivum
gtggcggctttggagggggtagctcgtgaggacgcatacaaagcgtggtgaagatgtggtgcataccatgaaggtttcgttagaagacttgtacaatggtgctaccaagaagctatctttatcacggaatgttctttgtggaaaatgcaagggaaagggatccaagagcggggcaacggctacttgcagtggttgtcgtggtgcaggaatgaggatgataacaagacagatcggacctggcatgatccaacagatgaata

SEQ ID NO: 439401 - DNA, 336 bp, Triticum aestivum
ctgttgttggagctaccggattaccccaagttgaagcaaaatatccagctttgctctttaaacagcagcttgtggatctaattgagaaggtttacggtatgataagtgacagcgtgaagaaggaactaaaccctttacttgaattgtgcatccaggatccacgaacttctcactcaaatctggcaaaaagcaatacaaatggcttgggacaacagaaccaattagcacattggttaagcatcgtgaaagtcctcgccaactatttggatgtattaaaggcgaaccatgtcccatcaattttggtgcataaattgttcgtacagatattttcactga

SEQ ID NO: 439402 - DNA, 358 bp, Triticum aestivum
ctctcgtgacctcctgtttccgcccaccttctccggctccggcgccggcgaacccaccgcggatcgagcgattcctccgatcaggagaggccagccgggaggaagagcacctacgcgggaggagaggagatggggctcacgttcaccaagctgttcagccgcctgttcgcgaagaaggagatgcggatcctgatggtgggtctcgacgccgcgggaaagaccaccatcctctacaagctcaagctcggcgagatcgtcaccaccatccccaccatcgggttcaatgttgaaactgtggagtacaagaacatcagcttcactgtctgggatgtcgggggtcaggacaagatcaggccac

SEQ ID NO: 439403 - DNA, 264 bp, Triticum aestivum
ccctgataccaaagctcatcttcttctccttgaaatctttttgggtccacagatttggaggatgtcttgcaactgcggatcaggctgcagctgcggctcagactgcaagtgcgggaagatgtaccctgatctgacggagcagggcagcgccgccgccgaggtcgccgccgtggtcgtcctcggcgtggcgcctgagaacaaggcgggacagttcgaggtggccgtcgggcagtccggcgagggctgcagctgcggcgacaactg

SEQ ID NO: 439404 - DNA, 279 bp, Triticum aestivum
tgttcacgcgtccgcccacgcgttcgcccacgcgtccgcccacgcgtccgcccacgcgtccgcgcgccgccgcagccatggtgaagtactcgacggatcccgccaatcccaccaagtccgccaaggccatgggccgggacctgcgtgttcatttcaagaacactagggaaacagcgcttgccctgaggaagatgtcgctcaacaaggccaagaggtaccttgaggatgtgttggcacacaagcaagccatccccttccggaggtactgccgtggtgttg

SEQ ID NO: 439405 - DNA, 310 bp, Triticum aestivum
ttagaactggttgaactcccactgcgtcaccctcaacttttcaagtctattggtgtgaagcctccaaagggcatattgctgtttggaccacctggctctggcaagacccttattgcgagggctgttgccaatgagacgggcgcattcttcttcctgatcaatggcccagaaattatgtccaagttagcaggagaaagtgagagcaatctcaggaaggcatttgaagaagcagagaagaatgcaccatcaatcatcttcattgatgagattgattcaatagccccaaagagagagaagaccaatggagaag

SEQ ID NO: 439406 - DNA, 310 bp, Triticum aestivum
tcgtccacgcgtccgctgaagttataaagtggatggagcgctttgattgcattgttgttggccccggccttggaagggactcatttcttatggattgtatcagtaatatcatgaggcatgcacgacaggctaatatcccaactgttgtggatggggatggccttttccttataaccaataacattggtcttgttgaagacaactcacttgccatcttaacaccaaatgtatacgagtacaagcgtcttgtgcagaaggttcttaactgtgaagtaaatgaggaaaatgcttctgagcaactgactgcact

SEQ ID NO: 439407 - DNA, 265 bp, Triticum aestivum
ttctgcgcaacacgcgtccatctccaagaagcggaagctagtggagcagagcaaaccaagcaaggttggatggcgccggcggtgaaggtgtacgggtgggccgtgtcgccgttcgtggcgcgcccactgctgtgcctggaggaggccggcgtcgagtacgagctcgtgtccatgagccgcgcggccggcgaccaccgccagccggacttcctcgcccggaaccccttcggccaggtccccgtcctcgaggacggcgacctcaccc

SEQ ID NO: 439408 - DNA, 283 bp, Triticum aestivum
tttggacgcgtgggcggcaccggcggcgagtccatctacggcgagaagttcgccgacgagaagttcgtccacaagcacaccaagcccgggatcctctccatggccaacgcgggccccaacaccaacggctcccagttcttcatctgcaccgtcccctgcaattggctcgacggcaagcacgtggtcttcggcgaggtcgtcgagggcatggacgtcgtcaagaacatcgagaaggtgggctcccgcagcggcacctgctccaagcaagtcgtcatcgccgact

SEQ ID NO: 439409 - DNA, 186 bp, Triticum aestivum
ttggacgcgtgggcagactcgcgtctccggggcccttgcaccggcaccgcacatagcgcgcgcggtcgagagagatggcgtacgcggcgggctcgccggcggtgccggactggctgaacaagggcgacaacgcgtggcagctgacggcggcgactatggtgggcatccagtccatgccgggcctgg

SEQ ID NO: 439410 - DNA, 161 bp, Triticum aestivum
tctgacgcgtgggtggtggcgctgtgccaggccatcgaccttcgccacctggaggagaacatcaagacctccgtgaagaactgggtgacgcaggtgtcgaagaaggtgctgaccatgaaccccaccggggacctctgcagcgcgcgcttcagcgagaagag

SEQ ID NO: 439411 - DNA, 318 bp, Triticum aestivum
ttcgacggccacggccagtggggccactacgtctccaaggccgtccgggactcgctgccgccgtcgctgctgtgccgctggcaggaggccgtcacgctggcgtcgctcatcgacggcgagaagaagctctgcgactcccagttcgacctctggaagcagtcctacctggccgccgccgctgccgtcgacgaagagctccgccgcaccagccgcctggacgcggtcaacagtggctccactgctctgtccgtcgttaaaaagggtgacacgatggtgatcgcgaacgtgggcgactcccgagccgtcctggggaccacg

SEQ ID NO: 439412 - DNA, 331 bp, Triticum aestivum
tctcgctgtctttttcttcacttccccctcgccttctcctgccctcccctcctgatcggagtctcagccgcggcagccatggcgaagacctaccccgttgtcagcgccgagtaccaggaggccgtcgagaaggccaggcaaaagctccgcgccctcatcgccgagaagaactgctccccgctcatgctccgcctcgcgtggcactccgctgggaccttcgacgtgtcgtccaagacaggcggcccgttcgggacgatgaagaagccggcggagcaggcgcacgccgccaacgcgggcctggacatcgccgtgcggatgctcgagcccatca

SEQ ID NO: 439413 - DNA, 318 bp, Triticum aestivum
ttttcctcccctgcctgccaacccccaatctcccgtcgcagccctcgaatctccccccgagcatcgaccatgtcggcctactgcggcaagtacaaggatgagctcatcaagaacgctgcctacattggcacccctggcaagggtatccttgctgctgatgagtccaccggcaccatcggcaagcgcttcgccagcatcaatgttgagaacgttgaggacaaccgtcgtgccctccgtgagctcctcttctgcacccctggtgccctccagtacctcagcggtgtgatcctgtttgaggagaccctgtaccagagcacc

SEQ ID NO: 439414 - DNA, 409 bp, Triticum aestivum
tttccggtgccggagggcttgcagttcgtgctcaacactttaccggttgacccaagctgcattggggatggtgatggcttcactgctcatgtgaaggagatggcaggtgatacaaacaaccgagatccaaagcaataccgaataagaatgagagggattgatgcaccggagctgaacatggaatatgggaagaagtcaaagaaagggttggtgaagcttattggagagaaatgcgttgagattcatgtgtatgggatggaccactttgatcgatatattggcgacatctactgtgacggcgtctttatccaagaacaaatgctgaaaaggggcttggcctggcacttcaaaaaatatgacaaacgtcctgaattcgcacaatgggagagagaagcaaaaatggcacgtg

SEQ ID NO: 439415 - DNA, 303 bp, Triticum aestivum
ttctcgcgtccgccacgcgtccgcggacgcgtgggcggacgcgtgggtcgcgcttcgctctcagatcccttctcctccgtctcgcccgcgtgttggggtaggagccatggcggaccagctcaccgacgaccagatcgccgagttcaaggaggccttcagcctcttcgacaaggacggagacggctgcatcaccaccaaggagcttggaactgtgatgcgctcgctggggcagaaccccactgaggcagagcttcaggatatgatcaatgaagtggatgctgatggcaatggaacgattgactt

SEQ ID NO: 439416 - DNA, 287 bp, Triticum aestivum
tcttggcttctcctccccactcagtcctgggttcccggcccggttcggttcgttagggtttagtagtggggaagaggaggaagaatggcggacgtcgagtaccgctgcttcgtcggcggcctcgcctgggccaccgacgaccagtccctccagaacgccttctccaagtacggcgacgtcatcgactccaagatcatcactgacagggagacgggccgttcccgcgggttcgggttcgtcaccttcgcgtcggacgaggcgatgcgccaggcgatcgaggccatgaa

SEQ ID NO: 439417 - DNA, 315 bp, Triticum aestivum
tcgtccacgcgtccggcggaggactgccgccgcgcctgatataggatggcgatggccatggaagtgctcgctcgacttgcttgtgtgttctgcgccaccattcttttgcagagcctggcatggccctgcagcaatggagagagaggcttctcctacccccagtctccaaaggccccctccattgtcagcgagaggtacaggactgcctaccacttccagcctcccaggaactggatgaacgatccatgtggaccaatgtactacaatggcgtctaccatgaattctaccagtataaccccgatggcgcctttgac

SEQ ID NO: 439418 - DNA, 301 bp, Triticum aestivum
ttacacatcatctcccccacctctctgccaaagccaagagctcagagaagcaccggccatggagggcaaggaggaggacgtgcgcctgggcgcgaaccgctactcggagcaccagcccatcggcacggcggcgcatggcggcggcgcggacgagaaggactacaaggagccgcccccggcccccttcttcgaggccggggagctcacctcctggttcttttaccgggacggcatcgccgagttcctggccactttcctctttctttacatctcggtgctcaccgtgatgggcgtggtgggc

SEQ ID NO: 439419 - DNA, 338 bp, Triticum aestivum
tcccacgcgtccgcccacgcgttcggctgaggcagaccaggaacggccgccccacggggtcctgggagccgatgcgccgctcctggggatccatctggcggatggacaccagccgcccgttgcaggggcccttctccatgcgcatcaccagcgactccgggaagacattggtggccaacaatgtcatcccgacctactggcggccggacaaagcctactggtccaacgtccagttctattgattttggctcaatcatcagttgcatgcttctccgacggattccgatcgagagtccatgctccacattagcattaaaagaaattaaaaacaacctaac

SEQ ID NO: 439420 - DNA, 259 bp, Triticum aestivum
cctcacgcgtccgcgatggaggggccgtcggtggaggtgccgccgtacttcctttgcccgatctcgctggagatcatgcgggaccccgtcacgctcgccaccggcatcacctacgaccgctgcagcatcgagcgctggctctccgacggccacgccacctgccccatcacgcagcaaaagctcgcggaggccgaccgggaggccacgcccaaccacacgctccgtcgtctcacccaggcctggtgcgctctgcacgccg

SEQ ID NO: 439421 - DNA, 350 bp, Triticum aestivum
ctggctgcatgggtgtgaaggttcttcaggagaagaaagttctggaggttcacgttgagaaggggatgcaacacaaccagaagatcaccttccctggtgaagctgatgaggcgcctgacactgttactggagacattgtatttgtcgtccagcagaaggaacacccgaagttcaagagaaagggcgatgatctcttctatgagcataccatatctctcactgaagctctttgtgggttccaactcgtcctgacccatctggacaacaggcagctgctcattaaatcaaaccctggtgaagttgtcaagcctgattcattcaaggcaatcagcgacgaggggatgccgatg

SEQ ID NO: 439422 - DNA, 370 bp, Triticum aestivum
tatgaccgagatgcacattttggtccagtccaccatggcctcaaagtccaactcctccaactccaactccaactccaactccaacgggggcagcagcaagggcggtaacggcgggggtaacatcgcgtcaaagcagcataatgcatcactgtcagggacaaccacaaggggcagggagttcgaggaccccgagacaaaggcttacatgaaggccaacgccgccaaggctctgtggcacctcgccaagggcaatgcagctatctgcaagagcatcaccgagtcaagggctcttctatgcttcgcggttcttctggaaaagggggaaggcgatgtgcaatacaattctgcgatggctctcatggagatctgc

SEQ ID NO: 439423 - DNA, 301 bp, Triticum aestivum
tctcgcgtccgcacgatctgaaaaaatcgacaaaacatgtcgtcggagaaacaggagacggcgtcggtgcgcgtgctgggcaggtggccgagcccgttcgtgatccgggtgctgatagctcttgggctcaagagcgtggaccacgagctcgtggaggaggccgtgggcaacaagagcgagctgctgctcgcctccaaccccgtgcacaagaagatccccgtgctcctgcaccacggcaggcccgtctccgagtccctcatcatcctccagtatgtcgacgaggcctgggcctcccaagccc

SEQ ID NO: 439424 - DNA, 326 bp, Triticum aestivum
ttctcgtccaatatgcaaggttgctgattttggtttatcaaagatgaaacaagccaccatggtttctggtggaatgagaggaactcttccatggatggccccagaattgttgacaatgagcggcaccaaagtatctgaaaaggtcgatgtctattcttttggtgttgtgatgtgggaaattctcactggtgaggatccatatgatggcatgcactatggaggagttatagggggcattttgagtgacacactgaggccgtcagtgcccacttcatgtaacccggaatggaagaaactcatggagcaatgctggtcaactgagcctg

SEQ ID NO: 439425 - DNA, 250 bp, Triticum aestivum
gtcttaccaattgcagagaggccattctaagctgagtcaaaattgcaacatcatgcagctgtaaatattgtgggtgatggcttcaattggaggaaatatggtcagaagcaagtgaaaagtactgataattctaggagctactatagatgcacaaattcaagttgcttggccaaaaagaaagatgagcattgtcctgatggccgtgttatacaaatcatatatcgaggagcacacagtcatgaaccaccac

SEQ ID NO: 439426 - DNA, 329 bp, Triticum aestivum
tcttgccgtcccgcagggcacctacgcgcgcatcgtgccgcggtcggggctggcgtggaagcactcgatcgacgtgggcgcgggcgtggtggacgccgactaccggggccccgtcggggtcatcctcttcaaccactcggacgccgacttcgccgtgaggcccggggaccgcgtcgcgcagctggtcatcgagaggatcgccacgccggacgtcgccgaggtggacgacctcgacgccaccgtcaggggcgagggcggcttcgggtccaccggcgtctgatggccggccttgacggaaggcgaggcaggtgtgtctatctagatgctga

SEQ ID NO: 439427 - DNA, 378 bp, Triticum aestivum
tctccgtccctcctcgcgcgtcgtgatccatccagcccaggtgattaaggtcgccatgtcggactccgaggaccaccacttcgagtccaaggcggacgcgggggcgtccaagacctaccctatgcaggccggcgccatccggaagggcggcttcctcgtcatcaagaaccgcccctgcaaggtggtggaggtttctacctcgaagactggaaagcatggtcatgctaaatgccactttgttgccttagatatattcaatggtaaaaagcttgaggacattgttccttcatcccacaactgtgatgtgccacatgtggaccgcactgagtatcagctgattgacatatcagaggatggatttgtgagccttcttactga

SEQ ID NO: 439428 - DNA, 274 bp, Triticum aestivum
tcctacgcgtccggatgtcttcagctttggtgtcattttgatggagctggtcacgggacgcagggcgcttgatgacacacagcctgaggatagcatgcacctggttacatggttccggagaatgcagctcaacaatgatacgttccagaaggcaatcgacacaactatcgaccttgatgaggagaccttagccagcgttagcacggtcgcacagctcgcgggtcactgctgtgctagggagccacatcagaggcccgacatgggtcatgccgtc

SEQ ID NO: 439429 - DNA, 241 bp, Triticum aestivum
ctccacgcgtccggcttcttgatcggggttggttgggtgttgtatgagagggagtgagcgggcagcggtgccagcgtcaacgtcggggatgagctgcaacggctgccgcgtgctgcgcaagggctgcaacgacgcctgcgtgctgcgcccctgcctgctctggatcgaggccgccgacgcgcagggccacgccaccctcttcgccgccaagttcttcggacgcgccggcctcatgtccttc

SEQ ID NO: 439430 - DNA, 372 bp, Triticum aestivum
tctctcgccatttgccaacagacctcagatctcgctctcgcctccttgcgcagccgtcgtcgagagcagcaagaaaatggcggcgagcaacctcgagggtgtgctcctggggatgggcaacccccttctcgacatctccgccgtcgtcgacgaggccttcctcgctaagtatgatgtgaagccgaacaatgccattcttgccgaggacaagcacttgcccatgtacgatgagttgtccagcaaggacaatgttgaatatattgctggaggagccacgcagaactctatcagggttgcccaatggatgcttcaaactcctggtgcaacaagttacatgggttgcattggaaaggacaagtatggtgaggagat

SEQ ID NO: 439431 - DNA, 306 bp, Triticum aestivum
tgcactgtttccctcggttcttggaggaacatgtgctattcctggagctttcggttgtggaaaaactgtcattagtcaggcgctctcaaagtattccaattccgacactgtggtgtatgtgggctgtggagaaagaggaaatgagatggctgaggtcctcatggacttcccccaattgacaatgacgttgcctgatggacgtgaagagtcagtcatgaaaagaacaacgcttgtggctaacacctccaacatgcccgtcgccgctcgtgaagcctccatttatacaggaattaccattgctgaata

SEQ ID NO: 439432 - DNA, 331 bp, Triticum aestivum
agatgggagtttagcaatccaactcctttcataaggagccgtgaatttctttggcaagaaggccatacagtttttgcaactaaagaggaggcagatgaagaggtcctccaaatattggaactctacaggagaatatatgaagaatttttagcagttccagtgtccaaagggaggaaaagtgagatggaaaagtttgctggtggactttacacaaccagtgtagaggccttcattccaaatactggccgtggtatacaaggtgcaacttcacattgtcttggtcaaaactttgcaaagatgtttgatatcacttttgagaatgaaaagggtg

SEQ ID NO: 439433 - DNA, 346 bp, Triticum aestivum
ttttctggacctggacatgccggccctgcagtacatgatgagggagtaccctgggaatgaagaggagaagatgagagctgcaattggcaagtttggcctgtcaggaaaggcacaggtgatgccaatgaaaaacctgtctgatgggcagaaggcccgtgtcatttttgcttggctagcatttaggcagccacagatgctgttgcttgatgagccgacaaatcatcttgacattgagaccattgactcacttgctgaggcactgaaggaatgggacggggggttggtcctggtgagccatgacttcaggctgatcaatcaggttgctcaagagatctgggtctgtgag

SEQ ID NO: 439434 - DNA, 379 bp, Triticum aestivum
tggaaatatccctccaggactcagtaattgctccatgctgaaactcctcggcgctggctacaacaacctcaatgggactcttccagacgagctcttcaaagttacctcgttagagcacctctctttgcctagcaatggcttagaaggagctatcaatggcatcagcaagctcacaaatctggtcgcccttgatcttggggggaatgagctcactggcagtattccagagtctattggtgagctgaagagattggaggagctgcatttggaacacaataacatgtcaggggagctgccatcaactctgagcaactgcacatatctcgtaacaattgacctcaagagcaaccagttcattggagaacttacccaggtcaac

SEQ ID NO: 439435 - DNA, 322 bp, Triticum aestivum
ggttctgataaattgtgctctttcaagaccacccctggccgtggaggttacataaaggaagtggtcatctcagatgtagaaatggatggtatccgtgtggccattgaattcataggtaatttatcaagccatccagatgatgattttgatccatctgagctcccggtgattgatcaaatcaccctaaagaatatggtgggaacaaacatctcggttgcaggagttttatcaggaattgacggtgatccatttactgcgatctgcctttccaatctcagtttctcgataactgattcagcctattctactccctggtcttgtt

SEQ ID NO: 439436 - DNA, 184 bp, Triticum aestivum
atgtttgtgcaggagctccgtgttgtgctgccaaaggaggtcgaggctgcccgcagtgctgtggagaatggcaccgctgcgcatcagaaccgtatcaccgagtgccggtcatacccgctttaccggttcgtacgcaaggagcttgggactgagtacttgactggggagaagacacgatctcctg

SEQ ID NO: 439437 - DNA, 311 bp, Triticum aestivum
ttttccccctcccacgccgtctcgtcccagctcgccctccagaggttttagtcttcctccatggcggccctcatcaagctcggaagccttcttaggcagagtgctttggcgagcagtgcctcgaccggctcggctcctgccctgttcaacgctgcccgcttcatgtgcgccggccagcccgctggtggcaataagcttttcgtcggcggtctggcctgggctactgacgatcattcgctgaaggaggcgttccaaagctttggagaggtcgttgaggcacgtgtcatcactgatcgagagactggaaggtc

SEQ ID NO: 439438 - DNA, 312 bp, Triticum aestivum
tattcccccctcccacgccgtctcgtcccagctcgccctccagaggttttagtcttcctccatggcggccctcatcaagctcggaagccttcttaggcagagtgctttggcgagcagtgcctcgaccggctcggctcctgccctgttcaacgctgcccgcttcatgtgcgccggccagcccgctggtggcaataagcttttcgtcggcggtctggcctgggctactgacgatcattcgctgaaggaggcgttccaaagctctggagaggtcgctgaggcacgtgtcatcactgatcgagagactggaaggtc

SEQ ID NO: 439439 - DNA, 324 bp, Triticum aestivum
tttctactggtggcccgggttcccggcggagctggcggcccgggagtacggccggcaggagcgcggcgaccagtgggcgctgcgcgtggcgcaccacgcccccggcatcatacactggtggatggagcagagctggctgcccctgcccacctccaccgtcgacgtgaacaccacctacctgccaaacaagcgcgacgccgagatccgacgaaccctcaccgtcgacggaaccctccggaagaagagggagatggcgacgcaccaggggatccaggagtcgtactacagggacatggccgtcatgttcggcaagtgggagttcga

SEQ ID NO: 439440 - DNA, 245 bp, Triticum aestivum
tctcggacgcgtgggcctcccgcacgcttgtggtccgttctccgccccgcctcgagcagctcagggacgcgcacagccatggcgacggagaccgagaccttcgccttccaggccgagatcaaccaggtcctctcgctcatgatcaacaccttctactccaacaaggagatcttcctccgcgagctcatctgcaactcctccgatgccttggacaagatcaggttcgagagcctcacggacaagag

SEQ ID NO: 439441 - DNA, 299 bp, Triticum aestivum
ttagttcctcctcctagcaagctatatacctacataggacagccatggcccccaccgtgatggcctcgtcggccacctccgtcggtcctttccaggggctcaagtccaccgccggcctccccgtcagccgtcgctccaacggcgctagcctcggcagcgtcagcaacggtggaaggatcaggtgcatgcaggtgtggcccatcgagggcatcaagaagttcgagaccctgtcctacctgccaccgctcagcacggaggccctcctcaagcaggtcgactacctgatccgctccaaatgg

SEQ ID NO: 439442 - DNA, 335 bp, Triticum aestivum
tgtttcttgccgagaagcactaccatgatctcaaggagaggcctttcttcaatggactgtgcgacttcctcagctccggtcccgtgcttgccatggtatgggaaggagagggcgctatcaagcccgggaggaagctgatcggtgccactgacccatcaaaatctgagccaggaaccatcatgggtgaccttgctgttgtcgctggaaggaacatcatccacggcagcgatggccctgagacagccaaggactagatcgcgctctggtctccagcccaaggagctggtctcttacaccagcaacgaggagaagtggatctacggtgtgaactaacc

SEQ ID NO: 439443 - DNA, 394 bp, Triticum aestivum
tgttggcccggggctgctgcaccggcatccagaacctgctggccgaggccaacaacagccccgaccgccgcaccatctgcggctgcctcaagaacgtcgccaacggcgcctccggcgggccctacatcacccgcgccgccgcgctcccctccaagtgcaacgtcgccctcccctacaagatcagccccagcgtcgactgcaactcgatccactgaacgaacctgtcgacgtacgtctgccgtgtgaggagtcccatgtccggagaataaattgctgctactactagtactgaagcttagctaggccttggcggccagatccgtgtcgttctacctagtcgtgtggtgtgtggttttagggtcgatggatctgtgtgtgcacgcagtccatggtg

SEQ ID NO: 439444 - DNA, 457 bp, Triticum aestivum
tttgcttctatggcaatcgcttatgagaagaaatggccattgtaccttagcacaaaaaacacaatccttaagaaatatgatggcaggttcaaggacattttccaggagatctatgaagctggctggaaatccaaatatgaggctgctggaatatggtatgaacatcgtctcattgatgacatggttgcctatgcacttaagagcgaaggaggctatgtttgggcttgcaagaactatgacggagatgtgcagagtgatttcttagctcaaggttttggttctttgggcttgatgacgtcagtattgatgtgccctgatggtaaaaccatcgaagctgaagctgcccatggcacagttacccgccatttccgtgttcaccagaaaggtggtgaaaccagcacaaacagcattgcttcaatctttgcttggacaagaggacttgcacacagggcaaagc

SEQ ID NO: 439445 - DNA, 500 bp, Triticum aestivum
ttgagaaaagtaagcgccgcgcaccgcaatcggaacggaaatcccccgaatccgtcgccggaatccatccatcgagcgatccatccggccggacggcgaggcgggagcaggaggggagcggcggagatggtgagcgccttcttcctcttctgcgggtgcgtggagcaggccaacgtggcggtggtcgagaagtggggccgcttcctccgcctcgccgagccgggcctccacttcttcaaccccttcgccggcgagctcgtcgccgggaccctctccacccgcgtccagtcgctcgacgtcaaggtcgagaccaagaccaaggataatgtgtttgttcagctgatctgtacaattcaataccgggttgttaaggagaatgcagacgatgcattctacgagttgcagaatccccaacagcaaattcagtcctacgtctttgatgtggttcgagccatagttccaagaatggagctggacagtctctttgagcaaaagaatga

SEQ ID NO: 439446 - DNA, 421 bp, Triticum aestivum
ttgagaaaagtaagcgccgcgcaccgcaatcggaacggaaatcccccgaatccgtcgccggaatccatccatcgagcgatccatccggccggacggcgaggcgggagcaggaggggagcggcggagatggtgagcgccttcttcctcttctgcgggtgcgtggagcaggccaacgtggcggtggtcgagaagtggggccgcttcctccgcctcgccgagccgggcctccacttcttcaaccccttcgccggcgagctcgtcgccgggaccctctccacccgcgtccagtcgctcgacgtcaaggtcgagaccaagaccaaggataatgtgtttgttcagctgatctgtacaattcaataccgggttgttaaggagaatgcagacgatgcattctacgagttgcagaatccccaacagcaaa

SEQ ID NO: 439447 - DNA, 419 bp, Triticum aestivum
ttagcacaccagcctcctcagtcctcacagcatcctctcagtccttagcttccttccctcgccgccacccaccaaggaaaggaggatgtcttgctgcggcggcaactgcgggtgcggcgccggctgcaagtgcggcaacggctgcggcgggtgcaagatgttccccgacgtggaggccaccgccggcgccgtcgccatggtcatgcccaccgcctcccacaaggggagctccggcgggttcgagacggccggggagaccggcggctgcgactgcaccacctgcaagtgcggcaccgcgtgcggctgctcctgctgcagctgcaactgagccggcgcccatgaggccggccggcagaggcgagcacgaggatgaggaggacatgcaagcaagcaccatcaccaccagttcaccaccaccc

SEQ ID NO: 439448 - DNA, 374 bp, Triticum aestivum
tttttacgcgtccgagcttgctgacacctacgggagccaggctgctctgggtgatgctaaccaggatgcgatgaagactggtaccttctacggttagaacattctccatacacacccaccatctcttgctgcataggaggaggtaaaggggcacagcaaggtactttgcctgtaccggcaggatgcaccgaccagactgccaagaacttcgacccaacggcgaggagtgacgacggcagctgcctttacaccttttaagcatgccaatttaatatctgatgttttatcctttgtacctaagtaccgcatcgcatccaagcgattgctgggcatgttttgttaatatataaagatattgagtatacctatttggt

SEQ ID NO: 439449 - DNA, 476 bp, Triticum aestivum
ttgtcaccgctcagcacggaggccctcctcaagcaggtggactacctgatccgctccaagtgggtgccttgccttgagttcagcaaggtcgggttcatcttccgtgagcacaatgcgtctcccgggtactacgacggccgctactggacaatgtggaagctgcctatgttcgggtgcaccgacgccacacaggtgatcaacgaggtggaggaggtcaagaaggagtaccctgacgcgtacgtccgcatcatcggattcgacaacatgcgccaggtgcagtgcgtcagcttcattgccttcaagccaccgggctgcgaggagtccggcaaggcctaaacagctcactcaccacgggccacatataaagtgccattgcagttttgtcaactctgacattgctttgggttttccttctccatttgtctttcttacttgttcctaagaatatgtgtatgtccatgttcatgtaacaacat

SEQ ID NO: 439450 - DNA, 361 bp, Triticum aestivum
cccttttgtttttttgctttatttcttaattctttttgcttttataccttctcttctttatctttagttttatctacttatcaatagtatctaccggctcgaactcgaatttgatcgccttccatacttcacaagctgcggctagttcaggactccatttgcaagctgctcggataatttcattaccttcgcgagcaagatcgcgcccttcgttacgagcttgtacacaggcttctaaagccactcgattagctgctgcaccaggtgcatttccccaaggatgtcctaaagttcctccaccaaattgtaatacagaatcgtccccaaagatttcggtcagagctggcatatgccaaacatg

SEQ ID NO: 439451 - DNA, 396 bp, Triticum aestivum
tttgtttacctgatccgctccaagtgggtgccttgcctcgagttcagcaaggttgggttcatcttccgtgagcacaacgcatctcctgggtactacgatggccggtattggacaatgtggaagctgcctatgttcgggtgcactgacgccacacaggtgatcaacgaggtggaggaggtcaagaaggagtaccctgacgcgtatgtccgcatcatcggattcgacaacatgcgtcaggtgcagtgcgtcagcttcatcgccttcaagccaccgggctgcgaggagtccggcaaggcctaaacagttcactcacgacaggccatatataaagtgccattgcagttttgtcaactctgacattgctttgggttttccttctccatttatctttcttat

SEQ ID NO: 439452 - DNA, 310 bp, Triticum aestivum
tttgtttccagagccacgccgtgctggcgctccaggaggccgccgaggcgtacctcgtcgggctcttcgaggacaccaacctctgcgccatccacgccaagcgcgtcaccatcatgcccaaggacatccagctcgcccgccgcatccgcggggagcgcgcatagattgcccaaggaaaagcaatgtagagctgtccgttcgtcgcctctggtttcagatcgtgttagcaataggcaagaggcgacttttattttgttgtagaaaaaactctggttggctacattgttacaatgactcgtttcttatttcg

SEQ ID NO: 439453 - DNA, 289 bp, Triticum aestivum
ttttaatcgaatcctccagtccaaatcaaaacaagggagcgagcatggcgtcgtcctctgctgtgagcaagcgcggcgacgcgggcggcgtcctggctgccatctcgcggtcctcggtggcggcgcacggccgcgaggcggcggcggtggcggggaagctgctgcggagcacggggaaggcggcgtggatcgccgggacgaccttccttgtgctggtcgcgccgctcatcatcgagatggaccgggagcagcagatggtcgacctcgacctccagcagcaggctcttct

SEQ ID NO: 439454 - DNA, 288 bp, Triticum aestivum
ttcttggcagtctggctctctccatcccaatccggacctaccgcccgctctcgcacgccatggacgccacggccaccggcgccaaggggaagaagggcgcggccgggcgcaaggccggcggccccaggaagaagtcggtgacgcggtccgtgaaggcggggctccagttccccgtcggccgcatcgggcggtacctcaagaagggccgctacgcccagcgcgtcgggaccggcgcccccgtctacctcgccgccgtcctcgagtacctcgccgccgagctgctggagc

SEQ ID NO: 439455 - DNA, 447 bp, Triticum aestivum
ttgtgcacactagcacagaatggccaacgcagggttgctccctgcgctcatctccttcctcatcctgcccttctcttccctggccctgacccaggacttctgcgtggccgacctagcctgccccgacacaccggcggggtacccgtgcaagccgggcgtcggcgcgggcgacttctactaccacggcctcgccgccgccggtaacaccaacaacctcatcaaggcggccgtcacaccggccttcgtgggccagttccccggcgtcaacgggctcggcatctccgcagccaggctcgacatcgccgtgggcggcgtcgtgccgctgcacacccacccggccgcctccgagctgctcttcgtcaccgagggcaccatcctcgccggcttcatcagctcctcttccaacaccgtctacaccaagacgctctacatgggcgacatcatggt

SEQ ID NO: 439456 - DNA, 432 bp, Triticum aestivum
tcttttctctctctcacctccggcgaataacacaccagagctcacctctcccctcgcttccccgcgaaaatgtcgactgacgtggctgccgctgacatcccggtgcctcaggtggaggtagccgccgacgctgccgttgacacaccggcggcgaagccggccaaggcgcccaaggcggccaaggccaagaagtccactggcccgaagaagccccgcgtcaccccggcccacccgtcctacgccgagatggtgtcggaggcgatcgccgccctgaaggagaggagcgggtcgagcaccatcgcgatcggcaagttcatcgaggacaagcacaaggcgcacctcccggccaacttccgcaagatcctgctgacccagatcaagaagctcgtcgccgccggcaagctgaccaaggtcaagggctcctacaagctc

SEQ ID NO: 439457 - DNA, 352 bp, Triticum aestivum
ttgtttgtagcccgcgcgctctcgccagcgccgggggcgcctttccccgcccccttcgtcgcgccgcgtgcggccggccaggtgcgcggggttcgtgggcccggcggtggagtcggcgtccccgggcgcgagggcggcgacgctcgcgagcagccgcggcgggaccgactcgtcactggccatctgccgggtgctcaacggcatgtggcagaccagcggcgggtggggccgcatcgaccgcgccgacgccgtcgacgccatgctcgcctacgccgacgccggcctctccaccttcgacatggccgaccactatggaccggcggaggatttatacggcatgttcatcaacaaa

SEQ ID NO: 439458 - DNA, 425 bp, Triticum aestivum
tttttgcaccctgttcttcttacagaggctcctcttaaccctaaggccaacagggagaagatgacacagatcatgtttgagacattcagtgttcctgccatgtatgtcgctattcaagcagtcctttctctatatgctagtgggcgtaccactggtattgtcttggattccggagatggtgtcagtcacacagtcccaatctatgaaggttatgcccttccacacgctatcctacgtcttgatcttgctggtagggatctcactgattccctcatgaagatcctcactgagaggggttactctttcacaaccactgccgagcgggaaattgtccgtgacatcaaggagaagcttgcatatgttgccctcgactacgaacaggagcttgagaccgcgaagagtagctcatcagttgagaagagcta

SEQ ID NO: 439459 - DNA, 484 bp, Triticum aestivum
ttcttcctccttctcctcgggtttgcacagtcgtccaccatgccgaagcagatccacgagatcaaggacttcctgctgacggcgcgccggaaggacgcgcggtcggtgcggatcaagaggaccaaggacgccgtcaagttcaaggtgcgctgctccaggtacctctacacgctctgcgtcttcgacgccgacaaggccaacaagctcaagcagtccctcccaccaggtttgagcgtccaggaggtttaagcatcaagccagacaatgccttttctagtagcgggaatgttctatccatcttgctttagtaactgttagcaggctctccttgtttacccccattaagagagttttgatgtcccaagaatggaatgtaatgttgggagctatgtggttgaacctgtgaggatttttgtgttattttcacttttgctggagaggagatcaattatcttatcctaaattggtttagtatctcactatt

SEQ ID NO: 439460 - DNA, 410 bp, Triticum aestivum
ttcttgcgccgccagctctaaaggaggcggcgtcggccggcgggcgagcgcacgcccaggcccaatcgatcgatcccagctctagaggggagggagcaaccatggcgggggacggggaggacgaggtgccggcgatgggcggagacaagctgatcctgcgggggctgcagttccacggcttccacggcgtgaagcaggaggagaagaagctgggccagaagttcgtggtcgacgtggacgcctggatggacctcgccgccgccggggactccgacgacatcgcccacaccgtcagctacaccgacatctacaggatagccaagggcgtggtggaaggcccgtcgcggaacctcctggagtcggtggcgcagtcgatcgccggcaccacgctgctcgagtttccccagatc

SEQ ID NO: 439461 - DNA, 369 bp, Triticum aestivum
ttcttgcgccgccagctctaaaggaggcggcgtcggccggcgggcgagcgcacgcccaggcccaatcgatcgatcccagctctagaggggagggagcaaccatggcgggggacggggaggacgaggtgccggcgatgggcggagacaagctgatcctgcgggggctgcagttccacggcttccacggcgtgaagcaggaggagaagaagctgggccagaagttcgtggtcgacgtggacgcctggatggacctcgccgccgccggggactccgacgacatcgcccacaccgtcagctacaccgacatctacaggatagccaagggcgtggtggaaggcccgtcgcggaacctcctggagtcggtggcgc

SEQ ID NO: 439462 - DNA, 422 bp, Triticum aestivum
ttcttttcgcgccgccgcccccgtcgttggagcagaagccgtttgcgccgccgcctccgtcgtcgtagcagaagcagggatccccatcaccaacagcccaagaaattaagcatggatacgcaggtgaagctcgcagtggtggtcaaggtgatgggccgcaccgggtccaggggtcaggtgacccaggtgagagtcaagttcctggatgaccagaaccgtctcatcatgaggaacgtcaaggggcctgtccgggagggcgacatcctcaccctgcttgagtctgagcgggaggccaggaggctgcgctaagcactttcttttcacctgactgtcttcggaattgctcatgaaatgatgtgctgttgccttcttactctaccgctttcatcttttgtcttggctatggagatgtaatgagtttc

SEQ ID NO: 439463 - DNA, 446 bp, Triticum aestivum
  unsure (1)..(446): unsure at all n locations
tcccacgcgtccgcccacgcgtccgctcattgcctgttgccacccacccaccggctccaccctccgaatctcggacgcctcagcgccggccgcagggcacgcgagtcgagttgcttccgttccggcggcgggggaagagatggcggcgaacctagaggacgtgccgtcggtggatctcatcaccgaggtgctccgccgcgccaagtgcagctccaagcccgacaagcgcatcatcctcgtcggtccacctggctctggaaagggtacgcagtcgccccttattaaggatgaatactgcttgtgccatttagccactggtgatatgctgagagctgctgttgctgctaagactcctctggggatcaaggctaaggaagctatgaacaagggagagcttgtttcagatgactnggttgttgggattatcgatgaagccatgaagaaac

SEQ ID NO: 439464 - DNA, 437 bp, Triticum aestivum; identical to SEQ ID NO: 436373

SEQ ID NO: 439465 - DNA, 437 bp, Triticum aestivum
ttcttttaaaggccgggagttctcactcgattgcatttgtgagcaaggctgccaaagaagctggtgttgcatcagagtacaaactagcaaagagggtggaagctgttgttggcgtccgccatttatcgaagctggacatgaagctcaacgacgcgcttgcgaaaatcaaggtcgaccccgagacctacacggttactgctgatggagaggtcctgacttgccagccagcagccacggtgccattatctcggaactactttcttttctaggccacccattgcttgagaaattcttggaaggtcaataattcactcaactagcttcgacggtaacttcaagttgcgcatgggagatgtgctgctggctcaaaataaacaattatacatttacatgaaaaaaaatcacacgtatacatattgcaatacttcagttttttg

SEQ ID NO: 439466 - DNA, 432 bp, Triticum aestivum
ttcttcgcaaacccccgagagatcacagcatgttcggcttcggtcaccacggccaccatggccagaacccccctgccaacgctccggccgccggcggcggcaaccagcccaccttcaagatcttctgcaaggccgacgagggctcgtgccattcaacccggagtacctcgacgagtccgtgatgtggacggagagcggcgacgtcggcaagggcttccgctgcattcgcatggtgaacaacatccgcctcaactttgacgccctcaacggcgacaaggaccacggcggcgtgcacgacggcaccaccgtcgtcctctgggagtgggccaagggcgacaaccagagctggaagatcctcccctggggcgaagaggcctacgccggaggcagcgccaacgccccccgcggtggctccacagagcccaccgtgcg

SEQ ID NO: 439467 - DNA, 340 bp, Triticum aestivum
ttgtctagagatatgaatcacttcgccattgggagtgggttgatgaagtcattcctgacgctccgtgggtagtaacagaagagttcttgaacaagcataacatcgattttgttgcacatgattctctgccgtatcatgatgctagtggagctagtaatgatgtctatgaatttgtaaaaaagcttggtaaatttaaggagaccaagcgcacagaaggaatatcaacctcagacattataatgaggattgttaaagattataatgagtatgttatgcgcaatctggccagggggtacagcagaaatgatcttggtgtcagctatgtcaaggaaaaacgact

SEQ ID NO: 439468 - DNA, 307 bp, Triticum aestivum
ttctttccgacttcggcggcgcggccatctggatgggggcccttaataggagaaggtcatggcacccaaggggggcgagaatgcaggtggcagcagctgcagactccaagaacattctcatcatgggaggcaccaggttcatcggcctcttcctgtccaggaaacttgtccaggagggacaccaggtgacattgttcaccagaggaaaggcacccataacccagcagttgccaggtgaatcagatgcagagtatgcagagttctcttccaaggtgctgcatttgaaaggtgataggaaagactttga

SEQ ID NO: 439469 - DNA, 392 bp, Triticum aestivum
ttgtatattgggagtgatcaaagaggaagctgtggttgaagtcccaaaataggatgtttaggagcaagaagtcacgccggatgaggttgtgcatgaagctgcagttggcaagggtttgggtggagctttgaagtttctaaaggagcgagggaccctcaatgagggcaccaattggggaggcagaaccacggacaagaagaaaagcaagcttgttggtattgaggaagaggctcaggacggaaaaaaagaaatccgcatagaaagaatggatgaattcggtcgagtgatgacacccaaggaggcatttagggatctttcgcacaaattccatggcaagggaccaggtaaaatgaagctggaaaaacggcagaagaagtaccaggatgatatga

SEQ ID NO: 439470 - DNA, 305 bp, Triticum aestivum
ttcttgactccactccgagccctgttctcccgggggactcgtctactcctccacctccgtgctgccgccgccccgtcgaccgccgctcgcgggagccctcctcttcctcagcctaggagccgtagcgggttgcgccctctccacccgccgtctccccttcctccgggcaataagctctgctcgaatggagtctacttccacgaccgtaccttccattgttgtgtatgtgacagttccgaatcgggaagcaggcaaaaagctatcaggaagcattatcagtgagaagcttgctgcttgtgtgaaca

SEQ ID NO: 439471 - DNA, 248 bp, Triticum aestivum
cttatcgtgtccgcccacgcgtccgagcagaagctgcagcttcaggttcagcttgttctccatagcaatggctggcactggcagcacctggctcctgctggagcagaagggagctgggccgggagcaaggagctcccacgccatcaccctcgtcggcggcacggtctactccttcggcggagagttcaccccgcgccattccgtggacaacaccatgtacgccttcgacctcaaggcgctattctggt

SEQ ID NO: 439472 - DNA, 137 bp, Triticum aestivum
gtcgttatcacgcccttgcacaagcgagcgagcaaccatgtcttctgcagagccgacgcgagactagagcgtctacatggccaagcttgcggagcaggccgagcgctacgaggagatggtggagttcatggagcgcg

SEQ ID NO: 439473 - DNA, 123 bp, Triticum aestivum
ctgacgattgttccgtcatattgtgggacctgacaggcctggtctttgtgaagcagttgcctaggttcccagcgtcagtgtctgcattacatgtgaacaacctcaatggtgagattctgactg

SEQ ID NO: 439474 - DNA, 144 bp, Triticum aestivum
tcttatgtttgagacacatctcattctgggatggactcggaaaaaagcggtgatggccgcacaagggcttacaaatttgtcgcctactcagcggtcactttctctattgtggctgtgttgagcgtcgtttgcacactaccaatg

SEQ ID NO: 439475 - DNA, 157 bp, Triticum aestivum
tcatgcgtccgtattgatttcctgtcgaagacaatgtaccttgaagatagaactgtgagactccaactctgggatacagctggtcaggaaagattcaggagtttaattccaagctacatcagagactctttagttgctgctattgttttcgatgttg

SEQ ID NO: 439476 - DNA, 173 bp, Triticum aestivum
tccacgcgtccgcccacgcgtccggacagctctggctctacgacagcgagaggaatatcgccgcggggaaagctctcggcctccgcacagccctggttggcaagagggcgaggagcaaggaggcggactacgcgctggagaccatcggcggcctccggcgagccatcccggag

SEQ ID NO: 439477 - DNA, 225 bp, Triticum aestivum
ttctattgttgccaactatgaatatggtttttactggcacttttatcaggatggtaagatagaagctgaagtaaaacttactggaattctgagtttgggagctctgatgcctggggaatcaaggaaatatggtacaactattgctcctagtctgtatgcacctgtccaccagcatttttttgttgcccgtatggacatggctattgattgcaaacctaacgaagc

SEQ ID NO: 439478 - DNA, 175 bp, Triticum aestivum
tttcctacgcgtccggcaagagcctggcacctgagtatgagaaggcggcccaactgttgagcaagcacgacccagcgattgtccttgctaaggttgatgccaacgatgagaagaacaagccgcttgcgggcaagtacgaggtccagggcttccctacccttaagatctttaggaa

SEQ ID NO: 439479 - DNA, 183 bp, Triticum aestivum
tcgctcacgcgtccgggttgtccagagggagtccgagtcgatctcgaggaagaccctcaggaactcggccgagaagtttgagttccatgccgaggtgtccaggctcatggacatcatcatcaactcactctacagcaacaaggacatcttcctgagggagctcattttcaatgcatctgatgc

SEQ ID NO: 439480 - DNA, 238 bp, Triticum aestivum
cctcgtttcactccactcctctgcctgaggtaccaagagcaccagtaaaatggctctccagaacaaggaggtggatgccctggtccagaagatcaccggactccacgccgccatcgccaagctgccgtcgctcagcccgtccccggacgtagacgcgctcttcaccgagctggtcaccgcgtgcgttcccccgagccccgtggacgtgaccaagctcggcccggaggcgcaggagatg

SEQ ID NO: 439481 - DNA, 303 bp, Triticum aestivum
cctacgtgtccgtaaactcgcccccaccccatctagggtttggccctgccaagagacccgcgacccccttaatccttctcccaacccttatctgtatccctctccatggccacggcggcggcggcgaagcggaagccggtgttcgtcaaggtggatcagctcaagcccgtcaccagcggccacacgctcgtcgccaaggtgctcagctccaagaccgtcctccagaaggcccgcgccgctggcggccccggcccagccgccaagcccaccaggatcgccgagtgcctcatcggcgacgagacc

SEQ ID NO: 439482 - DNA, 217 bp, Triticum aestivum
gttgttctgcttgctttgagcagcgcacggtatttactcagcaagttctagaaaaggcactaaataaattggtcgacaatgtaccgattcctcttctttttatgagaacagttattcaagcactcgatgctttcccagctttggttgattttgtcatggggatactttccaggcttgtcaataagcagatctggaaaatgccaaagctgtgggttgg

SEQ ID NO: 439483 - DNA, 374 bp, Triticum aestivum
tgggtaggagccacccccctccccattcctacccacccagcatctcggcagtaactctcctccctcccacgcggcgcgcccgctcgccgcgcgcgcgaatctcggtcgcaactggtgtactgttgaaggaaggaaaaatcatcctatttgtcatggcgggaactgactcctcggcgtcatcgagacaaagcagtttcaactcattagcaaaggacctagaacttcctttggagcaagggtgcctcaccatcgttgtacttggggcttctggagatcttgccaagaagaaaacgttcccggcactctaccacctttttgagcaggggttcttacaatctggtgaagtgcatatagtggggtatgcgagaacaaat

SEQ ID NO: 439484 - DNA, 172 bp, Triticum aestivum
gttggtgtgtgaagaacccagagtggctggtggggattggtgtctgcactcatcttggttgcattccccttcccaactatggagactttggtggctggttctgcccgtgccatggctcccactatgacatcctatggcagaatccacaagggccctgccccgtacaaccttg

SEQ ID NO: 439485 - DNA, 229 bp, Triticum aestivum
cgtcggttcggcttccagtgggacaccaagaagttctgctggtacctctacttcatgtacttcactctgctctacttcacctactacggcatgctcgccgtggggctcacccccagctacaacatcgcctccatcgtctcctccttcttctacggcgtgtggaacctcttctcgggcttcgtcatctcacagccgacaatgccggtgtggtggaggtggtattcgtggg

SEQ ID NO: 439486 - DNA, 195 bp, Triticum aestivum
atttatatggcagcagctgcttctccgtcctgaatcggatgacttagctcaactttctcagattgaaaccgaaaagcttctagctcaattggttgagaccgaaatgaacaaacgtttgaaggaaggcacttacaaaggaaagaagttcaatgcaatctgtcacttctttggctaccaagctaggggtgcaatgcc

SEQ ID NO: 439487 - DNA, 211 bp, Triticum aestivum
ggtcattgctagacgagaatgctagacttcttgtccaagcaatgattgaagcaatgctgtttgtgctggtttcaccacctttctggtgaacacggaaatggcgggtaactgtgccatgggcagcttcagcttcgatggttttaccattagggcacatcaatactgacgtcatcaagcccaaagagccaaaaccttgagctaagaaatcact

SEQ ID NO: 439488 - DNA, 239 bp, Triticum aestivum
gctatgttaaagcctctatgagcagaaacctgaagagccagctcctgccctgccatcggtggctgaaagcactacagctaggagcaaatctcatacttcccgatttgaatatgtggaaaatgtaccttctgctgggagcagctctgcggaaaaccaggcatttgggcatgttgcgcccccaaagtcttcaaactttttcggtgaatatgggatggacagtggatatcacaagaaatcta

SEQ ID NO: 439489 - DNA, 215 bp, Triticum aestivum
ttcatctgtgcagcagcaggaaacaaccggggatgaaactcaagttccagtcgaggctgctgccgaaactgacgctccagctcaagaagaaaaacgggaggtggagaaagacaaccccaagaaccgaatcgacttccttggattcttcgccatgatctttgagaggttctgctccccagctgacaagaagaaagactagttccgtgtcagctgcc

SEQ ID NO: 439490 - DNA, 286 bp, Triticum aestivum
tttgctagataatctcgtggaggatttgttgagtgattttgaatacgaactccagcctccatatttgttgtatcggaatgccacacaggaagtaaatggcatttggttttataaccaacaggagtgcgaagctgttgctagtctgtttggaaggatactgaatgcttatgcgaaagtgcccccaaagccgaaagtgccatccataaaaagtgagtttgaggaattagaggctgttcctacatcctctgccatagatggtccccttgaacctcctccatcatctacc

SEQ ID NO: 439491 - DNA, 211 bp, Triticum aestivum
tcgctcgcgtccgcaagtgcaagtcctcccaaatccacgcatccctcgcccgcgtctcctcccgttgccgcagcagcaagagaatgggcagcgtcgacgcctccgagacgacggtcaccgggtgggccgccagggacgccaccggccacctctccccctacagatacaccctcaggaaaacaggacctgaagacgtggtgttgaaggttaa

SEQ ID NO: 439492 - DNA, 232 bp, Triticum aestivum
ttgctgacgcgtgggtgcactccgcacgtcgccgcaggggcttggccctcagattgaggtcatccgtgctgccaccaagtcaatcgagcgggagatcaattccgtcaacgacaatccactcatcgatgtctcgcgcggcaaagctatccatggtggcaacttccagggcacgcccatcggtgtgttcatggacaacaccaggcttgccattgctgcaatcggcaagctcatg

SEQ ID NO: 439493 - DNA, 205 bp, Triticum aestivum
tgtaattactttactcggtagaccgacgcagagaagcatatgctaccatactgcattcagcaagcgagtatgtctgtggcgcaattgcagcagctcaaagcattcgtcaagcaggatcaacaagggactttgttattcttgttgatgacaccataagtgaccatcaccggaagggccttgaatctgcgggttggaaggtgagaat

SEQ ID NO: 439494 - DNA, 139 bp, Triticum aestivum
tttgttacgcgtccgcctcaactggctgcagtgcgcgccctgcctcgactgcttccaccagaccggccccgtcttcgaccccgccgcctccgcctcctaccgcaacgtcacctgcggcgacgcgcgctgcggtctcgtc

SEQ ID NO: 439495 - DNA, 265 bp, Triticum aestivum
ttgctgtccctccccatccccaagtcataaacccaaggcggacttgccttcctcctccccaactactcctcacacacacaatggtgaaggctgtggctgtgcttaccggcagtgagggtgtcaagggcaccatcttcttcacccaggagggagagggcccgaccaccgtgacgggaagtgtcaccggactcaaggaagggctccacggcttccatgtgcacgctcttggcgacaccaccaatggctgcatgtcaactggaccaca

SEQ ID NO: 439496 - DNA, 268 bp, Triticum aestivum
catgagcttaagttgctcgctgacgacgtattctcattttggcttaaccgggattcggatgcactttctggtggtgagctcgtctttggtggcatggacccggatcactataagggaaaccacacctatgtccccgtgagccgcaaaggttactggcagtttaacatgggcgatctcttgattgatggccactctactggcttctgtgccaaaggctgtgctgctattgtggactctgggactttcctgctggctggcccaacagcta

SEQ ID NO: 439497 - DNA, 235 bp, Triticum aestivum
ttgatctctacatgaagcgctacatcaagaacctctctgtcaagcttgaaggggatgacctagatgctttcaagaagaatgttgagtccgccacaaagtatcttcttagcaagctcaaggaccttcagttctttgttggcgagagcatgcatgatgatggcggcgtggtgttcgcctactacaaggagggagctgctgatccaacttttctgtactttgcacatgggctgaaaga

SEQ ID NO: 439498 - DNA, 349 bp, Triticum aestivum
tcgctttggccagttcgtcgacgcggctttcgggggggcgtttttgacgcgggacctacgttccgacgaggtgatcgccaggatcgccgagggagacaaggccgacatcgacctcgccgtgaaggcctgccgcgaggccttcgacaacggcccatggcccataatgcccggctgtgcaagggcccggatcatgcacaagttcgcggacctggtcgaccagcacgtcgaggagctggcggtgctggacacggtggacgccggcaagctctttatgatgggtaagatgatggacatccccggaggcgccaacttgctccggtactacgccggcgccgccgacaagatccac

SEQ ID NO: 439499 - DNA, 394 bp, Triticum aestivum
ttgctacgcgtccgggaacgaggccgtcgatctggagaacattcccatcgaggaggtgttcgagcagctgaaatgcacgcgccaggggctcacctccgatgagggggcgcagcgtgttgaaatcttcggcctcaacaagctcgaagagaagaaggagagcaaagtcctcaagttcctgggattcatgtggaaccccctctcctgggtcatggagatggccgccatcatggccattgcgctggccaacggtggtgggaagcccccggattggcaggatttcgttggaatcatcgttctcctggtcatcaactccaccatcttcttcattgaagagaacaacgccggcaacgccgctgctgcgctcatggccaaccttgcgcccaagacaaaggtg

SEQ ID NO: 439500 - DNA, 437 bp, Triticum aestivum
ttgataaacgccggctctcccccgctccgcctccctgcctcattctcccccgctccgcgccctccgccgccagatcccttcgagccccccgcgcccccgcgtcgaagatgagggagtgcatctcgatccacatcgggcaggccggaatccaggtcggcaacgcgtgctgggaactttactgcctcgagcacggcatccagcctgacggtcagacgaacggtgacaagaccatcggaggtggtgatgacgccttcaacaccttcttcagcgagaccggagccggcaagtacgtgccccgcgcggtcttcgtcgacctcgagcccaccgtgatcgacgaggtccgcaccagcgcctaccgtcagctcttccaccccgagcagctcatcagcggtaaggaggacgcggccaataacttcgcccgtggtcactacacaatc

SEQ ID NO: 439501 - DNA, 310 bp, Triticum aestivum
tctgttcgcatcatcatccctgataccaaaggggatgtttttctccttgaaatctttttgggtccacagatttggaggatgtcttgcaactgcggatcaggctgcagctgcggctcagactgcaagtgcgggaagatgtaccctgatctgacggagcagggcagcgccgccgccgaggtcgctcgccgtggtcgtcctcggcgtggcgcctgagaacaaggcgggacagttcgaggtggccgtcgggcagtccggcgagggctgcagctgcggcgacaactgcaagtgcaacccctgcaactgttaagct

SEQ ID NO: 439502 - DNA, 397 bp, Triticum aestivum
ttgctcacgcgtccgcccacgcgtccgggtaagggagcctgctatggcgtctgctgaaacaggtggcgacaagtaccggtcgttcatggacggtgagggcgagaagaacaccgtgtggaggcatggagtccctcccaacttcgacgtggtgaacaagctcttcgaggaagagaggactaaggaatgggcggaggggagtgtggaagagaaggtgcagcggttgctcaagacatgggagatggagatgttccacaagttgcggcccgaggaccagaagagcgtgcactcccagggattcaccagcagcaccaacgggatgaagcctctgacccgaaaggagtggaccgccatcggtggctacaacgcgttcctggcaaccaagctgccgttggagcac

SEQ ID NO: 439503 - DNA, 357 bp, Triticum aestivum
tcgtacagaagcgtctggctgcctccgtgctgaagggctgtttgcgcatggtctggcttgtaccccaacgagtcgagcgagatcggcctcgccaactcgcgccagaacatccgcaagttggtgaaggatggtttcgacatcaagaagccgcaggtgatccactcgcgcgctcgtttcaccaagcgtaacgaggccaagcgcaagggccgccacaccggcatcggtaagcgccgtggtaccgtcaacgcgcgtcttccgttcaaggacatctggatgcgccgaatgcgtgtgcttccgtcgtttctccgcaagtaccgtgacgccaagaagatcgactcgcacatttaccacgagctg

SEQ ID NO: 439504 - DNA, 428 bp, Triticum aestivum
gtcctttttcgtgtgcgcgctcttcgcgttcgggatcccgtacctgtcggccctgtggatctggctgggcttctccaccatcttcagcctcacctacatctttgcagcctgcgtgctgttgctcaaggacggcttccgcaatccgcctcgggactacagcatccaaggagacccgttcagcagggtgttcaccaccatcggcgcggcggcgagcctggtgttcgcctacaacaccggcatgctgccggagatccaggccaccgtccaggcgcccgtggtgaagaacatggagaaggcgctgtggttccagttcaccgccggctccctgcccctttacgccatcatagtcatcggctactgggcctacggcaaccagaccaccacctacctgcttcacaacgtcactgggcccctgtggatcaaggcag

SEQ ID NO: 439505 - DNA, 396 bp, Triticum aestivum
cagcgcgtccggggcgttggagggggccaactacctggccacgggcaagatggaggtgcatctccgagcagcagctggtcgactgcgaccatgagtgcgacccaggagaacctgattcatgcgatgctggatgcaacggtgggttgatgacttcagccttcagctatctgctgaaatctgctggccttgagagagaaaaggattacccttacaccgggaaggacggtacctgcaaatttgagaagtccaagggtgctgcttcagttcaaaacttcagcgtagtcgctgttgatgaagaacagattgctgctaaccttgtgaaatacggaccgctggccatcggtatcaacgccgtatacatgcagacatacattggcggagtgtcatgcccataca

SEQ ID NO: 439506 - DNA, 368 bp, Triticum aestivum
tcggttagcaccatcaatggcgatggcggccatgggggccttccccctccttcccctcgcgctcctgctcgtcgtggcgcacgcgcggctgcagcccaccatccggctgccgtcggacgacggctccgtcgggaccaggtgggccgtcctcgtcgccggctccaacgggtactacaactaccgccaccaggcggatatttgccatgcctaccaaatattgaagaagggtggtctcaaggatgagaacatcatcgtcttcatgtacgatgacattgcgcacaacctggagaacccgaggccgggcgtcatcatcaaccacccccagggtggagatgtctatgctggggtccctaaggactacactggga

SEQ ID NO: 439507 - DNA, 474 bp, Triticum aestivum
tcttaccgcccacctcctctcccgcagcctcgccgccgccaggacgctctccgccgccgccggttactcctcctcctcctcttccgtcaagatggcgcgctcggcgctggacgaggtgaccgacaccggcgccttcgaccggacgccgtccaccttccggagcttcgtgtccagggacgcctccgcccgcttccccgcggtggcgggcaggtaccacctctacgtctcctacgcctgcccctgggcgtcccgctgcctcgcctacctcaagctcaagggcctcgaccacgccatcagcttctcgtcggtgaagcccatcttcgagcggaccagggagtccgacgaccacctggggggggtgttcccggccaccgccgacgaggtgcccggcgccagccccgaccccttcaacggcgccaagagcgtcagggatctgtacgagatggcgagcaccaactacaccggcaaaccgac

SEQ ID NO: 439508 - DNA, 384 bp, Triticum aestivum
ttcgttccctgccgcgcctcggcaccacgctgcactacaactacacggccgagggcaactcggtcgccgtggcgttccgcgcgccgcagacgagcaaggccggcgggtgggtggcgtgggggctcaaccccaacggcacgggcatggtgggcacgcaggccgtggtggcgttccggcattccaacggcagcctcgtcgcgtacccgacgatgctggacagctacgcgccgtccatggcgcccgcggacggtgccgagctggcgttccccgtgtcggacgtggcggccgagtacgccaagaacggcaaggagatggtcgtgtacgcgacggtcgcgctgcccgggaaggggagcaagttcacccacgtctggcagcaggggggct

SEQ ID NO: 439509 - DNA, 381 bp, Triticum aestivum
tctgtgtgacgtcacaccgctctcgcaggggggggagattgccggaggtgtcatgtccgtgcttatcccaaggaacacgacaatccccaccaagaaggagcaggtcttctccacctactctgacaaccagcccggcgtgctcatccaggtatatgagggcgagagggcgaggaccaaggacaacaacctgctcggcaagttcgagctctccgggatcccaccggcgcccaggggtgtcccccagatcaccgtgtgctttgacattgatgccaatggtatcctgaacgtctctgcggaggacaagaccaccgggcagaagaacaagatcacaattaccaacgacaaggggcggctgagcaaggaggacatcgagaagatggt

SEQ ID NO: 439510 - DNA, 458 bp, Triticum aestivum
ttgttacgcgtccgctccaccctctccagcgcatcgcctacctcaacatgtcgacctacccgatcgtcacggtgttcatcctggcctacaacctcttccccgtcctctggctcttctcagagcagttctacatccagaggccgttcggcacgtacatcatgtacctcgtcgccgtcatatccatcattcacgtgatcggcatgttcgaggtgaaatgggcggggatcacgctgctcgactggtgccgcaacgagcagttctacatgatcggggccacgggcgtgtacccgacggcggtgctttacatggcgctcaagctcgtcaccgggaaggggatatacttcaggctcacgtccaagcagacggacgcctgctccaatgacaagttcgccgacctgtacaccgtgcggtgggtgccgctgctgctcccgaccatcgtggtgctcgtcgtgaacgtc

SEQ ID NO: 439511 - DNA, 376 bp, Triticum aestivum
ttgctcacgcgtccggggcaccagttcaggacactgggccgctttccagctgccagatcttcagccccaggagctccgaagcagtctctccaatggcggtcaaggtctatgtcgtgtactactccatgtatggacatgtcgctaaactagctgatgagatcaagaaaggagtgtcatcagttgaaggtgtcgaagctaaaatatggcaggtccctgaaactctccccgaggaagtacttggaaagatgggcgcgcctcctaagcttgatgccccaatcatcacaccacaagaacttgcggaggcagatgggatcctctttggtttccctacaaggtttggcatgatggctgcgtaaatgaaggcattctttgacgc

SEQ ID NO: 439512 - DNA, 222 bp, Triticum aestivum
cgggtcttgaatatctccataataattgattaagaaccgtactccacagggacatcaagccaggtaatgggatgctggatatggacttcactgctaaactgtgtgacttctgtttggtgacacagcttacacgtgccgcaacctcacgctcaacagataacattattggaacactaggctacatggacccattataccagcagaacggccaggttactaaag

SEQ ID NO: 439513 - DNA, 370 bp, Triticum aestivum
cttgtttaccggctcgccgacgtcgaccgctccgcccgcaagaagaacagcctcaggttggatgactgggtgctgtgccggatctacaacaagaaaggcgcctcggagaggccgagcgccggtgaccggaccgcgagcgcgagccccgggcacgcggtcgtcggatcgccgccggagcagaagccggccctgctgccgccatacgcgccgcagccgttctcggacctggcggcgtactacgaggtgaggccgtcggactcgatgccgcgggcgcacgccgactcgagctgctcggagcacgtgctgacggcgtcgtgcgagcggccggaggtgcagagccagcccaagatctccgagtgggagcgcacgt

SEQ ID NO: 439514 - DNA, 392 bp, Triticum aestivum
tcgatcccatggacgcggctcagtcaaaatgggggttcctaatgcaggtgttcaagatgccaccggataccaaccggacaaagctcttcccaccggccaatttcaagatctctggcggctcatcgctgaacccagactatagctgtggccagccagtgcctgtcagccccaccgggttccctaatcccagcgggctcgactctacaacgctggcggttgcgacatggcaggtggtgtgcaacattaccacggccaagggggccaagcccaagtgttgtgtcaccttctcggctcactacaatgactcagtcattccctgcaacacctgtgcatgcggttgttctgtgaaccgccggggtcctacctgcagcacgactgctccatccatgatc

SEQ ID NO: 439515 - DNA, 319 bp, Triticum aestivum
cgttcgatttaacgcggcggcggcagcagcggcagggcaggatgtagataggagtatcaccaccaccgtgcaagaaatggcggtcgagactttcctcttcacctctgagtctgcgaacgagggccaccctgacaagctctgcgaccaggtctctgacgctgtgcttgacgcgtgcctcgcccaagacgctgacagcaaggttgcctgtgagacatgcaccaagaccaacatggtcatggtttttggtgagatcaccaccaaagccacggttgactatgagaagattgggcgtgacacctgccgcaacattggcttcatc

SEQ ID NO: 439516 - DNA, 265 bp, Triticum aestivum
gtctattgccgggtcgaagaagctgatctacttcgggccgatggcggaggccccgccgttcgacctggaggacctgttgcgcgcgtcggcggaggtgctgggcaagggcgcgttcggcacggcgtacaaggcggtgatggagagcggcgcggcggtggccgtgaagcggctcaaggacgtggacctccccgagccggagttccgcgagcggatcgcggacatcggtgccgtgcagcacgagctggtggtgccccttcgagcctac

SEQ ID NO: 439517 - DNA, 360 bp, Triticum aestivum
ctcacgtgtccgcccacgcgtccgtcacgcgtccggagcaaagcagttgaatatgataactttattgagtgttgccttacagtcaagggtctgactgagaagttcaaggagaaggacacagcttattccgggtctgcaactttcagttacgaggcattcatgttgactgtgctccctttcatcatcgcatgatgactccgcagttcaatacaaagactgagctttgagtgtgttgttccatgtgtcgaaacgtttttccatcggaggtgtagtttgtctgaattcgagtgatgtcgctgcgttcctgataaggtgataccctggagattggaaactgcctatggatggtttggaactctg

SEQ ID NO: 439518 - DNA, 300 bp, Triticum aestivum
tcgtttaccctagcgccgccgccgccagcaccaccgccgtacttgcaaaccgagagacagctgctatggccggcaagggcgagggtcccgccatcgggatcgatctcggcacgacctactcctgcgtcggcgtgtggcagcatgaccgagttgagatcatcgccaacgaccagggcaaccgcaccaccccctcctacgtcgccttcaccgactccgagaggctcatcggcgatgcggccaagaaccaggtcgccatgaacccggtcaacacggtcttcgatgcaaagcgtcttattggca

SEQ ID NO: 439519 - DNA, 271 bp, Triticum aestivum
ttggtatcttgtccagagctttgcagtcaccggaggctctattggtacaaaatgccatcttatttctcaaagtcattggagcattcgatcagaatgaagagttcacagttctaggaaagcccctgtctatgcttccagttgagcctaacataggcaagatgctgatttgtggggctatatttaattgccttgatcccatattaaccatctgttgcatggacttatcggaagagatccattcatgacaccatttgacaagaaggatcttgcg

SEQ ID NO: 439520 - DNA, 399 bp, Triticum aestivum
tttgttcgattgcagttcatacatgctgatttaggcggtccaattgctgttaacagaatattcgcagaaaatgcatttgatgccgtcatgcacttcgctgccgtagcgtatgtgggtgagagcacgcttgagcctctgaggtactatcataacatcactgcaaacactttggttgtgctagaagccatggcgacgcacaatgttaaaaccctgatctactctagcacatgtgccacctacggggaacccgagaagatgcctatcactgaagaaactccccagtttcctataaacccatatggcaaggccaagaaaatggcagaggatatcattttggacttctccaagtcgaggaaatcagacatgtcggtgatgatcctgagatacttcaacgtcatc

SEQ ID NO: 439521 - DNA, 468 bp, Triticum aestivum
gaaaaaaggccacggttttatgatgctcaggcgtgaattctttaatgcggttggttatcttaatcagaatgtcccagaagaaaggaaactgagattcatccactgggattttcataaatttgcgaaaagcaagtccgcaaatgtgctgggtgttttaggaggtgtggcgagtgaagcactggaccttactggattttactacagtgggaagccaaaagttcagaaaagaaggtctatccagcttagtcgaactagcactgcaagggatgttgaaataagagctagttctggagaccttccgagactctctagcaatgctgatgcacttggttctatagcttctcaggatatgagaaaagaggatagcaaacatgagcctcttggtgatgctccttgttatcaaactggagttcttcgtacgaattgcatagactgcctggatcgcacaaatgtcgcacagtatgctta

SEQ ID NO: 439522 - DNA, 429 bp, Triticum aestivum
ttgtgacgaggaaaaatacactgcagataagagagggaggggcgagcgagagaggcagggagaggcggcgcgccgagcaggccagcccacaccccgcccgcggccatggccggcgccgacctcaaccggagcttcattaaggacgtgaagcgcatcatcatcaaggtgggcactgcagttatcaccagaaatgatggaagactggctttgggcaggattggagccctgtgcgagcaggtgaaagatcttaatgctcaaggatatgaggtgattatggtcacctcaggcgctgttggtgtggggcgacagcggctcaggtaccggaagcttgtcaatagcagctttgctgatctgcaaaagccgcagatggagctggatgggaaggcatgcgctgctgttggtcagagtggtctgatggcactctatgac

SEQ ID NO: 439523 - DNA, 338 bp, Triticum aestivum
tttctgtgcagtcttgatcaacccttggatgttccatacaggcctttttgtgctgaagccttctatggatggttttaagaacatgctacatgagctagctgatgggcgtgaaaacccagatggtgcagatcagggcttgcttgctagctatttgccagacttgcttgatcagccaatgttccatacaccaggtaatggcaccaaacttgatggaaattatcgccttcctctaggctatcagatggatgcatcttatttttatttgaagctccggtggagtattgcgtgtggaccgaatagtgtggatacatttccaagtgctccatggatgaagccat

SEQ ID NO: 439524 - DNA, 404 bp, Triticum aestivum
ttgaaagataccagctataacaggatcaagagggtggtttccgaggagttgaagctgtatttccggcctgagttcttgaacagattggatgagatgattgtgttccggcagttgacaaagttggaggtgaaagagatcgctgatattatgctcaaggaggtgtttgataggctcaaggcaaaggaaatcgacctccaggtaacagagaagttccgggatagggttgttgatgaaggttacaacccgagctacggtgccaggcctctgcgacgcgccattatgaggcttttggaagacagtctggctgaaaagatgctggctggcgaggtcaaggaaggtgattctgctattgttgatgtggattcggatggtaaggtggtagttctcaacagcgggggtggtat

SEQ ID NO: 439525 - DNA, 396 bp, Triticum aestivum
tttcgatggcaagatcaggctctactccaggagcttgatgcggatggccaagacggtcttcccggggcttgggtcgccgatcacgcatgtggatgttacttatgacgggaagtggatcctgggcaccacagacacatacttggttttgatctgcaccatcttcaaggacaaggatggcaaggagaagaccgggttcagtgggcgtatgggaagcaggatcgccgcgccgaggttgctgaagctcagtccgcttgattcaatcttggctgggaatgacaacaaattccatggtggacaattttcatgggtaacggagaacgggaagcaagaaaagcatctctcgcgacagtcggcaagttcagcctcatatggaacttccaaaaggtgaaggacagc

SEQ ID NO: 439526 - DNA, 464 bp, Triticum aestivum
ttttgtcgcgtgggagcagagcaccctcaaggcctggtccggcaagacggagaatgaggagaaggccagggcggcgttcctggtgaggtgcaaggccaactctgaggccaccctcgggacctacaagggcgacgccacccttgccgagggcgcctcggagagcctccatgtcaaggactacaagtactgatctgccccccgctggatggtttgggcattcctgcttactacctccgtctgaaaataagtgtctgacacttatttttggacggagtagtatctgtttggtttcatagtcttgatatttttaaatatcaatccttgtttttaataatataagcttctacttatagttaatttttgacgttgaatcccctgtaatacatttgctgagcagaatgtttttgctctaagcggcattgtattttttctgcttacaatgaaatgaaatggtgaaccccccc

SEQ ID NO: 439527 - DNA, 410 bp, Triticum aestivum
ttattctttgttcctggccagaagaaggatctatatgtgaagagtgtccagcggactgttatctggatgggaaagaagcaagagtctgttgaggatgttccctgtggtaacaccgttgctttggttggtttggatcagttcatcaccaagaatgcaaccctgacaaacgagaaggaagttgatgcctgcccaatcagggcaatgaagttctctgtgtcccctgttgtacgtgttgctgttcagtgcaaggtggcttctgatcttcctaagcttgttgagggtttgaagcgtctggccaagtctgatcctatggttctctgtaccattgaagagtctggtgagcatatcatcgctggagccggagagcttcatcttgaaatctgcttgaaggatctgcaggatgacttcat

SEQ ID NO: 439528 - DNA, 336 bp, Triticum aestivum
tgtataagaagaagaagaagaagaagaaggagagagagagttagagagagtgtgagagagagagagagagagagagagagaaggaaggaagaagatggcggacgaggggaccgccaactgcatcgacatcatcctcgccatcatcctgccgccgctcggcgtcttcttcaagttcgcctgcgggatcgagttctggatctgcttgctgctcaccttcttcggctacctccccggcatcatctacgccgtctgggtcatcaccaagtaggactgcatgcaggaggggctcctctgcctctgccgctaggtgatccatggcgaacttgttctgtgtct

SEQ ID NO: 439529 - DNA, 386 bp, Triticum aestivum
ttgacgcgtggtccccaccttcttccagcactcacgagtcacagcccaccagcgaagcccccaaccccgatcagcctcagcagcgatggcccccaaggcggagaagaagccggcggcgaagaagcccgcggaggaggagccgacgacggagaaggccgagaaggccccggcggcgaagaagcccaaggccgagaagcggctgccggcgggcaagaccgcctccaaggagggcggcgagaagaggggccgcaagaagggcaagaagagcgtcgagacctacaagatatacatcttcaaggttctcaagcaggtccaccccgacatcggcatctcctccaaggccatgtccatcatgaactccttcatcaacgacatcttcgagaagc

SEQ ID NO: 439530 - DNA, 422 bp, Triticum aestivum
ttttagatcaccttctccgaggcatcaatctttggggacccttatggtcgtggcctgcgcgccctctccagggcccagattgactctgttcttgatcttgcacggtgcaccattgtgtccgagctctccaacaaggacttcgactcctatgtgctatctgagtcgagcctgttcatctactctcagaagattgtgatcaagacctgtgggactaccatgctcctgctcaccattcctaggattcttgagcttgctgaagagctgtgcatgccgcttgctgccgtgaagtactctcgtgggatgttcatcttccccggcgcacagcctgctccccacaggagcttctctgaggaggttgatgtcctgaaccgctacttcggccacctgaagtctggcggcaatgcttatgtgatcggagaccc

SEQ ID NO: 439531 - DNA, 390 bp, Triticum aestivum
ttggacgcgtggggtgcccttcaggccctgatggtgggcatccagatcctcaccttggaggatgttgtctctgaggctgatatctttgtgaccaccaccggaaacaaggacatcatcatggttgaccacatgaggaagatgaagaacaacgccattgtctgcaacattggtcactttgacaacgagattgacatgaacggccttgagacctaccctggtgtcaagcgcatcaccatcaagccccagactgaccgctgggtcttccccgagaccaagaccggcatcattgttcttgctgagggtcgtctgatgaaccttggatgtgccactggccaccccagctttgtcatgtcctgctcattcactaaccaggttattgctcagcttgag

SEQ ID NO: 439532 - DNA, 418 bp, Triticum aestivum
ttgctactcagagtgggagccaagctagagcggccagatcccactcacccacccaatgcgcgcgcgcccctcgtgagctaccagagccgaccgacacactcaccagagcaccgccgaacggacgaacgccatggtgaaggcgaagctcctcgctgtgctggccctcgtggccgtcgccgcgccgttcctccgcgccgccggccaggaggagggtgagggcggggcgaggccgtcagagctgctgccgttcgcggtgggcgcggcgccggcggggtgcgacgtcgggcagggcgagtgggtgtacgacgaggcggcggcgccggcgtacgatgaggaggcgtgcccctacatcccggcggagctgacgtgccaggcgcacggccgccccgacaagtcgtaccaacactggcggtggcag

SEQ ID NO: 439533 - DNA, 424 bp, Triticum aestivum
ttgagggcctcggccgccacgtcgtctcctcgggcgccgtgcaggccaactgggacaagaagctgcaagtggcatggaagaaggcgaggccggccccgacgacgccggaggaagccggccgcctcgtggtgctgacgctcaagaaccaccagaaggcggacgtcgacggcctcctcgccttctacggcctcccgcacccgaacgaggcgggatcggcgccaccgccggccgccggtcaccacgctcctccggcccagcacagcgcccccgcgcacaagccccagggcgtcaagttcgagctgcacacgctcccggtggacgccaaggcggtggccgacggcgacacggtgacggtgtacgtggacacgaatgacgcccccagcgagatcaagaaggccgcggcggagcgcaccaaggcgcgcgc

SEQ ID NO: 439534 - DNA, 327 bp, Triticum aestivum
ttctatcgcgtccggcgctaccggtgccatctccgtttgagcatgtgcacgccgcggcgcccttcgacgagagcatgacgctcctcgatcctgagaccgacaagctgttctatgaggccttggccgcccatgaccatatggggatcggcacggttgtacgggaatgccgtgggctgttcaatggtctggagtcactcaccgactgctgtggtggtgatgggacgaccgcaagggccatcgtcaaggccttcccgcatatcaagtgcaatgtgttggaccttccaaaggtgatcgagaaagtcccaagtgatggtgttgttaactatg

SEQ ID NO: 439535 - DNA, 424 bp, Triticum aestivum
ttcttctgccgagttacttgacaagtgccactgggtactagtgcaagtatggctcgggtctctgccaatgcagttgcacttgttgcactcgtctccgttcttctcacgtatggctgctgcgcccagtcgccgctcaattacaccggctccttggccaaatcctccaaggctagctggtcatggctccctgccaaggccacatggtacggcgcgcctaccggcgccggtcccgatgacaacggtggtgcttgcggctacaagcacactaaccagtacccgttcatgtccatgacttcctgcggcaacgagcccctgttcaaggacggcatgggctgcggcgcctgctaccagatacgatgcgtcaataacaaggcctgctccggcaagccggagacggtcatgatcaccgacatgaactactacc

SEQ ID NO: 439536 - DNA, 410 bp, Triticum aestivum
ttattgaaggagagctcgcgcccctccccgccgccgccgcagccatgtctcagaagaagtcgcgcggcggagccgccgcccgagaagatgccgatgagctctcgcgctcgcccctccaggccgtcctcctcgccgacagcttcacgctcaagttccgccccatcaccctcgagcgccccaaggtgcttctgccgctggtgaacgtgcccatgatcgactacacgctgtcctggttggagaccgagggcgttgaggaggtcttcgtcttctgctgtgcgcacgcgcagcaggtcaaggagcacctggaggaggcgggctggactgggaagcccgcggcccgggagatggccgtcatggccgtcgagtcgcatgatgcgatcagcgcaggcgacgctctccgcgtcatgtat

SEQ ID NO: 439537 - DNA, 387 bp, Triticum aestivum
ttcttaggtaaaggaaagattcgcccatggctccggcgcattccaagtctggcctcttcgtgggcatcaacaagggccacgtcgtcaccaagcgcgagctgccgccgcgcccgtccgaccgcaaggggaaaggtaccaagagggtgcatttcgtcaggaacttgatccgggaggtcgctgggtttgctccgtatgagaagcgtatcactgagcttctcaaggttggcaaggacaagcgtgccctgaaggtggcgaagcgaaagttgggtacccacaagagggcgaagaagaagagagaggagatgtccagtgtcctcaggaagatgagatctgctggaactggaacagacaagaagaaatagagcatcccaggctcatgaagttgat

SEQ ID NO: 439538 - DNA, 386 bp, Triticum aestivum
tttgtcaagcaccaaccacacaagaaccgatcaagacaccagcaatggccggaggaggaagcgacgaagtgaagctgctgggcatgtgggcgagcccgttcgtccttcgagtcaagctcgcgctcagcctcaagggcgtcggctacgagtatgtcgaagaggacctcaagagcaagagcgagctgctcctcaagtccaaccccgtgctccagaaggtgccggtgctgatccacgacggcaagcccatctgcgagtcgtcggtcatcctgcaatacatcgacgaggctttcgccggcgtcggctcctcgctcctcccggaggaaccccacggccgcgccgttgctcgcttctgggcccgttacatcgacggcacgctcgtgaaagca

SEQ ID NO: 439539 - DNA, 407 bp, Triticum aestivum
ttccacgcgtccgcggacgcgtgggccgttcggtgtttcagtgtcttgttccctctccccgatctcgactcctctaggggtcgtcctcgtgcactccgccgccgccagatcgaggtcggagctgggctttggagcagccatgggttcagacctcagagatgtatgtgttgttggggttgcacgcacccctatgggtagtttccttggtggcttgtcttccttgcctgctacgaaacttggctctatagcaattgaagctgctctgaaaagggcaaatgtcgatccatcccttgtgcaggaggtcttctttggcaatgtcttgagtgctaacttggggcaagcccctgcaagacaagctgctttaggtgcaggaataccaaatacggttgtttgcaccacagtcaaca

SEQ ID NO: 439540 - DNA, 369 bp, Triticum aestivum
ttttagttgccaagaaggagaggcttctaaagagggcccaggctgaagctgaaggtaaaactgttgaggccaagaagccaatagttgtgaagtatggccttaaccatgttacctacctaatcgagcagagtaaagcccagctggttgtcatagctcatgatgttgatccgattgagctggttgtgtggctccctgctctttgcaggaaaatggaggtcccttactgcattgtcaagggaaaatctcgccttggatcgattgttcacaagaagactgcctctgttctgtgcctgaccacagtgaagaatgaggataagcttgagttcagcaagatccttgaggctattaaggcgaacttcaacgacaaat

SEQ ID NO: 439541 - DNA, 394 bp, Triticum aestivum
ttcctacgcgtccgcccacgcgtccgcccgccgccgcctcctctcggttccttctccttcctcggagctccagccatgggtaaggagaagactcacatcaacatcgtggtcattggccatgtcgactctggcaagtcgacaaccactggccatctgatctacaagcttggaggtattgacaagcgtgtgatcgagaggtttgagaaggaagccgctgagatgaacaagaggtctttcaagtacgcctgggtgcttgacaagctgaaggccgagcgtgagaggggtatcaccattgatattgccctgtggaagttcgagaccaccaagtactactgcaccgacattgatgcccctggtcaccgtgacttcatcaagaacatgattactggtacct

SEQ ID NO: 439542 - DNA, 368 bp, Triticum aestivum
ttttgacggcctgccctcggccagcgaagtcgtgcagctctaccagtccaacggcatcaccggcatgcgcatctacttcccggacgccgacgccctgcaggccctcagcggcagcaacatcgacctcatcatcgacgtggccaacgaggacctcgcctccctcgcctccgaccgcgccgccgccaccgcctgggtccagaccaacgtgcaggcccaccagggcctcaacatcaagtacatcgccgccggcaacgaggtgggcgaccagggcggcgacacggggaacatcctcccggccatgcagaacctcgacgccgcactctccgcggccgggctaggcggcatcaaggtgtccacgtcggtgtcgc

SEQ ID NO: 439543 - DNA, 357 bp, Triticum aestivum
tttcttacgcgtccggtcgaccaccagcagcagcacacctccacaccgaggccaagcgaagatgtcgggccgcggcaagggagggaaggggctgggcaagggcggcgccaagcgccaccggaaggtgctccgggacaacatccagggcatcaccaagccggccatccggcggctggcccgccgtggcggcgtgaagcgcatctcggggctcatctacgaggagacccgcggcgtgctcaagatcttcctcgagaacgtcatccgcgacgccgtcacctacaccgagcacgcccgccgcaagaccgtcaccgccatggacgtcgtctacgcgctcaagcgccagggacgcaccctcta

SEQ ID NO: 439544 - DNA, 395 bp, Triticum aestivum
ttttagagcactaacccagtacttcgggctcggttccgagactcgccacaccgccacatgggttcctgatccttatggaattgagaccggcaaccaagagaaggcccctgaaggctatgaggagaaatggctgctcaatattcatgccatcgacacgaggggcgtggccgacaagcctagctgcaccgagtgcaagtgcgacttctacaatgtcacaattgatgagtatgggcgcacagtctcgaagaactacactggtgggttgctttgctgctatgatcagacccagtgtcggctcaaagcagggttcaacgccgaggtgcggaaggtgttcttgcagtacaccgtgacttggctcgactggactgatgcggtggtgcctgtcaagatctaca

SEQ ID NO: 439545 - DNA, 380 bp, Triticum aestivum
tttcctaccaagcttagccacaaaccagtaagagcaatggcgccctccaagcttgctcttttcctcgccctgaacctggtcctcctcgccaccgtgcagggctgcggaccctactgcccaccggtagtccctaccccgccgatccgctcaccgccaatcgtgccaccgaccggcgggggcagctgcccgatcaacacgctgaagctgggtgtgtgcgccaatgtgttgaacctgctgaagctcaagatcggcgtgccggcgaacgaggagtgttgcccgctcctgggcgggctcgccgacctcgacgccgcggtgtgcctctgcaccgccatcagggccaacattctcggcatcaagctcaacgtgcccatcgacctgac

SEQ ID NO: 439546 - DNA, 408 bp, Triticum aestivum
ttctacgcgtccgagcgcgcgtgggcgcactggaggcggctggggtccccgaggctggtggtggcgcccatggtggacaactcggagctacccttccgcatgctgtgccgccgctacggcgccgacgccgcctacacgcccatgctccactcccgcatcttctccgagaacgagaagcacagggacatggagttcactacctgcaaggaggaccgcccactttttgttcagttttgtgcaaatgatcctgacattttgttacaagctgcaaagctggttgaagcacactgcgactatgttgatttgaattttggatgtccacagcgcattgctaaacggggatactatggggcatttctcatggacaaccttccactcgttaaatcgcttgtgcaaaatctgtcagag

SEQ ID NO: 439547 - DNA, 429 bp, Triticum aestivum
tttatcgccggagaggaatcgcgacgagggcttgctcctatcagttaaatcaaagccatggagcacaaggagaccggctgccagtctcgggagggccccatcctttgcgtcaataattgtggcttcttcggcagcgcggcgaccatgaacatgtgctccaagtgccacaaggagatggcgatgaagcaggagcaggcaaagctggccgcctcctctttcgacagcatcgtcaacggtggcgatgccgcgaaagaacatcttgctgctggcagcacggcggtggcagttgctcacgttgaggcgaagacgcttattaccgcacagcctgctgatatcgctggtccaagcgagggggcgatggagaaccccaaaggcccaagccggtgcagcacctgcagaaagagggtcgggctgaccggattcaactgc

SEQ ID NO: 439548 - DNA, 377 bp, Triticum aestivum
tggtttttttgctattgaaacagtactggggggcgctttttgcagagaactcaccaccctttacaactgctatgattattttggcatcagttatatcttcaactgtgtccaatgttttgttaggggagaaggcagcttttattgtcccgacagcttccactctatcttattctaggcatgctttgtggggtagtgagtgtggtattcaggcaactggttgtttggttcacaaagactttcgacttgataaggaaaaaatttggtctccctgctgtagtatgtccggctttaggtggtcttggagcaggtttaatagctctaagataccctggaatactgtattggggtttcaccaatgtagatgaaattctacatac

SEQ ID NO: 439549 - DNA, 446 bp, Triticum aestivum
ttccgagaggccaaagagaaaaaagctcactggatcgtttcagccccgccgcacccccacacccgccgacgacgcgatgattcccaacctctccgccctcgagaaccacttcggcgccgccgccgccggcagcgacgacctcggcggcctcttctccgccgacgccgctggccagctcgccctcgagttccccacctgcaacgacttcgatgggttccagaaggcgaccaaggagatggtgaacaacaagaaggggaccaccacgctctccttcatcttcgacaagggcgtcatcgtcgccgccgactcccgggccagcatgggcggctacatatcctcgcaaactgtgaggaaaatcatcgagattaatccctacatgctgggaaccatggctggaggtgctgctgattgtcagttttggcatagaaacttgggggtcaagtgcc

SEQ ID NO: 439550 - DNA, 429 bp, Triticum aestivum
ttaggggattcatgctcctgggaggtgctcgggggggattgattgtgccgtcccaaaaggagactcgctcagagagccatacactgctggtcaccacatcctcttagctcatgctgaggctgttgagctgttcaaagcttgttacaacaagcatggggattccaagatagggatggcctttgatgtaatgggttacgagccattccaagactccttcctcgacgaccaggcccgggaaagatccatcgactacaacctcggatggttcctggagccagtggttcgtggtgactaccccttctccatgagatcgctgatcggagatcgtctacccaagttcactaaggaggagcaagagaagctagcgtcctcatgtgacatcatggggcttaactattacacctccagattctccaagcatattgatat

SEQ ID NO: 439551 - DNA, 343 bp, Triticum aestivum
ttgttcccttcccgcgcctccgctcccaccgccgcctcgccgtcgccggggaggcccccgtcgaggcgccgcccaagcccgcggaggcggatccctcccccgccgcgtccaacgggtccgcggcagccgcacccgccgctgccgctcccgctgctccggtcgccgcggccaaggccgaggcggtggcgtcgcccaagttccaggactcgaggtgggtcaacgggacctgggacctcagccggttcggcaacaccggcggcgccgtcgactgggacgccgtcatagacgccgaggccaggaggaggaaatggctggaagattccccggaggcaagtagcagcga

SEQ ID NO: 439552 - DNA, 380 bp, Triticum aestivum
ggatccgaaacagtacaggagcactcaatatctttagaattacaagacaagctaatctgcaacgagtatcaaattcaatcttcaacatccgtgaacatccggtgattcttactcctaccaggctacatattctaccaaaaccatggaatcccatctcaaatcccagtttccttcatatgtcacttgaacagcaccatgtatgatattgcaagaaaaccttgtgcgggacatgctctaggagcagacaggaaacttatctcgaaagttgctacatcagtcgatcttcacagaagcatagatcttcctcacaaaccagaagcaagcatagaagccaatggtgccggtcaggacgaagaaggcataagaaatgatcagcatgt

SEQ ID NO: 439553 - DNA, 372 bp, Triticum aestivum
ttgtcgcgtgggcggacgcgtgggcggacgcgtgggcggacgcgtgggcaaatcacaccaaccccccaaaacctccccgcatctcgcgcctctccgccgccgccgccgccgccgaggacaccgagcttctcccccgcccgatcgccatggccgccccgacggccttcgccgccgccaggttcctcccctccgcccacctcgactcctccgcgcgactcgccccgctcgccgcgattcgccccagcctttggagggaagaccggtcctgcctagagtggcttcgtggcagggagccccgttctgtggtgtacgtcaacttcgggagcatcactaccatgaccggccaagagctggtggagttcgcttgggggt

SEQ ID NO: 439554 - DNA, 423 bp, Triticum aestivum
ttgttgcagaccactccctccatccacctcttgaggtccttgtagcagcagagaagagcagaggagagcaagaaagcagagatggggttcaggaagggcctgctggcgtgcttcggcccgggcggcggcggcgacgaggaggagacggagcaggaggcgcgggcgacgccgggggcgcggcggcggcgcacggtgatgaacctgcggtcgctgtcgctggaggacctgtcgcggacgctggccaccaccagcctgcacgccttcaccctggacgagctcaagtccgtgaccaagaacttctccaccgccaacttcctcggcgagggcggcttcggccccgtctacaagggctgcgtcggcggcgccctccgccccggcctcgccgcgcagcaggtcgccgtcaagtacctggacctcgacagc

SEQ ID NO: 439555 - DNA, 373 bp, Triticum aestivum
ttttccacgcgtccggagagacggtggtgacggcgagggaatgaacatggccggcaaccggacggtgcgggagccgagggtggtcgtccagaccatgagcgacatcgacatcctcgacgacgggtaccggtggaggaagtacgggcagaaggtggtgaagggcaacccgaacccgcggagctattacaagtgcaccacggtggggtgccccgtgcggaagcacgtggagcgcgcgtcccacgacctgcgcgcggtgatcaccacgtacgagggcaagcacaaccacgacgtgccggtcgccagggggagcgccgtgctctactcgcccgcgccacgggcggcggacagcaccgggagcaccggccactacctg

SEQ ID NO: 439556 - DNA, 360 bp, Triticum aestivum
atcgtggacgcgtgggcggccgcccacggtctggggcgatttaaacgcaccgcttgcttgtgtccgaactaagccccaatcccgtcaccaccgccgctggtgctcggcgcgatggcgcagaaggacgccgccaatggcaacggcgccaccacgcgcccgccgcccactccctcccccatccgcttctccaagttcttccaggccaacatgcggatcctgggcaccggcggagctggcttcatcggctcgcacctcgtcgacaagctcatggagaacgagaagaacgagggcattgttgctgacaactttttcactggggcaaaagacaacctgaagaagtggatcggacacccaagattt

SEQ ID NO: 439557 - DNA, 416 bp, Triticum aestivum
tttggacgcgtgggtcgtgctgctgtccagcatccggcaccggcatgtggtgtcgctaatcgggtactgcaacgagcaggcggagatgatacttgtgtacgagtacatgcagagaggctcgctgcgacaacacctgtacggctccggcgagccggcactgccggcactgtcgtggaagcagcggctggagatctgcatcggggtggcgatgggcgtgcactacctgcacgcaggctgctcggagaacatcatccaccgcgacatcaagtcgaccaacatcctcctgggcgacagcaaccgcggcatgatagccaaggtagccgacttcgggctgtcgctcaccgggccgtcgttcgggcacacgcacgtgagcacgattgtgaaggggagcttcgggtacctggacccggagtact

SEQ ID NO: 439558 - DNA, 429 bp, Triticum aestivum
tctcccgccgccgcgcccaaacccaacccgcgggcgccattgacgtcgccgccggatcgcgcggaggcgaccaccccaccgccgccaagatgcagatcttcgtgaagaccctgacgggcaagaccatcacgctggaggtggagtcctcggacaccatcgacaacgtgaaggccaagatccaggacaaggaggggatcccgccggaccagcagcgcctcatcttcgccggcaagcagctcgaggacggccgcaccctcgccgactacaacatccagaaggagtccacccttcacctggtgctccgcctccgtggtggcgccaagaagcgcaagaagaagacgtacaccaagcccaagaagcaaaagcacaagcacaagaaggtgaagctcgccgtcctccagttctacaaggtcgacgacgccaccggca

SEQ ID NO: 439559 - DNA, 353 bp, Triticum aestivum
tttctctacccctacaggaggccaacaagggccaacatcctattggcgatgcggtggctggtgcatgggtgcagctccggggactcccttgtgttccacttctccggccacggtgatcaggagaaagacaaggacggcgacgagcaggacggccaggacgagagcatctgcccgctggactggcagctgaacggcgccatcctggacgacgagatcaacgaggccatcgttcgcccgctcgtgcagggcgtcaggctccacgccatcattgacgcctgccgcagcggcaccgtccttgatctccccaacctctgccagatcaaaaagaacgggaaacccctgtggattgatca

SEQ ID NO: 439560 - DNA, 339 bp, Triticum aestivum
ttgtttacgcgtccgcccacgcgtccgcccacgcgtgcgcccacgcgtccgggaacttctagaaggaggcggcgagggcgagcagggagcggaagagatggagaacggcggcagcaaaggcgacgtcccggaggacgccaacgcccattgccctggaacgcagtcggaggaggcagggaaggccgattcctgcgccgggtgcccgaaccagcagatttgcgccaccgcccccaagggccccgatcctgacttggttgctattgctgagcggatggctactgtgaaacacaagatactggttttgtcaggaaagggaggtgttggaaagagcacattttc

SEQ ID NO: 439561 - DNA, 354 bp, Triticum aestivum
ttgtcctccccgtcccctgtcgtcggcctgcggggcgtggtgagctccctcgtcgccttcttcatcgtcgtcagcaccgtctccctgctcttcgaccgcggccacgagtcgcaggtgcagctggcggtgcagcaccggcaccaggaggtgaaggtggccgcggccgggagccgcgaggcgcaggtgcagtggacggacgagctcatgggcgaggccgcgaggggctccggcgaggagtgcaactggtccgtggggcggtgggtgtacgacaacgcctcccagccgctctactccggcctcaactgctccttcatcttcgacgaggtcgcctgcgagaagtatggccggaatgac

SEQ ID NO: 439562 - DNA, 407 bp, Triticum aestivum
ttcttaaatcatgttcgagacattcaatgccccagggatgtatgtggctattcaagctgttctttctctatatgccagtggtcgtactacaggtattgtgcttgattctggtgatggtgtgagccatactgtgccgatttatgagggatatgcacttcctcatgctattctccggctggatcttgcgggccgtgatctgaccgactccctgatgaagatcctcacggagaggggctattccttcaccacaactgctgagcgggaaatcgtaagagatataaaggagaagctcgcctacgtcgcccttgactacgagcaggagctggagaccgccaagagcagctcgtccgtcgagaagagctacgaactgcctgacgggcaggtcatcacgatcggcgccgagaggt

SEQ ID NO: 439563 - DNA, 389 bp, Triticum aestivum
ttgttgtcttgcaatgtttgcactggccatagtcatggccgtggtggctgacgtctcggcgcagaacaccccgcaggacttcgtcaacctgcacaaccgcgcccgcgccgtggacggcgtcggccccgtggcatgggacaacaacgtggccaggtttgcgcaggactgggcggcgcagcgcgccggcgattgccggctgcagcactccggcgggccgttcggcgagaacatcttctggggttccgggcagtcgtggacggccgccgacgcggtgaagctgtgggtggacgagaagcagaactaccatcttgacagcaacacctgcgacgccggcaaggtgtgcgggcactacacgcaggtggtgtggcgcaggtcgacccgcatcggct

SEQ ID NO: 439564 - DNA, 381 bp, Triticum aestivum
ttcgcctttctagctaaagctaagctaccttgaggaaatggccgcggcgactggcatgatcatgctggcggcgactggcatgatcatgctggcggcgctggcgatcctcactccgtccgcccgagggctcgaccgcgccgatttcccgccggtgttcctcttcggcgtcgcgacgtctgcttaccagatcgagggcgcgtacctggaggacggcaagggcctcagcaactgggatgtgttcacccacacacctagaagaattaaggatggacggaatggggacatagcggatgatcactaccatcgttacatggaggacgtggagattatacatagtttgggggtcgactcctacaggttctcaatctcatgggcgagaat

SEQ ID NO: 439565 - DNA, 339 bp, Triticum aestivum
tgggattccaaaacagcattatgtggtactctcctgctacttatggcactgctgcctcttccagccagcgcgtcgagcaaactctacatcgtgtatatgggggagaagaagcatgatgacccgtccgtggtcaccgcgtcacaccatgacatactaacatctgtttttgggagcaaggatgaagccttgaggtccatagtttacagttacaagcatggattttctgggttcgcagcgatgctcaccaagtctcaagctgacgcaattgcaaaatttcccgaagttgtcactgtgaagcctaacacttttcatgaaacacacacaactcggagctgggac

SEQ ID NO: 439566 - DNA, 411 bp, Triticum aestivum
tcttgccgactgttccgtttatttaaccgagccgtcccattcttggagagcaagaagcacgccaccacctcgcccaaagaatccccacccccgccgaccccctcccctcccctccccggccgaagacagatccggcgaccgacaagccatggtgtccaacggggagctgtcgcagccgcaggcgggggagtacggcctcgccgtgatgcgccgccggcccaagaccaagatcgtctgcacgctcggcccggcctcgcgctccgtcgacatgatcgaaaagctgctgcgcgccggcatgtgcgtcgcccgcttcaacttctcccacggctcccacgactaccaccaggagacgctcgacaacctgcacgccgtcatggagcgcaccgggatcctctgcgccgtcatgctcga

SEQ ID NO: 439567 - DNA, 250 bp, Triticum aestivum
ttcttgacccccgcactcaacctcgccggaggctgcgatccgatgtacggcaacggcaacgtcttcagctccgacatcacgacgtgccagtccaacggcgttgaggtgctcctctctctcggcggtggcgccggcagctacggactatcctccaccgaggacgcgcagagcgttgccacctacctgtgggacaacttcctcgggggcagcgcgtcgcaccgcccgctcggcgacgccgccctggacggca

SEQ ID NO: 439568 - DNA, 377 bp, Triticum aestivum
ttattccgagaaccccccgctccaaagccctggccctagccatctcctctccccccagccctcgtcgagcgcgcgttttccaggagcttcaggtgccggcggcgccatggcttcggagaccgagaccttcgccttccaggccgagatcaaccagctgctctcgctcatcatcaacaccttctactccaacaaggagatcttcctccgcgagctcatctccaacgcctccgatgcgttggataagatcaggtttgagagcctgactgacaagagcaagctggatgctcagccagagctgtttatccatattatccctgacaaggccacgaacacactcactcttatcgacagtggtattggtatgacaaagtcagacc

SEQ ID NO: 439569 - DNA, 426 bp, Triticum aestivum
ttttcacgcgtccgcccacgcgtccgcccacgcgttcgcccacgcgtccgcggacgcgtggcttgcttccaaacgcgacctcatcagagcaagacccggaggaaacaaggagaggccagagcggcctgtcacaaggcaaaggacagaggaggtgcttgttcaggtctcctgctagatccggaggcgatgggcaggggcgtgctggaggtgcatctcgtcgacgccaagggcctcttcggcagcgatttcctagggaagatcgacccgtatgtaatcgtgcaataccggagccaggagcgcaagagcagcacctccagagatgaggggaggaacccgagctggaacgaggtgttccggttccagatcaactcctctgcggccaacgggcagcacaagctcttcctccggatcatggaccacgacaac

SEQ ID NO: 439570 - DNA, 360 bp, Triticum aestivum
tgttaactttcttggtgtcagaaatgctgctcggaggatgctcctcgatgagctgggcatcccagctgaagatgtgcccgttgaccagttcacccctctcggtcggatgctttacaaggcaccatctgatgggaaatggggcgaacatgagctggactacctgctgttcatcgtgcgcgaggtgaagctggtcccgaacccggacgaagtggccgacgtgaagtacgtgagccgggagcagctgcgggagctcatccagcaggcggacgccggcgagggcggcgtgaagctgtccccttggttcaggctggtggtggacaactctctcatgggctggtgggagcacttggagaaaggcac

SEQ ID NO: 439571 - DNA, 466 bp, Triticum aestivum
tttcgcctatgctgggctgttgcgcgtcgccctcgtcctcatcgccgccgccgcgacctgggcggcggcgctagacgacccggcggggcttctgcgacgggccaaggaggcggagttcatggactggatggtgggggtgcgccggcggatccacgagaaccctgagctcggctacgaggagtttgacaccagtgagctcgtgcggcgcgagctcgatgccatggggatcccctacaggcatcccttcgcggtcaccggcgtcgtcgccaccgtcggcacaggcggcccgcccttcgtcgcgcttcgggccgacatggacgcgctccctatgcaggaaagcgtggaatgggaacataagagcaaagtgcctgggaagatgcatggatgtggccatgatgcacatgttgctatgctattgggttctgctaagattcttcaggagcaccgtgacgagttgaagggtact

SEQ ID NO: 439572 - DNA, 320 bp, Triticum aestivum
tttgccacaagccggagcagacgatccgccgtcgacgcgacctcctccgcccgccaggatcggagacgactatatagacggtctaggggttgaagcaacttaacaatgagtagcataggaactgggtatgatctgtccgtcaccactttctccccggacggacgtgtcttccaggtcgagtatgctggcaaggccgtcgacaacagcgggacgatcgttgggatcaaatgcaaagatggaattgtccttggtgtggagaagctgataacatcaaagatgatacttgctgggtcgaaccggagacttaattccgtgcaccg

SEQ ID NO: 439573 - DNA, 357 bp, Triticum aestivum
tcgcgcgcggcgcctcctctcctctcttcccctcccccctcgccgccgccgtcgcgccagcgcctcctccaccaccgctcgtcctcctatacacaggtgcggaggaggagatgttggtgctcttcgagacgcccgcggggttcgccctcttcaaggtgctggacgaggggaagctcagcagcgtcgaggatctgtggaaggactttgcctcgtcggacaaagcaaggaaggtggttgagctgaaggctttcaacaagtttgaaaatacttctgatgctctttcagccgcaactttgctgattgatagcaagcccagcaagggtctgcgcaagttcctgcagaagcactgtgatggtg

SEQ ID NO: 439574 - DNA, 405 bp, Triticum aestivum
  unsure (1)..(405): unsure at all n locations
tcgcccacgcgtccgcaccggctcaccaccacacagacaagcaagaatggcgatcgccgtgagcgggcactggacgcggctgcggacgctcggctgcggcgcgtcgggggccgtggtgtcgctggcggccgacgccgcgtcgggggagctgttcgcggtcaagtccgtgcgcgcggcggacgcggcgcagctgagccgggagcaggggatcctctccgcgctctgctcgccgcacgtcgtcggctgcatcggcgngcggtggcgaccgcgacggctcctaccacctcttcttcgagttcgcccccggcggctcgctcgccgacgaggccgccaggaatgggggccgcttggaggagcgcgccatctgggcgtacgcggcggacgtcctgcgcggcctggcataca

SEQ ID NO: 439575 - DNA, 469 bp, Triticum aestivum
tagctgtcaggtttatgcgcactattatatccagaaatgatgaacatcttattcgccatgttgtcaagtttaacttgttgaaaccaataattgatgcctttgtggaaaatggggatagatataacatgctacaatccggagtactcgaactgttggaacacatacggaaggaaaatctaaaacctcttgttatttatgttaccgagtctttctcagatcaacttatgaagtttgaacacttcgggagcattcaggccttcaaactcaagtatcaacagtacttggagagtgccgatatgaaattaagtgctagtgtgcctgacatgagaaagaaggcagaaggaagaggtcttgagaaggaagaggaagattatttcaatgagagtgacgaggaagattcagtaaggcggactaaacatgcacacagtgaacataatgaagaaagcaaggatgatgtagccaatggaag

SEQ ID NO: 439576 - DNA, 438 bp, Triticum aestivum
tgctaatgtgcctgtgccatatgatgacgccttttcatttttgccgcataccatgttgatggggtctaatcagggaacagcaggtgatggcatgggtctggaactcggccagttgcatcacgcaatttctcaaggccatccaattcagccagcaaatttcggctacgataattggcatcacaaccgtgatggtcagtatgctgatgatttcactgaagacattcgcctgaaaagccacgaactgctcgagggtgacgacatgcagcagctgctcagggtcttcaatatgggcggagcttctactggtttgccagacgaaacgttttccttccctttgcaatctccattgccaaacccagacttggaaggtgagcccagccgtccatcgggcaaagccgttgtcgggtggctcaagataaaggctgctatgagatgggg

SEQ ID NO: 439577 - DNA, 459 bp, Triticum aestivum
ttccacgcgtccggcgccatcgagccgccctccccgctctccgaggtccgcgccgacccctacccgctccccgccgccttcgagtggttcacctgcgacctcgacgacgacgccctcctcgccgacctctacgccctcctcgcccacaactacgtcgaggacgacgagaacatgttccgcttcaactactccccggccttcctccgctgggcgctccgccccccctccttcttccgcgcctggcacattggcgtccgggccaaggagtccaagaagctcgtcgctttcatatccggctgtccccgcgcgcatccgtgcgcgcgacgacgttgtccgcatggccgagatcaacttcctctgcgtccacaagaaggctccgatccaagcgcctcgcgccagtgctcatccgggaggtcacccttcgcgtccacctggagaacatctggcaggctgcctaca

SEQ ID NO: 439578 - DNA, 370 bp, Triticum aestivum
tttcccaaagaggaggaagaacaccaaggactgactgccagcgcctctccgcgatccaaatcctcccgggaaagttcttggttgatctcttcctcctcgaccgcctcccaggttcttggtgtagcttttgccactctcaccaggagatttcatgtctgatcttgacgttcagatcccaactgcctttgacccctttgccgaggcgaatgctggggacgctggtgcagctgccggatcaaaagactacgttcatgtacgcatccagcagcgtaatggtcgcaagagcctgaccactgtccagggcctgaagaaggagttcagctacagcaagatcctcaaagacctcagaaagagttttgctgcaatggta

SEQ ID NO: 439579 - DNA, 362 bp, Triticum aestivum
tacccccgaaaccaaccccatctaaaggacgaacagaggggaagcaaaaccctcgtcctcccccctccctgtcgtccgcaaccagccaaagccaatcccaagttgggagccggaaccgcctgccgcatcagccgtcgccgtcgatggaggcggactactacaaggtgctcggcgtcggccgcggcgccaccgacgacgagctcaagaaggcctaccgccgcctcgtcatgaagtaccacccggacaagaacccctccccgcaggccgacaccctcttcaagcaggtctccgtggcctacgacgttctcagcgacccggataagcgcgccatctacgaccagtacggcgaggaggggatcaag

SEQ ID NO: 439580 - DNA, 319 bp, Triticum aestivum
gtatctgcgagtttcgccctcgcgcgggcgacgggcggcggcggcggcggagatgggctgctgcagcagccggagctcggactcgccggccacccgcgtcacgcgctggcgctccaccgggatcgtcgccctccgggacgccaaactgaaggtggtaccacatgaagttctgcaagtgggaaattcccttagaactctggatttgacaaataacaagatagttgaggttccccaggaagttggtaccattgtgaatatgcaaaggctggttttggctggtaatttgattgaaaacattccagctaatattggatacctg

SEQ ID NO: 439581 - DNA, 412 bp, Triticum aestivum
  unsure (1)..(412): unsure at all n locations
ttggacgcgtgggcggacgcgtgggcggacgcgtgggcgatggcgtccatccgcctccttccgctcgctctgctgctcctcctgctcgctgtggcgcacgccgggaccccacggcaggagcccgccatccggctgccgtcgcagcgcgcggcggccgggcaggaggacgatgactccgtcgggaccaagtgggccgtcctcgtcgccggctccaagggctaccagaactaccgccaccagatatctgccacgcctaccagatcttgaagaaggggtggtctcaaggatgagaacatcattgtcttcatgtatgacgacattgcgcataacccggagaacccgaggccnggcgtcatcatcaaccacccccaggggggnagatgtctatgctggggtccctaaggactacact

SEQ ID NO: 439582 - DNA, 386 bp, Triticum aestivum
tttcggttccttctccttcctcggagcttcagccatgggtaaagagaagactcacatcaacatcgtggttattggccatgtcgactctggcaagtcgaccaccactggccatctgatctacaagcttggaggtattgacaagcgtgtgatcgagaggttcgagaaggaagccgccgagatgaacaagaggtctttcaagtacgcctgggtgcttgacaagctgaaggccgagcgtgagaggggtatcaccattgatattgccctgtggaagttcgagaccaccaagtactactgcaccgtcattgatgctcctggtcaccgtgacttcatcaagaacatgattactggtacctcccaggctgactgtgctgtgctcatcattgact

SEQ ID NO: 439583 - DNA, 213 bp, Triticum aestivum
tttttcaacaggcggaagcctatctggatgaggaaaccagaggagatcaacatggaagagtacgcatcttgatacaagagcttgaccaatgactgggaggagcatttggctgtcaagcacttctatgttgagggtcagcttgagttcaaggctgctctgtatgtgcctaagagggccccattcgacctatgagacaacaagaagaaggccaac

SEQ ID NO: 439584 - DNA, 463 bp, Triticum aestivum; identical to SEQ ID NO: 435779

SEQ ID NO: 439585 - DNA, 253 bp, Triticum aestivum
tttttcctcctgaccacccacccacctaccagccaccaaggcggccgatctcccctccccagccgcgccaccgccgacgccgcagctccggcagccgttcgtctcgagattgatctttggtgactgttagaagccacagacactgaagatggcgcagcctgctgagctttcccgcgaggagaatgtgtacatggccaagcttgcagagcaggctgagaggtacgaggagatgggttgagttcatggagaaggt

SEQ ID NO: 439586 - DNA, 338 bp, Triticum aestivum
tttcgtagctctcatgttggccatggcggtcacggcccaaaactcggagcaggacttcgtggacgcccacaacgcggcgcgcgccgacgtgggccttggggaggtgacatgggacgctacggtggcagccttcgcgcaggactacgcggatcagcgccgcggcgactgccagctgatccatactcctgatggccggccgtacggggagaacctctacggaggcggcgggaccgagtggacggcgacggacgccgtgaattcgtgggtgtcggagaagcagtactacgaccacgacagcaacacctgctcggcgcccgagggtgagtcgtgcgggcact

SEQ ID NO: 439587 - DNA, 394 bp, Triticum aestivum
  unsure (1)..(394): unsure at all n locations
ttttcgagaccctgaacccgccgtgcctgctgacgccgtgcgaccaggcgccggagatcttcgacatcgccggccacttcgccgggttaggcagcgccgatgacctgcccaggacccccgtcctgtgcaagcccaacgtcggcgccatggaggcggccctcaggatcgccaacgtcaacccttacaaggcgattttcttcgacgacagcgtgcgcaacattcaggcgggcaagcgaatcggcctccacacggtgctggttggcacgtcgcancgggtgaagggcggcggatcacgcgctggagagcatccacaacatccgggaggcgctgccggagctgtgggaggaggccgagaaggcgagggacgtcctctacgccgcccgcgtggcgatcg

SEQ ID NO: 439588 - DNA, 424 bp, Triticum aestivum
tttggttcatgtccgacgtgcaggtcgccgaggccagggccttctacggcttccagatcgccatcgagaacatccactccgagatgtactccctgctcatcgagacctacatccgcgacgacgtcgagaaggaccgcctcttccgcgccatcgacaccatacccgccgtgcgccgcaaggccgactgggccctgcgctggatcgacggtggggagcgcttcgccgagcgcatcgtcgccttcgcctgcgtggagggcatcttcttctcgggctccttctgcgccatcttctggctcaagaagcgcgggctcatgccgggcctcaccttctccaacgagctcatctcccgcgacgagggcctgcactgcgacttcgcctgcctcctctacgacatcctgcgcggcaagctggacgagtcacgcgt

SEQ ID NO: 439589 - DNA, 461 bp, Triticum aestivum
ttttctctctcgactccggccagtctcttcttctctagaaagctagcgaggcttggaggtgagcgaaaatgccggtcagcaggatcgccgtggggagccaccgtgaggtgtacgaggtcggcgccctcaaggcggcgctcgccgagttcatctccacgctcatcttcgtcttcgccggccagggctccggcatggccttcagcaagctgagccccgacggcgcggcgacccccgccggcctgatctcggcggcgatagcgcacgccttcgccctgttcgtggcggtgtccgtgggcgccaacatctccggcgggcacgtgaacccggccgtgaccttcggcgccttcgtgggcggcaacatcaccctcttccgcggcctgctctactggatcgcccagctcctgggctccaccgccgcctgcttcctcctccgcttctccaccggcgggctccccaccggc

SEQ ID NO: 439590 - DNA, 309 bp, Triticum aestivum
tttcacgcgtccgctttatggtaatcttaaaagaatatgcgagacaaatcttggattgatctctcaatgctgtctcacgaaacatgttaaaaagacgacaccacagtatctcgcaaacgtcgcccttaaaatcaatgttaaggtgggagggagaaatactgtacttgttgatgctttgtcaaggagaattccccttgttagtgacagaccaaccattatatttggtgctgatgttacccatcctcatcctggagaagattctagcccttccatcgcagctattggcccgaggtcaccaagtatgctgga

SEQ ID NO: 439591 - DNA, 461 bp, Triticum aestivum
tgtgccattttccgcagcatggcaatattaggtgtcgatggcttctcatcgctaccaaagaactgccttactctctgctacatattctttgttggagcaatcgttgtcaacttgataagagatcttgttcccaagaaggtatcaaacttcataccaatcccaatggcgatggcaatcccattctacataggatcgtatttcgccatcgacatgttcatcgggacagtgatcctttttgtctggcaaaggctggacagagccaaatcggaaacatttgcacctgcagttgcttccggcttgatttgcggcgatggactgtgggttctgcctcagtcggtgcttgctcttgccaaggtgaaacctccaatctgcatgaagtttctgtcaagagggatgaacgacaaggtggatgcttttatcacaacattatcgtagaatcttagggaaaaggagaagttaca

SEQ ID NO: 439592 - DNA, 381 bp, Triticum aestivum
ttttccacgcgtccgcatcggccacgccacgcaagaacacaaacacagccctcacacgcgagtcgccaagaagaaaagtcccaaactttttccccctgatcgatccgccctcctcctcctcgtcgccgcaggagtttctcccgggattcgccgccccctccttctctctccggcgaccgatcggatcccgccggccggaggcccgagccccgcccgatctacccacccgatggcggccaacgccggcgccggcgccggcggcagcaagatccgcaacgccaagctggttcttctgggcgacgtcggcaccggcaagtccagcctggtgctccgcttcgtcaagggccagttcgtcgagttccaggaatcgaccatcggcgc

SEQ ID NO: 439593 - DNA, 448 bp, Triticum aestivum
tctgtttccccgtctccccgtctccccgccgcctcctcctcctccgcgtcgcaaaccctcgtcctaatccgccgaatcccgcgacccacgaaccaaggcagatcgatggcgaagagctcgttcaagctggagcacccgctcgagaggaggcaggcggaggctaaccgcataagggagaagtactctgacagaattcctgtgatcgttgagaaggctgggaagagtgatattcctgacattgacaagaaaaagtacctcgtccccgccgaccttacggttggacagttcgtgtatgttgtccggaagcggatcaagctcagtgctgagaaggcgatcttcatctttgtgaagaacactcttccaccgacagctgccctgatgtctgccatttacgaggagaacaaggacgaggacggcttcctctacatgacctacagcggcgagaaca

SEQ ID NO: 439594 - DNA, 274 bp, Triticum aestivum
tttaagaggaggaagaacaccaaggactcactaccagcgcctctccgcgatccaaatcctcccgggaaagatcttggttgatctcttcctcctcgaccgcctcccaggttcttggtgcagcttttgccagtctcagcaggagatttcatgtctgatcttgacgttcagatcccaactgcctttgacccctttgccgaggcgaatgctggggacgctggtgcagctgccggatcaaaagactacgttcatgtacgcatccagcagcgtaatggtc

SEQ ID NO: 439595 - DNA, 444 bp, Triticum aestivum
atgttttggtgcccttaagggagctttggatggtggtcttgacattccccacagtgacaagagatttgctggttttaagaaggacgagaagtcgctggatgctgagattcaccgcaagtacatctttggagggcatgttgctgactacatgaggtcactagcagatgaggaaccagagaagttccaaactcacttcagtgagtacatcaagaggggaatctcagctgatgacatggaagcagtttacaagaaggttcatgctgccatccgtgctgatcccaccatggccaaatcaaccaaggcgcctcccaagactcacaagaggtacaaccccaagaagctgacttatgagcagaggaaggccagcctcgtcgaaaggctcaacgccctcaacaactctgccggtgccgccgatgatgacgaggacgacgaccagtgaaatgc

SEQ ID NO: 439596 - DNA, 434 bp, Triticum aestivum
tttccaccacagccgccgcctcccccaccaacctgccccgacccgctcccgacctccgaggcaagcagcgcctccgccatggcgttcgagaagatcaaggtcaccaaccccatcgtcgagatggacggcgatgagatgaccagagtattctggcagtctatcaaggacaagcttatcttcccatttttggacttggacattaagtactttgacttgggagttctacaccgcgatgcaactgatgacaaggttacagtggaggctgcagaggctactctcaagtacaatgtggctattaaatgtgcaactattactccagatgaagatcgggttaaggagttcaacctaaaataaatgtggaggagcccaaatggcacaattaggaacattataaactgcaccgtgttcagagagccaattatatgcaagaatgt

SEQ ID NO: 439597 - DNA, 223 bp, Triticum aestivum
tttttcacgcgtccgccacgcgtccggagcaggccgagttcaagaggatgtacagtcttatttaggagtacaagctgaagggccatatccgttggatctccgctcagatgaaccgtgttcgcaatggagagctttaccgctacatctgtgacaccaagggtgcatttgtgcagcctgcattctatgaagcgtttggcctgactgtcattgaggccatgacatg

SEQ ID NO: 439598 - DNA, 194 bp, Triticum aestivum
ttcagagcagaagcagaagcaggcaacaggcgagcaggaaggaagcaagagaggtggagatggcgcccatcaagctgtacgggatgatgctgtcggccaacgtgacccgcgtgaccacgctgctcaacgagctcggcctcgagttcgacttcgtcgacgtcgacctccgcaccggcgcccacaagcaccccgac

SEQ ID NO: 439599 - DNA, 408 bp, Triticum aestivum
tttattccgtgtggccaccgagcgaaccctagccgagattagactaccatccccaatctagcggaggaggacgaggacgacgccgacgagatgctgagggttgcggggaggaggctctcgtcttcgctctcctggcgccccgtggcgaccgtcggagccaggggcccgctcgccggcgccggcggccctgggagagacgacgacgacggttcggcctaccagcggcggttcgccatcgagtcccccttcttcaccgccgcgagaggcttttcttcggctgaaacacttgttccacggaaccaagatgctgggttggctgaactcccagccactgttgctgcactgaagaaccccaactcaaaaatcctttatgaccagtacaaccatgaaagatatcctctgggagat

SEQ ID NO: 439600 - DNA, 463 bp, Triticum aestivum
  unsure (1)..(463): unsure at all n locations
ttgtaagtagccacaaaactcatcaccagagcccagagagagacagagtactacactccagcgccggccgttccatttcgctccgccctcccgccttgtcccgttgctgagttcgcgtccgctcgccaggaggagcagttcgccgccgttgaagggtcctcccccgtcgctagccgcgatgaagaaggttgtgctcaagctggatgtgcacgacgacaggcacaaggccaaggcgctcaaggccgtctccggtctccacggtatcgaccagctgggtgtggacatgaaggaccagaagatgaccatcgtgggcaccgtcgaccccgtagcccgtcgtcgccaagctgcgcaagctcttccccggtgggcagnatcgtcctccgtcggcccggccaaggaggagaagaaggacgacaagaagcccgccggagacaagaaagagggcgacaagaaggagggcggc

SEQ ID NO: 439601 - DNA, 252 bp, Triticum aestivum
ttgtaagaagcccagcgagaagataaaaagcctcaaggcccatttccccatctctatcatcggcggcggcggctcgagcagaggaaaggaagctttctaccctagcagagaaaaaaaaagcagaggagaggaagcggaggcgacgatgtcggcgatgactgcggcggtgcccttctggcgcgcggcggggatgacctacatcggctactccaacgtctgcgcggcgttggtgcggagctgcctcaaggagcc

SEQ ID NO: 439602 - DNA, 409 bp, Triticum aestivum
tttttggagagaaatggtccggacatcagtgagtagaagtttcaaccaaattactgtggatggtgatacaagtacgaatgactgtgttattgctatggctagtggattatctggtttgtcggacatcctcactcatgatagcgttgaagctcaacagctccaagcatgcctagatgcagtaatgcaaggcctcgcaaaatccatagcatgggatggtgagggtgcaacctgcttaattgaggttactgtaactggtgcaaataatgaggcagacgcagctaagattgctcgttcagtggcagcgtcctccttggttaaagctgctgtatttggccgagacccgaactgggggcgcattgcttgctctgtcggatattcagggattcattttgatgcagatcaacttgat

SEQ ID NO: 439603 - DNA, 309 bp, Triticum aestivum
tttcgctgcctcgcaccaaaacacaactaccaccagcggcagcagttcgactccggagaggcagagatgggctccaccgcaaccgacatggccgcctccgccgacgaggaggcgtgcatgtacgctctccagctcgtctcgtcgtcgatcctcccgatgacgctcaagaacgccatcgagctgggcctcctggagaccctggtggccgccggcggcaagctgctgacccccgccgaggtggccgccaagctcccgtccacggcgaaccccgccgcggcggacatgggtggaccgcatgctccggctgct

SEQ ID NO: 439604 - DNA, 327 bp, Triticum aestivum
tcatcttcgacggccgagcttacagcatcacgaaggatgtcttgcagctgtggatcaagctgcggctgcggctcaaactgcaactgcggcaagatgtaccctgacttggagaagagcggcgccaccgtgcaggccaccgccgtcgtcctcggcgtcgggcctgcgaaggtgcagttcgaggaggccgccgagtccggtgaggccgcccacggctgtagctgtggcgccagctgcaagtgcgacccttgcaactgctaaggtgcaagcggttgatgcgcttctggtgattgtgccgtgtgtgatcgagtgcgaataatgaaaccgacg

SEQ ID NO: 439605 - DNA, 434 bp, Triticum aestivum
tttcgtgatgtctgccctcttcctacgaaataactacatctctgttggtgcatctggagctttatttgggctgcttggatctatgctttctgagctacttatgaactggactatttactccaacaaggttgcagccataataacccttctgtttataatcgcgatcaacgtggcaatcgggatactaccgcatgctgataactttgctcacattggtggattcctgaccgggttccttttggggttcgttctgctggcaaggccacaattcggttggttggaacgcagcgagctgccccataccaatcagccccccaagtacaaaccataccaatatgtcctggtgggttgtggcactcgtcttgctgcttgtcgggttcacgctttcgttggtgatgctcttcaagggcaagaacgggaatgacggctgccac

SEQ ID NO: 439606 - DNA, 382 bp, Triticum aestivum
ttgtcaatgccagttcgtcacgggccggctgtacaacttcagcgggacgaaccagcctgacccgaccctcgacgcgacataccgagccttcctgtcacagagatgcccgaggaacggcgacggaacgtccctcaacgacctcgacccgaccacacccgacaacttcgacaagaactacttcacaaacctcgaggtgaaccgcggcttccttcagtcagaccaggagctcaagtcggaccccggcgcggcggggacgacggcgccaatcgtcgatcggttcgcgggcagtcaggaggccttcttcagtagcttcgtgacttctatgatcaagatggggaacattaggcccgtcacagatccctcccagggagaagtccggaac

SEQ ID NO: 439607 - DNA, 279 bp, Triticum aestivum
cacctggccaccatccccatcaccggcaccggcatcaacccggcgaggagcctcggcgcggccatcatctacaacagggagcacgcctggtcagaccactggatcttctgggtcggccccttcatcggcgccgcgctcgccgccgtctaccaccaggtggtcatcagagcgatcccgttcaagaccaagtcctaagctgctgttcttcctgctacaaagaagatgccaacccaacccgaagagcaaagctggcgtgttctgaatttctgatggggcggc

SEQ ID NO: 439608 - DNA, 298 bp, Triticum aestivum
cgcctcatcaccgacaagcacccatggggctacatgcagtcgtcgtcggacgaggcacagctgctggggatgctgatcaagatggcgggcgccaagaagacgatcgaggtgggcgtgttcacgggctactcgctgctggccaccgcgctggcgctcccggaggacggcaaggtggtggccatcgacaccgaccgcgagtgctacgaggtgggccgccccttcatcgagaaggccggcatggcgcacaaggtggacttccgcgagggcaccggcctggcgcgcctggacgagctgctcg

SEQ ID NO: 439609 - DNA, 307 bp, Triticum aestivum
tttcagcaacaaagaaaagacagatgatgaaaagagtgcaatggaggagaagaagggccagtacgccaagttctggaatgagtttggcaaatcagtcaagctgggaatcattgaagatgcaacaaacaggaaccgtcttgcgaagcttctgagatttgagagttccaagtcagatggcaaacttgtctcccttgatgagtatatttcaaggatgaagtcagggcagaaggacatcttctaccttacaggaagcagcaaggagcagctagagaaatctccattccttgagcagctgaccaagaaaaac

SEQ ID NO: 439610 - DNA, 305 bp, Triticum aestivum
actatgggaagaccttcaagaagccaaggcgtccgtatgagaaggagcgtcttgacgctgagctgaagctggttggggagtacggtctgcgggccaagcgtgagctctaccgtgtgcagtacgccctcagccgcatccgaaatgctgccagggagctgctcaccctggatgagaagaacccccgccgtatctttgagggtgcagcgctcccccgccgcatgaaccgctacggtcttctcactgaggaacagaacaagcttgattatgtgcttgccctcactgttgacaacttcctcagcgccgtc

SEQ ID NO: 439611 - DNA, 343 bp, Triticum aestivum
tgcgcgaacccggaagcctcgcttccgccgccgtcgccgccgctccgcaccgcgacgcagagctcgcccgtgctcccctacgcacggagctcccggctctcgtcggcgcagggatttgttcaccatggcccgcttgtacgttggcaacttggatgcccgggtgactgctggggaacttgaagatgagtttcgtgtgtttggagttttgcgaagtgtctgggttgcacgtaagccacctggttttgcgtttattgattttgacgacaagcgggatgctgaggatgcacttcgtgatctagatggcaagaatggatggagggtctgagctgtctcgcaatgaccg

SEQ ID NO: 439612 - DNA, 293 bp, Triticum aestivum
tgatcatccctgataccaaagctcatcttcttctccttgaaatctttttgggtccacagatttggaggatgtcttgcaactgcggatcaggctgcagctgcggctcagactgcaagtgcgggaagatgtaccctgatctgacggagcagggcagcgccgccgccgaggtcgccgccgtggtcgtcctcggcgtggcgcctgagaacaaggcgggacagttcgaggtggccgccgggcagtccggcgagggctgcagctgcggcgacaactgcaagtgcaacccctgcaactgt

SEQ ID NO: 439613 - DNA, 197 bp, Triticum aestivum
ccccgccgcctcaagatgcagatctttgtgaagaccctcaccggcaagaccatcaccctcgaggttgagagctccgacaccatcgacaacgtcaaggccaagatccaggacaaggagggcattcccccggaccagcagcgccttatctttgctggcaagcagctggaggatggccgcaccctcgctgactacaacat

SEQ ID NO: 439614 - DNA, 339 bp, Triticum aestivum
tggacttctgcgagagggtggttgaatttgcctattggattaacattggaacacgagatatacaaggcagcagcatcccttaggagctacagtcaggtttcaaggataaacccgagaaaatctattccacgtgcagtccttagaggagcaagtggacttgctatcttgacagttgtaaaagctggtgcatttcttacatacaaacttggaactggcttagtagttgctcgtaaatcagatgggtcatggtctccaccctctgctatagcttcagctggattaggatggggagcacagcttggcggtgagttgatggatttcatcatagtgcttcatggt

SEQ ID NO: 439615 - DNA, 301 bp, Triticum aestivum
tgcccgactctaatcaggtcatctaatcctgaaacagaagcacttcggaagagcagccaggcctactgtgctcaaccagcttgtgcagagccatcctgcatgatacagccatcgtgcacagcccccacaacatgctttggccctcggttcttctcgaagtcgaagaaagatcgaaagccaaagcctgaagttgtcaaccaggtccgcccatggccggagctcatggcagaacctagtgatgctcgatcaatgtcatttgttggcacacacgagtacttggcccctgagattatcaaaaggt

SEQ ID NO: 439616 - DNA, 405 bp, Triticum aestivum
ctgggggaacccgacggagatggacgccgacgacaacaagtcgctggcgttcgagggctacgagacggtgaggatcgccaaggaggccgtggaggccgcgtgccccgacctcgtctcctgcgccgacatactcaccatcgccacacgggacgccatcgccctgagcggcgggcccttctaccaagtggagctggggaggctggacggcctgagctccacggccagcagcgtggccggcaagctgccgcagcccaccagcaccctcaaccagatggtcgccatgttcagggcgcacgggctcaacatgtccgacatcgtcgctctctcagcggcgcacaccgtggggctcgcgcactgcggcaagttcaggaccggggtgtacggcagcccggcggacgcgacgct

SEQ ID NO: 439617 - DNA, 366 bp, Triticum aestivum
ttttaccgatatggatggacagtagcactaccaagcaatgcagagaagtagaaaatgctgtcggaggagcattggagttatctaagctgacagggtctcgtgcctatgagagattcactgggccccagatacggaagatctaccaaacagcaccccatatttatgaaaataccgagagaatatctttggtgagctcatttatggcatctatccttgttggatgctatgcaagtattgatgaaactgatggtgctgggatgaacttgatggatataaacaagaggacctggtcaaaagctgttttagaggcaactgctcctgatcttgaacagaagctgggaaatctggcaccggcacgtgcagctg

SEQ ID NO: 439618 - DNA, 388 bp, Triticum aestivum
tgcaacccctcctcccccgttctcctcattgtcctcgcgccccgccccgctccgctccgacggccaaccgctccacacaccactagcctgcctgcctgcctgcctgcctgccgccaaggcaagatggtgaagatctgctgccttggggctggctatgtaggtggcccaacaatggcggtcattgccctcaagtgccctgacattcaggtggttgtggtagatatcaccaagtcccggattgatgcctggaacagtgacacactgccaatctatgagcctggccttgatgaagtcgtgaagcagtgccgtggaaagaacctcttcttcagcaatgacattgagaagcatgttagcgaggctgacatcatctttgtgtcggtaaacaccc

SEQ ID NO: 439619 - DNA, 349 bp, Triticum aestivum
cttgcgcgcctaagtcaaagccgcctcgtcggcggcgcggacgatggaaaccaaaccggaggagccgagggtggtgacgctgcggccggtggaggccacgccggagtccttcgcgcccttcgggcaggtcatcgccgcctcccccgacggcgaccagttcggcccccacgacgcccagctcgacctcaaccgcggcatccctaggttctacatcatgagattggagagcaggccgctcaggttctcgaccatcacccaccacgccagcgtcacgcagtgcctgggctccatcggcggccaggactggtacctcggcgtggccaagccttccgtcgtggacgagcacggt

SEQ ID NO: 439620 - DNA, 466 bp, Triticum aestivum
tgttccagctagctacctagctacgggtacagcagctcagtcgcgatggctcacatcctgggcatccactcacttgtcctcctcctcctcctggcctcttcgtcggcgtctaatgacatcgtgcttggccggaaggccggcgcggctgtggaggcacggccagcaccggggaagtacgcggtgatcatggatgccggcagcactggcacccgcgtccacgtcttcaggttcgacaagaggatggagctcgtcgacgttggcgacgacattgaggtcttcgccacggtgaatccgggactgagctcgtacgccggacggccacaggacgctgccaactccatcatgcctctgcttgagaaggccaacaccgctgtgcctcggtcactcatgaggagaacacccattaaacttggggcgaccgctggactcagactcataggagacgagcacgcggagcaaattcttg

SEQ ID NO: 439621 - DNA, 406 bp, Triticum aestivum
  unsure (1)..(406): unsure at all n locations
tgattgtttctccttgcagccctccttgcgctggcctcatggcaggccactgcctatgatcctagccctcttcaggacttctgcattgccgacatgaaggcgcctgtgcgagtaaatggatttgcttgcaaggacccaatggccgcaaccccggaagacttcttcaacgcagccatgctcgatcagcctagggatactaaggcgagcaaggtcaggtctaacgtcaccaacatcaatgttataaatttccccggcctcaacaccctcggcatctcgttggcacgcatcgactatggaccattanggtgtgaacacgccacacatacacccttcgtgccactgagctcctcacggtgctcgaggggacactctaccttggatttgtcacatccaacccaaacaggct

SEQ ID NO: 439622 - DNA, 196 bp, Triticum aestivum
gagttcaaggaggccttcagcctcttcgacaaggacggagacggctgcatcaccaccaaggagcttggaactgtgatgcgctcgctggggcagaaccccactgaggcagagcttcaggatatgatcaatgaagtggatgctgatggcaatggaacgattgactttcctgaagttcctcaacctgatggcacgtaag

SEQ ID NO: 439623 - DNA, 290 bp, Triticum aestivum
tgtgtaaccccgccttcgccatcgtcaacaaggccactggtctcgccgtcaagcactccctcggccagtcccacccggtgaagctcgtgccattcaacccggagtacctcgacgagtccgtgatgtggacggagagcggcgacgtcggcaagggcttccgctgcattcgcatggtgaacaacaatccgcctcaactttgacgccctcaacggcgacaaggaccacggcggcgtgcacgacggcaccaccgtcgtcctctgggagtgggccaagggcgacaaccagagctg

SEQ ID NO: 439624 - DNA, 362 bp, Triticum aestivum
tcttagcaatccaatagaaaactaaatacatcaccagcatcaatggccaagtcacaggcattggctgcaacattgttgcttgtcctggtggtgtccctcgccgcaatagagagtgttcatggcgtttgcggcatgtcgaatgatgaattcaagctttgtcagcctgcagcggcagtgaataacccaacaggcagtccatctgccgagtgttgtgccgcgctaggaaaggcaaacctatggtgcatctgtcgctacaaaggcatggccggcatatggctgaaaatgtaccatattgacgcacgccgtgccatggcactgccaggcaagtgcggccttaccatgccaagcaactgcccttgatg

SEQ ID NO: 439625 - DNA, 148 bp, Triticum aestivum
cttctcgatctagctagagccatggcgccgaccaagggcgaggggccggccatcggcatcgacctcggcaccacctactcgtgcgtcggcgtgtggcagcacgaccgcgtcgagatcatcgccaacgaccagggcaaccgcaccacgc

SEQ ID NO: 439626 - DNA, 304 bp, Triticum aestivum
tctgtgattgatgaggtgaggactggcgcttaccgccagctcttccaccctgagcagcttatcagtggcaaggaggatgcagccaacaacttcgcccgtggtcattacaccattggcaaggagattgttgatctctgcctagatcgtatcaggaagctttcagacaactgcactggtctgcagggattccttgtcttcaacgctgttggaggtggaactggctctggccttggttcgcttctcctggagcgtctctctgttgactatggaaagaaagtccaagcttgggttcacagtttaccca

SEQ ID NO: 439627 - DNA, 322 bp, Triticum aestivum
gcgtccgcccacgcgtccgcataaacgctcctgcaagcgagaccttcctgccactcccccgtgtggtcaatgtcatggtggccggagccgccccgacaccatcgcttcttgcggcgctgtctatccgtggtttccgtgtcacccacacttacggcctgtctgagacctatggcccgtcgacggtgtgcgcgtggaagcccgagtgggacgacctgccgctggaggagcgctcccgcctgcactgccggcagggcatcaggtacaccgcgctggaaggctggacggtggtgatcccgagacaatgatccctgtcccggctgat

SEQ ID NO: 439628 - DNA, 298 bp, Triticum aestivum
cacgacagatttctgggctgggcatttaccctgctgtcgatcctttggactcgacatcaagaatgctttctccccacgttctgggtgtggatcactacaacactgcccgtggtgtccagaaggttcttcagaactacaagaatcttcaggatatcattgccattttgggtatggatgagctcagtgaggatgataagatgacggttgcttgtgcaaggaagatccagaagttcctgagccagcctttccatgttgccgaagttttcactggtgctccaggaagtatgtggatctaaag

SEQ ID NO: 439629 - DNA, 261 bp, Triticum aestivum
gctcttggttggttgatcaccaatggtgcaggtcttgcatcttaccccattgacactgtccgcagaaggatgatgatgacctccggagaggccgtcaagtacaagagctccttggatgctttccagcagatcctgaagaaggagggtgccaagtccctcttcaagggggctggtgccaacatcctccgtgccattgctggtgctggtgtgctctccggctatgatcagctccagatcctcttcttcggcaagaagtacggc

SEQ ID NO: 439630 - DNA, 271 bp, Triticum aestivum
tttctcacgcgtccgccggcggcggcgcgtagaacaggagaaggagcaggcggcggcggtgcccgaagaggagaagcacggcgacctagcccgagctcgcaaccatggctaggggtttgaagaagcatctgaagaggctcaatgccccgtctcactggatgcttgacaagcttggtggagcttttgcccccaagccatcatctggtcctcacaaggccagggagtgcctgcctctgatcctcatcctgaggaacagactgaaatatgctct

SEQ ID NO: 439631 - DNA, 311 bp, Triticum aestivum
cccgccgccaccgccggcaaccaccggatccggagaagaaagaggcagcgcccggcgaagcgaagcgggggaagagatggtgggcactccgtcctcgccggtggtgaacgtgtacccgctcgccaactacacgttcggcaccaaggaggccaagatggagaaggacacctccgtcgccgaccgcctcgctcgcatgaaggtcaactacatgaaagaaggaatgcgaacaagtgttgaagcaatcctattggtgcaagagcacaaccacccccacatacctgttgttgcaaattggaaacacattttgcaaa

SEQ ID NO: 439632 - DNA, 401 bp, Triticum aestivum
gggcgccattattgcagagcttttttcacaccgacctcttttccctggctcaagtgaagcagacgagatatacaaaatctgtagcattcttggcacaccaaatcagcatacttgggctggaggactgcagctggcagcatctatcaattttcagtttcctcagtctggaagcataaatctttcagaagtggttcccacagcaagtgaagatgcgctgaaccttatttcgtggctttgctcatgggacccacgtaaacggccaaccgcagtggaggttttgcagcatcccttctttcagccatgcttctatgtccccccttcacttcgtttcagatcgaccggatatgcaacaacaccaccatcagttggggctaaaggagctatggaccagaagaatgcta

SEQ ID NO: 439633 - DNA, 358 bp, Triticum aestivum
ttttctttttactggcatggaacaaaacgcgggtccgaacgtggggtcggtgaggggcttcggcgtcatcgacaacatcaagacccagctggagagtgtatgcaagcagaccgtgtcctgcgccgacattctgaccgtcgccgtccgggacttcggtgtcgcccttggagggccatcgtggactgtcccgctggggagacgggattccaccaccgcaagtgcctcgctggcgaacagtgacctccctggcccgagctctagccggtcacagctcgaggccgcgttcctcaagaagaaccttaacacggtcgacatggtcgcgctctcaggcgcgcacaccatcgggaaggcccagtgc

SEQ ID NO: 439634 - DNA, 450 bp, Triticum aestivum
ggcgtgttcatggacaacaccaggcttgccattgctgcgatcggcaagctcatgtttgcccagttctcggagctggtgaacgacctctacaacaacggtttgccttccaacctctccggcgggcgcaacccgagtttggactatggcttcaagggagctgagattgccatggcctcatactgctccgagctccagttcttgggcaacccggtgaccaaccatgtccaaagcgccgagcaacacaatcaagatatcaactctcttggtctcatctcctccaggaagaccgccgaggccattgacatactcaagctcatgtcatccacattcatggtcgccttgtgtcaggccatcgacctccgccatctcgaggagaatgtcaaggatgccgtcaagaactgcgtgaagatgacagccaggaagacattgagcaccaccaacaatgggcac

SEQ ID NO: 439635 - DNA, 485 bp, Triticum aestivum
tctaagcagcaatggagtcgctgactctgcgcgcctcgccgtcgtcgaccgcctcgccgctgctccgcctgcccggccggcggcgcgcggcgtccgtccgcgtctccgcctccgcctccggcgccggcgagccggacctgtccgtgaccgtgaacgggctgaagatgcccaacccgttcgtgatcggctccggcccccccggcaccaactacaccgtcatgaagcgcgccttcgacgagggctggggcggcgtcatcgccaagaccgtgtccttggatgctggaaaagttatcaatgtaactcctcgctatgctcggctcagggcagatcctaatggatctaccaagagtccaatcattggatggcagaacattgaacttatcagtgatcgacctctcgagacaatgcttaacgagttcaagcaactgaagaaggaataccctgataggatactcattggctcaataatggaggaatacaacaaa

SEQ ID NO: 439636 - DNA, 369 bp, Triticum aestivum
cacgcgtccgatctgctgcatcggagctggctacgtcggcggcccaaccatggctgtcattgccatcaagtgcccggcgattgaggtggtggttgtggacatctccaagccccgcattgacacgtggaacagcgacacccttccgatctacgagcccggacttgatgatatgttgtacaaggcttgcagggggaagaacctcttcttcagcactgatgttgagaagcatgtcgccgaggccgacatcatcttcgtctccgtgaacacccccaccaagacccgcggtctgggagccggcaaggctgccgacctcacctactgggagagcgccgcccggatgatcgccgacgtgtccaagtccgacaagat

SEQ ID NO: 439637 - DNA, 215 bp, Triticum aestivum
ttcgtctttggacgcgtgggggcggcggtggagcacgcgaagatggtgaagttcctgaagcccggcaaggcggtgatccttctccagggtcggttcgccggccggaaggcggtcattgtgcgcgttttcgaggagggcacacgcgaccgcccctacggccactgcctcgtcgccggcctagccaagtaccccaagaaggtgatccgcatggactc

SEQ ID NO: 439638 - DNA, 310 bp, Triticum aestivum
ttgtgccgcatggtggagatgtgctgcgccgagcacgacgcgcacgccgccgagacgcagttcctcacgcacaccgccggtcggatgctcgccacgctcgagctcagctccaccccaatcaacaccaagggctacgagacgctgctccgcctcgtggacaatacctgcagcgacagcttcgacctctacaacggcctcttcatgtacaacaagaactcgacggacctgctcaaccgcctcgagtccgtcatggactccgtcaaaaagaggctcttcgacggccctcacgaggtgctccggaagcagctct

SEQ ID NO: 439639 - DNA, 440 bp, Triticum aestivum
tccacgcgtccgtctcgatctagctagagccatggcgccgaccaagggcgaggggccggccatcggcatcgacctcggcaccacctactcgtgcgtcggcgtgtggcagcacgaccgcgtcgagatcatcgccaacgaccagggcaaccgcaccacgccctcgtacgtcgccttcaccgactcggagcgcctcatcggcgatgccgccaagaaccaggtcgccatgaaccccatcaacaccgtcttcgatgcgaagcgtcttattggcagaaggtttgctgatgcccctgtccagagtgatattaagatgtggccgtacaaggttattcctggccccgcagacaagcctatgattgtagtgcagtcaagggtgaggacaagcagttctcagctgaagaaatttcttccatggtcctcatcaagatgcgtgagatcgctga

SEQ ID NO: 439640 - DNA, 387 bp, Triticum aestivum
tggcggtttttgccggatggcccgtggtggatcacagtgggctactcaggtccccgaccccggggacaacttctccggcatgccggtcgtcgacctctccagccctggcgcgccgcgggccatcgccgacgcgtgcgagcgcttcggcttcttcaagctcgtcaaccacggggtgcccgcggacacgatggacaggctcgagtcggaggccgtcaggttcttctcgctgccgcaggccgacaaggaccgctccggcccggcctacccgttcggctacggcagcaagcgcatcgggctcaatggcgacatggggtggctcgagtacctgctcctcgccgtcgacgccgcgtcgctctccgccgcctgcgccgtcccgtcctgcgcgct

SEQ ID NO: 439641 - DNA, 211 bp, Triticum aestivum
cccacgtttccgaccacacgtccgtcggcgccacgagggaccccggcctggtgaagaggatcggcgaggccacggggctcgaagtcagagtcaccggtattcagtacgccttcgcgccgtgcatacgaggtgtgcagagatccgaggtgggggcggtgctacgagagctacagcgaggaccgccggatcgtgcagtccatgacggagctca

SEQ ID NO: 439642 - DNA, 396 bp, Triticum aestivum
tacatcatctcccccacctctctcccaaagccaagagctcaggagaagcaccggccatggagggcatggaggaggacgtgcggctgggcgcgaaccgctactcggagcaccagcccatcggcacggcggcgcagggcggcggcgcggacgagaaggactacaaggagccgcccccggcccccttcttcgaggccggggagctcacctcctggtccttctaccgggccggcatcgccgagttcctggccaccttcctcttcctctacatctcggtgctcaccgtgatgggcgtggtgggcaacccgtccgggtccaagtgcggcaccgtcggcatccagggcatcgcctggagcttcggcggcatgatcttcgtgctcgtctactgcaccgccggca

SEQ ID NO: 439643 - DNA, 411 bp, Triticum aestivum
gtgaatgtgctaatggagtcaaagggtggcaaaaagtctagcagtagtagttccctgatgtacgaagcacgcctcggctacagcattgaagaccttcgacctgctggaggcgccaagaagttctctgctgcatactcgaactgcgcgaagaagccatcctgatatcgtttttggcatccccttctcgtagtttaggattgttatgcaattttattctgactcttttctcccaccaatctctctggcttgctgcttcacgataatcgaccagttctctagtctttctccctctgttcctctctgctctgctctctgactcgaactgcaacaatggctgccccgacctctgcgatcgggtttgagggctacgagaagcgcctcgagatcaccttcttcgaggcatcaatcttt

SEQ ID NO: 439644 - DNA, 400 bp, Triticum aestivum
tcacgcgtccggttttggatactgtatataaggggctgctaatgaatggaacacttattgctgtcaaggtgttatctgtcgaatcaacacaaggactaatggagtttctgaatgaactgatgtcaatttccaacatatctcatggcaatcttgtcagcctttatggctattgtgtggaaggaaaccagaggatccttgtctacaattaccttgagaataatagccttgcacaaacacttctaggttctggccgcagcaatatccagttcaattggagaagtagagtaaatatttgccttggtatcgcccgaggattagcatacctccatgatgatgtcaatccccacattgttcatcgggatatcaaagcaagcaatatacttcttgataaggatctcac

SEQ ID NO: 439645 - DNA, 423 bp, Triticum aestivum
cgcaactggttcgtccgtcgtcgcgtaccgaatctccaccatcccccccgcgcgccgccgcctccgcctccgccctcgacgatgggtctctgggatgccatgtaccgcgtggtgatgcgccgtaacggcgtgtacgtcaccttcgtcgtcgccggcgccttcgctggcgagcggctggtggactacggcgtcaacaaggtctgggagatgaacaacgtcgggaaacggtatcaagacatatcagttctggggcaaaggccggttgaggagtgaagacattgaagcccagatttcccatgatcttttaagtgaaattaggcaccttataaagctccatgttttggcattttcttttggcacaataatattgtaaaactcttgctgggtgttattcactctctctgagcactatggcacccatct

SEQ ID NO: 439646 - DNA, 437 bp, Triticum aestivum
gagctgttccgcatgatggcggaggcggacgcggacggcgacggcttcatcagcctggaggagttcgcggcgctcaacgccacggcggccggcgacgacgaggaggacctgcggctggccttcaaggtggtcgacgcggacggcagcggcgacatctcggccgcggagctggcgagcgtgctccacggcctcggcgagaaggcgacggtgcagcagtgccggcgcatgatcgagggcgtggacaagaacggcgacggcctcatctccttcgacgagttcaaggtcatgatggcctccggcttggccgccaagatggcctgacccgtccatcctcttgttgattcagcgatttcgtccacgcctccctccctccttcctctcgcgtgccgtgcggtgcggtgcggattaagtgcgaattaagtgtacataattcaagg

SEQ ID NO: 439647 - DNA, 340 bp, Triticum aestivum
tgaaatacacaacacgtacatcattcagagctagtcgatcggcaatggcaggtcaggccgagaaagtgttcgtccccaccgacgacgagctgctccaggcgcagtgcgacctgtggcgccacagcctctgctacctcacgcccatggcgctccgctgcgccgtcgacctgggcatccccacggacatccaccggctacggcggcgccgcgtccccgtccgagctcgtcgccgccctgtccctgcccgcgtccaagctgccgttcctcgcccgcctgctccgccagctcgccaccgcggggcgtcttcacctccaccgacgccgtaacgtaccggcttaac

SEQ ID NO: 439648 - DNA, 401 bp, Triticum aestivum
ttgaggacctcgtccccctccagcccgtggggcgcctcgtgctcgaccgcaacgtaggcaacttcttcaacgagaacgagcagctggccttcggtccggggctcgtcgtgcccgggatctactactcggacgacaagatgctgcagtgcagggtgttcgcctacgccgacacgcagcgctaccgactggggcccaactacctgatgctccccgtcaacgcgcccaagtgcggcttcaagaacaaccactacgacggcgccatgaacttcatgcaccgtgacgaggaggtggactactacccgtcacgccacgcgccgctccggcacgccgagccggacagcttccccgtgcccacgcgggccgtcgtcggaaaaagggagaagacgaggatcaagaaggag

SEQ ID NO: 439649 - DNA, 361 bp, Triticum aestivum
ttgcaaatcaccgggtggttctattgtatgatgtccagacgcataatgttgatatgcagcttcctgataactccagcctgccaggttcaggccggggtgtacaacccattatacatttcagtccttcagatgatatgttgctgtggaacggggtcctgtgggatagacgaagtcccactcctatccatcagtttgaccagttcacagactattgtggcggtggctttcatccagctggaaacgaggtgattctaaattcagaggtgtgggatctgagaaagtttaagcttctgaggagtgtcccatccctggaccagacagtaatcaaattcaatggaggggtgatgttatctatgctatc

SEQ ID NO: 439650 - DNA, 381 bp, Triticum aestivum
ttgcgtccttctgtttgaagaagcacgcgcagttctagagcaggagtggggggcctgtcatcctgatactcttggcgtgtacagcaacctggctgcgatctatgatgccatgggaagggtggaggacgcgatcgagatcctggagcacgtgctgaaggtgcgggaggagaagctgggcacggcgaacccggacgtggtggacgagaagaagcggctggcggagctgctgaaggaggcggggcggtcccggaaccggaagcagaagtcgctggagaacctgttcgggtccggcggtgctgcgcggggtgccaagaaggacggcgccgggggcaggcggtggaccaacttcgggttcaggggctgagctgatgagaagaaaac

SEQ ID NO: 439651 - DNA, 378 bp, Triticum aestivum
tacccacgcgtccgccacgcgtccgcccacgcgtccggcaatggcttacgatacgaagtccctgacagtccttattgttggccgcctactctgtgggttgggttctgcaagagctgtcaaccgacggtacattagtgattgtgtccctgcaaggatacgcatgcaagcttcagcaggattcgtaagtgcaagtgcacttggcatggcttgtgggccagcgctggctggtttacttcagtggagatttaaaatctacatggttacgttcagtcagtcgactctacctggttggttgatggcagttgcatggctactgtacttagtttggctatgcatctcattcaaggaaccaaatcgtgccactgaggcagatgatac

SEQ ID NO: 439652 - DNA, 297 bp, Triticum aestivum
ttttgacgagcaggtggtgaaggatgggtaccaatggcggaagtacggacagaaggtgaccaaggacaatccgtgcccgagggcctacttccggtgctcgttcgcgccgtcgtgccaggtgaagaagaaggtgcagcgcagcgccgacgacaagaccgtgcttgtggccacgtacgacggcgatcacaaccacgcaccgtcgcccaagcaacaaggctctggtggcaggaagaggggcggcgcagccgtcctccacgtatcaccggcgccggtgcttgttcaggagcagcggaagca

SEQ ID NO: 439653 - DNA, 413 bp, Triticum aestivum
gtcgggtacaggacggagtggctgaccagctgcgcggtgctctccagcaaggtggccgcgctcgccccccactccaccaacagccacctcgcgctggcggtggcggcttcgaacggggcggtgcttgacttggtccctgtgaagaccgttgatggcagcgctcgcagcctgccggcgcccctgcggatcgcagacctgtccccggcgcccatgcacggctcggagctgcgcgtggcgtaccagggcgtgcctggggcgtacagcgagaaggcgtccggaaaagcctacccgggctccgacgccatcccgtgcgaccagttcgaggtggcgttccaggccgtggagaactggatcgcggaccgggccgtgctccccgtggagaactcgctcggtggcagcatccaccgcaacta

SEQ ID NO: 439654 - DNA, 460 bp, Triticum aestivum
tctccacgcgtccgcggacgcgtgacccacgcgtccgccaaattccctcccaacttctctacctctccggcctccacccaggagagccctaagccggaagcgccttacccttaagctctcttgacctctccccatggcgtccgcgtggtgcctcttggcgccggccgccaccggcgcggcgccgggcgctctcggcgtctccgcctccgaatccagaggcgtcttcgccgcgcgggcggcggtccctgagaggacgcggcgcaggtgggactcgctcgtggtgtgcgtggcccccgacgaggagaagattacgcggcgctcgcccctcgatttccccatcgaatgggagaaacctaagcctgggaggagacctgacatcttcccaaagttcagccctatgaaaacaccattgccccatccattaccagctgatgatcctctggatgatgatgaggaagaa

SEQ ID NO: 439655 - DNA, 432 bp, Triticum aestivum
ttgctgttgaatgggccgtgtttggttgttttttcaatagtggtcaagtttgcagtgcaacttctcgtctacttctccatgagaaaattgcagagcgatttttagatagactagttgaatgggcaaagaacataaaaatctcagacccactggaagaaggttgcaggctgggttcagtcatcagtaaagggcagtatgaaaagattaagaagttcatctcgacagcaagaagtgaaggtgctacaattttgcatggtggtgaccgaccaaagcatctcggaaaagggttctttattgaacctacaattataacagacgttagcacatcaatgcaaatttggagagagggaagtctttggaccagtcatctgtgtcaaagtattcaagacagagagtgaagctgtagagcttgcaaatgatacccactatggc

SEQ ID NO: 439656 - DNA, 391 bp, Triticum aestivum
taacacatcaggaatacacaagagaaaagaagacccaacggagctgaaatcaaatggcatcctccccttctttccttctcctcgctgctcttcttgccttggtctcatggcaggccgttgcctccgatcctggcccgctccaggacttttgtgtcgccgacatgcaatcaccagtgcgtgtcaatggatttgtctgcaagaacccgatggaggtcaacgctgatgacttcttcaaggcagccgccctcgacaagcctagggtgaccaacaaggttggatccaacgtcaccttgatcaatgtcatgcagattgctggactcaacaccctcggcatctcaatcgcgcgcatcgactatgctcccttaggccagaacccaccacatacgcaccc

SEQ ID NO: 439657 - DNA, 329 bp, Triticum aestivum
tttcagagcagagtccgaactctttagcctgaagacctgatcacagagaaaacagtcgtgtgcaagatggtgaagcttgcatttggaagcttcggcgactcgttcagcgccacgtccgtcagatcgtatgtcgcggagttcatcgccaccctcctcttcgtgttcgccggcgtcgggtccgccatttcctacgggcaactgacgcagggtggcgcgctagacccggctggccttgtggcgatcgccatcgcccatgccttcgccctcttcgtcggtgtggccatggctgccaacatctccggcggccacctgaaccccgccgtcacgtt

SEQ ID NO: 439658 - DNA, 372 bp, Triticum aestivum
tgccacgcgtccgcccacgcgtccgccacgcgtccggagctcacgacgtcccttctcggaacgtccaacgttcgtgcgttctccgccgccaatcttcccgtggaagccccgggcacgctggcgctgcgggggaggtacaacgtgacggctgcccgaaggctctccaagtcatcggagatcgtgacctgccacgacttgaagtacccgtatgcggtgtactactgccacacatccaaccccaccgccgtgtacgcggtgacgatggagagcatggaaaggggcgcggcgccggcgacgatggaggcgctggccgtgtgccacctcgacacgtcgcagtggagcctgaagcacccgttctttgcgctgacaacg

SEQ ID NO: 439659 - DNA, 428 bp, Triticum aestivum
ttatgatggttgctgccagctagatattcagtactcaatctcagcgagttgcaagttcactacaacaatgatagatctagagatttcacaaatccatctttgcccacagagcaacgcccaagatcctctcagcttggttataatgatcctagcctttttggtttccaacagcctggagctgcatatggacaggctgcagtgattgctgctgcatttggcggaacattgcctcctggagtgactggtaccaatgatcgctgcacacttatagttagcaacttgaacagtgataaagtcgatgcggataagctcttcaatctattttctatttatggaaatatagtgagaatcaaggtactccgcaacaagccagaccatgcccttgtccagatggctgatgggcttcaggctgagcttgctatacacta

SEQ ID NO: 439660 - DNA, 330 bp, Triticum aestivum
ctcctccttccgcccccctcgctctccatcccctccgggccatcgccgtctgaatccttcactagggttagggtttacgtaacgaacccgcgccatggctaccttcacttaccaggtgagcgcgatggctggcgcctccccgtcgtgctctctcttcgtgagccggcggcggccggcggtcatgcccctgcagatgcgggttgctcgtggcgggaggccgcgcgggttggcgatgcaggtgacgagcgagaaggtggtgggaatcgacctgggcaccaccaactccgccgtcgcggcgatggagggccgcaagccgactgtgatcaccaa

SEQ ID NO: 439661 - DNA, 422 bp, Triticum aestivum
tcacgcgtccgggcacagatgcggttttcctctctcttatacgtgcattcagctggaatcccgctacatttcttcatgcatacacatgccttccccttgcccaagcaacaagacaggctgctaccgcagttttgcaggacattgctgattcgggagttctgtttgcactgttgatgtgtgatcacaaggttattagtcttgtgggagcacaaaaggcaactttgcatgctgatgatatattactacttgcaaatttcatattgtcctccgaatcttttaggacttcggagtctttttcacccatatgcttgccaagatacaatcctatggccttcctatacgcttatgttcatttttttgatgaaaatacttacttgactcttcttacccgagatcagatgccttctttgatttgaaagatt

SEQ ID NO: 439662 - DNA, 368 bp, Triticum aestivum
ttggcgaagcacccgcagattgacgtgccgaacctccaggtgatcaagctcatgcagagcttcaagtctaaggaatatgtcagggagaccttctcgtggcagcattactattggtacctcaccaacgatggcatcgagttcctgcgcaacttcctcaacctgccatctgagatcgtgcctgccactctcaagaagtctgccaggcctcctggccgccctcttggctctggcccacctggtgaccgcccaagggggccacctcgctttgagggtgacagacctaggtatggtgacagggatggctaccgtggcggtcctcgtggtgcacctggtgactatggtggtgagaaaggtggagcccctgcaga

SEQ ID NO: 439663 - DNA, 341 bp, Triticum aestivum
tccacgcgtccgcccacgcgtccggcctcaaggcctcgctcaagcggctcaacatggagtacgtggacgtcgtgtactgccaccggcccgacgcgacgacgccgatcgaggagacggtgcgggccatgaactgggtgatcgatcaggggtgggcgttctactggggcacgagcgagtggaccgcgcagcagatcaccgaggcctggggggtggcgaaccggctcgacctcgtcgggcccatcgtcgagcagcccgagtacaacctcttctcccgccacaaggttgagtctgagtttgtacctctctacagtacttatggcattgggttgactacatggagc

SEQ ID NO: 439664 - DNA, 403 bp, Triticum aestivum
ttcggacgcgtgggtggcgatatttctgctattcctggaatttcagctgctcttgaggaaactataaaaaatgctattgaagactcaataacatggccagtaaggaaagtcattcctatagtacctggggactacagtgatctggaactgaagcctgtcggcacattggaagtcaagcttgtgcaagcaagagatttgacaaacaaggatctgataggaaaatcggatccttttgccactttatatatccgaccattgccagacaaaaccaagagaagtaaaacaattaacaatgatctcaatcccatttggaatgaacacttcgagtttattgttgaagatgctgatactcccagcgtgacagtcaagatttatgacgatgacggtattcaagaatctgatc

SEQ ID NO: 439665 - DNA, 456 bp, Triticum aestivum
gcgcctcgcgctcctcttcttcgtcttcgtcgccgccaccttcgccttctgggaccgccaatcgctcgtcagcgagcacgagtctgagatttcccgattacgaaatgaaataaatcagttgcatggtcagttaaggaaggctggtgttctactggaagaaaatccagcaactgaaattcccagaaaagatcttgtagagattgatcctattaataatgaaaggagggaaaaggttaaggaggctatgctccatgcctggaattcctatgtaaagtatgcatggggaactggtatgagcttcagccacaatcaaagaactggtgttaatagctttggcggtcttggggcaacccttgtggactctctagatacactgtatataatgggcctaagagatgagtttcagaaggccagagactgggtggcagagtcattaagctttgacaggattatgac

SEQ ID NO: 439666 - DNA, 471 bp, Triticum aestivum
tgggtttcttcggtgctgatgcaaggtgtttgttgtatctgagaattcagaatatgggttctcggtttccatcccaccaattaagcaatgggctttatgtctctgggcgacctgagcaaccaaaggagaaggctccggttgtttgctctgcagctatgccatacactgggggtgacatcaagaaatcaggagaactagggaaaatgtttgatctccatgctgagaagtcacggaaatctggccctttgggtaatcaaccttcaaggaatacttcatttggtggtgctgcttccaattctggaccagtatctagtgctgcttctcgatccaactactctggctctatttcagcagcggttcctggcactggaggttcggcaagggcaaaatctaattctggaccgctcaataagcatggagaaccaaaaagagatcctctggccctcagtcaggaggagtgaccccaatggc

SEQ ID NO: 439667 - DNA, 344 bp, Triticum aestivum
ttccacgtgtccggtccgtccgtccgtccgtcggcttaaaccctagacgagccgcccctcctccgactcgccgccgccgccggttgccatggagttctggggccttgaggttaagcctaaccagtccgtcaaggtttcacctgatgatgaccacttcctccatctctcccagggggcccttggcgaagtcaagaaggatgacaaggcaaccatgttcgtcaagatcggcgaccagaagctggccatcgggaccctctctaccgacaagttccctcagatccagtttgacctcgtcttcgagaaggagtttgagctggcacacaattccaagacatccagcgtct

SEQ ID NO: 439668 - DNA, 356 bp, Triticum aestivum
atagctgtcccgatcctcgatctgttctcaaccctccctccgtccgtcgcagctccagatttccttccccatggctccgatcaagatcggcatcaatggtttcggccggatcggcaggcttgtggccagggttgcgctccagagccccgatgtcgagctcgtcgccgttaacgaccccttcatcaccaccgactacatgacctacatgttcaagtatgacactgtccacggacagtggaagcaccatgaagttaaggtgaaggactccaagacccttctcttcggtgagaaggaggttgcggtgtttggctgcaggaacccagaggagatcccatgggctgctgctggtgctgagt

SEQ ID NO: 439669 - DNA, 442 bp, Triticum aestivum
ttcccactcgtccgcggacgcgtgggtgcctggcccaagagcttagcctgctctgtgaatttgatagtttaaagacacaggaacttcttgataggccttgcagtggcatcaatggcttagtcgcatcttttgttgcacgactaagggaggagaatccttctcgtgagcatactattgtaagaactgcacaaaaacttaagccattcccttttaacaagttctcagcaaatggctatcatgatttcctgccgtcgcggctgcgtcccaagttccaggatgttgatagcgatgagtctgcttcctctgaggttctctgcctgatatgtcgaagtccattcagtgaatcagaactccagaattttgaaagcacaaggcgcaagtctcagaagaaaattgatctgtatactgcttattgctgtcaaagctgtcatttccagattct

SEQ ID NO: 439670 - DNA, 269 bp, Triticum aestivum
ggacaaccagcgacagccgccacttcgtccagctccggccccgggaggatcgcttcgctgccaaatcgctcgtcgacggcgggatgggggaggcgtcatctccggcgatcgccaaggatgtcaccgagctgatcgggaacacgccgttggtgtacctcaacaaggtgaccgacgggtgcgtggggcgcgtcgccgccaagctcgagtccatggagccctgctccagcgtcaaggacaggattgggtacagcatgatcaccgacgcggag

SEQ ID NO: 439671 - DNA, 255 bp, Triticum aestivum
gggggaggcgtcatctacggcgatcgccaaggatgtcaccgagctgatcgggaacacgccgttggtgtacctcaacaaggtgaccgacgggtgcatggggcgcgtcgccgccaagctcgagtgccatggagccctgctccaccaacaaggaccggactgggtacaggatgaacaccgacgcggaggagaaggggtccatcgtcccaggcaagagtgtgctgattgaaccaaccagtggcaacacaggcattgggc

SEQ ID NO: 439672 - DNA, 322 bp, Triticum aestivum
ttcggacgcgtgggttctcctccccttccggttcgggttctggttcggttcgggttcggttcgagagagaggccgagtagctagcctagtctagggtttcggtagagaggaagtgagatccatggcggagacggagtaccgctgcttcgtgggcggcctcgcctgggccaccgacgacaacaacctccagcaggccttcagccagtacggcgagatcctcgacgccaagatcatcaacgaccgcgagacggggaggtcccgtgggttcggcttcgtcacgttcggcagcgaggagtcgatgcgccaggccatcgaggagatg

SEQ ID NO: 439673 - DNA, 262 bp, Triticum aestivum
tgtcctcacaaggccacgggcagtgcgctggcctggagatgccttatcctgaggaacagactgaaaggtgctttcacctaccgtgaacagcaatacaatgcttatgcagagttatatcatggttgatggaaaggggcgcactgacaagacctaccctgctgggttcatggacatcattgccatgcccaagactggtgagaactacaggcttctttatgacaccaagggtggcttccgccttaactatacaagggatgaggat

SEQ ID NO: 439674 - DNA, 331 bp, Triticum aestivum
cggacgtttgggcggacgcgtgggtgattgagaggtccaccaaccttgactggtacaagggcccaaccctccttgaggcgcttgaccagatcaacgagcccaagaggccgtcagacaagcccctccggcttcccctccaggacgtttacaagattggtggcattggaactgtgccagttggccgtgttgagactggtgtcatcaagcctggtatggttgctacctttggtcccactggtctgacaactgaggtcaagtccgttgagatgcaccatgagtctctcctggaggcgcttgccggtgacaacgtcggcttcaacgtcaagaatgt

SEQ ID NO: 439675 - DNA, 424 bp, Triticum aestivum
cccacgcgtccggcacctttgaccaaggatgggcagcagggatctcggcagctgctatacaaggtctgttagagctgttggtagagggtggcgcagacaatgtgaaccaatgctttcttgaagctgcacgctatggaagcactgaactcgtccgcatcttacttcagattgctcaaaggaacagcttggacattgatgtggatctagcccttggttttgctgcccactacgggaaactcgaaaccatggggtgcttagttgaggaaggtaatactgtcgccttccttggccctttaatgcgggcagctgagcgtggatgctttcaagttgtggaatggtttgtgaaccgtggctgtcgggacatggagctttgcctggcccttactgctgccacctctagtagccaggttgaagttgctgccta

SEQ ID NO: 439676 - DNA, 443 bp, Triticum aestivum
tttacactgcccagattctgatgagaagcttgatggtaaaggaaggaactttttacatattgctgttgagtataagaaatggaaagttgtttggcatttctgtggtaccccagagctggaaagaatggtgaatgtcatggattatgaagggaatacagctctgcatcttgcagtcaagaatgcagaccagatgatagtgagccttctgatggcaaataaaaatgtactgccaaatatagtgaacaacaagggcctcactgccttagatcttgcggtactggcaactgacaaagggatgagttatacactgaatccacaggtcattatacttcgctgtttagcatggacaggagctgtccttactccgcgtcgcctggatcatttcatagatgagttccacattgggaaagcctctgggaacgagctaaagaaattcagcaaca

SEQ ID NO: 439677 - DNA, 415 bp, Triticum aestivum
tatctcgtttctctcttcgcagcaaggattccccaagccgcaccagtgcccctctcaagttaatacacaacttgtggctccctcgcgtttcttaaatcatcagaaatggccatgccaagcctcatactaccgaaggaactaccatatgaatttttgaagaaaatcacggatgacttctcagatgaccgtaaaattagtgatagtccatttggaatactttataagggaattaatccagatgatggcaaagtgattgctgtgaagaaacttcaggaaaacgcaccgatgccacctaacaaagcatttgcgcaagaggttcagaatgttatggcgctcaaacatgataacatagtacagttggttggattctgcagtgaaacaacaaagagattggtgcagtttgataaaagatata

SEQ ID NO: 439678 - DNA, 426 bp, Triticum aestivum
ttcgactgatgttgcagggcgtggtattgatattcctgatgtcgctcatgttattaactatgagatgcctagttcagttgatacatacacacatcgcatcggaagaacagggcgtgcaggaaagaagggacttgcaacttcattcttgaccctggataacactgatattttcttcgatctgaaacagatgcttactcagagcaatagtcccgtccctccagaacttgctaggcatgaggcgtcaaagtttaagccaggatcagttcccgatagacctccaagaagaaatgacaccgtctatgcatctcactgaagcaatctgccgcagaagaggtgggagatccttcctgggtataattcagggccaccaactgtgtcgagatttagtacttatgaggtacaaacatcataacaattgaacaatta

SEQ ID NO: 439679 - DNA, 429 bp, Triticum aestivum; identical to SEQ ID NO: 436425

SEQ ID NO: 439680 - DNA, 243 bp, Triticum aestivum
ggcgagcctcaccttgccgccggcgcccccgaacccccgccaggacgccatcgacctccacaaggccttcaaagggtttggctgtgatagtacaacagtttcaaatatacttgctcaccgtgactcaatgcaacgtggatacattcaacaggaatacaaaactatgtattctgaggaactttcacgtcgtatatcgtctggactcagtggaaaccacaagaaagcaatgtcgctctggattct

SEQ ID NO: 439681 - DNA, 315 bp, Triticum aestivum
cccacgcgtccgcccacgcgtccgctccgacgaccaccaccgacggcggcgacgatgcaggcggcggcggcggcgacgcggcgccacctcctcgaccagcaccacctctccccggcctcctcggccgccatcgccgccttcagatccgccgcccagccggcgctcgggccccaagggttgggcggggcggatggcgcgaggtacatgtccgcgcgggcgccggccgtcaagggcgccgggcatctcgtccgcaagggcaccggagggaggtcgtccgtgagtggaatcggcgctacggcgtttggagctactgga

SEQ ID NO: 439682 - DNA, 357 bp, Triticum aestivum
ttggacgcttgggcatgcatacagggtcctctttgatgtggatggcaaccctaggttgtcatgttttggtttgatgaagaacagcagagatgggaaaagctacagtactaatttggctttcacacctcctgagtaccttaagacaggtagagtaatccctgagagtgtggtctacagcttcggtaccatcttgcttgacctcctaagtgggaagcacattccaccaagccatgcgcttgaccttatcagaggaaggaacatcaccgtgctcatggattcttgcttggatggtcacgtctccagttctgatggaacagaaatggtgcggttagcatcacgctgcttgcaatatgaagc

SEQ ID NO: 439683 - DNA, 395 bp, Triticum aestivum
gtgacgccaacctcgcgggaagcgccggcgtctgcgcgcgtgcgatcatgatgatgaggcgccagttatcggtctgcgtcctcctcctgctcgtgctcgcggggcagcagcaggcggcggccaagaagtacgccgccatcttcaacttcggggactccctcgtggacgccggcaacctcgtcgtggacggcatccccgagtacctcgccacggcgaagctgccgtatggcatgacctacttcgggtaccccaccggccgctgctccgacggccgcctcgtcgtcgacttcatcgcgcaggagctggggctgccgctgctgccgccgtcgaaggcgcgcaacgccacgttccaccacggcgccaacttcgccatcaccggggccacggcgctggac

SEQ ID NO: 439684 - DNA, 270 bp, Triticum aestivum
tgcgcaggctaccccaaaaccaccggatagtcaatccctcggcgggccacgagcgcgagagaagcagcggcagcgatggagccggagggggtgcggcaccggatggtggaggtggccaagggggtgcggctgcacgtggcggaggtggggcccgagaacggttccgtggtgctgctcgtgcacggtttcccggacctctggtacggctggcgccaccagatggtcgccctggcggtccggggctatcgcgccgtcgcgcccgacatgcgc

SEQ ID NO: 439685 - DNA, 356 bp, Triticum aestivum
tccacgcgtccgggatgttgctctcaagaagaggagaaaatactggtctatgaatacttgccaaacaaaagcttggatttcgtcatctttgatgagaataaaagagctttgctggattggacaaaacttgcagtaataattgaaggggtagcaaatggacttctctacttacataagcactctcgattgcttgtcatacatcgagatcttaaaccaagcaacattctcttggacagtgaaatgaatccaaaaatttcagatttcgggctcgcaaaaatattcagctcaaatgacaccgaaggagacattacaagaagagttgttggcacatatggctacatggcccctgagtatgc

SEQ ID NO: 439686 - DNA, 325 bp, Triticum aestivum
ttccacgcgtccgtacaactacagctcaacacatcatttgcaccggtcgtccttgatcctcacagcaatggcctccaccgacagctggacccacgagattgaatcgccggtggccgcagcgcgcctcttccgcgccggcgtcatggactggcacacactggcccctaagctcgcaccgcacatcgtcgccagcgcccaccctgttgagggcgaaggcggcatcggcagcgtcaggcagttcaacttcacctcagccatgcccttcagcctcatgaaagagaggctcgagttcatcgacgccgacaagtgcgagtgcaagtccacc

SEQ ID NO: 439687 - DNA, 343 bp, Triticum aestivum
cccacgcgtccgcccacgcgtccgcccacgcgttcgcggacgcgtgggtccagttatgcaagcactttcagtttgattggccagtgaatcatacatctctgagtcctgacgggaagcttgttgtaattgttggggatgatcctaatggtttacttattgatgccaattcaggaaagactcttcattccatgaaaggtcatcatgacttctcattcgcatcagcctggagccctgatggccgaacgtttgctactgggaaccaagacaagacatgccgaatctgggacgcgaggaacctatcaaaagcagtccatgtattgaagggtaaccttggagccatcag

SEQ ID NO: 439688 - DNA, 304 bp, Triticum aestivum
ttctctggttctccaactcggcctacatctacctctccgtctccttcatccagatgctcaaggcgctcatgcccgtcgccgtctactccatcggcgtcctcttcaagaaggagaccttccgctcctcctccatgctcaacatgctctccatctccttcggcgtcgccatcgccgcctacggcgaggccaggttcgacctccgcggcgtcgcgctccagctcgccgccgtcgccttcgaggccacccgcctcgtgctcatccagatcctgctcacctccaagggcatctcgctcaaccccatcac

SEQ ID NO: 439689 - DNA, 432 bp, Triticum aestivum
  unsure (1)..(432): unsure at all n locations
tctcctctcgcccgcgtctttcctcctcgacccgccgccgccgccgccgccgccatggccgccgggacgaagaccgtcgactacgcggcggaaagagcgctcgccaaggacttcctcaccaatttcgccggcccgcacggcgagcccaagtaccagaacatcctgcaagacatcgcgaaccggaagatccgcgccgcccagatcgagctggacgacctgttccactacaaggatgtggacgaggagttcctgcagagggtcaccgagaacaccaagcgctacattggcatattcgccgagggccgtggacgagctcatgcccgagcccacggaggccttcgctgtggacgaggacagggacatcttgatgacgcancgcgtggatgaaggggctgatggaggcgctgacggcacagacccttacagaggatg

SEQ ID NO: 439690 - DNA, 422 bp, Triticum aestivum
atatgagaggggagggatgcctatgagagatgccggtgcgtcacaaagaccaacaattggggcattggcttctgcacttgccaatacacccccagagacgcaaagaatgatgcttggcgagaacctgtaccctgttgttgatcagctggagcacgaccaggctgccaaggtgaccggcatgctcctggagatggatcagactgaggtgcttcacctgcttgagtcgccagacgctctcaaggccaaggttgctgaagccatggaggttctccgcagcgctcagcagcacaccaaccagtcccctgagcagcagctggcttcgctctcgctgaatgacggcctcatctcttcctaagctctacggcgacaatttttgcaccatatcaaaacttatctagactgaaaatgacttggctttattg

SEQ ID NO: 439691 - DNA, 182 bp, Triticum aestivum
tgccagccccgtgcccgtgcacgtcgaccacaccgccatcctcgaggcgccggagaccagggtcaccacgctcgacaacggcctgcgcgtcgccaccgagtcctcgctctcctcgcgcacggccaccgtgggcgtctggatcgacgccgggagcaggtacgagacggaggaggcggccgggg

SEQ ID NO: 439692 - DNA, 201 bp, Triticum aestivum
ccctaaccctagtcctagcttagcttacttcttctcgatctagctagagccatggcgccaaccaagggcgaggggccggccatcggaatctacctcggcaccacctactcgtgcgtcggcgtgtggcagcacgaccgcgtcgagatcatcgccaacgaccagggcaaccgcaccacgccctcgtacgtcgccttcaccgac

SEQ ID NO: 439693 - DNA, 137 bp, Triticum aestivum
ttcgtgcttttggctgacgtctcggggcagaacaccccgcaggacttcgtcaacctgcacaaccgcgcccgcgccgtggacggtgtctgtccggtggcgtgggacaacaacgtggccaggtttgcgcaggactgggc

SEQ ID NO: 439694 - DNA, 228 bp, Triticum aestivum
tggggggtttccgtccatccgagctcttaaagctgctggtgaatcatctggagccgctaaccgagcagcagatgttgggattgaccaacctccagcaatcttcccagcaggcagaggatgcattgtcacaaggaatggaagcattgcagcaatcactggcggagactttggctggatctctgggttcctccgctggctcttcagggaatgttgcaaactacatgggtc

SEQ ID NO: 439695 - DNA, 358 bp, Triticum aestivum
gcgggagggcggctactgggtgctcaaggagaagtatcgcacgagcctgaacccgcaggagaaggtgaagctgggcaaggagcccatggcgctcttcacggagggcggcatcaaggacctagccaagctccccatggagcagatcgacgccgacaagctcaccaaggaggacgtcgacgtgcggctcaagtggctcggcctcttccaccgccgcaagcagcagtatgggcggctcatgatgcgtctgaagctgcccaacggcgtgacgacgagcgagcagacgaggtacctggcgagcgtgatcgagaagtacggcaaggagggctgcgccgacgtgacgacccggcagaactggcag

SEQ ID NO: 439696 - DNA, 231 bp, Triticum aestivum
actttccacgcgtgcgcccacgcgtccgcgttatctggatgcaggaaccgtgaaatggactaacatatatgaggaagagttgcaaaatttccttcaggagggggcactctccgagctaattgtcgcctactctcgtgaaggaccaaccaaagaatatgtgcagcataagatggtggacaaggccaccgagatttggaacgtcatttctcaaggtggttacatatatgtgtg

SEQ ID NO: 439697 - DNA, 264 bp, Triticum aestivum
tttaagttttgcagtggtgcatttgtagattggaagcatggtttgccactgacgtggataatatatctttgaaaaattgggatcaggaacatgttcttactggtggacatgggcttatggtgaatggctacgaccctgttatcaaagctctctctcgagatctagatgtccacctgaaccacagggttaccaaaatcatccagcggtataataaagtcatcgtatgcgtggaagacgggacaagctttgttgcagatgctgcta

SEQ ID NO: 439698 - DNA, 373 bp, Triticum aestivum
gcgcagacccactcgtccggttgcattccagctcaggcgagcagcgaccacctttcggcgagggtagcagcgatggagggcaaggaggaggacgtgcggctcggagcgaacaagtactcggagcggcagcccatcggcacggcggcgcaggggtccgaggacaaggactacaaggagcccccgccggcgccgctgttcgagcccggcgagctcaagtcctggtccttctaccgcgccagcatcggcgagttcatggccaccttcctcttcctctacgtcaccatcctcaccgtgatgggctacagcggcgccacctccaagtgcgccaccgtcggcatccagggcatcgcctggtccttcggcggcatgatct

SEQ ID NO: 439699 - DNA, 372 bp, Triticum aestivum
ttccacgcgtccgcccacgcgtccgcccacgcgtccggaactttccttatggcaggaagccttccgatctgtggaggatatccatggcttgatgagcttggttaagagaactccaaagccatctgtcctggtcgtatattatgccaagctgactgaaatattctggatatctgagagtcacctgtatcatgcatatgcatggctgaagcttttcaacttgcagaagagctacaacaagaatttaactcagaaggatctgcaattactagcatcttctgttttgcttgctgcactttctgttacaccatatgaccataaatatggtgcatctcatcttgagcttgaaaatgaaaaggaccgtagcttgcgtat

SEQ ID NO: 439700 - DNA, 400 bp, Triticum aestivum
tctcacgcgtccgccagtatttggggaaccagtagcatctcaattatcaagagcggcaagagatgggatctctccccgtcccgagtgtgcaggccttggtggctgccaccggcggagacgatgtgccgctgaggtatctccggccagaggcggcagcagaagcggtcaccagcgacggcgacggcgacggcgaggcacagatccccatcatcgaccaccaaaggctgctgctggagctggaccatggtggcgaggagtctgcacgcctccacagagcctgccaagactggggcttcttccagttagttaaccacagtgtcccagacgatgtggtggagagcatgaaggccaacatccagcaattcttccagctacccgcagagacgaagaagcgattcgc

SEQ ID NO: 439701 - DNA, 210 bp, Triticum aestivum
tttgcctttcgaatgggccgaccgccacgccactgagaaccgcatgcgcctccacgccctacgggtgatccgggagaggaagatggacggtgtggttgtgtttgcggatgacagcaacgtgcatagcatggagctgttcgatgaggtgcagaaggtccagtggatggccgcggtgtctgtgggtattcttgcgcacaccggaacagcaga

SEQ ID NO: 439702 - DNA, 421 bp, Triticum aestivum
tggactgttgttagcatcccttgtggtcctactgcattagctgtcaaggaagcggcatggggacttgctcgctatgctgctattgctcaggacaatggtttagtgccaattgtggagccagagatccttctggacggtgaccatggcatcgagagaactcttgaggtggcagagaaggtgtggtcagaggtgttcttctacctggccgaaaacaatgttctgtttgagggcatcctgctgaaacccagcatggttacccctggtgctgagcacaaggagaaggcttctccagaagccattgcgaagaacaccctcacaatgctgaggaggagagtaccgaccgcggtccctggaatcatgttcctttccggcggacagtccgagctggaggcaaccatgaacctgaacgcgatgaaccagt

SEQ ID NO: 439703 - DNA, 313 bp, Triticum aestivum
gccggccagccatggcgcccaggacgtccgacaagacggcgacgccgcccgctgccggggccgccgcgaccgggctggcgctcggagtcggcggcggcaacggcgggggcgtcggcacgcactaccgcggcgtcaggaagcggccgtggggccggtacgcggcggagatccgcgacccggccaagaagagccgggtgtggctcggcacgtacgacacggccgaggaggccgtccgcgcctacgacgccgccgcgcgcgagtaccgcggcaacaaggccaagaccaacttccccttcgcctccgcctccgcgcc

SEQ ID NO: 439704 - DNA, 430 bp, Triticum aestivum
  unsure (1)..(430): unsure at all n locations
ctccgctcccctcctctctctcctccatcctccggtttctgatcgcgaccatgggaacccgcgggctcgccgtgctgctcctcgcggcggtgctgctgcagggcctcctcccggcctcggaggcggagggcctggtgcggatcgcgctgaagaagcgcgccatcgaccggaacagccgcgtcgccaagagcctctccgaccgcgaggaggtgcacctcctcggcggcgcctccaacaccctcccctccgaggaggagggcgacatcgtgtccctcaagaactacatgaacgcgcagtacttcggggagaatcggcgtcggcacgccgccgcagaagttcaccgtcatcttcgacaccggcagctccaacctctgggtgccctccgccaagtgctacttctcgattgcgtgctacctncacgcacgctaca

SEQ ID NO: 439705 - DNA, 333 bp, Triticum aestivum; identical to SEQ ID NO: 436434

SEQ ID NO: 439706 - DNA, 363 bp, Triticum aestivum
ttctgctatcaaaggcagatactggtcctgaggggcagtatagcactttgcaggttcttgtcaatattttggagcatcctgaatgccgagctgattacaacttgacaccccggcaaacaattgagccagtcattaccttactgaattcatctccaccagctgtgcaacaattggctgcggagctcctatctcatcttctcctggaagaacaccttcagaaggatacagtagcagagcaatccatccctgccctcattcaaattctctcatcaggtttgccaaatttacagcagagagctataaaagctctcgctaatcttgcattagcctggccaaatacaattgcaaaggagggtggtgtgt

SEQ ID NO: 439707 - DNA, 368 bp, Triticum aestivum
tttggattcgtgggtccgcacccaagcttgggcaccaatcttccgcactctccccttgccgccgggatggacgtgcagatgggcgagccgcaggcggtccctgctcccgccgccgtagaggcggcgccggccccctccaccctccaacatctgaaggagatcgccgcggtgatcgaggcggggtcgctctccaaggaggtccgccggatctcccgcgccgtccgtctcaccgtcgccctgcgccggcgcctcgccgcccgagacgtctcggccttcctcgccttcgccctcccggccaacagcgacgcatacgcccgcctcactcccctcctccccaaggaagatgaagctgagatggatgttgatgc

SEQ ID NO: 439708 - DNA, 456 bp, Triticum aestivum
tttgagagcgttggagacattccagatgctgaggtcaaaccaccagataatgtcttatttgtttgcaagctcaacccagtgacacaggatgaagatttatatacaatcttctcgcgttttggaagtgtgacatcagctgaaataattcgtgacttcaagactggggatagtttatgctatgctttcattgaattcgaggaaaaggaggcatgcgaacgtgcatattttaagatggataattgtctgattgatgatcggaggatccatgttgattttagccaaagtgtttcaaaattgtggggtcagttcagacaaagtaaacgaaatggaaataaagatggttgcttcaagtgtggtgctccagatcacatagcccgagattgtgaccaggatggtgagcagaaacctaaagccccaaattatgttctgaaagatgataacactcaacgaggcggg

SEQ ID NO: 439709 - DNA, 491 bp, Triticum aestivum
tgtttccttggacgcgtgggctcgccgagaaatctcctccgatcgaagcgaagccaaggctctctcgtcctcctccccaagatgcagatcttcgtgaagacccttaccggcaagaccatcacccttgaggtcgagtcctctgacaccatcgacaacgtcaaggcaaagatccaggacaaggagggcatccccccggaccagcagcgtctcatctttgctggcaagcagctcgaggatggccgcacccttgcggactacaacatccagaaggagtccaccctccacctggtgctcaggctccgtggtggcatgcagatcttcgtcaagaccctcacgggcaagaccatcacactggaggttgagtcctcggacaccatcgataacgtgaaggccaagatccaggacaaggagggcatccctccggaccagcagcgcctgatctttgctggcaagcagcttgaggatggccgtaccctggctgactacaacat

SEQ ID NO: 439710 - DNA, 377 bp, Triticum aestivum
tccacgcgtccgcccacgcgtccgcccacgcgttcggtcggcgagcacgtcgacgtcaaggtgaacggcgccgtccacaagggcatgccgcacaagttctaccacggccgcaccggccgcgtctgcaacgtcaccaagcgcgccatcggcgtcgagatcaacaagcaggtcggcaacaggatcatcaagaagaggatccatgtccgtgtggagcacgtgcagccatccaggtgcaacgaggagttcctccagaggaaactcaacaacgacaagctgaaggcggaggccaaggcgcgcggcgaggtcatcagcaccaagaggcagccagcagggcccaagccggggttcatggttgagggcaccaccatcgagacggt

SEQ ID NO: 439711 - DNA, 486 bp, Triticum aestivum
ctccctttcctttccttcccccctcgcttcgtttgtgcgttgcctttttctttccgccgcggcaactgtgagccggcccgatcgagcgagccgccccccacgcacctcaagaaaccggcataattccatccatccatccgctgccgcgtcctacgcggccatttggggcgctcgtggggtgttcgtcacatcaaccaggccaagatcagatcggcggcgacgacggcgaccatgttcagcgggacgcagcagaagtgcaaggtgtgcaccaagacggtgtaccccatggaccagctctccaccgacggcgccgtcttacaccgcgcctgcttcaagtgccaccactgcaagtgcaccctctcctttagcagctactcctcgttcgaaggggtgccctactgcaagccccatttcgcgcagctgttcaaggagaccgggagctacaacaggagcttccaatcacaatcacccgcaaaatctgcaacg

SEQ ID NO: 439712 - DNA, 268 bp, Triticum aestivum
cccacgcgtccggcccctcgatgttcagaggcctcggagcgaatggagcttagtcgagtgggcaaagccatacatacgggacttcaggatcgaggagatcgtggaccctggcataaaggggcagtactgctcggaggccatgtggagggtgctggaggtggccacggcgtgcaccgagtccttctcgaccttccgcccgagcatggaggacatcgcgcgggagctggaggacgcgctcatcatcgagaacaacgcttccgagtacatg

SEQ ID NO: 439713 - DNA, 374 bp, Triticum aestivum
ttaatgatgacaaacagtatgtgtgggagtccaaagctgatggatcattcgctatttccgaggatacatggaatgaacccctgggccgtggaactgagatcaaactgcatctccgcgatgaggctaaggagtacttggaagaaggcaagctgaaggacttggtgaagaagtactctgagttcatcaacttccccatttacttgtgggcaaccaaggaggtcgatgttgaagtgccagctgatgaggaatcaagtgaagaagaggaatcaaccacagagacgacagaggaagaagagacagaagatgatgaagagaagaagccaaagacaaagactgtgaaggagacgactactgaatgggagcttctgaatgat

SEQ ID NO: 439714 - DNA, 178 bp, Triticum aestivum
tgggacggagaaggagcacgaaccctcagccccatggcctccatctcggtcccggaccctgccccttccccaaccgaggatgcagagaacataaggaaagcagtacatgggtgggggacggacgagaacgcgctgatcgagatcctgggccaccggacggcggcgcagcgcgcggaga

SEQ ID NO: 439715 - DNA, 366 bp, Triticum aestivum
tccacgcgtccgcccacgcgtccggcttgttattgatcgtgccatctctactgtgagtgtgatcgagctagtgatcaaacgcgagaagatggcgttgcactggagcagcggcctcgcggtcgccgtcgcggcggcgctggccgtgtccgcgctcttcccggcgggcgctgcgggtcacccgccgttcccaggcccgttggtcccgcagttctacgagcacacgtgcccgcagatgcaggcgttggtgggcgccatcgtggccaaggagcacgccaaggatccccgcatggtggcgtccctgctccggctgcacttccacgactgcttcgtgcagggctgcgacgcgtcggtgctgctcgacgccga

SEQ ID NO: 439716 - DNA, 310 bp, Triticum aestivum
tatggaatgttttgccatggctagacgctggttggataatgagcctctatgacctgccctatttaattctatcattttgttcatgatagaatcatgagggattttaatgtacaatacaagatcagacctgcaccaagtattaattaaattatgtaaaaaaaaggaggatggacctcggcctatacatctggttgatgcatacagccagtttattatgaagccatcgctgagctggattccctcggagaagatttctacaaggacagcaccctgataatgcaacttctccgtgacaatctcaccttgtgga

SEQ ID NO: 439717 - DNA, 262 bp, Triticum aestivum
ttggacgcgtgggttggatagtgaatgaaatgaagaaatcaggtctacgagggcgtggaggtgcaggttttccgtctggcctcaaatggtctttcatgcccaaagtgtctgatggacgtccttcttatcttgttgttaatgctgatgagagtgaaccaggaacttgtaaagacagggaaatcatgcgccatgacccccacaagcttctggaaggttgcctgattgctggagttggaatgagggcatcagctgcttacatcta

SEQ ID NO: 439718 - DNA, 406 bp, Triticum aestivum
tcacgcgtccgtcctcctaaaccactctccctatccccgtgtccagaagctaccccccggctccaatggcggcgaaggaaccgatgcgcgtgctcgtcaccggcgccgcaggacaaatcggatatgctcttgttcccatgattgccaggggagttatgcttggtgcagaccagcctgttattctgcatatgctggatattgaatttgctgctgaagctcttaaaggtgtcaagatggagttgattgatgccgcatttccacttctcaagggagttgttgcaacaactgatgttgttgaggcctgcactggtgtgaatgttgcggttatggttggtggattccccaggaaggaaggaatggaaaggaaggatgttatgacgaaaaatgtttcaatctacaaagctca

SEQ ID NO: 439719 - DNA, 289 bp, Triticum aestivum
gattttgccagggaccacgctatctggattggccaagcttaagacagtttttaagaaggatgggactacaactgcaggtaattctagccaagtgagtgatggcgctggagctgttcttctcatgaagagatctgtagcggtgagcaaggggctccctatacttggcgttttcaggagtttcgctgctgttggagtggatccagctgttatgggcgtcggtcctgcggtcgccatacctgctgcagtcaagtctgctggccttgacattgacgacattgatctctttgaa

SEQ ID NO: 439720 - DNA, 208 bp, Triticum aestivum
ggactttgataacaggatggtcaaccactttgtccaggaattcaagaggaagaacaagaaggacatcagcggcaaccccagggctctccgtaggctgaggacagcttgtgagcgggcgaagaggaccctctcctccactgcacaaaccaccattgagattgactcgctgtatgagggcatcgacttctacacgaccatcacccgtgcc

SEQ ID NO: 439721 - DNA, 276 bp, Triticum aestivum
ttcacgcgtccggatgaagatagcggaatcgagatagggcgtacagttaagaagttccctcttttaacaccaagagagtacatattggcatggcgagtttgggcatcagatgagaactctttctattgcttggtcaaggaatgtgaacactctcttgcgccaatacaaagaaaatttgttcgagtacgacttctgagatcggggtggtgtattaggaaagtccctggaagagacgcatgtgaaatcacagtgctgcaccatgaagacaatggcatg

SEQ ID NO: 439722 - DNA, 309 bp, Triticum aestivum
tcacgcgtccgggtgaattcactgattctcagattgttgtgatgcttggtgagaacggcacagggaaaactacattcatcagaatgctggccgggttgttgaagccagataccatggaaggaagtgaggttgaaattcctgaattcaatgtgtcctacaagcctcaaaagatcagcccaaaattccagcatccagtgaggcacttgctgcattcgaaaatacgcgattcatatactcatcctcagtttgtatctgatgttatgaaaccactacaaattgagcaactcatggaccaggaagtcattaatt

SEQ ID NO: 439723 - DNA, 304 bp, Triticum aestivum
  unsure (1)..(304): unsure at all n locations
gcggcgcaagccatggccacggtggagcagcagcagcagatcgagcacagccacctcgccatcagaggcctcagcctccacgtagcgcaagcaggcacaggcgagctcgggacggtgctgttcctgcacggcttcccggagatatggtactcgtggcgccaccagatgctggccgtggccgccgccgggtaccgcgccatcgcgccggactggcgggggtatggcctctccgaccagccaccggagccggaggctggggcctacagcgacctgacagaggatctnctcgccgtcctggatgcgc

SEQ ID NO: 439724 - DNA, 177 bp, Triticum aestivum
tgtgcttagggtgaagcagaggccaagtacctgtctggcctcggtatcgcccgccagcgccaggccattgtggatggcctgagggacagcgtcctgggcttctcagtcaatgtgcctggcactcactgcaaaggacgtgatggacatggtgctgatcacccagtactttgataccta

SEQ ID NO: 439725 - DNA, 225 bp, Triticum aestivum
acctgtttggtggcgatgtgctgcgccgagcacgacgcgcacgccggcgagacgcagtgcctcacccacaccgtcggacggatgctcgccacgctcgagctcaggtccaccccaatcaacaccaagggctacgagacgctgctccggctcgtcgacaacacctgcagcgacagcttcgacctctacaacggcctcttcatgtacaacaagaactccaccgacctg

SEQ ID NO: 439726 - DNA, 373 bp, Triticum aestivum
tttcggtgtccatccaaggacagctttctatcaggcatttctcaagttggcgaagtccatatggttattgcacaggctggcgtactctttcgatccaaaggtcagggtcttccaagtgaaaaagggaagcgagttctcggagattcacatggaaagcgtagtcaagaacatggtcttggatgaaagtgccgagaggcctaaagtaggtttaatggtgatgcctggtttcttgattgggactagcgtcatacaggcccgagtgtacctatcagatgtcaaatatgctgactgaaaatgctgcagctgcttgggaagattcagggcgtattagttcctgcgggctcatttagttgcatctgaaatggcgggggac

SEQ ID NO: 439727 - DNA, 256 bp, Triticum aestivum
tccacgcgtccgcgcctaccttggcaaggataccagggagacaacaaaggttttcttgtcagcaagaaaaagatggcgacctctcctgaatctctgtgtggcatttgtccacagtcttttcgacactttgttgagtatgttgtgaacttgaagtttgacgaagaacctaattacgccaagtgcatctctctttttgacggcattgttggtccacatccagacaccagaccaataaacacagatggtgctcagaagc

SEQ ID NO: 439728 - DNA, 440 bp, Triticum aestivum
tggaagcctggatgattggctccataacagggatgatggtgctatctcattgcttgactggcctactcggctcaagatcgcacaaggagcaagcctgggcctttcttatatccatgatgcctgcaaccctcaaattgtccatcgtgacatcaaatctggtaatatcctactggacaaagaatttaaagcttatgttgcagactttgggctagccagattgatccttcccaacaacactcatgtcacaacggagctggtaggtacgatgggttacatcccacccgagtatgggcaatcatgggttgctacgctgagaggtgatatatacagtttcggagtagtcctgcttgagctgctcacaggaaggcgacctgtttcagtgttttgtacaccaaaagaacttgtcccatgggttttacagatgaggtctgagggaaagc

SEQ ID NO: 439729 - DNA, 434 bp, Triticum aestivum
  unsure (1)..(434): unsure at all n locations
tcttttctgctgcatctcagatctcgcgggcaccaacaaaccaaagctctctctcccgatcactctcccttccaggaagcttggaccgaaggaaggagctgagaggaggccatgggggaattctccaaggaatcttgcccttccgtgaagaacattttgctactggattctgaggggaagcgtgttgctgtgaagtacttctccgatgattggccgaataacgcatctaggttgacctttgaaaagtccatttttactaaaactctgaagacaaatgcacgctccgaagctgagataacattgcttgatggttatattgttgtttacaangtttgtacaagacctacactttttcgtcactgccggagatgatgagaatgagctcatcatacaaatgtgcacagggttttgctgattcggttggtcttctacta

SEQ ID NO: 439730 - DNA, 434 bp, Triticum aestivum
tttttgttcctctctgctctgctttctgactcaaaactgcaacaatggctgccccgacctctgcgatcggatttgagggctacgagaagcgccttgatatcaccttctctgaggcatcaatctttgctgaccctcatggtcgtggcctgcgcgccctctccagggcccagattgactctgttcttgatcttgcacggtgcaccattgtgtccgagctctccaacaaggactttgactcgtacgtgctatccgagtcgagcttgtttatctactctcagaagattgtgatcaagacctgtgggactaccatgctcctgctcaccattccaaggattctcgagctggctgaagagctgtgcatgtcgcttgctgctgtgaagtactcccgtgggatgttcatcttccccggtgcacagcctgctccccacaggagc

SEQ ID NO: 439731 - DNA, 389 bp, Triticum aestivum
ttctttcgtccgataaaagcaaactggagagaccatctgttcctctccctaccaaccatcttccttagcgacgaggccacccagagctccacaggaaagaagcgcgaccggagaaagaaggagagcaagatgtcgtcggtgttcagcggcgatgagacggcgcccttcttcggcttcctcggcgccgccgccgccctcgtcttctcatgcatgggggcggcctacgggacggccaagagcggcgtcggggtggcgtccatgggagtcatgcggccggagcttgtcatgaagtccatcgtgcccgtcgtcatggcgggagtgctcggaatctacggcctcatcatcgccgtcatcatcagcaccgggatcaaccccaaggccaagcccta

SEQ ID NO: 439732 - DNA, 444 bp, Triticum aestivum
tttgtcgcgtgggcggacgcgtgggcgcacccgcacccgcacccgcacaacagagacccagagcaggcgacacaccgcccaggcccagctgcagctccggcgagatctccggcgacccttcgagatgagccgcggatcgggcgcgggctacgaccgccacatcaccatgttctcccccgagggccgcctctaccaagtcgagtacgcgttcaaggcggtcaagtcggcgggggtcacctcgatcggcgtccgcggcaaggactccgtctgcgtcgtcacccagaagaaagtcccggacaagttgctggatgacaccagcatcacgcacctcttgtcgattaccaagtacaccggcttgcttgccaccggcctcacagctgatgcgaggtccttggtctcccaagcaagaaatgaagcagctgagttccgtaaaaaatggggata

SEQ ID NO: 439733 - DNA, 412 bp, Triticum aestivum
ttctttctggacgagctcgctctcgggctcgaggcctcagggatggcgttcctgtgggtggtgaggacggacaagtggtctcccccggagcggtggcacgagcgtgttggaggcaggggaatggtggccaccgcctgggctccgcaaagggctatcctggggcaccgggcggtgggggccttcgtgacgcactgcggatggaactccgtcctggagacggtggcggcgggcgtgccggtgctcacatggcccatagtgttcgagcagttcatcaccgagaggctgctcacgcaggtcctagggatcggggagcggctgtggccggacggcgccggcgttcggagcacgaggtatgaagaaaacgaggtaatccccgcccaagatgtggcacgggcattgacgaccttcatgc

SEQ ID NO: 439734 - DNA, 425 bp, Triticum aestivum
ttctcacgcgtccgcggacgcgtggggcgcgtcctcaacaccggctccccgatcactgttcctgttggtagggcgactcttgggcgtattatcaatgttattggtgagccaattgatcacaagggagatataaaaacaaacagttacctgcctatccatcgtgaagcccctgctttcgttgagcaagctaccgagcaacaaatccttgttactggaattaaggttgtggatctacttgcaccctatcaaagaggtggtaaaattggtctcttcggtggtgcaggggtgggcaaagacagagaaaccaccatgggccttggcaacgttgttggagaacgtacgcgtgagggtaatgacttgtacagggaaatgattgagagtggtgtcattaagcttgacgacaagcagagtgagagcaagtgtgc

SEQ ID NO: 439735 - DNA, 384 bp, Triticum aestivum
tttctggcaaccagccgcggcggcagtcgggtctccgctttcacgatgcgcgcggtggcgcgcatgtcgagggcgcggtggttcatcttcctgaggcgggtataccagtaccagaacggcccgaggtctgacctgggctccaaccctttcaactcatccggctggctcgctcttgagctcggcgtgatcgtcgcgcagatggtcatcaccaccaccgttgtggccacctccccaaaggaacgccccgcgtggccgcttcggctctgggtctgcgcgtacaacgtcggcaacgtgctcagcctcccactcctctactggcgccaccgacattcatcggccgccggacgaggcgacgaccccgagatgcacggtgccggtgacgct

SEQ ID NO: 439736 - DNA, 439 bp, Triticum aestivum
ttactcatgcactcccagaaccactggggcggggcgttcgacatcgacggcgcggaggacgaccagagccgcaacatggacatcgaccgcggcgcgctgcagcaccagcaccagctggacgagacgcagcagagctggctgctcggcccgccggaggccaagaagaaggaccgctacgtcgacctcggctgcgtcgtcgtcaagcgcaagctcctctggtggatgctctgggtcgtgctcggcgccttcgtcctcatcggcctccccatcatcatcgccaagaacatccccaagaagaagccccacgccccgccgtccgacaagtacaccgacgccctccacaaggcgctcctcttcttcaacgcccagaaatccggcaagcttcctaagaacaacggcatcccgtggcgcgggaactcgggcatgaaggacggcgcgg

SEQ ID NO: 439737 - DNA, 321 bp, Triticum aestivum
tttctccgtcacggcccaggcaaagtgaaacaacgaaaagcaaacagcacatccgaagcatccatcccctgagtttgacagcttcctaatcgcagttcgtcctcgcccaaatcgagcagccatgtcgctgattccccgcggcaacgccttcgaccccttctccctcgacctctgggaccccttcgacggcttccccttcggctccggcggcagcagcagcggtggcagcctcttcccctcgttcccgcgcatcagctccgagaccgcggccttcgccggcgcgcggatcgactggaaggagacgcccgaggcgcacgtgtt

SEQ ID NO: 439738 - DNA, 433 bp, Triticum aestivum
ttcttacaccactgtagatcagagctacaaagcaattacataccggtgttgtctttgtggtgcctcttcaaattctttccacttgttgcccactgacgaagttgtaccgagcagaggaaaagctgacctggacgattctagcttgaacatggataatgaggtttgcttcacaattttgcaaacattgattcttttactaagtttatcaacaagtcgatatagaatcagtaactgcagttctggaactatttacaggaatgtgcggctgcttttgtatttttcaaaactcggtatggagcacttgttgcgtcagacgttcttcagacatcgaaccctaccaagtgggttactgatccagctccagaaccaaatgatgtgtattggtcaaacatttggcttccctacaagcagctttggattcgaaggatagcga

SEQ ID NO: 439739 - DNA, 250 bp, Triticum aestivum
ttttcgccggagcaccccacccaaccgcctcggtcgtcggcgaggaacctgctccggtaggcggagatgggcgggcacggcgggctgaacatcctgccgcagaagcggcggaacgtctacaggttcgacaaccaggagaaggtccgcgtcgacgaggccgaggccgcccgccaggaccagctccagcgcgaggccacccgccgccgagagtcgcacgcccgcctcgtcgcgctccgccgcaaccggggcc

SEQ ID NO: 439740 - DNA, 411 bp, Triticum aestivum
tgttcttccacgcgtccgcaccactttgctccatctctcagactccaatctctctctcctattggacggacggtcagagtcagacccctttgccttagcccgtaaggttacgtggacattgtggttttccttggcctgcccttcttggcgcattgtttcgtccgtctcgatagtcgacagtctgaagctctcttgggactgacttgggaggtgaggtgagacggcgcggcagcaatggctcaccggctgctgcacggcaccctccacgccaccatcctggaggccgacaacctcaccaaccccgaccgcgccaccggcggcgccccccagatcttccgcaggttcgtggaggggttcgaggagacgatcgggcgcggaaggggtcgacgcagctgtacgcgaccgtcgacc

SEQ ID NO: 439741 - DNA, 307 bp, Triticum aestivum
tttttaccctagcctgcctcccaggagcgccgagtccctccgcccccaacagatctacgcgcgcgaggttcggttcggtcttcggagctcgagacatggcggaggagaatgccccagttgaggttgccgctccggttgcggcccctaccccagttcttggagagcccatggacttgatgactgctctgcagcttgtgatgaagaagtcaagcgctcatgatggccttgtcaagggactccgtgaagctgcgaaagcgattgagaagcatgctgctcagatctgtgtgcttgctgaggactgcgacca

SEQ ID NO: 439742 - DNA, 443 bp, Triticum aestivum
tgtttagcgcgacacggagacatccgtctttgccaagcttgccgcgttcgagcaggagctccgtgcagtgctaccaaaggaggtcgaggctgcccggacctccgtggagaacggcaccgccgcgcagcagaaccgtatcattgaatgccggtcatacccgctctacaggttcgtgcgcaaggagcttgggactgagtacttgactggggagaagacacggtctcccggggaagaggtcgacaaggtgtttgtcgccatgaaccagggcaagcacatcgacgcgctgctggagtgcctaaaagagtggaatggtgagcccttgcctatctgctgaacagaggatcaagaaactgaagagaagacagtgtgcagaaggctctgtatcttcttagctgataagtgataatagtttttcaattgtattttcttaagatcgatgtttt

SEQ ID NO: 439743 - DNA, 440 bp, Triticum aestivum
ttcttatccccccccgccccccacgaacccacagcgcgctcccgagatccgcagccgaagcccgtgagaaaagcgaagcgcgagaggaaaggcactgaactagtttgcaacaaagaagagggaaaatgtctaccgctgaggcaacccgtgaggagaatgtgtacatggccaagcttgccgagcaggctgagcgttacgaagaaatggttgagttcatggagaaggtggcaaagaccgctgatgttggtgagctcactgttgaggagcgcaacctgctctctgttgcttacaagaatgtgattggtgcccggagggcttcctggaggatcatctcctccattgagcagaaggaggagagccgtgggaacgaggcctatgttgcttcaataaagagtaccgtaccaggattgaaactgagctcagcaagatctgtgatggca

SEQ ID NO: 439744 - DNA, 399 bp, Triticum aestivum
ttggtgaacatcaccgtcctcctcgaccgcggctcctccgggccgcagcccaccggcgccaacatccgccacgcgttggccaagctcgtcggggacgcgcgccgtggggacttcctcttcttccactacagcggccacggcacgcggctgccggccgagaccgggcaggacgacgacaccgggtacgacgagtgcatcgtgcccagcgacatgaatctcataacagatcaagatttcagagatctggtgcagaaggtcccggatggttgcatatttaccatcgtctccgactcatgccacagtggtggcctactggacaaggcaaaggaacagataggcaatagcaccaggcagaatcagacccagtctcgtgaacccgaagaagagcgatctcattct

SEQ ID NO: 439745 - DNA, 412 bp, Triticum aestivum
tcttgaagacttgtacaatggtgctaccaagaagctatctttatcacggaatgttctttgtggaaaatgcaagggaaagggatccaagagcggggcaacggctacttgcagtggttgtcgtggtgcaggaatgaggatgataacaagacagatcggacctggcatgatccaacagatgaatactgtttgccctgaatgcagaggatcaggcgagatgataaatgacaaggatagatgcccaagctgcagagggaacaaagtatcccaggagaagaaggtctcggaggttcatgtggagaagggaatgcaacatggccaaaagattgtattccagggtgaagctgatgaagctcctgatacagtgacaggagacattgtttttgtcttgcaacttaaagagcacccaaaattc

SEQ ID NO: 439746 - DNA, 412 bp, Triticum aestivum
ttctctgcctcctccgagacgacgaagccgaccaaagtaagcaacgccgccgacccctcgagtaggggtgaaacaaggcaaagggagagtaatgtggcgtcgctgcatttgctgtcaagccactgagtttgatgagaatgaaaatgggcgtgccaaggccaaggccccaacaaataacgtagatggaatgaaaaagggtttgaaagattctgctactgtgaaagccgagccacaagattcagctccctctatcaatattcctgttctatctttggatgaattaatagaaaagactgatgattttggggcaaaggctttaataggcgaagggtcttatgggagagtgtactatgctgtccttgatgatgggacaaaaatggcagtgaagaaactcgatgctactgaaaatgag

SEQ ID NO: 439747 - DNA, 393 bp, Triticum aestivum
ttctttccattccgtgtggcgaccgagcgaaccctagccgagattagactaccatccccaatctaccggaggaggacgaggacgacgccgacgagatgctgagggttgcggggaggaggctctcgtcttcgctctcctggcgccccgtggcgaccgtcggagccaggggcccgctcgctggcgccggcggccctgggagagacgacgacgacggttcggcctaccagcggcggttcgccatcgagtcccccttcttcaccgccgcgagagggcttttcttcagctgaaacacttgttccacggaaccaagatgctggggttggctgaactcccagccactgttgctgcactgaagaaccccaactcaaaaatctttatgaccagtacaccatg

SEQ ID NO: 439748 - DNA, 412 bp, Triticum aestivum
tttgctcggcatcgcctcgacgaacctgcgcaagcctctgccgatccgcgaggtcattgctcgcatcgtcgacgggtcgcacttctccgagttcaagcgcgactacggcacgacactcgtcaccgggttcgccagcatctacggccaccgcgtaggcatcatcgccaacgacggcatcctcttcgggacctcgtcccagaagggcgcccacttcatcgagctctgctcgcagcgcggcatccccctcgtcttcctgcagaacatcagcggattcatggtgggcaaggactctgagcgcgacggcatcgccaagcacggcgccaagctcgtcacggcgttcgcgtgcgccgacgtgcccaagttcaccgtcgtcgtcggcggcagctacggcgccggcaactacggcatgtgc

SEQ ID NO: 439749 - DNA, 378 bp, Triticum aestivum
ttcctcgcgtccgcggacgcgtgggttccaccatgcaccggggcaagaagacgaggaaaacagaagaagggagaatcaggcggtggaagtagcacgacacggaggagccgaaccaagggggccgcccggtgatgtcggacgaaggggaggacgcgcccgtggcggcggtggcggcgggcttcgggctgccggaggagctggcggccgtgctgccggcggacccattcgagcagctggacgtggcgcgcaagatcacctccatcgcgctcgcgtcccgcgtcggccgcctcgaggcggaggccgcggggcttcgcgcgcagcttgcccagcgcgacgacgccgccgaggacctccgcgagcgcgtcgagcagctcgagt

SEQ ID NO: 439750 - DNA, 382 bp, Triticum aestivum
tggtcatttggcggagcaaagccgatctgcccgacgaactcatcttccacataaactatctaggaacagatcagcccacgttcacactgaacttctccaagggcgctagccagatcattgcgcaatactatcagctgatccgcctcggcttcgaggggtacaagcacatcatggagaactgcaagctgaacgcggcggtgctgaaggagggcatcgacgcgacggggcggttcgacgtgctgtccaaggcggacggcgtgccgctggtggccatcaggctcaaggacagcaccaacttcagcgtgtttgacatctcggagaacctgaggcggttcgggtggatcgtgccggcctacacgatgccggcggacgctgagcacgt

SEQ ID NO: 439751 - DNA, 427 bp, Triticum aestivum
tggaacaacaagaagttgcttggtcgcgtgagggcatttgatcgtcattgcaacatggttcttgagaacgtcagggagatgtggactgaggttccaaagactggtaaaggcaagaagaaggctctcccggtgaacaaggacaggttcataagcaagatgttcctccgtggggattcggtcatcatcgtcctcaggaacccgaaatgagtttgacgactcggcgtaaaccagaagagtctgttttcgctatgctgctgttagtttgtatgccgaatgctctggatcagggagtgtgtaagagacagttatcaagcaagcattgcctgtactgattaatggtttggtgctgtagtctggatgttatgaattcacgtctttgtagtatctaatctaacaacgtgcactggtagcctctgtttggatcatc

SEQ ID NO: 439752 - DNA, 443 bp, Triticum aestivum
tttttctctcccttctcttaaaccaatcagacgctagaatccttggcaattcgccgctcctccgatccgttcgtcgccgccgggatcgaccatgtcgtacgcctacctcttcaagtacatcatcatcggcgacacaggcgtgggcaagtcatgcctgctgctgcagttcaccgacaagaggtttcagcccgtgcacgacctcaccatcggcgtcgagttcggcgcccgcatgatcaccatcgacaacaagcccatcaagctccagatttgggacacggctggccaagaatcattcagatctataacaagatcatactacagaggtgctgctggtgctcttttggtttatgatatcaccaggagggaaacttttaaccatcttgcgagctggctagaagatgcaagacagcatgcaaatgccaatatgacagtgatgttaatcg

SEQ ID NO: 439753 - DNA, 363 bp, Triticum aestivum
ttatcattgatatttctgacgttgagaggctgaaagagcagtatgcatgctgcacagaagatcagtcagcctttgaagctatagcaagtacatgccagccagaaactcacactcttccagatggacaggttataacaattgaaaaagagcgctatatagttggcgaagctttgtttcaaccaagcatcttgggcttagaagattatggcattgtccaccagctaattactagtgtttcaaacgtcgcatcagagtaccaaaagcaactgctggagaacactatgttatgtggtggcactgtatctatgactggtttcgaggacaggtttcagagagaagcgaatctgtctgcctccgcgatcc

SEQ ID NO: 439754 - DNA, 440 bp, Triticum aestivum
tagtcatcagaccttgtgatggttccatccacgtcggatatcttgggccaggtcatgcctttagtcggacgagattggagtcagtctggtgttgctcgactcttttctgcaataaaggaaaatggttatcaactgatattccttagcgctagagccattgtccaggcatatctgacaaaaaacttcctcttcaatctaaaacaggatgggaaagttatgcctaatggacctgttgtaatttcgcccgatggattgttcccttcactctaccgagaagttatacgaagagcaccacatgagttcaagattgcctgtctggaggacattaaagcactttttccttctgactacaatccattttatgctggatttggcaacagagacactgacgagcttacgtacaaaaagatgggaatttcgaaggcaagatttttatcatc

SEQ ID NO: 439755 - DNA, 401 bp, Triticum aestivum
tccttcgcgtccgggctccaacggcaaggccccggacttttatagcgatacgaccgccgtgggtgcgttccgcgccgtcagcaagggcatcgtcgtctccgcctcggcgggaaactccggccccaaagagtccaccgccgtcaacgtcgcgccatggttcttgacggtcggcgcgtccactctcaaccgccaattcccggccgacgtcgttctcggcaacggcgagaccttcaagggtacttctctctacgcgggcgagccgctgggcacgaccaaggtaccactggtccacgcaggggacgtgggctcgaaaatatgcgaagaagggaagctgaactccaccgtggtagccgggaagatcgtcttctgcgaccctggcgtgtacgcccgggctgcgaaag

SEQ ID NO: 439756 - DNA, 398 bp, Triticum aestivum
tttttctcgtcccggcgcgcttggagctcgacctacccgcgcgccgcccactatgatcatctccaagaagaaccgcaatgagatctgcaagtacctcttccaagagggggtgctgtatgccaagaaagactacaacctggcgaagcacccgcagattgacgtgccgaacctccaggtgatcaagctcatgcagagcttcaagtctaaggaatacgtcagggagaccttctcgtggcagcattactattggtacctcaccaacgatggcatcgagttcctgcgcaacttcctcaacctgccatctgagatcgtgcctgccacgctcaagaagtctgccaggcctcctggccgcccactcggttctggcccacctggtgaccggccaagggggccacctc

SEQ ID NO: 439757 - DNA, 407 bp, Triticum aestivum
tcggacgcgtggggtccggcgagcacctatcttatcttgggagggcggtcgcgatgatgaccatggatctgattggaggatacgggagggcggacgagcaggtggccatccaggaggcggcggcggcggggctgtgcgggatggagcacctcatcctgcagctctcccggacaggcaccagcgagagctcgccggttgggtcgtcggaggcgccggagcagcaggtagactgccgggagatcactgatatgaccgtgtccaagttcaagaaggtgatttctatcctcaaccaccgcactggccacgccaggttccggcgcgggcctgtggtggcgcagtcccagggccccgccgtgtccgagccggcgccggtgagggcgtcttcgtcgaggtccatgaccttggac

SEQ ID NO: 439758 - DNA, 426 bp, Triticum aestivum
ttggccacggcgccgtcgtggaggagatacacgggctcatccgcgtgtacaaggacgggcacgtggagcgcctcccggcgatccccgacgtgccctgcacgtggggctcgacggccgccgggagcggcgtcctcgcgcgcgacgtggcggtcgaccgcgccacgggggtgtgggcgcgcctgtacgcgccggccgccgcggcggggaaggtccccgtggtggtctacttccacggcggcgggttcagcgtcggctccgcggcgtggagctgctaccacgagttcgtcgcccagctccccgcgcgggcgggctgcgccgtgatgtccgtcgactaccgcctggcgccggagaaccggctgcccgcggccttcgacgacgggctcacggcgctgcggtggctgcggcagcaggcgggcagaaacaacg

SEQ ID NO: 439759 - DNA, 411 bp, Triticum aestivum
ttcttctcgcttcgggagactacgaggatgtccacgtccgcctcatgagggcataccctgaggtgtcggagtactggtactttggcgtgctcgtcgtggctgctgctactggcatggccggtatcgatacctacccgacctacactacaatcggcgtcgtgccgtatggcatcatcctagccttgctctttgtggttcctacgggcatcatccgagccatgaccggcgtggaggtcacactcaacgtgctggccgagttcattggtggcatgtgggtccgagggcaatgccctcgccatgaacttcttcaagtcgtttggttatgtaacatgtgcgcatgcactctcgttctccaacgacttgaagctggcccactacctcaagattgcaccacgtcagacttttgccgcg

SEQ ID NO: 439760 - DNA, 379 bp, Triticum aestivum
tttgttctagatctgctgttggtcttaatacaagggttggtgttgctagcttcatcaccttgctggtacagaaggtcatgattaacatcaagccatacacggtgatgttactgaaattactttatactgctgttctggaggaaaggagttctgcagccaaaagggcctttgcgtcttcttgtgctgcagttttgaaatatgccagccaatctcaggctcagaaacttattgaagacaccgcttctctgcatttaggtgaaaaaagttctcagttatctggtgcagttcttattaaatcgtacttgagcaatgcagcagatgttattagtggatacaatgcagtggttatccctgtaattttttcttcaagatttgatga

SEQ ID NO: 439761 - DNA, 386 bp, Triticum aestivum
tatcccccctccgcgatctcaccgagaaaatcctcgaccgaccgaacgacaaggccctctcatcctcctcctccaagatgcagatcttcgtgaagactctcaccggcaagaccatcacccttgaggtcgagtcgtctgacacgatcaacaatgtcaaggccaagatccaggacaaggagggaatccctccggaccagcagcgcctcatctttgctggcaagcagctagaggatggccgcaccctggctgactacaacatccagaaggagtccaccctccacctggtgctccgcctccgcggaggcatgcagatctttgtcaagaccctcaccggcaagaccatcaccttggagggtggagtcctcggacaccatcgacaatgtgaa

SEQ ID NO: 439762 - DNA, 422 bp, Triticum aestivum
ttatcaattggtgtctcagaaggcggacatcgccgagaggatgatcatccccttggtggagctacaaaaggccacaaacaatttcgacaaagctcgcgagatcggtggaggagggcatggcacggtatacaaagggatcatgtcagacctgcacgtcgtggcgatcaagaagtccaaggtcgcgatccagagggagatcgacgagttcataaatgaggtagccatcctctcgcagatcaaccatcgaaacgtggtgaagctctttgggtgttgccttgagacggaggtgcctttgctggtgtacgagttcatctccaatgggaccctttaccatcatcttcatgtccaagaacccgcgccatccctgacatgggaatatcgggtaaggatcgcaaccgaaactgcgagagctctcgcctacc

SEQ ID NO: 439763 - DNA, 405 bp, Triticum aestivum
tctccacgcgtccgtgtccaacggggagctgtcgcagccgcaggcgggggagtacggcctcgccgtcatgcgccgccggcccaagaccaagatcgtctgcacgctcggcccggcctcccgctccgtcgacatgatcgagaagctgctgcgcgccggcatgtgcgtcgcccgcttcaacttctcccacggctcccacgactaccaccaggagacgctcgacaacctgcacgccgccatggaccgcaccgggatcctctgcgccgtcatgctcgacaccaagggtccagagatccgtactggatttttgaaagatgggaagcctatccagttgaggaagggccaagaaattgtgatctccacagattatagcataaagggggacggcaagatgatatcgatgagcta

SEQ ID NO: 439764 - DNA, 449 bp, Triticum aestivum
tcgacagcccccactttccaacttagggttctagggtttctccagcagcgccggcgcctccacccgcctacccaaccaccatgacggccgagaccgcgaagcaggcggagctgctccgcgccgtcctggatgagcagaagctcgcggcgcagggagatgagcctgtagttgaggatgatgatgatgaggaagatgaggatgatgatgacgaggatgacaaagacgatgatattgaaggagttgatgcaagtggaagatctaagcagagtaggagtgagaagaagagcaggaaggccatgctgaagcttggcatgaagactatcactggcgtgagccgtgtaactgtcaagaagagcaagaatatcctgtttgtcatctccaagccagatgtattcaagagccctgcctctgacacctatgtcattttcggtgaggctaagattgaggat

SEQ ID NO: 439765 - DNA, 448 bp, Triticum aestivum
tcttccacgcgtccgcctccaacctctctggtggccgcaatccaagtcttgactatggcttcaagggtgccgagatcgcaatggcgtcatactgctcggagctccaattcttgggcaaccctgtgaccaaccatgtccagagtgcggaacagcacaaccaagatgttaactccctcggattaatctcagcccgtaagactgccgaggccatcgacattctgaagctcatgtcctctacatttttggttgcgctgtgccaagccatcgacctgcgccacctcgaagaaaatgtcaagaatgccgtcaagaattgtgtcacaagagtggctaggaagaccctgatcacaaatgacatgggtggcctccacacgcacgtttctgtgagaaggacctgctccaaacaatcgaccgcgaggcggtgtttgcatacgcagacgacccttgcagc

SEQ ID NO: 439766 - DNA, 328 bp, Triticum aestivum
gacttcaccactgacatgtctaggtcccttgtgaggaagtggcagacactcattgaggctcatgtggatgtgaagacaactgacaactacatgcttcgcatgttcgccattggcttcaccaagagacgcccgaaccaggtgaagcgcacttgctatgcccaagcaagtcagatcagacagatccgccgcaagatggttgagatcatggtcaaccaagctgcaagctgtgacttgaaggagcttgtgaacaagttcatccctgagggtgatcggaaaggagattgagaaggctacctcaagcatcttccccctcagaaacgtgtacgtc

SEQ ID NO: 439767 - DNA, 414 bp, Triticum aestivum
tcctgatctgtctgtcatcgtttctccccccactccgaatccctccctcctctctccgtgaaggtcctcaccgacgtgcccgccgccacggccctccctccaaatcgtcgccgacccgagaatctccgttcaacagcaaggtcatggcagaaaccatagatctaacaggggatggaggcgctcttaagacggtggtcagaaaagcaaaggatgatgctataagcccatctgatagccttccattggttgatgttcattatgaagggacacttgctgaaaatggcgaagtttttgacaccacacatgaagacaattctattttttcatttgaagttggccagggagctgtcattaaagcatgggatatagccttaagaactatgaaagttggcgagattgcaaaaataacatgca

SEQ ID NO: 439768 - DNA, 444 bp, Triticum aestivum
ttcggccggccggcaccgtcgtctagctctcacactcgccccgttgccctgtgcagcagcagcagcagcatcatggcgcggtcggagcagcaggggctgcaggtgctgagcgcgctggacgcggccaagacgcagtggtaccacttcacggccatcgtcgtcgccggcatgggcttcttcaccgacgcctacgacctcttctgcatctccctcgtcaccaagctcctcggccgcatctactacaccgacctctccaagcccgaccccggcacgctgccctccggcgtcgccgccgccgtaacggcgtcgccttctgcggcacgctcgccggccagctcttcttcggctggctcggcgacaagatgggccgcaggagcgtctacggcatgacgctcattctcatggtcatctgctccatcggctccggcctctccttcgcgcaca

SEQ ID NO: 439769 - DNA, 444 bp, Triticum aestivum
ttggacgcgtggcaacatagtatctcctggagcagacatgtctatatattttccattcactgaaaaggacaagcggctcactgcccttcatggttcaattgagagcttgatttatgacccagagcaaaacgatgtacacattggacatctggatgaccgatcaaaaccaattctcttctccatggcaagacttgaccgtgttaaaaacatgacaggactagtggaagcttatagtaaaaatgctaagctaaggtcgctggtaaaccttgttgtggtcgctggctacaacaatgtcaagaaatcaaaggatagagaagagatcgcatagatgcagaagatgcatgaacttattaagacatataacttgtttgggcagttccgctggatctctgcccagacgaacaaggctcgcaacggtgagctgtatcgctacattgctgatac

SEQ ID NO: 439770 - DNA, 320 bp, Triticum aestivum
ttaggtgctgcaccaggacatgaaggtcgccgccgtgaactcccagtactggatgagcgtgaccaccctcatgccgctcctcggcggcttcctcgccgacgcctacctcggccgcttccgcaccgtcctcctctccaccgtcgtctacctcctcggcctcgtcctgctcgcggtggcgcagctggcaccgggcctcaggccgggcggcgtctccgtgccgcgggttcacgagacgctcttcttcgtggggatctacctcgagtccgtcggcaccggcggtcacaagccggcgcttgagagctgtggcgccgaccagttcg

SEQ ID NO: 439771 - DNA, 324 bp, Triticum aestivum
cccacgcgtccggagaaggtcatgcgtgcacttggtgactacttgggtgtgaaggttcatgcctgtgttggaggaacttcagttcgtgaggaccaaaggattcttgcaagtggagtgcatgtcgttgttggtacgcctgggcgtgtgtttgacatgctccgtaggcagtctctgcgccctgacaacatcaagatgtttgtccttgatgaagctgatgagatgctttcccgtggtttcaaggatcagatttatgacatcttgcacctgctcccagggaagattcaaagttggtgtcttctctgctaccatgccccctgaagccct

SEQ ID NO: 439772 - DNA, 438 bp, Triticum aestivum
tcgctcgcagagagatcgggtcggggaggaggaggatgacgggcgggcgcgcggtgctcctgctggtggtctcggcgctgttcgcgcagatctacgcgtcggatccgctgtttcacgagtccttcgacgagggcttccaggggagctggatcgtctccggcaaggaagagtactcaggtgtatggaagcacgagaagagtgatggccatgaagactatggtctccttgttagcgagccagccaggaaatatgccatagtcaaagagcttgatagccctgttactttgaaggatggaacagttgtcctgcagttcgaagtgaggcttcagaatggccttgagtggtggaggtgcttatcttaagtacattcgccctcaggaggctggatgggatgccaaggaatttgacaatgacactccttacacaattatgtttggt

SEQ ID NO: 439773 - DNA, 389 bp, Triticum aestivum
ttcacgcgtccgcccacgcgtccgttcaggatggaggcgagaacggatcgcgccgaccgaggggccgcccggccgggtccaagaacaagccgaagcctccaatcatcattacgcgggacagcgctaacacactccggacgcacgtcatggaggtcgcgggcgggtgcgacatctccgagagcatcacggcgttcgcccgccgccggcaacgcggggtctgcgtgctgagcggcgcgggcaccgtgaccaacgtcacgctgcggcagcctgcctcgcaggcgcggttgtcgccctccacggccggttcgagatactctcactgtctggctccttcctaccccctccagcaccaccggaagccacggggctcaccgtctaccttgccggcg

SEQ ID NO: 439774 - DNA, 424 bp, Triticum aestivum
gaaccggaccctgtccaagtgcgacgagctcgtcgcgatgggtgccgccgtcggggacacgccggcgtccgtcgtcgctaagtgcaagtacaccatcgccatgctctccgatcccagcgccgcgctatccgttgttttcgacaaggatggcgtgctcgagcaaatcggagagggcaagggctacgtggatatgtccactgttgatgctgcaacttcttgcaagataagcgaggcggttaaacaaaagggcggagcttttgttgaagctccagtttcagggagcaagaagccagctgaagatggccaattggtcattcttgctgcaggcgacaaggcactatatgatgatatggtccctgcatttgatgtacttgggaagaagtcattctttctgcgggagatgggaaatggagcaaagatgaac

SEQ ID NO: 439775 - DNA, 209 bp, Triticum aestivum
tgacttgtggtgcccatagatgtgaagaagaagccatgggagcagaaggttcgtctccataaccgctggcatccggatatccctcctgttgctgatgtaactgaaggggaattattccgtgttgagatggtctattgcactggaggaccgattagagatgatgactctgcagatgatatcaaatttctggacctcaaaattactcatta

SEQ ID NO: 439776 - DNA, 377 bp, Triticum aestivum
tggaatattggccatcagcagaggaacaaagaaaatatctgttgaattataccaagtcaaaaagaacagtaacaaagaatgtatttcctagcatccaaacacctgagttttatgagaagatagttgttcacacactcagccataatttccgcaatgctacaagacttgatcgtgtgcgattgagattgcccattgaaccacaaggtgcgctagttaaaataatatacgctggtgtaaatgctagtgatgtaaacttcagctccggacggtatttcagtggtagtgctaaagaaactgctgcacgccttccgttcgatgctggttttgaggctgtgggaattgttgcttctgttggagatgcagtgagccatgtcaaa

SEQ ID NO: 439777 - DNA, 274 bp, Triticum aestivum
tgttgattggggagcgtctactgggcggtatcgcgcattcccaagatttgctaaagggagtgtgcactaacatcatacacatgcataacaagaccctcaagttatatactggcaattatgaccagtctgtccaaactcgctctgagctcgaagagaatcaactgaagctgtacaaatgggaacaggaacatatagctaatatgaatgagcacattgcacgatttggtcatggatctgcgaagcttgctcgtcaggctcagagcaaagagaagac

SEQ ID NO: 439778 - DNA, 389 bp, Triticum aestivum
tttctggaacaaacaacacacaagataaagaaatccttgaaatcacagcaaagggagctggtgtttttgtcatagtagcttcagttttccttctcctcctgttctacttcatgtcgtcttgggtcgcctggctactgattgtattgttctgcattggtggtattgaggtatttccccgtgtattctctaccttgtgctcgtttgatcacactgcaccgagagaagtatttgtacaaatacttctctcggtgcttggttagttttttgtattttggtattcggctgtgagtttgtttctgttttgtgtgttgcagggaatgcatgtttgcttggtgacaattatctctaggattaataaggattggggaaataatactgtacaattgccc

SEQ ID NO: 439779 - DNA, 346 bp, Triticum aestivum
tgttcatcagcgcccctccgtccctccctcctcctggcgcgtcgtgatccatccagcccaggggcgagaagctagttagcgggtgattaaggtcgccatgtcggactccgaggaccaccacttcgagtccaaggcctatgcgggggcgtacaagaccttccctatgcaggccggcgccatccggaagggcggctacctcgtcatcaagaaccgcccctgcaagggtggtggaggtttctacctcgaagactggaaagcacggtcatgctaaatgccactttgttgacttagatatattcaatggtaaaaagcttgaggacattgttccttcatcccacaactgtga

SEQ ID NO: 439780 - DNA, 475 bp, Triticum aestivum
tcactttcacctcttttttctttctagtttatcctaatgtcaaagcaacaagataaacctgctttgaaacctgctgttttcactactgttgatcagttgagaccaggaaccaatggtcataacttgaatgtaaaggtagtgagttgtacgatcgtgattgaaaagcaacgagctgatggaacaaagatcagagtagctgaggctgtcattggagaccaaactggagttgtcactcttactgcaagaaatgcacaaattgatgtagttgtcccaggtagtacagttgtacttcgaaatgccaaagtagatatgtttaatggttttatgagactagcagttgataaatggggtttagtgaaagctgctccagaacccgctaagtttgaagttaacacagaaaatgatctttcaagtatagaatacgaacttgttactgttgatgatgctcaatgattaaacaagacaagaaatcatg

SEQ ID NO: 439781 - DNA, 424 bp, Triticum aestivum
ttgtccacgcgtccgcccacgcgtccgcgaaccaatggcgatggtgaccgcgaagctcagctccccggccgccgcccggctcgcgccctccgccgggagcgcccgccgcgcctcgcgcgtccgcgtccgcgcctccggcggctcctacgccgacgagctcgtctccaccgcgaaaactgttgcttcccctggccgtgggatccttgcgatcgacgagtcgagtgcaacatgtggaaagagattggcatccattggtttggacaacaccgaagttaaccgccaggcttacaggcagctgttgctgaccactgctggtcttggtgaatatatctctggtgctattctctttgaggaaactctctaccagtccactacagatggcaagacctttgttgatgtcttgaaggaccagaatatcatgcct

SEQ ID NO: 439782 - DNA, 404 bp, Triticum aestivum
cctgctgacgcgtgggattcgatctcggcttcctctccaagccacgcgacgcgagaccagagctccggccatggcggcgacgatccagtccgtgaaggcccgccagatcttcgacagccgcggcaaccccaccgtcgaggttgatgtgtgctgctcagatggaacctttgccagggccgccgttcccagcggtgcatcgactggtgtctatgaagctttggagctgagggacggtggatctgactacttgggcaagggtgtttccaaggctgttaacaatgtgaactccattattgcacccgctttggtcggcaaggaccctaccgctcaaactgagctcgacaactttatggttcagcagcttgatggaaccaagaatgagtggggtttggtgcaagcaaaag

SEQ ID NO: 439783 - DNA, 325 bp, Triticum aestivum
ttttggagatcatcaaccaccgctcgctgcgccaccccaacatcatccgcttcaaggaggtggtactgacgccaacaaatcttatgattgtcatggagttcgcagcaggtggggagctgtttgagcgaatctgtgatcgtgggcgcttcagtgaggatgaggcaaggtatttctttcagcagttgatctgtggtgtgagctactgccatcacatgcaaatatgccatagagatttgaagctggagaatgttctcttggatggcagtgcagctccacggctcaaaatatgtgattttggctactccaagtcatcagtactgcattc

SEQ ID NO: 439784 - DNA, 322 bp, Triticum aestivum
tttctcgtccgcggacgcgtgggcggacgcgtgggctctgctctgccggccacctaccgctctcccttccgcagatcttccggtcttcgatctcgccggtcgccacgacgccacaccgtgcttgccagcagaagagacgttatcaaggcgctatggctgagccggcggcggcggcgagcacaaggaagctgtacgggtacgagctgtcgtccaattcggtgcgcatcgcggcgctgctcaacgagaaggggctcgactacgagctcgtcgtcgtcgacgacaccaagtcgccggagttcctcgccatcaaccccttgggcca

SEQ ID NO: 439785 - DNA, 411 bp, Triticum aestivum
tttctcgtccgatggactactaccgcgagacctacggcgggtacgggatggcgacgcccgggtacgcggcgccggtgccgtacggcatgtcgcaggtgaacatcgacggcaactgcggcgggcgccccatgccgccgcagccgacggtgaagatctactgccgcgccaaccccaactacgccatgtccgtgcgcaacggcaaggtggtgctggcgccggccaaccccaaggacgactaccagcactggatcaaggacatgaggtggagcaccagcatcaaggacgaggaggggtaccccgccttcgccatggtgaacaaggccaccgggcaggccatcaagcactccctcggccagtcccaccctgtgcgtctggtgccgtacaacccagactacctggacgagtcggtgc

SEQ ID NO: 439786 - DNA, 434 bp, Triticum aestivum
  unsure (1)..(434): unsure at all n locations
ttgttcgcgtgggcgacagtgaagtcagggattatgaagcaggttgaagctttcagatcaggttttagccaggtctttgatatctcatccctccaaatattttcacctcaagagcttgactatctaatatgtggtcgtcaagaaatatgggaggctgaatcactggtagataacataaaatttgatcatgggtttactgctaaaagtcctgccattataaatctactcgagatcatgtcggaatttacccctgatcagcagcatgcattctgccagtttgtaaccggtgcttctcggcttccaactggtggtttggctgctcttagtcccaagcttaccatagttcgaaagcacccttcggtggggtgagtactttgaatcaagcggggtaacggatgccgcggatgacgatttgcncagcgtcatgacatgtg

SEQ ID NO: 439787 - DNA, 476 bp, Triticum aestivum
tttttacactagctagctgaccctcacagacattgttaggtcttgcaagtgaagctaggagacagaaaccatggcggcttcccgtgccttggctgcactgcttgctgtggtggtactcgtggtctgctctccggcgcctcgtgttctcgccactgaccccacccagctccaggacttctgcgttgctgatataatgaaccctgtgattgtgaacgggttcgtgtgcaagaacatgaagatggtgacggcgaacgacttcttcttgcccgggcttaacaagccgggcaagttgaacgctcagggctcggcggtgacaccggtgacggtgcggcagctgccagggctgaacacgctgggcatctcattggcgcgcatcgacttcgggcccaacggcgggcagaacccgccgcacacacacccccgcggttctgagatcccaccgtgatcatggggcagctgcttgtggggttcgtcac

SEQ ID NO: 439788 - DNA, 420 bp, Triticum aestivum
cccacgcgtccgccctcttcgtccgcccacgcgtccggctgctcatcttgttgacagcaccaaccaagtcgggcacttccagcaggtcctcactgccatcggaaacttctgcatcgtctcgattgcagtgggaattgtcattgagatcatcgtcatgttcccgatccagcgccgcaagtaccgtgccggtattgagaacctgttggtcctcttgatcggtggtattccgattgccatgcctacagttttgtcggtcaccatggctattggttcccacaagttgtcccagcagggtgctatcaccaagaggatgactgccattgaagagttggctggcatggatgtgctttgcagtgataagactggcacactcacccttaacaagctcagtgttgacaagatcctggttgaggtgtttgc

SEQ ID NO: 439789 - DNA, 468 bp, Triticum aestivum
ttcttgctctgcccgtccgggcccgtcgtgcgccggccggtacgtgtacatgtacgacctgccgccccggttcaacgccgacctcgcccgcgactgccgcatgctctcggcgtccaccgacatgtgcaggcacgtggtcaacgacgggttcggcccgccgatcaccgacggcggcgcgctccccgagagcggagcctacgccaccgaccaatacatgctggagctgatcttccacgcccggatgtggcagtacgagtgcctcacgcccgaccccgccgccgccgccgcggtctacgtcccgttctacgccgagttcgacctggcgatgcgcatcgacaacagcgacatgtcggcgcggaacgcgctgccgggtgacgttgcggctggctggtgcggcggcccgagtggcgcgcatggggggccgcgaccacttcatgctagccagccggcccacatgggacctgctct

SEQ ID NO: 439790 - DNA, 448 bp, Triticum aestivum
ttctctcacgcgtccgcccacgcgtccgggcatggtgtgcctctaaagggaacatcccatactttgagacttctgccaaggatggaatcaacgtggaggaagctttccaatgtatagtaaagaacgctctgaagaacgagccagaggaagaactgtatatgccggacaccgtggacgtggtgggtggcaaccggggtcaaggatcatcaggatgctgttagaacctgaggccacaactgtcagctattcctttgacattactgtatttccatggtgacttgtggacccgtatttcattcgtgacctttttcaatcacctcgtaagtgcccaaggaatgattgatgcgtctgttccgagctgtcaatctgtggacgtttgtgtagctttatcatgattagcgtcatatcttgtgaatacagtaaggcgaaatagtgaagtgtaaactac

SEQ ID NO: 439791 - DNA, 430 bp, Triticum aestivum
tctttacagccatgatggcagcaagttgaacttcatacctgttctagcatcacgatcccaagcactaaggtacttgtatataaggtggggtgtagagctgtcgaacatgacggtggttgtcggtgaaagcggcgatacagattatgaagggctgctcggaggcgtgcagaagaccatcgtactcaaaggctcgtttaattctgcgccaaaccagcttcatgccgccagaagctattcgctagaggatgtcgtatcgttcgacaagccaggaattgcttccgtcgacggttatgccccagataacctgaaatcagctctacaacaatttggtgccctggagggctagaatcaccaacttttgtcagagtcagcagaggaataagtaggtgtgtggaggcacaccttgctatggggtcgcacacgagacacg

SEQ ID NO: 439792 - DNA, 409 bp, Triticum aestivum
ctcgttgacgcgtgggtacacgacgcgaccgcgagccaaaccctaccgcgaacacgtcggcgatgagctcctccaacggcaacggcgggaagaagccggcaccgtccggcgggcgcgggggcatccgcaccctcgccgacatcaaccgcggcccctccgggttcccaggcgcaggcggcagcggcagcgactccgatgagccccaggagtactacaccggcggcgagaagagtgggatgcttgttcaagatccaacaaggagaaataatgcggactcaatctttgagcaagctagagtgatgggtgctcagcaagttccactgccttcttttgaaggccaatcttccagctcaaccagctttgcaggaacgtgtcgtctgctttaggggatgcgcagacagcaccagct

SEQ ID NO: 439793 - DNA, 350 bp, Triticum aestivum
tgttttttcctcctcaacccgccgccgcttctcctcctccggaagaaaaacagagagcttcaagttctccggagcgagagagatggcggcgaagggcgatgggccggcgatcggcatcgacctcggcacgacgtactcgtgcgtcggcgtgtggcagcacgacagggtcgaaatcattgccaatgaccagggcaaccgcaccacgccgtcgtacgtggccttcaccgactccgagcgcctcatcggcgacgctgccaagaaccaggtggcgatgaaccccatcaacaccgtcttcgatgccaagcgtctcattggccggagatttaccgattcaactgtccagagtgaca

SEQ ID NO: 439794 - DNA, 421 bp, Triticum aestivum
tgtttctcgtccgcagccatggagctcctcttcttttgcacaatagttctcatcctcattgtctcatccgtgtaccttctgggcctcttagccgacggtcgtcgcaacctgcccccaggtcctcgctcgcttccactcgtcggcaacctcctctcactgggcgcccaaccgcaccgctccctcgcgcgcctcgcggagagccacggcccgatcatggcgctccgtctaggcacggtcaccaccgtgctcgcctcctccgcagacgccgcccgcgacatcctccagcgccatgacgccgctttttccgggcgcttcgtcctggacggtcccacgtgtcggcgcactacacgcacccatggtctggctcccggccagcagccccggtggcgcgcgctacgcaaggtgtgtcgggtgagctctc

SEQ ID NO: 439795 - DNA, 410 bp, Triticum aestivum
tttgctattcacttgaattagaaacacagaaggtttgggattatgctggtgacaactatgtccatcgtttgattcagtccaaaacagatggtaaactggttgagtacaattgctatggtggtcatgaagcagatggtatctgttctatatgcagtggtgatgcaggaatggatgaagctctactaaacagtaaagttgaagctattgttgaagagtacaatgatctcctcacgtctcagcttgacaaacaaagaaattactatgagtcacttctgtcagaagtcaaagaggagaatgagaaagaaatttctgcagccacttcgaaatctgtgagcatgatgaaactccaaaagttacaggcaaagcttgataagtgccttgaaagaaaagttttcttgatgatatcaata

SEQ ID NO: 439796 - DNA, 453 bp, Triticum aestivum
  unsure (1)..(453): unsure at all n locations
tttttagcctctccattccgtgtggcgaccgagcgaaccctagccgagattagactaccatccccaatctaccggtggaggacgaggacgacgccgacgagatgctgagggttgcggggaggaggctctcgtcttccctctcctggcgccccgcggcgaccgtcggagccaggggcccgctcgccggcgccggcggccctgggagagacgacgacgacggttcggcctaccagcggcggttcgccatcgagtcccccttcttcaccgccgcgagaggcttttcttcggctgaaacacttgttccacggaaccaagatgctgggttggctgaactcccagccactgttgctgcactgaagaaccccaactcataaatcctttatgaccagtacaaccatgaaagatatncctctggagatcccacaagcgtgcctttgcctactttgtctgagt

SEQ ID NO: 439797 - DNA, 385 bp, Triticum aestivum
ttgggcctcatcaccttccacagcctccgccgcaacgcgccgctgctgggcctgggcgccatgtccgacgacgacctccgcgggatgctcgccgagggcgacttcgacggcgacggcgcgctgtcccagatggagttctgcgtcctcatggtcaggctcagccccgacctcatggaccagccccgccggtggctcgacgacgccgtcgcccaggcctcccacttcctcttcaccagctaggcggagcatctggtgtcgatcggataggaaattaatcttcttcttcgttgttgttttttcttctctcccccgctgttatagagtcaggattcaagaaaagaaagggcactgtcgattggttgaatgatttcgatgtgtgctctcc

SEQ ID NO: 439798 - DNA, 410 bp, Triticum aestivum
tctttagcaatttccttctcatctgtttttggtagctgtttgccttgcaaactcacggggactaattcgtcaactctggagactgttggatacagcatatttgcctctatttttaatgttggttgggcagttacccaagtcgctcacatgtcaatggtgaactgcatgacgtcaaacccaacaagtcgggttgcactagtgagctgccgcaatgccttcacgatggtcgcaaatcttagcttgtatggcattgctttgttgatatttactctaatgcggtcagtgagtgtattagttcagtatcgttggattgcttatacggccatttccatcggatgttgttttgttgtcgcgttcttgattggaacaaaagagccagggttaaatcaaccttctcaggataagagcct

SEQ ID NO: 439799 - DNA, 449 bp, Triticum aestivum
ttcccgtcgtgctcttctgcgtcatggtcgtgtgcctctgcctcctcttcctctatttctcgggctccaatgggcaggctgggagcgcggcactagagtatggcaccaagttttctcgctcgcttgggtggggcagcgatggagatggcgacgatggctcagacgagtcgatttttgggactggcgatgcaaatgacgttaagctcaagagcttcccggtatgcgatgatcggcattctgagctgatcccctgcttggataggaattcgatatatcagatgaggttgaagctggatctaaacttgatggagcattatgagcggcattgccctcctcctgagaggcgatttaattgcctgattccaccgccacatggctataaggttcccataaaatggccaaaaagtcgcgatttagtgtggaaagcaaatattcctcacactcacctt

SEQ ID NO: 439800 - DNA, 333 bp, Triticum aestivum
tgtctccgtcgtgctcttctgcgtcatggtcgtgtgcctctgcctcctcttcctctatttctcgggctccaatgggcaggctgggagcgcggcactagagtatggcaccaagttttctcgctcgcttgggtggggcagcgatggagatggcgacgatggctcagacgagtcgatttttgggactggcgatgcaaatgacgttaagctcaagagcttcccggtatgcgatgatcggcattctgagctgatcccctgcttggataggaatttgatatatcagatgaggttgaagctggatctaaacttgatggagcattatgagcggcattgccc

SEQ ID NO: 439801 - DNA, 400 bp, Triticum aestivum
tttctctcgcgcccgccgcctcctcccccaccccctccccaaggagcacaggccccagggaactgccgtcttctccgcgcccacggcaggccgcagaggcaccgccgccgaccccgctcctcctccggcgccagcgccagcctctccgtctccggcccggagatggatcccgccgcgcggaaggatctgtacccgcacgtcgagcccttcgacaccggccgcctcagggtctccgacgtccacaccatctactacgagcagtccgggaaccccgggggccaccccgtcgtcttcctccacgggggtcctggggccggcacgtcgccgggcaaccgcaggttcttcgaccggagttcacaggatcgtgctgttcgaccagagaggcgcctgcaagagcact

SEQ ID NO: 439802 - DNA, 372 bp, Triticum aestivum
ttctcgcgtccgagccagaccaaaacctgccggcaacatccaagaccagcggggagcactaccttgacgaccatggcgaccgctcctgtcacggtggtgccgcgcctgaagctgggctcccagggtatggaggtctcggcgcagggcctcggctgcatgggcatgtccgccttctacggcccgcccaagcccgagcacgacatggtcgcgctcatccaccacgccgtcgccgccggcgtcaccctgctcgactcctccgacatctacgggccgcacaccaacgagatcctcctcggcaaggcgctgctggggggcgtgagggagagggtagagctggccaccaagttcggcatctcgttcgccgacggcaag

SEQ ID NO: 439803 - DNA, 330 bp, Triticum aestivum
ttttcgcgtgggtccgccgccgccgcgcctcctcctcgcccaaggtaggagcttgtgaaagttctaaggctgagaagatggttctgaagaccgagctctgccgttttagcggccagaagatttacccagggaagggtatcaggttcattcgttcggattcgcaggttttcctctttgccaactcaaaatgcaagcgctacttccacaaccgcctcaagcctgcaaagctttgctggacagcaatgtacaggaagcagcacaagaaggacatccatgctgaggctgccaagaagaggcgccgcaccaccaagaagccgtactcacggtcga

SEQ ID NO: 439804 - DNA, 408 bp, Triticum aestivum
tctttttgtgactgccatgtcgtcgtcggccatggaagcgctccacgccctgatgccggagcagcaccagctggacgttgaggcggctgcggctgtcagcagcgccaccagcggcgaggagagcggccacgtgctgcaggggtgggccaagaggaagcgatcgcgccgccagcgctccgaggaggagaacctcgcgctctgcctcctcatgctctcgcgcggcggcaagcagcgtgttcaggcgccgcagccggagtcgttcgctgcgccggtgcctgccgagttcaagtgctccgtctgcggcaagtccttcagctcctaccaggcgctcggaggccacaagacgagccaccgggtgaagcagccgtctcctccctctgatgccgctgctgccccactcgtggccct

SEQ ID NO: 439805 - DNA, 309 bp, Triticum aestivum
ttcacgcgtccgcccacgcgtccgagcgagtctactcaaaaaagctaaggaaggatggtggagaagccggcgagccaggccgacgtgggcggcgaagtggaggcgcataaggagaggaaggggctgtggtcgccggaggaggacgagcggctgtacacccggatcaccaggcacggcgtgtccacctggagctccgtggcgcagctcgccgggctgcggcggagcggcaagagttgccggttacggtggatgaactacctccgggcggaccttaagaaggagcccatctccaagcgcgaggaggagacc

SEQ ID NO: 439806 - DNA, 447 bp, Triticum aestivum
ttctccacgcgtccgtccagttctccggcgcgggtgcgcaggtccccgactgcgacggcgacgagcgggacggcatggacgaggccatctgccccgtcgactcgttccagcagggccccatcctggacgacgagatcaaccaggccatcgtccgcccgctagtgcacggtgtcaagctccatgccatcgtcgacgcttgccacagtgccaccgtcctcgatcttccctaccagtgcaccttctccaagcagtacgggtgcttgaggtggatggatgagcgccctctgaatggcgcctgcaaaggcacgagcggaggccaggccgtgctcatcagtggcagcagcaatggaaagacccagatgagcgtgctgcctgagccgaatgcaacgattggcgccctgacgcacagcttcctcaagcagtggagtgcgagccccgcaccaccta

SEQ ID NO: 439807 - DNA, 373 bp, Triticum aestivum
ttttctgtctttttcttcacttccccctcgccttctcctgccctcccctcctgatcggagtctcagccgcggcagccatggcgaagacctaccccgttgtcagcgccgagtaccaggaggccgtcgagaaggccaggcaaaagctccgcgccctcatcgccgagaagaactgctccccgctcatgctccgcctcgcgtggcactccgctgggaccttcgacgtgtcgtccaagacaggcggcccgttcgggacgatgaagaagccggcgtagcaggcgcacgccgccaacgcgggcctggacatcgccgtgcggatgctcgagcccatcaaggaggagatccccaccatctcctacgctgatctctaccagct

SEQ ID NO: 439808 - DNA, 369 bp, Triticum aestivum
tttttcacgcgtccgcccacgcgtccggtaggaggaaagaagagactgatgtagctcgaagtaggatagaaacatatgtaaggtcttcactccgtacagcttttgctcaaagaatggaagaagcagattcaaagcgatcatcaaggaaccctaccccagttatgtctatccttgcaaaggacattggtgacctagcaattaaggagaaaaatctgtacagtccaatattgaagacatggcatcccctcgcttcaggtgttgctgttgcaacgcttcattcatgttatggaagtgagctgaagcagttcatagctgggctttcagagttaaccccgggacagttcaagtgctcaagtctgcagacaaatt

SEQ ID NO: 439809 - DNA, 404 bp, Triticum aestivum
ggttcattgtctgaacacgcttttttcaaagcttcaaataaatcagtctattatattctgcaactctgttaatagagtcgagctactggcaaagaaaatcactgagcttggctattcgtgcttctacattcatgctaaaatgttgcaagaccaccgaaaccgggtgtttcatgattttcggaatggtgcttgcagaaaccttgtttgcacagatctttttactagaggaattgacattcaagctgttaatgttgtcatcaattttgacttccccaagactgctgaaacatatttgcatagggttgggtcgttctggaagatttggacaccttggtttggcggtgaacttaatcacttatgaggaccgtttcaacatgtataggattgagcaagaacttgggaca

SEQ ID NO: 439810 - DNA, 389 bp, Triticum aestivum
tcttctcggagcgcctcatcggcgatgccgccaagaaccaggtcgccatgaaccccatcaacaccgtcttcgatgcgaagcgtcttattggcagaaggtttgctgatgcccctgtccagagtgatattaagatgtggccgtacaaggttattcctggccccgcagacaagcctatgattgtagtgcagtacaagggtgaggacaagcagttctcagctgaagaaatttcttccatggtcctcatcaagatgcgtgagatcgctgaggcttacctaggagtaactattaagaatgctgttgtcaccgtgcctgcttacttcaatgattcccagaggcatgcaaccaaggatgccggtgttattgctggtcttaatgtgatgcgtatcatc

SEQ ID NO: 439811 - DNA, 292 bp, Triticum aestivum
tcttcgcgtacgacagcctagagctgagcattgcatttggtgttagactagcgcttgcccaccctgccatgacgtccaaggtagccaacagctccggcagcaacaatgcggatgccaagctatcgccgtcggggctccccgtccgggaggtcccgggcggctacggcgttcccttcttgtcgccgctgcgcgaccgccttgactactactacttccagggcgcggaggagtacttccgctcccgcatcgcccggaacggcggcgccaccgtgctgcgcgtcaacatgccccc

SEQ ID NO: 439812 - DNA, 334 bp, Triticum aestivum
ttttcgcgtccgcccacgcgtccgcccacgcgtccgcacccgtctcctcgcctcgccgtctcgccccacgccgccgacgcaaagatgccgttcaagaggttcgtcgagatcgggcgcgtggccctggtgaactacggcaaggactacggccgcctcgtcgtcatcgtcgacgtcgtcgaccagaaccgggcacttgtggatgctcctgatatggtcaggtgccagatgaacttcaagcgtctttcgctgaccgacatcaagattgacatcaagcgtatccctaagaaggcaactttgatcaaggccatggaggaagcagatgtgaaaaccaaat

SEQ ID NO: 439813 - DNA, 447 bp, Triticum aestivum
tttttcgcgtccgcgcaagacgatcgtgtatatctttggaggagtttatatgtgatcactttttacctgagacccctgttataatcagtggctgcatcgatcattggcctgcgatgacaaaatggaaggacatccagtacctaaagaagattgctggggatcggactgttcctgttgaggttgggaagagctatgtttgcagtgagtggaagcaggagcttatcacgttctcccagttccttgagaggatgtggtcaaccgcctgtccttcaaatttgacatatctagctcagcatccattatttgagcagataaaagagcttcatgaagacataatggttcctgactactgttatgctggtggaggggaactccaatcacttaatgcttggtttggtccacacggacagtgacaccattgcaccacgacccgcatcacaacatttt

SEQ ID NO: 439814 - DNA, 371 bp, Triticum aestivum
gtgtgattgagattgtcggcaatggcaggccaggccgtgaaggtgttcgtccccaccgacgacgagctgctccaggcgcagtcggacctgtggcgccacagcctctgctacctcacgcccatgtcgctccgctgcgccgtcgacctcggcgtccccaccgccatccaccgcctcggcggcgccgcgtccccgtccgaactggtcgccgccctgtccctccccgcgtccaagctgccgttccttgcccgccttctgcgccagctcgccacggccggcgtcttcagcgccaccgacgccggaacgtaccgcctcaacccgctctcctacctcctcgtggacggcgtccgcatcgacggcgacgccagccagac

SEQ ID NO: 439815 - DNA, 354 bp, Triticum aestivum
tctttcagagcagcaaattcttgttactggaattaaggtcgtggatttgcttgcaccttaccaaaggggtgggaagattggtctcttcggtggtgcaggagtgggtaaaactgttcttatcatggagttgatcaacaatgttgccaaggcccacggtggtttctctgtttttgctggtgtcggagaacgtacccgtgaaggtaatgacttgtatagggaaatgattgaaagtggtgtcattaagctcgatgagaagcaggctgaaagcaagtgtgctcttgtctacgggcaaatgaacgatgccccgggtgcccgtgctcgtgttggtcttactggtttgactgttgctgaaca

SEQ ID NO: 439816 - DNA, 351 bp, Triticum aestivum
tttttcacgcgtccgcccggagccggtgcaggacttctgcgtggcggcggtcaccaacggctcggccgaccatccgtcgtacccggggttcccgtgcaagccggcgtcggcggtggtctccgacgacttcttcttcgcggggctggcgcgctcgggcgccgccgactcggccgagagcccgttcgggtccagcgtgacgtcgggcaacgtggcggccttcccggggctcaacacgctcggcgtctccatcaaccgcgtcgacctcgcccccggcggcgtcaacccgctgcacagccacccgcgcgccgccgagctgtgcacgtcgtcgccggccaatgctcgtgggctttg

SEQ ID NO: 439817 - DNA, 394 bp, Triticum aestivum
ttcttcacgcgtccgcattcctcctaccacctcggcaccaccagcccaagcagagccatggcgcccaacggagacaacaccgtggccaacgtccacagcggcatcgacagcaccaacaagacgctgctcaagagcgacgccctctacacctacatcctcgacaccaccgtcttcccccgtgagcacgagtgcatgcgcgacctgcgcctcatcaccgacaagcacccatggggctacatgcagtcgtcgtcggacgaggcacagctgctggggatgctgatcaagatggcgggcgccaagaagacgatcgaggttggcgtgttcacgggctactcgctgctggccaccgcgctggcgctcccggaggacggcaagggtggtggccatcgacacc

SEQ ID NO: 439818 - DNA, 320 bp, Triticum aestivum
tcgtcatgttcgacgccgacatggagtccgccatccggacctaccagcagaacttcggcctggaggtcaccggccagctggacgcggccactgtcaccaagatgatgtccccgcggtgcggcgtcgccgacatcatcaacggcacctccgccatgggcaagacggtccacggccggaacctctactcctacttcccggggtccccctcgtggccgcgctccaagaagagcctcaggtacgccatcacggcggccaccgagacgaccatcgaccgggccacgctgagcaaggtcttcgcgagcgccttcgcgcgctggtcg

SEQ ID NO: 439819 - DNA, 237 bp, Triticum aestivum
tttctcgtccggtgacgttcctcaagtgcggcggcgtggccgtgggcacgggcatgcaccacgtgaccatggacggcgcgggcgcgatccagttcatccggacgtggacgaccctggcgcgcggcctggacgccgcgtccgtgcacccgtccccgccggtgcacgaccgcacggtgctgcgcgcgcgctctcccccgcatgccaccttcgagcacccggtctactccccgagcaacc

SEQ ID NO: 439820 - DNA, 399 bp, Triticum aestivum
tccttaccgaccgcacagttgaagtgagatctgcgctaagggttcatcagcaaccatgaagagcaccaagctcgcggcgatcctgatcctccaggccgtcctggtcatggggatcctctcacacgtgaacgccgactatttccccaagtgctgcaacaactgcaggtccttctcgggggtcgacgtctgcgacgacgcccacccccagtgccccaagggctgctcggcctgccgcgtggtgacgccgagccctcacaagacgttccggtgcgccgacatgaagagcaccgtcgatggcacctgcggcgggccatgcaagaagcactgatccgttcaaggcttcaggctcagacgaggtgtgccgcctaaaataaagctcagatgagatgagcagtcatg

SEQ ID NO: 439821 - DNA, 462 bp, Triticum aestivum
  unsure (1)..(462): unsure at all n locations
ttcttatcggccgagtaaaccctagctaaaccccgacctcctccgccggcgagcgagatgaacttcaagggcgccaggatgccgagcgcgccggcgggcgcgggcgcgctggtcaagctcgggctgctcggcggcgccgcgctctacctcggcaacaagaccctctacaacgtcgagggaggccaccgggccatcgtcttcaaccgcctcgaggggatcaaggacaaggtctaccccgaggggactcacatcgtcatcccgtggttcgagaggcccatcatctacgacgtccgcgcgcgacccaacctcgtcgagagcacctccgggagccgggatctccagaggtgagaattggtcttcgtgttcttacacgacccatgccagagagactaccaactatgtacaggaccctgngggagaactacaatgagagagtgttgccttcaatcattcatgaaacac

SEQ ID NO: 439822 - DNA, 344 bp, Triticum aestivum
tttcgcgtccgcggacgcgtgggcggacgcgtgggcaagaagctcgtcgctttcatatccggcgtccccgcgcgcatccgtgcgcgcgacgacgttgtccgcatggccgagatcaacttcctctgcgtccacaagaagctccgatccaagcgcctcgcgccagtgctcatccgggaggtcacccgtcgcgtccacctggagaacatctggcaggctgcctacactgcgggcgtcgtcctcccgacccccatcaccacctgccgctactggcatcgatccctcaacccaaagaagctcatcgacgttggcttctcccgtcttggtccccgcatgaccatgagccg

SEQ ID NO: 439823 - DNA, 309 bp, Triticum aestivum
ttctcctccaaacgcgcacgcacgcgtccacgaataaaggccgagggcggcgaagccaggcccaatcgccaaaaaccctagcgccgatccgatccgatcgagctctgcttcccctcccatggcggccccctcgagccaggcgagcctcctgctccagaagcagctccgagatctagcgaagaaccccgtggacgggttctcggcggggctggtggacgacggcaacgtgtttgagtggcaggtcaccatcatcggcccgcccgagacattatatgatggagggctacttcaatgcagtaatgacctttc

SEQ ID NO: 439824 - DNA, 350 bp, Triticum aestivum
tgcatccgtcgccggccaagaagccgtcgccctccatccccgccacgcacccgcaccggtgccccaactccccgctaggcgtttttacgtcggtgcacgacgcgttcgccgcgcaacgctcgcccccgccggcgccgcacgtcccgttgagccaccagccgagctcggccacgccgaactccagcgtagccgtcccctccgccgtgagcacgaacaccgtggaggtcagcacgtcgtcgcacttttgcttctcgaccttctcccaccgcagaaactggccatgcaccgccgcggtggagtttggcggagcggaagcgacgcacgccacagcggcgggcgaggtgtcgctg

SEQ ID NO: 439825 - DNA, 350 bp, Triticum aestivum
ttcctggcggatggcttgtctggcgttgatggcatcctcatcgatcttggcatgtcatccatgcaggttaacaggtcagataggggatttagtgtgctcaatgatggtccacttgacatgcgcatggaccctaaggcaactttaacagcagaagatatcttgaactcttggcctgagcttgaagttgggcgtatcctccgtgattatggggaggaaaacaattggcaatcccttcagaggcgaattgttaaagaacggaaaaagggggtttacactctactagcgagcttgtcaaacttatccaaagaacgtgcaccatttcaagaggacggcaaggctggattaaaact

SEQ ID NO: 439826 - DNA, 329 bp, Triticum aestivum
gtgacatcaaaggaggtcaagatttgtggtgcccttggtccttgcatctcccttcacagacaaaacagctcggttagtcataaagaaattggtgagggtgggacaaattattggagaatgagtacattgaacagcaaaacctgtattgctttcttcttccgagctgattgtagccgtgataccgatcccccaactgtcttctttattcagttcatgacaagataccgacatggtgatggtagcaatcgcctaagggtaacgactgttgcgagaagatgggctggacctcgatctccagaaattgctgcagggtttgatcaggaagctgc

SEQ ID NO: 439827 - DNA, 361 bp, Triticum aestivum
tcgttcacgcgtccgcccacgcgtccggacacttctcccgtcccgtcccgtccccagccaacctcccatctccgtctcgcgtcgcggcggcagttccactccctcgccatgggcaagattaagatcggaatcaacggtttcggaaggatcgggaggctcgtcgccagggtagccctccagagcgacgatgtcgagctcgtcgccgtcaacgaccccttcatcaccaccgagtacatgacctacatgttcaagtacgacaccgttcacggccactggaagcacagtgacatcaagctcaaggacgacaagactctgctctttggcgagaagccagttaccgtcttcggcgtcaggaaccctg

SEQ ID NO: 439828 - DNA, 250 bp, Triticum aestivum
tgtgttttcatttctgatgactttgatggcgagctgttccccaggtacttgagctttgtcaaaggtgttgttgactcgaatgatctccctctgaatgtttctcgtgagattcttcaagaaagtcgtattgtcaggatcatgcgcaagagacttgttaggaagacttttgatatgattcaggatattgctgacaaggataacaaggaggactacaagaaattttgggagagctttggcaaatttatgaaac

SEQ ID NO: 439829 - DNA, 324 bp, Triticum aestivum
tgtattgcgtcttcgtactcgcctctctccgcgcaaccgagccttccgcccacctcctccccatttcgccagcggcgcacccaccaaccacccccacccgccgccatgagggagtgcatctcgatccacatcggccaggccggcatccaggtcgggaacgcgtgctgggagctgtactgcctcgagcatggcattcagcctgatggccagacgcccggtgacaagaccgttgggggaggtgatgatgctttcaacaccttcttcagcgagactggggctgggaagcacgtcccccgtgctgtcttcgtagatctcgagcccact

SEQ ID NO: 439830 - DNA, 385 bp, Triticum aestivum
ttttatatcgtaactgtgttcctccctccgcccgcctacccaccgcagatcacacacaattcactccagcccccctaccaccgcactcgaaaacctctctctctctctctcactccaacagtttgcaggaaagagagggagagatcgatcttgcgttgccaagatgttcatcgagagcttccgcgtggagagcccgaacgtgcggtacggcgcgggggagatcgagtcggagtaccgctacgacaccacggatctggtgcacgagagccacgacggcgcctccaagtggggtcgtccgccccaagtccgtcaactaccacttcaagaccaacaccaccgtccccaactcggggtgatgccgtggggtggggcggcaacaatggct

SEQ ID NO: 439831 - DNA, 368 bp, Triticum aestivum
  unsure (1)..(368): unsure at all n locations
tccacgcgtccgctttctcctctttccctcccaagcaaatcctctgcgctcccctcgcatcctcctccttcctctgccgcttgccgtgtttggttcgggaccgaaatggcattccacgacgaggcgccgctgctgctcaggatcaacaccgccagaggcggccacatgggcggaggcgagtgcgacgaggccgagaaccagcggtggccgccgtggctcaagccgctgctggcgaccagcttcttcgggcaatgcaagatgcacgcggacgcccacaagttcgagtgcaacatgtactgcctcgactgcgtcaacggcgcgctctgtncccagtgcctcgcctaccaccatggccaccacgccatcca

SEQ ID NO: 439832 - DNA, 421 bp, Triticum aestivum
ttttatgacttcttcaaggcagccgctctcgacaagcctagggtgaccaacaaggttggatccaacgtcaccttgatcaacgtcatgcagattgctggactcaacacactcggcatctcaattgcgcgcatcgactatgctcccttgggtcagaacccaccacatacgcaccctcgcgccactgagatcctcacggtactcgaggggacactgtacgttggctttgtcacatccaaccagcccgccccaaacagaaacaagttcctctccaaggtgctcaacaaaggtgatgtgtttgtcttccccgtggggctcatccacttccaattcaaccccaacccacacaagcccgccgttgcaattgccgcacttagcagccagaaccctggggctatcacaattgccacgcggtgtttgggtc

SEQ ID NO: 439833 - DNA, 363 bp, Triticum aestivum
tttttcacgcgtccggccgccgactgccggctgcagcactccggcgggccgttcggcgagaacatcttctgggggtccgggcagtcgtggacggccgcgaacgccgtgaagtcgtgggtggacgagaagcggaactaccacctcaacagcaacacctgcgatgccggcaaggtgtgcgggcactacacgcaggtggtgtggcgcaagtcgacccgcatcggctgcgcgcgcgtggtctgcgccgggaaccggggcgtcttcatcacctgcaactacaaccctccgggcaacttcaacggcgagcgcccgttcctcacccttgacgccgagtcctagtagtacatcgtgcgtgtgtgttttttt

SEQ ID NO: 439834 - DNA, 426 bp, Triticum aestivum
  unsure (1)..(426): unsure at all n locations
tctctcgaaccttccgaagtccaaaccctagcgagctcccttccgcctcccccaagacacaaacctcagatcccacccatcccacgccatggacgacgacttcgacatccccgcgggcgacgacctgatgatgggggacgggatgggtgacttcggcggcgccgaagggccggggatgaaggtgggcgaggagaaggagatcgggaagcaggggcttaagaagaagctgctcaaggagggcgaagggtgggacacccccgaggtcggcgacgagggtcgaagtccattacactggcaccctccttgatggtaaaaaatttgactccagccgtgaccgtgatgacactntcaagttcaagctgggacaaggtcaagtaataagggatgggatcaaggcatcagaccatgaagaaggggaaaatgctc

SEQ ID NO: 439835 - DNA, 439 bp, Triticum aestivum
ctcgtctatgggtgttcttgcgaaggatgatatgcatctaatcgctacaaatggtggaaaggaaaagctagactttgtatttgggtgtgcatatgatcagcaaggccagcttttgtcctcaccagcaaagaccgatgggattcttggtcttagcagtgcagcaataagccttcctagtcagctggccagcaaaggaattatttccaacattttcggtcattgtatcactagagaaacaaatggtggggggtacatgtttctgggtgatgattatgtaccaagatggggaatgacatgggctcctattcgaggtggtccagataacttataccacacagaggcccagaaagtaaattatggagatcaggagctcagtatgcacgggcacgcaggaaattctgttcaagtgatttttgatagtgggagctcgtatacatac

SEQ ID NO: 439836 - DNA, 427 bp, Triticum aestivum
ctccaggcggcggccgaaggcaacctccagctcttcaagaggaccgccagcgcgctggacggcgggaagggccgcctcagggacgcggtggaggctgtgacgctccaagggcgaggctccggggcgctgcacttcgccgcgcgccgtgggaggatggcggtgtgtgtgtacctggtccaggagctcggcgtcgacgtcgacgccaccgacgagacaggctatacacctctggttcatgcaattattgctggcactgtggacactttccagtatcttcttgatcacggtgctaatccagataaacccgatggacaagggtctacgcctctccatttggctgctgcaggaggaaattgtgaaatagtaaaagccttgctttccaaaggggtcaatgttgattcattgtgtcatactggaacaccactgc

SEQ ID NO: 439837 - DNA, 455 bp, Triticum aestivum
ttctatgaccggaaggagcggtgccgccgagccgggaagagccaccaccccatcttcctcgcctccgcttccgaagggtcagagatggcggaccgtgctaaccacccgtctgtcatgcagaagtttggtggacagttccaccttgcctccagcttctctgagggtgttcgtgctcgcaacatctgcccttctgtgccatcctatgagaggcgcttcaccacaagctgctacatgactcagaaccttggcatcagtgtccccatgatgtcatcttctccattgtttgccaatgcaccacctgagaagaaaggtgtcaagaactttgcaattgacttcctcatgggaggagtgtccgctgcagtttccaagactgctgcagctcctattgagcgtgttaagctgcttatccagaaccaggatgagatgatcaaggctggcaggctctctgagccata

SEQ ID NO: 439838 - DNA, 431 bp, Triticum aestivum
tctctcccctgcctcccccagagctcgttagggttttctcttttttcgggggagaaatctcaagaggcggcaccatgctcgtgtaccaggacaagctttccggcgacgagcttctgtcggattcgttcccttacagggagctggagaacggcgtgctctgggaagtcgatggccattgggtcgttcaaggagcagttgatgtggacattggagccaatccctctgctgagggtggtggtgatgatgagggtgttgatgaccaggccgtgaaggtggttgacattgttgacaccttccgtcttcaggagcaacctgcttttgacaagaagcagtttatctctcacatgaagcgctacatcaagaacctctctgccaagcttgaaggggatgacctagatgctttcaagaagaatgttgagtccgccacaaag

SEQ ID NO: 439839 - DNA, 475 bp, Triticum aestivum
tctgtgatgctggtcgctgctgctcaggtggcggtggctgccccggtgacggcgccggccttcctctgggctcccaagaactacggacttagtcccaatgaggctaaagaagtagtccactatcagacaatctccccaaagagtttagctgattctgttctcgaggaaggtggctggtcgaacttggtgtgttcaaaggatggtcctcaaaagaatgttgatgttgcagttctttttcttggatcaaagctacaatcatcagacatctctaaagataaacaagtcgatcctgctttagcggacatactaaagctgtccttctcaagctctgagttttccatggcattcccttatgttgccatgtcagacgacgaagcactagagaactcattgctatctggatttactgagaattgtgaggatggttctggaggaaatcatatcacttacacagacacgtgtactgcaagcagtg

SEQ ID NO: 439840 - DNA, 407 bp, Triticum aestivum
ttttgaccgtttgtctgtgtccagtaggtgagctgctgacgggcggatcgtgccgagcaccggcgagatggcgttggccggcggagatgctcgcggcgagctcgtctgcgtcaccggcggcagcggcttcgtcggctcctggctcgtccgccttctcctcgaccgcggctacaccgtccacgccaccgtccagaacctccaggacgagggcgagaccaagcacctgcaggctctggatggcgcggacacgcggctccggctgttccagatggacctcctcgaccccgcctccgtccggccggcggtcgagggcgtccacggcgtcttccacctggcctcccccgtgatactgcagcccgcacaagaccctgagaacgagctgctgctgccggcggtcaatggcgcgc

SEQ ID NO: 439841 - DNA, 377 bp, Triticum aestivum
tctttacgcgtccgcccacgcgtccggcggccctgtacgagtgcatgcggctgttcccgccggtgcagttcgactccaagttcgcggccggcgaggacacgctcccggacggcacgcccgtggccaagggcacccgggtgacctaccacgcgtacgccatgggacggatggagtccgtgtgggggcccgactgcgccgagttccggccggagaggtggctccgagacaaccagttcgtgccggagagcccgtaccggtacccggtgttccagggcggcgtgcgcgtctgcattggcaaggagctggccatcatggagatgaaggcggccattcgggccgtggtccagggcttcgacatcgagacggtcgggcggagc

SEQ ID NO: 439842 - DNA, 351 bp, Triticum aestivum
ttattgggttcgtgtgcaagaacatgaagatggtgacggcaaacgacttcttcttgcccgggcttaacaagccgggcatgttgaacgctcagggctcggcggtgacaccggtgacggtgaagcagctagtggggctgaacacactgggcatctcaatggcgcgcatcgacttcggtcccaacggcgggcagaacccgccgcacacacacccccgcggcaccgagatcctcaccgtgatcatggggcagctgctggtggggttcgtcacctccaaccagcaggacgggaagaacctgctcttcacgaagcagctagtggagggcgacgtgttcgtgttcccacaggggctca

SEQ ID NO: 439843 - DNA, 445 bp, Triticum aestivum
tttttaagatcgatcgatcgatctcggagcctggttgaatccacccaccgccactcgatccaatcacatacagcgaggaaagattaaaccgccgccgccgccgcgatgaagttgcagacggaggccgccgccgccgccgggggggaggggaggctgatgatccggcaggtgtgggcgaacaacgtggagtcggagttccaggcgatccggcaggtggcggagcggttcccgtacgtgtccatggacacggagttcccgggcgtgatccactgcccaagcaagcaccacgcgacgctgaccccgtcggagcggtacgcggcgctcatggcgaacgtggacgcgctccacctgatccaggtgggcctggcgttcgcggcgtcgcccgacgcggcaccggcggtggcgttcgagatcaacctgcgggagttcgacccgcgcgtgcacc

SEQ ID NO: 439844 - DNA, 432 bp, Triticum aestivum
ttcttcacgcgtccgcccacgcgtccgcccacgcgtccgcgccggcgtgtaccacgaggtgtacatcaactcccaggcctccttcggggagctcaagaagctcatgtccgagaagacggggctgcacccggacgaccagaaggtggtgtacaaggacagggagcgggactccaaggccttcctcgacatggtcggcgtcaaggaccgctccaagatgacgctgctcgaggaccccaccgcccaggccaagcgcctcatcgaggagcgccggaataccaaggcccagcgcgccgccaaggccgtctcgcgcgtcagcctcgacctcgacaagctcgcgtccaaggtgtcggcgctggagacgatcgttagcaagggcggcaaggtggtggaggccgacctggtcacgctcaccgaggcgctgatgagcgagct

SEQ ID NO: 439845 - DNA, 418 bp, Triticum aestivum
tttttcaagacgaagaacccatctgtaaaattaatatgcgttgaaccagctgaaagtccagtgatttcaggtggcgagccagccttccacaacatcctaggaatagggcctggttttgtcccagaaatattggatagatcccagatagatgaaattgtaacagtaactactcaagaagctatggacatggctagaagattggcaagggaagaaggattgcttgttggcatatcttcaggggcaaatgcagctgcctgcttaaaggttgcatcaagagaggagaacaggggaaagatgattgtgacaatgttttccagtggtgcagagaggtatctgaactcggagctctttgcgcaggttaaggaagagtgcgttaacgtcaacatgaccttctgatgtccatatcaaggcaatgaca

SEQ ID NO: 439846 - DNA, 348 bp, Triticum aestivum
ttttgatcagcgttggtacttcagttgtaaatgataaagtaaaggaaatggatcagaaatatctagtttccgagaagactaggtcagcacttgcagctgctgaacagggcgtctctactgctggatctgccatcatgaagaacaggtatgtccttactggagcagcatgggtaactggtgccttcagtaaggttgcaaataccgcgaacgatgtcggggcaaaggcgaaggagaaaatagcggctgagcaggagggcaagaccgtagcggccgggtatgcacaagctgacatgtcggacgctcgtgaaaagcccagggatttggatggtgaagtcacaaagatacatg

SEQ ID NO: 439847 - DNA, 398 bp, Triticum aestivum
tttaagtctttccaaccatcattggagacaatgtcacagtaggacatagtgctgtattacaaggatgcactgttgaggatgaagcttttgttggtatgggagcaaccctgttagatggtgttgttgtggaaaagcatgggatggttgctgctggagcccttgtaagacagaacacaaggatcccttgtggagaggtatggggcggaaaccctgcgaaatttctgaggaagctcacagatgaggagattgcttttattgcggaatcggctgccaactactccaacttagccaaggcacatgctgttgagaatgccaaacccttggagaagattgattttgagaaagtgttgcgcaagaaagttgcttaccaggacgaggaacacgattccatgcttagt

SEQ ID NO: 439848 - DNA, 468 bp, Triticum aestivum
tgccgaggaacgcctccgccgcgccggagatcctgtccccgagcgtcctggacttcccgtccctcaagctcagcagcccggtgacgccgctcaccggcgaccccttcttcccctcgccggcgtcgtcctcgggggatgccgccgagcgcgcggccatcgccgacaagggcttcttcttccacccttcgccgcggggcgccgagccgccgcggctcctcccgctcttccccgtgagctcgcccaggatggccgccgcgtccgcgacggcggcgccggccgagtgagtgacccaaagcctccgcctttgcgcgcgcatcctgctcagccagccatgaagtaatctacgacttctaccatcgccaccgccctcgctgtatcatcgccgtcctttggtcgcagttctagtttcatactgtagtagtagcaaggtgtttgctgtgtcgttcttcgccggcgccggcgctgctg

SEQ ID NO: 439849 - DNA, 490 bp, Triticum aestivum
ttcttgaaggactgaagggttcaagatgagcaacagcctgaacgcatcacgcttcccgttttgtgcgctagtcatggcatctacgaaccagagaattgtgctgttgcagcaggttgaggggcccaaatcacctgaagaaatgataacaattcttcagagagttgttgaagaatgcactacgtcccttgttgctgccaggattgaagctgaagaaagactaaacaatcaacgtttgcgtgaggaacaagatgctgcttacagagctgcacttgaagctgatcaggccagggaacgccagatgagagaggaacaagaaagacttgaaagagaggccgcggaggctgagaggaagcgtatagaagacgaggaagcacaagccagggcagtccaagaagcagctgaaaaggaagccgctcttgcaaggagacggcaagagaaggcaatggctcttggcgctgagccagagaaagggcctgacattactcgagtt

SEQ ID NO: 439850 - DNA, 378 bp, Triticum aestivum
ttcttccacgcgtccgggtgaggccgccgtgcaggtggtggtgacggacaggggcctcctcggcaacctcctcggcaagaagaaggctgaggaggacaaggagaaggaggaggagctggtcaccggcatggagaaggtctccgtggaagagcccgaggtcaagaaggaggagcacgaggatggcgagaagaaggagacccttttttccaagctgcaccgatccagctccagctccagcttgtttagtgacgaggaagaagaggaggtgatcgatgacaacggcgaggtgatcaagaggaagaagaagaaggggctcaaggaaaagctccaggggaagctgcccggccacaaggacaccgagggtgagcacgtgacggg

SEQ ID NO: 439851 - DNA, 501 bp, Triticum aestivum
ttctagaaagaagtcggattccaatgatgtcgcgatatgtagagttgagcagctctgtccattcccctacgacctcattcagcgtgagctgaagagatatccaaatgccgagattgtttggtgccaagaagaaccgatgaacatgggggcgtatacctacatcaatcctcgcctgctgaccgcgatgagggcgctcggtcgtggcagcatagatgatatcaagtacgtcggaagggccccatctgcagccacagctacaggtttctatactgtccatgtccaggagcaaaccgagctcgtgaagaaggcgctgcagcgagaccccatcaagtctccgctctgaacatgtagattctttgcatagccatcagaacttctgatctcctaccatgcagaaaaacaacaggtctaaattacacctcttcagccatttggtgaataatcgttgcgcatgtgtggtaccgcccattagaaaaggtctgaggtccattttgagtgcat

SEQ ID NO: 439852 - DNA, 396 bp, Triticum aestivum
ttcttcccatccatcatcatctcatctcctctgcctaacaggctaagcagctgagctcaagcagcggcaatggagggcaaggaggaggacgtgcgtctgggcgccaaccggtactcggagcggcagccgatcggaacggcagcgcagggcgcggacgacaaggactacaaggagccgccgccggcgccgctgttcgaggcggaggagctgacgtcgtggtccttctaccgcgcggggatcgccgagttcctggccaccttcctgttcctgtacatcagcgtgctcacggtgatgggcgtggtgggcaacccctccggctccaagtgcggcaccgtgggcatccagggcatcgcctggagcttcggcggcatgatcttcgtgctcgtctactgcacc

SEQ ID NO: 439853 - DNA, 452 bp, Triticum aestivum
tctttacgcgtccgcccacgcgtccgtggagctgaagcaaacttggccgcagctattcaggttgctcagctggcgctaaagcatcgccagaataagaggcaacagcagagaattattgttttcattggaagccctgtgacatacgacaagaaggttttggagacaatagggaagaagctgaagaagaataatgttgcccttgacgttgttgattttggtgaaactgatgatgaaaagcccgagaaactggaagcgctgatcgctgctgtgaacagcagtgatagcagccacatcgtccatgtccctccgggtgatcatgccctttctgatgttcttataagcactcctatctttactggtgaagaaggtggaagtggctttgctgcttctgcagcagctgctgcagccaccggagctactggatatgattttggcgtggacccaaatgtgga

SEQ ID NO: 439854 - DNA, 501 bp, Triticum aestivum
gtcgtcccaatcctcgatctgttctcagaccctcctccgtccgtcgcagctccagatttccttccccatggctccgatcaagatcggtatcaacggtttcggccggatcggcaggcttgtggccagggttgcgctccagagccccgatgtcgagctcgtcgccgtcaacgaccccttcatcaccaccgactacatgacctacatgttcaagtatgacactgtccacggacagtggaagcaccatgaagttaaggtgaaggactccaagacccttctcttcggtgagaaggaggttgctgtgtttggctgcaggaaccctgaggagatcccatgggctgctgctggtgctgagtacgttgttgagtccaccggtgttttcaccgacaaggacaaggctgcagctcacattaagggtggtgccaagaaggtcatcatttctgctcccagcaaggatgctcccatgtttgtctgtggtgtcaatgagaaggaatacaagtctga

SEQ ID NO: 439855 - DNA, 466 bp, Triticum aestivum
tttacgcgtccgcccacgcgtccgcccacgcgtccgcaaactcatgcactcatttcacggccacagcattgcatctgcagtctgttgctgcagttttagaagcaaatcttgaagctgggtctagattgtacagagattgtcgattgcggaacatctttatgatgaacaatatctgctacatggtccagaaagtgaagaactcggatctcaagagctttcttggcgacgactggatccggctgcacaaccgaatgtttcagcatcaggcgaccaactacgagagggcgtcgtggagtcaggtgctctcttacctgagtgatgatggcctatgtgccgccggaggtgccgcttctcgtaaaatcatcagggagaagttcaaaaacttcaacctgtcctttgaagatgtttatcgagttcagacggcatggtctgtccctgatgaccaactccgcgaagatgtcaggat

SEQ ID NO: 439856 - DNA, 463 bp, Triticum aestivum
tctgagaggaagaagcctcatagaggagaagctcaaggcgaggagaggagagggatcgtcgtcgtggcgatggatcgggtccgcggctccgcgctgctgctcggcgtcctgctcgcaggatcgctgtttgcactttgtgccgcaaaggaggaggccaagaagctcggtacggtgatcggtatcgatctcggcaccacctactcatgtgtcggtgtgtacaagaacggtcatgtcgagattatcgccaatgaccagggtaaccgtatcacgccctcatgggttgggttcaccgatggcgagaggctcatcggtgaggctgcaaagaaccaggcagctgtcaaccctgagaggaccgtctttgacgtcaagcgtctcattggaagaaagtttgaggacaaggaggtgcagagggacatgaaacttgtcccctacaagattgtcaacacggaggggaagccttaca

SEQ ID NO: 439857 - DNA, 489 bp, Triticum aestivum
ttcggtccaaccgcagctagggttttgctccgccgcaacgcacgatccagattcctacacttccctaaccctacccaaccctgcacctcccggcggcggcggcggcggcggcgagcagcagtcagcggcaagatgaggcctattctcatgaaggggcacgagcgcccgctcacgttcctgaagtacaaccgggacggcgacctgctgttctcatgcgccaaggaccacacccccaccgtctggtacgccgacaacggcgaccgcctcggcacctaccgcggccacaacggcgcggtatggtcctgcgatgtctcccgccactccgcgcgtctcatcacggggagcgccgaccagactgccaagctctgggacgtcaagacggggaaggagctcttcaccttcaggttcgacgcccccgcgcgctccgtcgacttagccatcggcgaccacctggcggtcatcaccaccgacagtttcatggggaatatg

SEQ ID NO: 439858 - DNA, 445 bp, Triticum aestivum
tttgtcagtgggcggacggtaggggtagcgatggtgggtcggacgatgccgcgcagggcggctggttccggatgttctccgtagcggcctacaagccctacttcgacgttgacacgtccgatgtcgtggagaggatctgggagtcggtcttccccttccgcggcaacttcacagagaagactttcgacaaacccgacctgtatgggccattctggacatgcaccaccctgatttttgttgctgcttccattgccacgtttgtcacctacctttcccacaaatggcacaagaaagagtggacctatgatattaatctggttacatggtctgctggcttattctatggctatgtgacatttgttccccttgggttatatgtcattcttaagtacttctcagcacctgctggactcgtgcaattgtggtgcctatatgggtactcttt

SEQ ID NO: 439859 - DNA, 382 bp, Triticum aestivum
ttcttcacgacctccggtgtgtccgcgcgtcgcgtggtggtggatgcgcgccaccacatgctgggtcgccttgcgtcgatcgtggccaaggagctgctcaacgggcagcgcgtggtggtggtccggtgcgaggagatgtgcatctccggcgggctggtccgtcagaagatgaagtacctccgcttcctccgcaagcggatgaacaccaagccctcgcacggccccatccacttccgcgccccctcgcgcattttctggcgcaccgtgcgcggcatgatcccgcacaagacgccccgcggcgaggctgcgctcgccaggctcaaggcgttcgagggcgtcccgccgccttacgatcgcaccaagcgtatggtcattcccgacg

SEQ ID NO: 439860 - DNA, 459 bp, Triticum aestivum
atcgaatccgagagtatcgtcgtcggttaggcgtcgccaccaccaccaccagcaccagcaccatggcagcgcccccctcctccgtctccgtcagggccggcgcgtccgtctcggcgaagctgaccccttcgcgggccgccagggttgggttcggtggcagggtcagcgtcggctcgggcaggaagtgcggcggccccgtgcgggcgtcgctcttctcgcccaagcccgcggtggccatggacgcgaggccgaccaaggtgcaggagctgcacgtctacgagctcaacgagcacgaccgcgagagccccgcctacctccggctgagcgccaagcagagccagaacgcgctcggcgacctcgtccccttcaccaacaaggtcagtcagtccagcaagtgatgaatctttcttgctccttcctctgttccgttcctcttcctctgctagctttgttgagtgg

SEQ ID NO: 439861 - DNA, 468 bp, Triticum aestivum
ttttctccagctccaggttctactgttactgcttaaaagaatttgagttggccacttctattggcatgatagtgttcaacactaggagatctcttgtgttatatatagcagggctcttgatttttaaaatttgaagtagatgtcattccgtagcattgtgcgcgatgtaagggatagctttgggagcttatctcgaagaggatttgacatcaggattctgggcaatggcagagggagatctcatggtgctgtccatgagttacatgaccccgttcctgtaatccagagcagctgttgggctaacttgccttccgaattgcttcgagatgtgattgagaggttggaggctagtgaggctacatggccctgtaggaagaatgttgttgcttgcgcagctgtctgcagaacatggagagagatgtgtaaagagattgtaaaaaatccggagttttgtggaaagatcacttt

SEQ ID NO: 439862 - DNA, 490 bp, Triticum aestivum
ttctggagggcacaaggagaaacaaatcgaggagagtcctcatgtcaaaggttttaatttgaaggatccacgtataatggatggaaattggatacatgaacctaataaagatgtcatcagggattttttccgtctgctagccatctgccatacatgcatacctgaagtagatgaaactgataaagtttcatacgaagctgagtcccctgatgaagctgcatttgttatcgcagcaagagaattagggtttgagttttacaagaggacacagacaagtatatttattcgtgaacgcgatcctagccagaatgttgcagattatcagtatagaaaatatgagctcctaaatgtcttggaattcagtagctcacgaagacggatgtctgtaatagtgaaggaaccagagccagaggggaggatattactgtttagcaagggcgctgatagtgtgatgttcacaaggcttgcaccagatggaagaaaatttgag

SEQ ID NO: 439863 - DNA, 499 bp, Triticum aestivum
gtaccctacccccatggcggcctcgctcctctcgcgcgccgcctcggccgccttcgccctccgcggcggcgcccggctcctccccaagggcagggtcggatgggcgcgcgcggcggaggtcggctgcggggcgtcgctgtcgccgtcgatgacgcggttcgggatcgccgcgcgcttcaacgccacctcgtcggccgtgtcggaggccgccgccgcgtcgggcgccgtccacgcggtgccgcggaccgagcctgtcgtgtccgccgagtggctccacgccaacctcagggaccccgatgtgaaggtacttgatgcctcttggtatatgcctgcagaacaaaggaatccacttcaggagtaccaggtggctcatatccctggtgccttattctttgatgtcgatggaatatctgacagagcatctaatctgccacacatgctgccatctgaaaaagcattttctgccgctgtgtcttcccttggcatctacaacaaagat

SEQ ID NO: 439864 - DNA, 425 bp, Triticum aestivum
tctatcttgatctcgcggtggtgccgggagaatggcgtcgccatggaaggcagcgagcctggcaagcccgagccggcgccaccggtggccgcaaacaaggccgcggtggaggctgcgcgcatgaccgcgtcgtttctggtgaagaagctctcggcctcgttctcccctggttcggacaaccgcgtggtgcacgagatccgtctgctcgccaagtccggctccgagagccgcgcgttcatcggagaggccggcgccgtgccgctcctcgtgccgctgctcaactccgaggacgccgcgctgcagctcaacgccgtgacggcgctgctcaacctctccattctcgatgccaacaagaagcgcatcatgcacaccgacggcgcggtggcggccctctgcgaagtgatgggctccggcgcgacatggcg

SEQ ID NO: 439865 - DNA, 406 bp, Triticum aestivum
tcttcgaggaggagcagccggagataggatggcgatggccatggaagtgctcgctcgacttgcctgtatcttctccaccaccatacttttgcagagcctggcatggccctgcagcaatggagagagaggcttctcctacccccagtctccaaaggtcccctccattgtcagcgagaggtacaggactgcctaccacttccagcctccaaggaactggatgaacgatccatgtggaccaatgtactacaatggcgtctaccatgaattctaccagtataaccccgatggcgcctttgaccccaatgactcccttatgaacatggtttggggccattcggtttcaacagacctcatcaactggatcggtcttgaaccggcaatcaaaccagatatcccaagtgacata

SEQ ID NO: 439866 - DNA, 427 bp, Triticum aestivum
tgccagatccggccgggaggggcagaggaggcgccggcgtgatgtcggccgagcatggcgccgcggcggcggacggggctggggcggagcctcctcccccggcgccgatgccggggctggtggcctcggcggacgcggcggggcagaggtccctgccgacgccgttcctgaccaagacgtaccagctcgtggaggacccggcggtggacgacgtgatctcgtggggcgaggacgggtcgacgttcgtggtgtggcggccggcggagttcgcccgggacctgctccccaagtacttcaagcacaacaacttctctagcttcgtgcggcagctcaacacctacggatttaggaagatcgtgccggaccggtgggagttcgccaacgactgcttccggcgaggcgagaagcgcctgctctgcgacataca

SEQ ID NO: 439867 - DNA, 440 bp, Triticum aestivum
tatccccttctgtgatttcagcataggcccagtgcacaagaaagatgttatgaaggctagtgttatgcttgagaggaagaaggaatatgcaactatcttggcgtttgatgtcaaagtgatgcctgatgcccgtgatcttgcagaagagtctggcgtgaagatcttcgtggcagatataatataccaccttttttgaccaatttacagcatacattaagaacatatgggaagagaagaagaaggacagtgccgaagaagctgttttcccctgtgttcttaagatcatgccgaactgtgtcttcaacaagaaggatccaattgttttgggtgtcgatatccttgaagggatagccaaggtgggaacgcctctgtgcataccctcgaaagaatttatcgatattgggaagattgcctccattgaaattaatcacaagcaagtc

SEQ ID NO: 439868 - DNA, 469 bp, Triticum aestivum
tttgacgcgtgggcgcgacgacgtccccgtcgccgccgccttccgccgcgcgcgcctccgcaaggaccccaacgcccacttcctcctcgccgtcaatctccaggtccccggccggccggacgcctacagctcggtcttctacttcgcggcggaggcgcccatcccgccggactccctgctcgggcgcttcgtctacggcgacgacgcctaccgcaacgcccgcttcaagatcgtcaaccgcatcgtcaagggcccctggctcgtccgcgccaccgtcggcaactacggggcgtgcctcctgggccgcgcgctcacgtgccgctaccacaggggcgacgactacctcgagatcgacgtggacatcggcagctcggcgatcgccactgccatcctgcatctggcgctgggcgcggtcacctcggtgaccatcgacatgggcttccttgtcgagtcccagtccgaggaggag

SEQ ID NO: 439869 - DNA, 388 bp, Triticum aestivum
  unsure (1)..(388): unsure at all n locations
ttctcgcgtccgcatgtggccattgccaccctgatattgtcaaggccgtgcaggagcagaccaagttgcttcagcacaccaccaccatatacttgcatcatgccatcgtcgagtttgccgaggcgcttgcctccaagatgccaggcaatctcaaggttgtgtacttcgtcaattctgggaccgaagcgaatgaactagcaatgttgatggctcggctgtacagcgggaatctcggtatgattgcattgagaaatggataccacggtgggagtgctggaacaataggtctcacgggtttgcagacgtggaagtacccgattcctcagggtgagattcatcatgtcatgaatccngatccttaccgtggagcttttgggtctgatgctgc

SEQ ID NO: 439870 - DNA, 444 bp, Triticum aestivum
tgctgctcacgcggttcgcgtgcggctcgctggccgtcgggttcgcggccaaccatgccgttgctgacggccacgccaccagcgacttcctggtcgcgtggggccgcgccgcgcgagggctggacatctccggcccgtcgccgacgccaccgccgcacagccaccccgatctcttcccgccgcgcgacccgccagtcgtcaacttcgagcaccgcggcgtcgagtactaccggccgtcgcccagcaaccccaagcagggcgagggcggacaccacggcgccgaaaacgtggtcatccacaaggcgcacttcaccaaggacttcatcgccgggctgcgcgccaaggcttcggaggggcgcgggaggccgttcagccggttcgagaccacgctcgcgcacctgtggcgcaccatgacgcgcgcgcgcgacctgagccccgaagaga

SEQ ID NO: 439871 - DNA, 454 bp, Triticum aestivum
gcgacgacagcggcaagaagcacccgctggacgccatgggcgccttcttctcggcgcaggtgaaccgccgcaagctggtcaccacgcagaagctggccatgtccgagcgctgcacctcctgcggcgacgacttccccggctgcgcccaccgccccgccgaccgcaaggcgtggatggcggagctgggccccgaccgcctgcgcctgcaccaggtggtctggccgggcacccacgactcggccaccaacaagatcggcatccccttcatcacccgccccttcgcgcagtgccagtcgctctccgtctaccaccagctcgccctcggctgccgcctcctcgacgtccgcgtgcaggaggagcgccgcgtctgccacggcgtgctcgccacctactccgtcgacgtcgtgctcgacgacgtcctgcgcttcctgtccgagacggagtcggaggtcct

SEQ ID NO: 439872 - DNA, 432 bp, Triticum aestivum; identical to SEQ ID NO: 435739

SEQ ID NO: 439873 - DNA, 379 bp, Triticum aestivum
tcttccacgcgtccgggaggtctgtgacttcgacttcgagccctgcggctactccatgaacgccatcaacggatctgccttctccaccatccatgtgacccccgaggacggcttcagttacgcgagctacgaggtcatgggcatggacgcttcggccctggcctatggcgacatcgtcaagagggtcctccggtactttggcccttcagagttctcagtggcggtcaccatcttcggtggccgcggccatgccgccacctggggcaagaagctcgacgccgaggcatacgactgcaacaacgttgtggagcaggagctcccctgtggaggcgtcctcatctaccagagctttgccgcgaacgaagaggttgctgtctct

SEQ ID NO: 439874 - DNA, 391 bp, Triticum aestivum
tcttttcttttcaagcagcatcttacagcatttgtggaaggtttatatggaatgatccgtgacaatgtcaagaaagaattatctgcattgctcttgcatgctattcaggtcccgagaattatgaaagccagtatggtaagacgttcatttggatcatcaagtttgagggggcgttcattttcaaatcaaggtagctattggctggcgatagttgacaatttgaatgaactcttgaatatcttgcgagaaaattgtgtccctgctatttttattcggaagatatttacccagattgtctcatttatcaacgctcaacttttcaatagtcttcttgtgcgccatgagtgctgctcttttagcaacggagaatatgtaaaacaaggattggcac

SEQ ID NO: 439875 - DNA, 435 bp, Triticum aestivum
ttgcagtgactctggggccaaagctgtcggagacggtcaaggggaagctcacgctgggcgccaggatcctgcaggccggcggcgtcgagaaggtgttccggcagtggttctccgtggacaagaacgagcggctggtgagggcgtcgcagtgctacctgtccaccacggcgggtcccatcgccgggatgctcttcgtctccacggagcgcgtcgccttccgcagcgaccgctcgctggccgtggccgcccccgacggcgccaagctccgcgtgccgtacaaggtgacgataccgctgcgcaaggtgcggcgcgccgtgcccaccgagaacaagcacaagccggagcagcgctacatcgaggtggtcaccaacgacggcttcgagttctggttcatgggcttcgtcagctaccaccggtcgctgcagcacctggagc

SEQ ID NO: 439876 - DNA, 332 bp, Triticum aestivum
ttttcataccagggaggtgaggccgctctgcaggtggaggtgacagacaggggccttctcggcaacctcctcggcaagaagaaggcggtggaggacatggagaagcaggaggagctggtcaccggcatggagaaggtcttcgtggaagagcccgaggttaagaaggaggagcacgaggatggcgagaagaaggagaccctcttctccaagctgcaccgatccagctccagctccagctcgtctagtgacgaggaagaggaggaggtgatcgatgacaacggtgaggtgatcaagaggaagaagaagaagggtctcaaggagaagctcaagga

SEQ ID NO: 439877 - DNA, 439 bp, Triticum aestivum
catctacaagtgctgcttggggaggtcgccaactttgtcgcctatgtcttcgcaccagctgtcctcgtgactcctcttggagcactgagcataatcgtcagtgttagcgcactttgtgctgaaggagcggcttaacaagctcggcgttcttggttgtatatcgtgcatagtaggttcagttgttgtcgttctacatgcccctgaagagcacatgcccgattccgttgaagaaatctgggatctagctactcaaccaggatttctagcatatgcgggaacaacattgttactcatggcaatagtagtagtgttcatcgaacctcgatatggtcagaagaacatactgatatatctgggtatctgctcttcaatgggatcattaactgttgttagcatcaaagccgttggtgttgccataaagcttacgctggatggaatg

SEQ ID NO: 439878 - DNA, 403 bp, Triticum aestivum
ttgttcacgcgtccgcccacgcgtccgcccacgcgtccgtccacgcgtccgcccacgcgtccgcccacgcgtccgcggacgcgtgggttcatggcaggaagctttagggctaacccatatgagacttgtactaccagccagcagtacaaacacctggcctatgtcatctcttttctcccttactattggagagctatgcagtgtttaagaaggtacatagaggaacatgacattaatcagctcgccaacgccgggaagtacgtgtcggcgatggtggcggctgccgtcaggttcaagtacaatgtcacaccgacaccattctggatgtggatggtcctcatctcatcctcaggcgccaccgtttaccagctctactgggactttgtcaaggattggggctttt

SEQ ID NO: 439879 - DNA, 453 bp, Triticum aestivum
tttacgcgtgggaagaccatgagcgtcaaatattggaaaaggaaaaaatagaggagacaaagagattgactattcagaagaaatctgcagatgaagaaagggagaggcttttgaaggaacagagacttagggagcagcagaggatccgtaaagaaatagaggaaaaagaggcgagggaagcagcaaaaatgatagaagatttaacaggaagggggaagaataagaaaaaaattcacattgagggggatatgacaaaacaacacgccatggaggtggtgttgaatcaacaggtgaaggagcgtcaggagatggaaaaaaaactggcgaaacttgcaaagacaatggatcacttggagagggcaaaacggcaggaggaagcaccactaatcgaggaggccttccagaaacgcctcgaagaagaaaagatccttcatgagcaagagcagctgagag

SEQ ID NO: 439880 - DNA, 360 bp, Triticum aestivum
ttctctcgtccggcccgctcacaccaaaaacaacaaccatcatcagttgctcggctccggagaggcagaggcagaggcaaagatgggctccaccgcagccgacatggccgcctccgccgacgaggaggcgtgcatgtacgctctccagctcgtctcgtcgtcgatcctcccgatgacgctcaagaacgccatcgagctgggcctcctggagaccctggtggccgccggcggcaagctgctgacgcccgccgaggtggctgccaagctcccgtccacggcgaatcctgccgcggcggacatggtggaccgcatgctccggctgctcgcctcgtacaacgtggtgtcgtgcacgatggagga

SEQ ID NO: 439881 - DNA, 452 bp, Triticum aestivum
ttcacgcgtccgctccgcaccatgggttaactaggcgccttaatctggccaggccggctgcaaacgaggtcagagacggcagccagcagagcggcgacggcagtgagcatggtgggagcggcggaggggaagctggcgctgggagacatgagggtgctcaagccattggcccacctgctggtcgggctggtgctgtactgggtggccgaggagatgacggtgcctgtgctggtcgacgtcaccaccgccgccctctgccccggcgacggcagcacctcctgcccggaggccatctacctcaccggcctccaccaaacggttggaggcattttcagggctgtgggattcactctgatggggcagctcgccgacgagtacggccggaagcctctcctcatcctcgccgctggcacctccatcatcccttacagtgtgcttgctctgagcagcac

SEQ ID NO: 439882 - DNA, 347 bp, Triticum aestivum
tcttttttggatggtattcaaggccccatctatgttggtactggatgtgtctttagaaggcaggcgctgtacggttatgatgctcccaaaacaaagaagccaccgtcaaggacttgcaactgctggccaaagtggtgtgtgtgctgtttctgctttggtaacaggaagaacaagaagaaggttaccaagccaaagacagagaagaagaagaggttgtttttcaagaaggaagaaaatcaatcacctgcgtacgcactcagtgaaattgacgaagcagctgcaggagctgaaactcagaaggctggtattgtaaaccaacagaagttagagaagaaatttggccagtc

SEQ ID NO: 439883 - DNA, 462 bp, Triticum aestivum
tcggtttgggctgttcgtcgcggtcgccatcggcgccaacatctccggcggccatgtgaaccctgccgtcaccttcggcctcgccctcggcggccagatcaccatcctcaccggcatcttctactgggttgcccagctcctcggcgccatcgtcggcgccttcctcgtccagttctgcaccggcgtggccacccctacacacgggctttccggcgtgggcgcctttgagggcgtcgtgatggagatcatcgtcaccttcgggctcgtctacaccgtgtacgccaccgccgccgaccccaagaagggatccctcggcaccatcgcccccatcgccatcggcttcatcgtcggcgccaacatcctcgtggccggccccttctccggcgggtccatgaaccctgcacgctccttcggccccgccgttgccagcggcgacttcaccaacatctgggtctactgggc

SEQ ID NO: 439884 - DNA, 383 bp, Triticum aestivum
cggacgcgtgggtcccagttctgttcctcggccattctagccaccatgccgggctccatcgccttcggtcgcttcgatgactccttcagcttggcctctttcaaggcctacatcgctgagttcatctccaccctcatcttcgtcttcgccggcgtcggctctgccatcgcctacactaaggtgagcggcggcgcgccccttgacccatccgggctgattgccgtggcgatatgccacgggttcgggctgttcgtcgcggtcgccatcggcgccaacatctccggcggccacgtgaaccctgccgtcaccttcggcctcgccctcggcggccagatcaccatcctcaccggcatcttctattgggttgcccagctcctcggtgc

SEQ ID NO: 439885 - DNA, 421 bp, Triticum aestivum
tgtaagaggccgttcttgacaacggtggacgaggagctccagatggacgaggagatgtacgggtactacggcctcgacgagcacgcgcccgagaggaagcgccggctgacggcggagcaggtgcgcgcgctggagcggagcttcgaggaggagaagcggaagctggagccggagcggaagagcgagctggcgcggcggctgggaatcgcgccgcggcaggtggccgtgtggttccagaaccgccgcgcgcgctggaaggcgaagcagctcgagcaggacttcgatgctctcagggccgcccacgacgagctgctcgccggacgcgacgcgctcctcgccgacaaccaccgactacgatcgcaggtgacatcactgaccgagaaactgcaagccaaggagtcgtcggagctagaggagcgaa

SEQ ID NO: 439886 - DNA, 388 bp, Triticum aestivum
ttatcggcctcctccaccgctccaagttcggcaagtgcatcgggatgaaggagctggcgttcgccggcgagctgttcgacgcgctggcgaggcggcggaacatcaccggggacagcatcagcaaggcggagctgctcgagttctgggaccagatctccgacaccagcttcgacagccgcctgcagaccttcttcgacatggtcgacaaggacgctgacggcaggatcaccgaggaggaggtcaaagagatcatcacgctgagcgcggcggccaacaacctgaagaaggtctcggagcagtcgaggagtacgcccggctcatatggaggagctcgaccccaacaacctcggctacatcgagctgtacaatctggagatgctgctgctgc

SEQ ID NO: 439887 - DNA, 407 bp, Triticum aestivum
gtggaggggtgaggagccagtcactcgcctggaatctcatcaggccctggtgtggtgtggcagtgaccttcacgtcgaaataaccggaccttttagatgatctggagatggtgaggagctgagagcacctagagatcggcagtgggggctgtggggcagcaaggacatgactgtcatgccgcctgcgcgccatcggcccgcggccaagacgcccatgtggataatcgtgctcctgtccctcgtctgcgtcgtgctgatcggggcgtacgtgtacccgccgcggcactactcgcagtgctacctctctgcttctagcgtctgcacgccgttgaaggattggctcccatccatcggccgccgggagaaaaccgacgacgagatcatctcagccgctgttatcagggata

SEQ ID NO: 439888 - DNA, 364 bp, Triticum aestivum
tacttcatttggctgcagcacctcacctcgtctctacccctcgatctccgtcgccgtcttcccccattctcccaggaccgaccatcctcacctcccgatctaccccgccgacgccgccgagatcctcgttccatggtgtcgtgacggcggcggcgctcatggaccccaagtcccccgacgaccgcccggaggcggcggcgccacagccgctagagtggcggttcgcgcaggtcttcggcgagcgcggtgccggcgaggacgtgcaggaagttgacatcatttctgcaattgagtttgacaaatctggtgatcatcttgccactggagataggggtggacgcgtaggtttgtttgaaagaactga

SEQ ID NO: 439889 - DNA, 351 bp, Triticum aestivum
tcttttccccacggatccttctcgtcttccacgtgattcgagtcgtctcgcctctctccgtcagcccaaacatggactcaagcaggcgcccgagtggaatccagcaattgcttgctgcagagcaagaagctcagcaaattgtaaatgctgctagggctgctaaaacggcgaggcttaggcaagccaaagaagaggctgagagagaaatagctgagtaccgtgcacaaatggaggctgatttccagaggaagctcaccgagaccagcggtgactctggcgcaaacgtcaaacgccttgagcaagagacaaacgtaaagattgagcagctcaagcagcaggcagcaaacatct

SEQ ID NO: 439890 - DNA, 370 bp, Triticum aestivum
  unsure (1)..(370): unsure at all n locations
ttttccacgcgtccgccattccgcagcccttcggtgagatcccggtgctcgaagacggcggtctgacgctttaccgtaagccttcttcatgttttctgttttatttttgattcagtaggcatattgtttttctaccaattattaagcaatttggtgggcgtgataaaaaaacccgaggggtactgatttctctccgcaatttattttcttgagaatcccgcgccattgcaaggcatattctccgcaaacacaagcccgggcttctaggagcaggcagcctcgaggagtcggcgatggtggatgtatgggtncgacgntggatgcccaccagctggagcccgtactcaagcccatcgtgtggaactgcatc

SEQ ID NO: 439891 - DNA, 387 bp, Triticum aestivum
ttgtcgctgcgccagcggatgatgtccgagtacaaggacaccgtcgagcgccgctactacacgctcaccggggaggtccccgaggacgaggtcatcgagcgcatcatctccgagggccgcggcgaggagatcatgagcgccgccgtcgccgagcacggcaagggcgccgtgctcgccgcgctcaacgagatccaggaccgccacgacgccgccagggaggtggagcgcagcctcctcgagctccaccaggtgttccttgacatggccgtcgtcgtacagtcgcagggggacaagcttcagaacatcgagcaccacgtgagcaacgccagggactacgtccactccggcaacaaggagctcggcaaggtccgcgagcaccagcgcggc

SEQ ID NO: 439892 - DNA, 348 bp, Triticum aestivum
ttctcgcgtccgctcatctctctctgtctctctccccctctctattctcgcgatacggagggaggcgtgccgttcttcgaggagacgaagaagcagctgccagaaagataagcaaggaaacatcagctggtcaagatgacagctggtttacagctcggcgtgatcgggtctctcgcgctctccgttgcatcttcagttgccattgtcatctgcaacaaagctctcatcagcacacttggtttcccatttgctacaacattaacaagctggcatctcatggtgacctactgcaccctccatgtggcacaacgcttacatttttttgagcccaggcaattgatggacata

SEQ ID NO: 439893 - DNA, 435 bp, Triticum aestivum
tctccataagcagctgttgggacagggatgagattgtgttcaatagcatggacttgtcacggctacggtctttgacagtgtttgggaagtgggtgccattcctcgtctcggacaagatgaaggtgcttcgggtgcttgatctagagggtactagtaggacatcagatggtactgctagtgtaacagatgatgttctggagaagatcgtgaagcagtttcgtcgcctcaagttcatgtccctgcgtggatgcatggaagtcactcgtctccctgattcattgggtgccatgactcagctggagactttggatgccaggcacacctccatagtcgagctgccacctgctatcatcaccaagctacacaagcttcagtacattcgtgctggcaccaccaaagcaagacgactacaagcagcaacaagagcagcagcag

SEQ ID NO: 439894 - DNA, 365 bp, Triticum aestivum
  unsure (1)..(365): unsure at all n locations
tcttttctttgccgtcgggttggcccactatgtcgtgctattcgtcactctctatcagcggctccccaccaacgcgcaactccccaaggagctccacccagtgttcttccttttcgtcgccgcacctagcgttgcttccatggcatggacgaggatttgtggagagttcaacgatggttccaagctcctttacttcgtctcgctattcctctacgtgtctttggtggtgcgcatcaacctctttaggggcttcaagttctcactggcatggtgnggcgtacacattcccgatgacgagtgtggccttggcgacggtgttatatgcatctgaggtagacaacgtgctgacacgggcactagcggtc

SEQ ID NO: 439895 - DNA, 356 bp, Triticum aestivum
ttttcctgaaacgttcaaggagatcatcagcacctactgctgcgaagttcggctgctcggcctccgactcctgggcgcgatctccctgggcctgggcctcgaggaggactacatcgagaatgtgctgggcgagcaggagcagcacatggccgtgaactactacccgcggtgccctaagccggacctcacctacggcctgcccaagcacacggaccccaacgccctcaccattctcctcatggacccccacgtctccggcctgcaggtcctcaaggacggcgcccagtggatcgtccgttgacccccggcccaacgccctcgtcgtcaacctaggcgaccagttgcaggcgctgagc

SEQ ID NO: 439896 - DNA, 406 bp, Triticum aestivum
tttgcggttatggttggtggattccccaggaaggaaggaatggaaaggaaggatgttatgacgaaaaatgtttcaatctacaaagctcaagcatctgctcttgaagctcatgcagcccccaactgcaaggttttggttgttgccaacccagcaaacaccaatgctctcatcctgaaggagtttgctccatctatccctgagaagaacatcagttgtttgacccgcctagaccacaacagggcactcggtcagatttctgagagacttggtgtccaagtttctgacgtgaagaatgctattatctggggtaatcactcgtccagtcagtaccctgatgttaaccacgccactgtgaagacttccagtggagagaagcctgttcgtgaacttgttcaagatgatgaat

SEQ ID NO: 439897 - DNA, 390 bp, Triticum aestivum
tgtcctcgcagccgcagcggcgcgcacccctctccctccttcctgaagacagcgccgccgtcggccagagcacaggatggcgaccgtccccgctcccgcagccgagaccgcggcctccaccgcgcgcacggtgaaggatgtcaacccccacgagttcgtcaaggcctactccgcgcacctcaagcgctccggcaagatggagcttccagagtgggttgacattgtcaagactgcaaggttcaaggagctgccaccttctgatgctgactggtactacatcagggctgcctcgatggcaaggaagatctacctgaggcagggaatcgggatcggcggcttcagaagatctacggtggccgtcagaggaacggttcacgcccaccgcacttt

SEQ ID NO: 439898 - DNA, 390 bp, Triticum aestivum
tcggttgttgttgccttcacaagagaaaggacttggttttgtatttcaggcatgctttcaatgcactttctaaaagaggcggtatatttgtgatggatgtatatggtggcacatcatctgaatgcaagcttcgtctccagaggagattccccagcttcacttatttctgggagcaagaagagtttgatatcataactcgtgaaacaaggatcagcctccactttcaagttggaaagaagcaaatgatacggcatgctttcacgtaccattggcgcctgtggtcgataccagaaatcaaggactgtttggaggaagctggatttaagtccatccacgtctgggtcagggagatgccggacaccaaatcaagcggaaacgcaaaggagtaca

SEQ ID NO: 439899 - DNA, 316 bp, Triticum aestivum
tctcgcacgcaagggccgccgcggccctcgccgccggcgtcgacgacgagcacgccgcctggatggcgaagcacccgtccgccctgggcaagttcgaggagatcgtggccgcgtccaaggggaagcagatcgtcatgttcctggactacgacggcacgctgtcccccatcgtcgatgaccccgacgccgccttcatgagcgagacgatgcggatggccgtgcgcagcgtggccaagcacttcccgacggcgatcgtcagcggtcggtgccgcacaaggtgtttgatttcgtgaagctggcggagctctactacgcc

SEQ ID NO: 439900 - DNA, 404 bp, Triticum aestivum
tctgggcgccgtgcacacctacgcggaggtgtcagagctctcccgccgctgcgcggcggggctgcggcggctcggcgtggggaagggcgacgtggtcatgaacctgctccgcaactgcccggagttcgccttcgtgttcctcggcgcggcccggctgggcgccgccaccaccaccgccaacccgttctgcacgccgcacgagatccaccgccaggcgagcgcggccggggcgcggctgatcgtcaccgaggcctgcgccgtcacaaggtgcgcgccttcgccgccgacgcgggatccccgtggtcaccgtcgacgggccggcctccgacgacggcggctgcttcgcgttcgacgaggccctgctgcccgcggagccgctcgccgccgacagcaggtcgacccga

SEQ ID NO: 439901 - DNA, 182 bp, Triticum aestivum
tctatccaggcaaaggcaagtgcaagtcctcccaaatccacgcatccctcgcccgcgtctcctcccgttgccgcagcagcaagagaatgggcagcgtcgacgcctccgagacgacggtcaccgggtgggccgccagggacgccaccggccacctctccccctacagatacaccctcaggaaa

SEQ ID NO: 439902 - DNA, 260 bp, Triticum aestivum
tgttcaacgacatgagcggcaaccacgtcggcgtcgacgtcaacggcctcaactccgtcgacgccgacaacgccggctactacgacgacggcaccggcgccttcaggaacatcagcctggtggaccgcaagcccatgcaggtgtgggtggacttcgacggccggaccatgcaggtcaacgtcaccatggcgcccctgcaggtggcccggcccaagaggcccctgctctccgccaccgtcaacctctcctccgtcatcgac

SEQ ID NO: 439903 - DNA, 387 bp, Triticum aestivum
tgttaaaagcaacttctatcggtccaaagattaaacggttccggatcgataacgaggaatccatggaattgaagataacatgggaggaggctcaagaattgcttcgccctcccctgaaggccccttcggttgttattgttgatggccatgagtttgaggaatatgaggagccaccagtacttgggaggaagacatattttgtgactgaccaatcaggtgagaatcatcagtgggctcagtgtgaggattgttccaaatggcggaaactgccaatagacgcccttttaccctctaagtggacctgctccgacaataaatgggatcctgaaaggatgaacttgtgtctctccacaagaggcaagcatggaggaacttgcagaactgatt

SEQ ID NO: 439904 - DNA, 326 bp, Triticum aestivum
tccgcagcggctttacctaccgagaagaagagagaaaaaaggttcgagtgcgttgcagagtgagaagagatggctccggtgaagctgtacggcgcgaccctgtcgtggaacgtcaccaggtgcgtggcggcgctggaggaggccggcgtcgagtacgagctcgtccccatcaacttcggcaccggcgagcacaagagccccgaccacctcgccaggaacccctttggccaggtgccagctttgcaggatggtgacttgtacgtcttcgaatcacgtgctatttgcaagaatgcgtgccgcaagaacaagccagagctgttgaagga

SEQ ID NO: 439905 - DNA, 366 bp, Triticum aestivum
tggcgaggtgcagctccccgtccaccactgcctgctggcgctcccgggggtccggcgggagctgctggcgcgggtgatctcgcacccgcaggcgctggcgcagtgcgagcacacgctgacccgcatgggcctcaacgtggcccgcgaggccttcgacgacacggcgggcgcggcggagcacatcgcggcgcacgcgctccgcgacacggcggccatcgcgtcggcgcgcgcggcggagctgtacggcctccaggtgctggcggacggcgtgcaggacgacgccgggaacgtgacccggttcgtgatgctggcgcgggagcccatcatcccgcggacggaccggccgttcaagacgagcatcgtgct

SEQ ID NO: 439906 - DNA, 320 bp, Triticum aestivum
tttacgcgtccggctcatcatcatcctcgacaccaaagctcatcttcttctccttgaaatctttttgggttcatcagatttggaggatgtcttgcaactgtggatccggttgcagctgcggctcagactgcaagtgcgggaaggtgtaccctgatctgacggagcagggcagtgccgccgcccaggtcgccgccgtggtcgtcctcggcgtggcgcctgagagcaaggcaggtcagttcgaggtggccgccggccagtccggcgagggctgcagctgcggcgacaactgcaagtgcaacccctgcaactgttaagctgca

SEQ ID NO: 439907 - DNA, 386 bp, Triticum aestivum
tttcctcctcctcctcctcgcctccccgcggccacacctcgactcgctccctcgagtagatcatctgttccatccttttgaggctgagatggcggctaccttcaatgttaatgctgaggcaggccttaaaaagcttgatggctaccttctgtctcgcagttacatctctggataccaagcttccaaggatgacttggctgtgtattcagagttctcagttgctccaccatcaacttgcaccaatgttgcaaggtggtacaatcacattgatgcactcctgaagctgagtggagttactgcccctggcaaggtgggaaggttctgtcataagttgtccctgaaacctcaactactgatgttgctgaggctcctgcagctgatgatga

SEQ ID NO: 439908 - DNA, 520 bp, Triticum aestivum
tttaagagattcagatccatcctcgcctccctcggtccgtccccggtttgttctcccaccagccccagatccatccggcgatctctgtcgccgccatcgccaggataggccccagaaaacccagcccagtggaaggggtgtgcgagtaggagaaggccagcagataggatgttcctgtgggactggttctacggggtgctggcctcccttggcctgtggcagaaggaggccaagatcctcttcctcggcctcgacaacgccggcaagaccactctcctccacatgctcaaggacgagcggctggtgcagcaccagccgacgcagcaccccacgtccgaggagctcagcatcggcaagatcaagttcaaagccttcgacctcggcggccaccagatcgctcgacgggtctggaaggactactacgcaaaggttgatgctgtagtatacttggtagatgcatatgacaaggagcggtttactgaatcgaaaaaggagctggatgctctcctttctgatgatt

SEQ ID NO: 439909 - DNA, 428 bp, Triticum aestivum
tctgtgccaagagagccctcagcaaccagcaccaggtccgcgttgagatcgagtccctctttgacgggactgatttctcggagccactgacccgtgcgaggttcgaggagctgaacaacgatctgttccgcaagaccatgggaccagtgaagaaggccatggatgatgctggtctcgagaagacccagatccatgagattgttcttgttggtggcagcaccaggattcccaaggtccagcagctcctcagggactactttgacggcaaggagccaaacaagggtgtgaaccctgatgagggctgttgccttcggagctgcagtgcagggaagcatcttgagcggcgagggcggtgacgagaccaaggatatcctcctcctcgatgtggcgcccctcaccctcggaattgagactgttggaggagtcat

SEQ ID NO: 439910 - DNA, 279 bp, Triticum aestivum
  unsure (1)..(279): unsure at all n locations
tcccacgcgtccggttctttcacgcgatccagcggttccgcgagcccttcgagcagttctttgcgggcgaatgccctgatgccgtcgtcgccgacagccacttccagtggtccgtcgacgccgccgcggagcacggcgtcccgcggctggcgttcctcggcaccagcatgttcgcgcgggcctgcaccgacagcatgctgcgcaacaacccgctggcgtcttgccccgacgccgtcgtctccctgccggggctgccganccgcgtcgacatgttacgga

SEQ ID NO: 439911 - DNA, 422 bp, Triticum aestivum
  unsure (1)..(422): unsure at all n locations
tctgggagagagggaaagatggtgtcccagaatcagaggacgccgggagaccaggtgttctggcccaaggtggtgctcaagaaatggctcaacctcaggagcaaggacgccaagttcaacgccgacgaggacgacggcgacgacgacggggagcaagaggagagctgcggctgcgacggcgccgaggcggagcgcgaggccggaggcgtggacatcgccgaggagagcctggacgccgcgccgtacaagctgcggcggcggaactcggagacgatgcgcgcgcagtacatcagcaccaaggagctcaggatctgcattggcacgtacaacgccgccggcatagagccgccggaaggcctcgacatgncgagtggctcggcaccaccggcggcgagcaggccgactggtacgtgttcgggttc

SEQ ID NO: 439912 - DNA, 504 bp, Triticum aestivum
tctctctccctctctctcgcctcctccctccccctgcaggaagctcgtcgagatgtcgtccgaggcggcgaaggtggtggtgccggagtcggtgctcctcaagaggaagcgggaggagctctgggccgccgagaagaagaccaaggccgtcgaggagaagaagaaatccagcgagaacgtcaaggtcatctacgcccgcgccaagcagtacgccgaggagtacgatgcccaggacaaggagttggttcagcttaagcgtgaggcccggatgaagggtgggttctatgtcagtcctgaggctaagctgctgtttgttgtcagaatcagaggtatcaatgccatgcacccaaagaccaagaagatcttgcagctgttgcgtttgagacagatattcatggagtgttcctgaaggttaacaaggccaccatcaacatgctccgcagggtcgagccatatgttgcatatgggtacccgaacctgaagagtgtgagggagttgatctac

SEQ ID NO: 439913 - DNA, 383 bp, Triticum aestivum
ctctcatcttcttcctcttgcaacgaaacgagcgtctaggttaacagctagctaaagattcggacgatggccgttcttgtggcgaggcaggggcgcgagctgcagcggtacagcgcgagcaccggcgggcgcatcgtggtggggtgcatcccgtaccgggtgcgcgcaggcggcgacggcgacggcgagggcgagctggaggtgctggtcatcagctcgcagaaggggcacggcatgatgttccccaagggcgggtgggagctggacgagtccatggacgacgcggcccggcgcgaggccctggaggaggccggcgtccgcggcgagatgggcaaggtgctcggctgctggcactaccagagccgccgctaccagaccaccta

SEQ ID NO: 439914 - DNA, 469 bp, Triticum aestivum
tttcacgcgtccggattgggaggtcccagattgggtcattgtaccgggaggcaatcttggaaacatatatgctttctacaagggattcgagatgtgccgtgttcttggtctcgttgatcgtctgccacggcttgtctgcgcacaggccgccaatgccaacccgctgtaccgctactacaagtcagggtggacacaattccagccacaggtggctgagccaacatttgcgtcggcgattcagatcggtgaccctgtatcggtcgaccgtgcggtggtcgcactcaaggcaacaaatggcatcgtcgcagaggccacggaggaggagctcatgaatgcaatgtccctcgcagaccgcaccggcatgtttgcctgcccgcacactggggtcgcgctcgcggctctcttcaagcttcgggaagagggcaccatcggggcaaatgaccgcacagtgtgtcgtcagcacggcgca

SEQ ID NO: 439915 - DNA, 294 bp, Triticum aestivum
tgtttgacaccaactaccacttcatcgtccctgaattggctcctagcaccaagttctcctactcttctcacaaggctatcaatgagtacaaggaggctaaggcgcttggcgttgataccgtccccgtacttgtcggaccagtctcatacttgttactctcaaaggccgccaagggcgtagagaaatcattctctcccctttcccttcttagcagcatccttcccgtctacaaggaggttattgctgagttgaaggcagctggcgcttcatggattcagtttgatgagcccaccc

SEQ ID NO: 439916 - DNA, 339 bp, Triticum aestivum
tttgtcacgcgtccgccacgcgtccgtgcaaattgatcttcagttggtgtcctggaagacagtcactgaaataggcaatgacaagacgatcttgaagaagatcctccaggagggtgaaggctatgatcgtcccaaagactgttcaactgtcaaagtgaaacttattgggaagttggatgatggcaccatgtttgtaaagaaaggtcatgatggtgaagagccattcgagttcaagactgatgaggatcaggtgattgaagggcttgacaaagcagtgcttagcatgaagaaaggagaagttgcctttgtgactattcccccagagcatgcatttggatc

SEQ ID NO: 439917 - DNA, 251 bp, Triticum aestivum; identical to SEQ ID NO: 436477

SEQ ID NO: 439918 - DNA, 453 bp, Triticum aestivum
  unsure (1)..(453): unsure at all n locations
tcggctcgtcgacggcgggatgggggaggcgtcatctccggcgatcgccaaggatgtcaccgagctgatcgggaacacgccgctggtgtacctcaacaaggtgaccgacgggtgcgtggggcgcgtcgccgccaagctcgagtccatggagccctgctccagcgtcaaggacaggattggatacagcatgatcaccgacgcggaggagaaggggttcatcgtcccaggcaagagtgtcctgattgagccaaccagtggcaacacaggcattgggctggccttcatggctgctgccaagggttacagacttgtactcacaatngcccgcatcatgagttggagaggagaatcatcttgaaggcttttggtgctgagctggtcctcaccgacccactcttgggaatgaaaggagctgtccanaaggcggaagagctggcagcaaagacacctaac

SEQ ID NO: 439919 - DNA, 525 bp, Triticum aestivum
tctgagaaatcagagctggcaatggagtctacgctaatcacgagattaccccccctcctcccctctccctccaagtccagccccctctcctcaccccccctcgccggagcgcgccgcatcgcctccatttccttctcttccgtcagcgtgtgtggcgtcttgcgtccccgcggcggcgttacctcgtcggtcaccgccgcagcagcggcgctcggcgaggccgcagagcccgggtctgaggccatattgctcagtgttcagggcatgatgtgcgacgggtgcgctgcgagtgtgaagcggattctcgagagtcaacctgaggttacttctgctacagttgattataaggaagcaagggctgtcgtgtggacaactcctgatgtcaaggtggcagaagattggcagaaacaatgtggagagaaactcgcaagtcatcttggtacttgtggatttgagtctcgccccaagggtaaggtgaagcctgataaagtcaactctgagtcgtaactgctgccgcagatgagc

SEQ ID NO: 439920 - DNA, 298 bp, Triticum aestivum
ttttctttctttgagcataccattgcatgaagcgactaacaaagagcagctagaagtgttccatgagaagaaagccgcactggacttggatggaaaagaagtgtctaatgaggaaattgtgagaccaacagttccactggaggcatgcttagcaagtttttcaggccgagaggaagtgcctgatttttacagcactgcattgaattcaaaaacaacatcaattaagactgttggctttaaaacttttcctgattacctggtgcttcagatgcgtaagtttgtaatggaagcaggatgg

SEQ ID NO: 439921 - DNA, 305 bp, Triticum aestivum
  unsure (1)..(305): unsure at all n locations
tatcgacctgcgcgccgccacggaggtcatctgctcccggacgccgtcgcagctgcagatcatgaagcagacctaccgcgcccgcttcggctgctacctcgagcaggacatcaccgagcgcacctacggcgaccaccacaagcttctgctggcgtacttggggatcccgcggtacgagggcccggaggtggacccggcggcggcggcgcgcgacgcgagggagctgtaccgcgccggcgagaagcggctcggcaccgacgagcgcgccttcatncgcgtcttcaccgagcgcagctgggcgcacc

SEQ ID NO: 439922 - DNA, 354 bp, Triticum aestivum
tcttaaaaaaggttcgagtgcgttgcagagtgagaagagatggctccggtgaagctgtacggcgcgaccctgtcgtggaacgtcaccaggtgcgtggcggcgctggaggaggccggcgtcgagtacgagctcgtccccatcaacttcggcaccggcgagcacaagagccccgaccacctcgccaggaacccctttggccaggtgccagctttgcaggatggtgacttgtacgtcttcgaatcacgtgctatttgcaagtatgcgtgccgcaagaacaagccagagctgttgaaggagggcgacataaggagtcagaatgtggatgtgtggtcgaggtggaggccatcagtacac

SEQ ID NO: 439923 - DNA, 407 bp, Triticum aestivum
tctcccacgcgtccgaggagatttcatgtctgatcttgacgttcagatcccaactgcctttgacccctttgccgaggcgaatgctggggacgctggtgcagctgccggatcaaaagactacgttcatgtacgcatccagcagcgtaatggtcgcaagagcctgaccactgtccagggtctgaagaaggagttcagctacagcaagatcctcaaagacctcaagaaagagttttgctgcaatggtaccagttgtccaggacacagaacttggacaggtcattcaactccagggtgatcagaggaagaacgtctcaaacttccttgtccaggccggcattgtgaagaaggaacacatcaagattcatggtttctgagcaactgccagctccatatcagagtctacatgc

SEQ ID NO: 439924 - DNA, 515 bp, Triticum aestivum
tagccgccgccagcagctgcgcaaaggctcctcaaaccctaaccctagtcctagcttagcttccttcttctcgatctagctagagccatggcgccgaccaagggcgaggggccggccatcggcatcgacctcggcaccacctactcgtgcgtcggcgtgtggcagcacgaccgcgtcgagatcatcgccaacgaccagggcaaccgcaccacgccctcgtacgtcgccttcaccgactcggagcgtctcatcggcgatgccgccaagaaccaggtcgccatgaaccccatcaacaccgtcttcgatgcgaagcgtcttatcggcagaaggtttgctgatgcccctgtccagagtgacattaagatgtggcccgacaaggttattcctggccctgcagacaagcctatgattgtagtgcagtcaagggtgaggacaagcagttttcagctgaagaaatttctccatggtcctcataagatgcgtgagatcgctgaggcttacctaggagtaactat

SEQ ID NO: 439925 - DNA, 299 bp, Triticum aestivum
tttttctttctttgagcataccattgcatgaagcgactaacaaagagcagctagaagtgttccatgagaagaaagccgcaatggacttggatggaaaagaagtgtctaatgaggaaattgtgagaccaagagtcccactggaggcatgcttagcaagtttttcaggcggagaggaagtgcctgatttttacagcactgcattaaattcaaaaacaacagcaattaagactgctggctttaaaacttttcctgattacctggtgcttcagatgcgtaagtttgtaatggaagcaggatgg

SEQ ID NO: 439926 - DNA, 324 bp, Triticum aestivum
  unsure (1)..(324): unsure at all n locations
tgccgccgccagcagctgcgcaaaggctcgacaaaccctaaccctagtccatagctagcttagcttccttcctctcgatctagctagagccatggcgccgaccaagggcgaggggccggccatcggcatcgacctcggcaccacctactcgtgcgtcggcgtgtggcagcacgaccgcgtcgagatcatcgccaacgaccagggcaaccgcaccacgccctcgtacgtcgccttcaccgactcggagcgcctcatcggcgatgccgccaagaaccaggtcgccatgaaccccataacaccgtcttcgatgcgnagcgtcttatt

SEQ ID NO: 439927 - DNA, 377 bp, Triticum aestivum
tccggttcgggttctggttcggttcgggtccgagagtagctagcctagtctagggtttccgtagttcggagaggagagaaagggagagatccatggcggagacggagtaccgctgcttcgtgggcggcctcgcctgggccaccgacgaccacaacctccagcaggccttcagccagtacggcgagatcctcgacgccaagatcatcaacgaccgcgagacgggcaggtcccgtggcttcggcttcgtcacgttcggcagcgaggagtcgatgcgccaggccatcgaggagatgaacggcaaggagctcgacgggcgcaacatcaccgtcaacgaggcccagtcccgccggtccggcggtgggggcggcggcggcggc

SEQ ID NO: 439928 - DNA, 349 bp, Triticum aestivum
ttgacattccattactttgtttatcttctcgattttgtcatactcaagtgcatgatagtaattttcccttcatttgatatatcgtgtactttcgtttccttgtttgcagctgttttcagcaattgatcggcataggcattgcacagagcatccgataaaatttatatcagtgaggcaaccaaatgtcgtcaaatttaagataaaaccagggtcagattctggtgcttccgacagccgaggaaaaagaatctcttccttgtttcacccatttttcccgcttgcactgtcgattcagcagacaaatatgcagccaactgttgtcaatgtacatttcaggagatagaaatat

SEQ ID NO: 439929 - DNA, 317 bp, Triticum aestivum
ttccagctccgctgcctgattagccggccggccccggccccgtctccgtccccatggcgtccaagcggatcctcaaggagctcaaggacctgcagagggatccccccacctcctgcagcgccggccctgtggcagaagatatgttccactggcaagcaacgatcatgggcccatcggaaagcccatatgctggtggtgtatttttggttactattcacttccccccagactacccattcaaaccaccgaaggttgcatttaaaacaaaggttttccacccaaatatcaacagcaatgggagcatctgccttgatatc

SEQ ID NO: 439930 - DNA, 271 bp, Triticum aestivum
tcgttcagatcccccacgcaggcgagcgaacgcgcgcgcaggcccagatccgccgccccgccggagcagccatggccaaggaggccggcggcgagggggccatgtcggagtcggtgctccgcaaggtgctcgtctcctactgctacgtcgcggtgtggatcttcctctccttcaccgtcatcgtctacaacaagtacatcctcgaccccaagatgtacaactggcccttccccatctcgctcaccatggtgcacatggccttctgctcctc

SEQ ID NO: 439931 - DNA, 368 bp, Triticum aestivum
  unsure (1)..(368): unsure at all n locations
tctatcatcatcgccaagaacatccccaagaagaagccccacgccccgccccccgacaagtacaccgacgccctccacaaggccctcctcttcttcaacgcccagaaatccggcaagcttcctaagaacaacggcatcccgtggcgcgggaactcgggcatgaaggacggcgcggacctgccggacgtgaagggcgggctcgtcggcgggtactacgacgccggcgacaacatcaagttccacttcccgatggccttctccatgacgctgctgagctggtcggtggtgggagtacgccgacaggtacaaggcgatcgnggagtacgaccacgtgagggagctcatcaagtggggaaccgactacctgc

SEQ ID NO: 439932 - DNA, 407 bp, Triticum aestivum
  unsure (1)..(407): unsure at all n locations
taatcaagatgcagaggatccacataaagctacaatgtcatatggttctgaacatgaagaggatccacataaagctacaatgtcatatggatctgaaaatgaagaggatccacataaagctacaatgtcatatggatccgaacatgaagaggatccacataaagctacaatgtcatatgtattagaacatgaagaggatccacataaagctacaatgtcatacgggtcagaacatgaagaggatccacataaagccaccatgttatatgagtcaggacatgaaatggatctaaagacatttttaacaggacatgcgacacatttaaaaggaatgnggagtcaccatgctcactctcacaagcacgggaacaaaaagcagcaagacgttttcttcttcacgacatgtt

SEQ ID NO: 439933 - DNA, 143 bp, Triticum aestivum
agtccaccctccacctggtgctccgcctgaggggtggtatgcagatctttgtcaagaccctcaccggcaagatcatcaccttggaggttgagtcattcgacaccattgacaacgtgaaggcaaagatccaggacaaggagggc

SEQ ID NO: 439934 - DNA, 230 bp, Triticum aestivum
tctccatgcggcttgatacaggaggatgtgaggccgcaaccatcgagcgggcacaccctgttggcgtgacagcagtctcctgggctccagcagcagcacttgggtccatggttggctcagatcagctcgtccacaagatcgtgtctggtggctttgactgtgtcgtcaaggtgtgggagtttgtcaatggtggctggaagctggagagcgctctggtctccgacatgcac

SEQ ID NO: 439935 - DNA, 191 bp, Triticum aestivum
ttttccacgcgtccggtggaagttcagattgttggtgatgaccttctagtcaccaacccaactagagttgcaaaggcaatccaggagaagtcatgcaatgctcttctgctgaaggttaaccaaattggatccgtcactgagagtatcgaggctgtgaagatgtcaaaacatgctggctggggtgtcatgac

SEQ ID NO: 439936 - DNA, 290 bp, Triticum aestivum
ttctatgctaacgacaagcacggagaaagagaaacagtcgcaaaaccccacgcacgcacatggagatggaggctccggcggaccaagctagcggcaagcacatcgttctggtgcacggcgcatgcgtcggcggctgggcctggttcaaggtggcgacgcggctcagggacgccgggcaccgcgtcagtgcgcctgacctcgcggcgtcgggcgtggaccccaggccgctgcgcgaggtgtccgacgttccgcgactacaccaagccgctgctggacctcctggagtgcct

SEQ ID NO: 439937 - DNA, 270 bp, Triticum aestivum
atcactttcttcaatgttggcctgatttttaattcgctccagatgtggatcaacagggtcatcatcagtgctctgaagagcagccgcaacggcaccagttctatcttggccatcttctccaagattcaggattttcaaattcttaccactgacgaagttgaagaggttatggtattcattcctttgtatatttctgaagagatgttcttggtcattctttagcttgaccaggagatcaaaatagtgagatgacatactagcaccaccagc

SEQ ID NO: 439938 - DNA, 353 bp, Triticum aestivum
ttatacactcattgaggctcatgtggatgtgaagaccactgacaactacatgctccgcatgttcgccattggcttcaccaagagacgcccaaaccaggtgaagcgcacttgctatgcccaagcaagtcagatcagacagatccgccgcaagatggttgagatcatggtcaaccaagctgcaagctgtgacttaaaggagcttgtgaacaagttcatccctgaggtgattggaaaggagattgagaaggccacctcaggcatcttccccctcagaacgtgtacgtccgcaaggtgaagatcctgaaggcccccaagttcgacctgtggaagctattggaggttcacggtgacta

SEQ ID NO: 439939 - DNA, 345 bp, Triticum aestivum
tttggcggtcgtcaccgacacggcgtacgtcgggttctcggcggccacgggcgtcatcttcacgcgccactacgtcctcggctggagcttcgcgctcaacggcccggcgccgccgctcgacacctcgaagctcccctcgctgccgcggttcggccccaagccacggtccaaggtgctggagatcgtgctcccgatcgccaccgcggccttcgtcctcgcgctggccatcgccttcttatggttcgtgcgcacgcggatcaggtacgcggaggtgcgcgaggactggggagggtggaattcgggccgcaccgcttcgcgtacaaggagctgtacgactgcatgccc

SEQ ID NO: 439940 - DNA, 338 bp, Triticum aestivum
gcttatgttaggtggcaagcttttacatgcgttgttgtgcgcatattcttaacctgatagtcaaggatggtttggatgtgttagaagaatcgattgagaaaatccgtgatagtgttgcattctggactagcacacctaagagaatagagaattttcaagaggttgccaagatgctgaaagtagaccaaagtaaaaaattatcccttgatgtgaaaacacgatggaactctacgtactttatgctcagtgttgctttacgctacaagagtgtatttaatcgcttgaggcagcgggaaaagacctttacttgtgctcctagtgatgatgatttgatattt

SEQ ID NO: 439941 - DNA, 352 bp, Triticum aestivum
tgttatgacatattttatcaattgcaagaattctgaaacatgttcctctgaggctcctttaaggtatgcacggatgcgccctctcaacccatcatcagaattcttgcaattgataaaatatgtcagtggttcctatgacagtggagaaggttttgaaaaactgaacaaggaaatatcagattatgagatgtcaaacaactcaggaagctcccgtaggctcttttatttggcattgcctccatctgtctacccttcagtgtgcaaaatgatccgaacatattgcatgagtccaacttctcgcgctggatggactagagtaattgttgagaagccctttggaagggacctggac

SEQ ID NO: 439942 - DNA, 289 bp, Triticum aestivum
tctcctcgcgtccgcccgagttcaagatcgtcctcaccatcatccgcgacgggctcaagaccgacgccagcaagtaccgcaagatgaaggagaggctcgtcggtgtctccgaggagaccaccaccggcgtcaagaggctctaccagatgcaggagtccggcaccctcctcttccccgccatcaacgtcaacgactccgtcaccaagagcaagtttgacaacctttacggttgccgtcactcgctccctgatggtcttatgagggccactgatgttatgatcgccggcaa

SEQ ID NO: 439943 - DNA, 241 bp, Triticum aestivum
tttttcactccgccgctgccgccgccgagatgggtcgcgtgatccgcgctcagcgtaagggtgcgggctccgtcttcaagtcccacacccaccaccgcaagggccccgcccgcttcaggtcgctcgacttcggcgagcgcaacgggtacctcaagggcgtcgtcaccgatgtcatccacgacccggggcgtggtgcgccgctggccaaggtgaccttccgccacccgttcaggtacaagca

SEQ ID NO: 439944 - DNA, 369 bp, Triticum aestivum
tttgccgtcatgcgccgccggcccaagaccaagatcgtctgcacgctcggcccggcctcccgctccgtcgacatgatcgagaagctgctgcgcgccggcatgtgcgtcgcccgcttcaacttctcccacggctcccacgactaccaccaggagacgctcgacaacctgcacgccgccatggaccgcaccgggatcctctgcgccgtcatgctcgacaccaagggtccagagatccgtactggatttttgaaagatgggaagcctatccagttgaggaagggccaagaaattggtgatctccacagattatagcataaagggggacggccagatgatatcgatgagctataagagctagcagttgatctg

SEQ ID NO: 439945 - DNA, 205 bp, Triticum aestivum
tgttttgcgtccgcatcgatgacgctgtcggcgaagatgtagtcgcggaattgcagacggccatggagaagcaaggtgtcgacatgcgtgtgtctgcgttgatcaatgacaccgtagggacactggctacgggcagctataacgatgaagatgttgtcatcggcgtgatattaggtaccggctcaaatgccgcatatgtagaaaa

SEQ ID NO: 439946 - DNA, 312 bp, Triticum aestivum
tctgtcccacggccatcattactgaaattaacgagaagattggtgcggctggggtagtcagccaagagtgcaaaacaattgtttctcagtatggacaacagatcctcgacctgttgctagcagagacacagcccaaaaaggtctgctcccaggttggtctgtgcacctttgatgggactcgtggtgttagtgctggaattcggagcgtggtcgatgatgagcctgtgaaatcgaatggccttcataccgatcccatgtgcagtgcctgtgagatggctgttgtgtggatgcagaaccaacttgcacagaaca

SEQ ID NO: 439947 - DNA, 227 bp, Triticum aestivum
ttttccacgcgtccgaaaagaagaaaagcaaggccaaaaagaagaaagacccccatcagcagacagatcctccatcaatccctgtggatgagcttttcccttcaggagattttcctgagggagaaatccaggaatataaggatgataatttatggagaacaactagtgaagaaaagagggaacaggaacgactacaaaaaccaatgtacaattctgttcgccgagct

SEQ ID NO: 439948 - DNA, 305 bp, Triticum aestivum
tttttcgtccactccaaaccctagcctcctcctcctctcgccgccgccgccgacgccgacgccgccgcagccgccatgtcagggaggaagaagacccgcgagcccaaggaggagaacgtgacgctcggccccgccgtccgcgagggggagcacgtcttcggcgtcgcgcacatcttcgcctccttcaacgacaccttcatccatgtcacggatctgtccgggagggagacgctcgtccgcatcaccggtggcatgaaggtcaaagctggatcgtgatgaatcatccccttatgcagctatgcttg

SEQ ID NO: 439949 - DNA, 186 bp, Triticum aestivum
tttttgaattgaagaggtcatagtcacacaggcatctgtccagcgctgcagtgcagttgtggacttccttgacaaagataagcctttcttccctccaacaatcaacaatcccgagcttcacgatttctttgcgaaggtgggcagtgagatggttggccccaacaacgtgagagagaagcagccact

SEQ ID NO: 439950 - DNA, 224 bp, Triticum aestivum
gtccggcccccgcctcgctctcacgctgctcgcgtcactccgagctccccggttcgtcaacgagcccgcccgagaaaaccgcttgagaaatggctgaagaggatgtccagcccattgtgtgcgacaatggcaccggaatggtcaaggcggggttcgccggcgacgacgcgccgagggccgtgttccccagcattgtgggcaggccgcggcacacgggggtgatg

SEQ ID NO: 439951 - DNA, 183 bp, Triticum aestivum
tctttcacgcgtccgcccacgcgtccgaatccagccccctccgatcgaagcgaagtcaaggctctttcgtcctgctcctcaagatgcagatctttgtgaagaccctcaccggcaagaccatcaccctcgaggttgagtcctcggacaccatcgacaacgtcaaggctaagatccaggacaagg

SEQ ID NO: 439952 - DNA, 191 bp, Triticum aestivum
tttttacggctccctggctccccggaggtacaggtactcggagcttaagaagataaccagcaatttcaagcacaagctcggcgaaggcggctacggcgcagtgttcctgggcactctgggtgatcggcgggcggtcgctgtcaagttcctgcaccactccaggcccaacggcgaggatttcctcaacgagg

SEQ ID NO: 439953 - DNA, 276 bp, Triticum aestivum
tttcgctcccaggaacggaaccaacaaatccccaccaatctcgtctccaatcgacccgaggctcgtcgaatcctccttccccaccgcctcaagatgcagatctttgtgaagacactgacgggcaagaccatcacccttgaggtggagtcgtctgacaccatcgacaatgtcaaggccaagatccaggacaaggagggcattcctccagaccagcagcgtctcatcttcgctgggaagcagctggaggatggccgtaccctcgctgactacaacatc

SEQ ID NO: 439954 - DNA, 248 bp, Triticum aestivum
ttcacccccacccgccgccatgagggagtgcatctcgatccacatcggccaggccggcatccaggtcgggaacgcgtgctgggagctctattgcctcgagcatggcattcagcctgatggccagatgcccggtgacaagaccgttgggggaggtgatgatgctttcaacaccttcttcagcgagactggtgctgggaagcacgtcccccgtgctgtcttcgtagatctcgagcccactgtgattgatg

SEQ ID NO: 439955 - DNA, 341 bp, Triticum aestivum
tttttctggaggaagccggcgtcgagtacgagctcgtccccatcaacttcggcaccggcgagcacaagggccccgaccacctcgccaggaacccctttggccaggtgccagctttgcaggatggtgacttgtacgtcttcgaatcacgtgctatttgcaagtatgcgtgccgcaagagcaagccagagctgttgaaggagggcgacatcaaggagtcagctatggtggatgtgtggctcgaggtggaggcccatcagtacaccgtcgcgctgagccccattctcttcgagtgccttatccatcctatgcttgggggagccactgaccagacggtcatcgat

SEQ ID NO: 439956 - DNA, 325 bp, Triticum aestivum
ttgtccaccgaattcctcgcgattcctctcccctcgcctcctcgtcctccccctcctaggggatcgccggagaggaatcgcgacgagggcttcctcctatcagttaaatcaaagccatggagcacaaggagaccggctgccagtctcgggagggccccatcctttgcgtcaataattgtggcttcttcggcagcgcggcgaccatgaacatgtgctccaagtgccacaaggagatggcgatgaagcatgagcaggcaaagctggccgcctcctctttcgacagcatcgtcaacggtggcgatgccgcgaaagaacatcttgctgc

SEQ ID NO: 439957 - DNA, 231 bp, Triticum aestivum
tttctacagcagctgcaattgcttatggtcttgacaagaaggctaccagtgtcggtgagaagaatgtgcttatctttgaccttggtggtggcacttttgatgtctctctccttaccattgaggagggtatttttgaggtgaaggccacggctggtgacactcaccttggtggggaggactttgacaaccgtatggtgaaccactttgtccaagagtttaagaggaagcaca

SEQ ID NO: 439958 - DNA, 265 bp, Triticum aestivum
tttttacgcgtccggatatctggagatagcctgaagaacgtatacaagtcattcgtgagcgagtaccccattgtgtcgattgaggacccgtttgaccaggatgactgggtgcactatgctaagatgactgaagaatgtggagtggaagttcagattgttggtgatgaccttctagtcaccaacccaactagagttgcaaaggcaatccaggagaagtcatgcaatgctcttctgctcaaggttaaccaaattggatccgtcactg

SEQ ID NO: 439959 - DNA, 310 bp, Triticum aestivum
tttttaggaggctaaggcgcttggcgttgataccgtccccgtacttgtcggaccagtctcatacttgttactctcaaaggccgccaagggcgtagagaaatcattctctcccctttcccttcttagcagcatccttcccgtctacaaggaggttattgctgagttgaaggcagctggcgcttcatggattcagtttgatgagcccacccttgttaaggaccttgaatcccaccaattgtctgcattctctgcagcttacgcagaacttgagtccgcactttctggattgaacgttcttgttgagacctac

SEQ ID NO: 439960 - DNA, 326 bp, Triticum aestivum
  unsure (1)..(326): unsure at all n locations
ttttccgcgcggcaccgtcgtgtcggccacgaggagccccggtttgggcaatgcagggaacctgcgcgagggttcgaacttggctaagaactgggatttgagcagacaaattggtgatgagcacggtgttcttatagaatgcagggatgtgcacaagtcctttggggacaagcatgtactgcanggcgtcagcttcaagattagacatggtgaagctgttggaataatcggtccttcgggaactggcaaatcaactattttgaaggttatggcgggccttctagcccctgatagggcgagggtgttcatctgcggaaagaaaagac

SEQ ID NO: 439961 - DNA, 305 bp, Triticum aestivum
ctgtcgcgtgggcaaatttgacagccagtaccacttttcatgccaattcacagctgacctgattgccatgaaccacactgatttcatcattaccagcacattccaggaaatcgctggaagcaaggatagcgtgggccaatatgagtctcacattgctttcacccttcctgatctgtaccgggttgtccatgggattgatgtgtttgatcctaagttcaacatcgtctctcctggagcagacatgactgtctacttcccatacaccgagactgacaagaggctcactgccttccactctgaaattg

SEQ ID NO: 439962 - DNA, 292 bp, Triticum aestivum
tttttaggttcggcgacctcagccccagggaggtcatccagcagttcaccgggctcaacaccaccagcttgaatgccacgtcacccacctacctcccctaccactccttcaagccctgctgcgttgactggcgctccagtggcgctgtcaccggcgtcaagaatcaaggcacttgtggatcgtgctgggcattcgcggcggtggcggccatcgaaggcatgaacaagattaggacaggtgagctggtgtcgctgtccgagcaggaactcgtggactgcgacaccgggagcag

SEQ ID NO: 439963 - DNA, 296 bp, Triticum aestivum
ataatcatcctcgacaccaaagctcatcttcttctccttgaaatctttttgggttcatcagatttggaggatgtcttgcaactgtggatccggttgcagctgcggctcagactgcaagtgcgggaaggtgtaccctgatctgacggagcagggcagtgccgccgcccaggtcgccgtcgtggacgtcctcggcgtggcgcctgagaacaaggcaggtcagttcgaggtggccgccggccagtccggcgagggctgcatctgcggcgacaactgcaagtgcaacccctgcaactgtt

SEQ ID NO: 439964 - DNA, 284 bp, Triticum aestivum
tcttctctcccgactcctctgctcccctgctccgtcgtccaagtacgatcgcctcctgctcctcgcagctcgctctccggccatggccttccagtcccccgtcggctcccccttcgactgcctcctcatagacctcgacgacacgctgtacccgggcaacaccggcattggccccgccctgaggcgcaacatcgacgagttcctcgtggcccggttcggcctcgccgccgacaaggccgacgcgctccgcgccgacctcttccgctcccacggcagcaccctcg

SEQ ID NO: 439965 - DNA, 364 bp, Triticum aestivum
atgtgtgacaacctgctttggggtggttctcttattgaatatgcgcgtgttgagcaatggatggactttggtgccacagaggttgatcccaatatcgcaaggtggctgtacccaaggcttggttatatgccttacaatgcccagtctgaggaattcggcattgctggattgaagagggcccttgaagcattgaacacacacctggcatcaaacacattccttgttgggcattctgtcactctggctgatattgtcatgacatgcaacctctaccatggttttgctcggatcttgaccaagactttcacatctgagtttcctcatgttgagaggtacttctggatcatggttaaccagcctaact

SEQ ID NO: 439966 - DNA, 293 bp, Triticum aestivum
ggagcttcccattgccatgcttgcatgtgcccgtatcggcgctgtccattcggttgtgtttgctggcttctctgcggattcgctggcccaaaggatcgttgattgcaagcctaagcttgtgctcacttgcaatgccgtgaaaagggggcccaagcccattcttctcaaagatatagtggatgctgctctggtggaaagtgagaagaatggattctctgtaggtatttgtttgacatatgaaaaccagtctgtaatgaagaggcaagacacaaaatggcaagtgggaagaagat

SEQ ID NO: 439967 - DNA, 285 bp, Triticum aestivum
gccgtcgccgccactccgccgctgccgccgccgagatgggtcgcgtgatccgcgctcagcgtaagggtgcgggctccgtcttcaagtcccacacccaccaccgcaagggccccgcccgcttcaggtcgctcgacttcggcgagcgcaacgggtacctcaagggcgtcgtcaccgatgtcatccacgacccggggcgtggtgcgccgctggccaaggtgaccttccgtcacccgttcaggtacaagcaccagaaggagctcttcgtcgccgcgagggtatgtacac

SEQ ID NO: 439968 - DNA, 317 bp, Triticum aestivum
tcccagacggaggacatcaacgcgggcgtgttcgccaccgacgacttccgcatgtacagcttcaaggtgaacccgtgctcccgcgcctacacgcacgactggaccgagtgccccttcgcccacccgggggagaacgcccgccgccgcgacccgcgccgcgtcccatactcctgcgtcccctgcccggacttccgccgcgacccggcagcatgccgcaagggcgacgcctgcgagtacgcgcacggcgtcttcgagtcatggctccacccggcgcagtaccgcaccaggctctgcaaggacgaggtcggctgcccccg

SEQ ID NO: 439969 - DNA, 391 bp, Triticum aestivum
ttgtctttctccaatcgcatccgcaaaaccaacactcgtcttccttcctccctcgaccagcgcaggcggatctcatcccatccaaggcaggcaggcaggtacgagatggctctcaccagaattggtcttgctggcctcgccgtcatggggcagaacctcgccctcaacattgcggagaaagggttccccatctctgtctacaacaggaccacctccaaggtcgatgagactgttcagcgcgccaagctagaaggaaacctttctctctacggattacatgaccctgcatccttcgtcaactccattcagaagccacgtgtagtcatcatgcttgtcaaggccggtgccccggttgaccagaccattgcaacgctcgcagcacacctggagc

SEQ ID NO: 439970 - DNA, 450 bp, Triticum aestivum
tggcatcaccgcgcgccacccggccaaggtcttctcccgcatgcgcgacctcctcgccaagccccttcccctacgcgcgggccctcgccgactcgctcttgctcccctacgacctcgtgcaggacgcgcgcggcgccgccgcggtgcgcgccgacgacggccaggtctacaccgtcgaggagatcgtggccatggtgctccactacgcctacgggatcgccgacgcccacgtctgcctgcccgtggtggacgctcgtcgtcgccgtgccgccctacttcggccaggccgagcgccgggccctcacgcaggcggcccaggtcgccggcttcaacgtgctcgcgctcgtcaacgagcacgccggcgccgcgctgcagtacgggatcgacaaggacttctcaacgagtcgcgccatgtcatcttttacgacatgggctcaggcagcacctacg

SEQ ID NO: 439971 - DNA, 378 bp, Triticum aestivum
ttccacgcgtccggtacactctcctccagaaggacgtgaactggcctcttggctggcccattggtggctaccctggtccgcagggaccatactactgcgccgccggcgcggacaaggcgttcgggcgtgacatcgtggacgcccactacaaggcctgcctctacgccgggatcaacatcagcggcatcaacggggaggtcatgcccggccagtgggagttccaagttgggccgtccgtcgggatcgcggcgtccgaccagctgtgggtggcgcgctacatcctcgagaggatcactgaggttgccggggtggtgctgtccctggacccgaagccgatcccgggcgactggaacggcgcgggcgcgcacaccaactaca

SEQ ID NO: 439972 - DNA, 311 bp, Triticum aestivum
tgccttcattgccccttatggtatggctacggagggcgcctcaagttcctggagagattcgcttacatcaacaccaccatttacccactaacctctctcccgcttctagtctattgtatattgcctgctatctgtctgctcactggaaagttcatcatgccagagattagcaacttggccagtatctggttcattgcgctcttcctttcaattttcgccactggtatccttgagatgaggtgagctgctgttggcattgacgagtggtggaggaatgaacagttctgggtcattggaggtatctctgcaca

SEQ ID NO: 439973 - DNA, 407 bp, Triticum aestivum
  unsure (1)..(407): unsure at all n locations
tcagtatacctttttttataggctttgcaagtcgaagacactagagaacttcaaaaatatcatattgttatcgtcaccacaggatgggtatgtaccatatcattcagcaagaatcgagctctgcccagctgcgtcggctgataattcaaggaaaggtcaagtcttcacagaaatgctgaataattgcttggatcagatgcgtgcaccgtcgtctgaaactcgtatattcatgaggtgtgatgttaatttcgaccaatctgcccatggacggaacctgaacaccatgatcggcagagcagcccacatagaattcctggagactgacatctacgccaggttcattcatgtggtccttccctgaacttttncgatgacgatgacaatgttctctccctcttatttgggat

SEQ ID NO: 439974 - DNA, 413 bp, Triticum aestivum
cttatcggtggtagtgctacaagcgagtgacactagttcttgcaccgatcagatccaacttctgcacaggatgctggacaagctgtgggacgacgtggtggccgggcctcgcccggagacgggcctcgacaagctccgtcgggccgccgccacccaacccctcgccatcaacacagctgcaggggaggcgattaagcagtcgccgtcgatgccgactaccccgaccactccggtgacgccgtcgtcgtccacgccgccgcgcggcggcagcgtgtggcggagcgttttccaccccgggagcaacctggccaccaagagcctcggcgccaacctcttcgaccgcccgcagcccaactcccacaccgtctacgactggctttacagcgacgagactaggacaaggagcaaccacc

SEQ ID NO: 439975 - DNA, 486 bp, Triticum aestivum
ttccacgcgtccgcccacgcgtccggttcccaccctctcacatccacaccagcggcaaatagtagtaatccccgccgcccaacccccaccctctccggcgcgtgcgcttccgatgcttccgcgccggcgtcggccacgggtggtgcagtgatggtgggcttcttccgcagcggcaaccttgcctcaagggtgttcgaccggcagtttctctctccgcgccccggcgcaaccgttaatactgtcagacaattctatgagaatttggttccaagttacactatatacggcatagattgcccagactattcgtttcgcaagttcaccgatgatggcaagtatcttgtggcctttagtcgaaaccaccaagatttgattgtgtaccgtcccatctggttaacgttttcatgccatgaagaatgtgattctcatgatcttccggccaatgcagagagatttgacagtttctttaagcagctctactcaatc

SEQ ID NO: 439976 - DNA, 325 bp, Triticum aestivum
  unsure (1)..(325): unsure at all n locations
tataagttcctcatcgacgggtttccaaggaatgaagagaatcgtgctgcgttcgagaatgttacaaaaatttcgcctgcatttgtgctattcttcaattgttccgaggaagagatggaaaggcgtcttttgggacgcaatgagggtagagttgatgacaacatcgagactatcaggaagagattcaaagtttttgttgaatccagtttgcctgtgattgagtactatgacgcgaaggacaaggttaagaagatcgatgctgcaaaaccaattcctgaaggtgtttngaagatgtcaaagccattcttggcccatatgccaaggc

SEQ ID NO: 439977 - DNA, 393 bp, Triticum aestivum
taacttgccagcagcgccagtgtgcagcgatccagtgaccgacacggacaagaacaagatggtcgccggctgtttcatcaccgacgagtgcgccctggcggtgtcgacggagcggatgtggaaggcggtcttctccggcgaggacacggccgtcctgcccaaggcctgcgcgggcttcatcgacgccgtggacgtcgagggcgactgcggacccggcagcgtctccaccatgacgctcagcccggcggcagcggagctcgccggctcgggcgtgatgaggagccgcctggtggcgcgcgacaacgcggcccgtgtgatcaagacggagctgctggagggcagcaaggtgagcgcccagctcaagtcgcaggtggccgaggtgaagctcgaggc

SEQ ID NO: 439978 - DNA, 265 bp, Triticum aestivum
ttccacgcgtccgccgccccctcctccttgacccgccgtcgcttctgccaccccgaaagaaaaacacacacacacagtagagagcttcagcatcccctgagcgcgagagatggcggcgaagggcgacgggccggcgatcggcatcgacctcggcacgacctactcgtgcgtcggcgtgtggcagcacgaccgggtcgagatcatcgccaatgaccagggcaaccgcaccacgccgtcgtacgtcgccttcaccgactcggagcgc

SEQ ID NO: 439979 - DNA, 339 bp, Triticum aestivum
ttcctcgcgtccgcacggcgcgctcatcatccttcccaagcgcggcatgccctaccccttccccaagcccgacaaggagttccccgtcgtcctggcggagtggtggaggagggacccgatcgcggtgctcaggcagtccatggtcaccggtgcgccgcccaacgtctctgacaccatcctcatcaacggccagcccggggatttcctcccgtgctccagccaagagacaagtatcattccggtggtcgctggcgagacgaacctggcacgcatcatcaacgcggccatgaactccgagctcttcgtctccctcgccggccacaagatgacgggtggtcg

SEQ ID NO: 439980 - DNA, 468 bp, Triticum aestivum
acgcactggaaaagtgatgcgggacttcaagggaagtgctgatgatttcactactggtggaaatatgggtgtctctggtgtgtcatggcctatcttcaggtggggtggtggaagagatgataagtattttgctagacttggaaagaatgttatatctgtctatgagactgatacgttctctcttatcgataagaagtccctaaaggtagaaaatgtggttgacttcagttggtctcctactgatcccatcatatcactctttgtgcctgaattaggtggtggaaaccagcctgccagggtgagtcttgtgcaaattccgggcaaagaggagattcggcagaaaaaccttttcagtgttagcgactgcaaaatgtactggcagaacaatggagaatatctggctgtccaggtagacaggtacaccaaaacatagaagagcatttacactgggttcgagctgttcagaat

SEQ ID NO: 439981 - DNA, 258 bp, Triticum aestivum
agcatgatatgcaagcgtgaacactcatcttggcattgaacaaagtcgaagagatgacttggaatctcttggatatgtacttatgtacttcctacggggaagccttccttggcaaggtctgaaagcaggaacgaagaagcaaaagtatgagaagatcagtgagaaaaaagttgcaacatcaattgaggctctgtgtcgtgggtatcctactgagttcacatcatatttccattattgccgctcgcttcggtttgatga

SEQ ID NO: 439982 - DNA, 412 bp, Triticum aestivum
tcacgcgtccggttcggttcgttagggtttagtagtggggaagaggaggaagaatggcggacgtcgagtaccgctgcttcgtcggcggcctcgcctgggccaccgacgaccagtccctccagaacgccttctccaagtacggcgacgtcatcgactccaagatcatcactgacagggagacgggccgttcccgcgggttcgggttcgtcaccttcgcgtcggacgaggcgatgcgccaggcgatcgaggccatgaacggccaggacctggacggccgcaacatcaccgtcaacgaggcccagtcccgccgctccggcggaggcggcggcggcttcagcggcggaggcggtggcggctacggcggccagcgccgcgagggcggcggcggcggctacggcggcggcggcggtgg

SEQ ID NO: 439983 - DNA, 406 bp, Triticum aestivum
tgccctctctggtttgctactgctggtgctcatcggactccccgacgccgccgtcgccgccaacatgaccgaggtctgcgtcaaggccgccgtcggccaccccgacacgctcggcgactgtcccttctcccagagggtgctgctcacgctggaggagaagaaggtgccctaccagatgaagctcatcgacgtcagcaacaagcccgactggttcctgaagatcaatccggagggcaaggtgcctgtgtataacggtggtgatggcaaatggattgctgattctgatgtgatcactcaagtcattgaggagaagtacccaactccatcacttgtgacccctcctgagtatgcatcagtgggatcaaagatcttctccaccttcgtcacgttcttgaagagcaaggat

SEQ ID NO: 439984 - DNA, 423 bp, Triticum aestivum
ccgtctgggagtggtctggttctgcctatgatgaaggaactgaagcagctgaatggttctccgcctatttcgggaaaccaagtcggctcgtgcggtttaaagaagagtccgaaatcaggccgactaatcctgagtatgctcaaggctacaagatcaccttcacggattgcttcccgttcctgatagcatcccagggatcactggatgcactgaatgagctgcttaaggaacctgtaccaatcaatcgcttcagaccaaatattttagtggacggatgccacccgtacgcagaggatctgtggaaaaccatgaagataaacaagctaacatttgacggcgtgaagttatgcgaccgttgcaaggtgcctaccattaatcaagagaacggaatacctggcagcgaaccaacagaaaccatgctga

SEQ ID NO: 439985 - DNA, 379 bp, Triticum aestivum
cccacgcgtccgcccacgcgtccgggcccgctctcaatgggatttccgattgaaaaccgtgggattcctctgccggcgaacgctctcaggagccacatggatcgtgcaaagcatctcccgttcgtcaagcggatctctgatttccacctgcttctccagatcgctgctttcctggatgtcaaggccgacgtgcctactctggctgcgtgcgtgggacaccaggccgaggtgccagagggctaccggctcctgatcgacgccttggcaggcatacataaccagagagggtttcctgaaacaagacacggggtcatttagcagcttgctctcagtatcatctcatgtgtgatttatacgagttttaaacaagacttacaca

SEQ ID NO: 439986 - DNA, 238 bp, Triticum aestivum
tggcgacggaggaggacacgacgcggctgtgcgacctcccggaggcgtgcgtggcgcacgtgctcgcgctcacctccccgagggacgcgtgccgctgcgccgccgtgtcgccctgcttccgcgacgccgccgagtccgacgtcgtctgggcgcgcttcctcccaccggactaccgcgccatcctccagctgcacgaggcgccggcgcggcgcttccccctctcgcgctccggctccac

SEQ ID NO: 439987 - DNA, 335 bp, Triticum aestivum
tcgttaaggccagccgatagatccccgcaagatgcaggagcattttgaagatttttatgaggatatcttccaggaactgagcaagtttggtgagattgagaccctcaacgtctgtgacaacctttctgatcacatgataggcaatgtgtatgtccagttcagagaggaagatcaggcagcagcagctcatactgcccttcagggacgattttactctggtcgcctaataattgttgacttctctcctgtgacggacttccgtgaagcgacctgcatgcagtatgaggagaacacctgcactcgtggtgggcactgcaatttcatgcatgtgaagc

SEQ ID NO: 439988 - DNA, 249 bp, Triticum aestivum
tggatgaagaactacacgatctatgcagtttccatcaccatccgtattgtgcttggctttatgcttattgccctgatctggaaatttgatttcgctcccttcatggtccttatcattgccatcctcaatgatggtactatcatgacaatatccaaggacagagttaagccatctcccttgcccgacagctggaagctcaatgaaatcttcgccactggtgttgtgctcggaacctaccttgccctgatg

SEQ ID NO: 439989 - DNA, 510 bp, Triticum aestivum
  unsure (1)..(510): unsure at all n locations
tctccgtctccggtcagctcgccagatcctacctccacgcgctagggtttgcgcggccgtccgtccgtccgtcgtcgccaccagccatggcgtccgggaagcacttcaagtacatcgtcctcggcggcggcgtctcgggggggtacgcggcgcgggagttcgccaagcagggcgtgcagccgggggagctcgccatcatctccaaggaggccgtggctccttacgagcgccctgccctcagcaaggcatacctgttccctcagaatcctgcaagattgccaggattccatgtgtgtggggaagtggaggcgagaggctcttgcctgaatggtactcacagaaaggcatcgagcttatcctgagcactgaaattgtcaaagctgatcttgcttccaagactctgactagtgcagctggagcaacctttacatatgataccctgctaatngctactggctcctcagtcattaagctctctgattttggcactcaaggagctgattctaacaa

SEQ ID NO: 439990 - DNA, 337 bp, Triticum aestivum
cccacgcgtccggggtggttttggttccgtattcaggggaatgctcaaagacggcacactaatcgcagtgaaggttctgtcagccacttcaaggcaaggcgtccgagagttcttgactgaacttacagcaatttcagacatcaagcatgaaaacctcgtcacgcttgtcggctgctgtgctgaagggtcccataggatcctcgtttacaattatcttgagaaaaacagcctttcacagacattgctagggtctggctacagcagcatccagttcaactggagggctcgtgtcaaaattgccgagggagttgcccgtggacttgcatttcttcatgag

SEQ ID NO: 439991 - DNA, 267 bp, Triticum aestivum
tgccttgttcccaaagtgctgcgacagctgcaggttcttctcgggggccgtggtctgcgacgactccggccccaagtgccgcgacggctgcgtgaactgccgcgtcgtgcatacgagccctaagaagacgttccgatgcgccgatgcacgcgtcgacgatggcacgccctgcaagccctgcaagaagtactgatcgctcatgtctcagaacatcagatgttgcgccgaaaataaaagctgggatgagttgagcagagccgttatggc

SEQ ID NO: 439992 - DNA, 227 bp, Triticum aestivum
cccttgcgtgcgccacgcgtccgctaacagttgattcctctatttgatcacacgtgtagggctgcgatgcttcggtgctgatcaactcgacgccggggaacacggcggagagggactcgccggcgaacaaccccagcctacgtggcttcgagatcatcgacgaggccaaggccgcactggaggcgttctgcccgcgcaccgtctcctgcgccgacgtgctcgctttc

SEQ ID NO: 439993 - DNA, 346 bp, Triticum aestivum
ttcttttcctccccttccggttcgggttctggttcggttcgggttcggttcgagagagaggccgagtagctagcctagtctagggtttcggtagagaggaagtgagatccatggcggagacggagtaccgctgcttcgtgggcggcctcgcctgggccaccgacgacaacaacctccagcaggccttcagccagtacggcgagatcctcgacgccaagatcatcaacgaccgcgagacggggaggtcccgtgggttcggcttcgtcacgttcggcagcgaggagtcgatgcgccaggccatcgaggagatgaacggcaaggagctcgacgggcgcaacatcaccgt

SEQ ID NO: 439994 - DNA, 310 bp, Triticum aestivum
tttcttggcctttcttcagactgtcatagcattacatatatttgcaagcccaatgtatgagtacttggacacaagattcggcagcggacacggtgggccttttgcaatccataatgttgtgttcagagttggtgtgagaggaggctacctggcggtgaacacgttggtggctgcgatgctcccgttccttggcgacttcatgagcctgaccggcgccctgagcaccttccccctcacgttcgttcttgccaaccacatgtacctgatggtgaaggggcccaaactttctgccttccagaaaggttggcac

SEQ ID NO: 439995 - DNA, 416 bp, Triticum aestivum
ttcttttcagattggctttcttgcctggacaacaaagtagggttcaagggttttgctgtccccaaggaatcgcaggctaaagttgctgagttttcgttccgtgggacgccagcaaagataaagcatggtgatgttgtaattgcggctatcaccagttgcaccaacacatcaaatcctaatgtaatgctgggagctgctttggttgccaaaaaggcttgtgacctaggcctggaggtgaaaccatggattaagacaagtcttgcaccaggttctggtgttgtgaagaagtacttggacaagagcggtctgcagaagtatcttaaccagcttggcttcaatattgttggctatgggtgtacaacctgcataggaaactctggagatcttgatgaatccgtagctgctgcaattactga

SEQ ID NO: 439996 - DNA, 221 bp, Triticum aestivum
ttcttgcaacccgccgtgcgtgcacaagaacctcaagagcagcaacgtcctcctcgacgccgacctccgcgccaaggtgtcaagcttcgcgctggcgcggtcggtccccacgggcgttgatggcggcgacgcgcagctcacccgccacgtcgttggcacccaggggtacctggccccggagtacctggagcacggcctcatcacgcccaagctcgacgttt

SEQ ID NO: 439997 - DNA, 310 bp, Triticum aestivum
ccgtcacggaggttgacctctgcgggcacgcgacgttggcctctgcgcacttcctcttcacgactgttcttccggagcatggcaagctggagttcatgaccaggtccgggatcctaactgccaagaaagtccctgcaccagggagcactggcgtcccaggtgaggagcaggggaagctgtttattgagctggatttccccatgattggttttctggactgcaaccaaatgccgtcgattccagagaccctaaacggtgcgcccattgtcagcgttcacaaatcggctaccgacggcgacctcattgtgga

SEQ ID NO: 439998 - DNA, 250 bp, Triticum aestivum
gctgaccgcgatggctgagctgctgcagtcgggctgcacgacgtcgagcgatcacctatacatctacccgaacggcagccggctcgacgacagcatcggcgccgcccagcggatcggcatgcgctttcacgcgagccgcggcgcaatgagcgtcggccagcgcgacggcgggctgccgcccgattcggtggtcgagcgcgaacccgacatcctgcgcgacgcgcagcgcctgatcgagacctatcacgac

SEQ ID NO: 439999 - DNA, 388 bp, Triticum aestivum
cccacgcgtccgcccacgcgtccgcggacgcgtgggtaccgcagcacgtacctgggcgcccggaccaagccggaccgggagcggaagctcagcgccaggtaccaggcctacgacaactaggagctgccggagaccgtcgactggaggaagaagggggccgttgctgccatcaaggaccagggcggctgcgggagctgctgggctttctcagcaatagcagctgttgaaggcatcaaccagattgttacgggcgacatgatccctctgtccgagcaagagcttgttgactgtgacacttcatacaacgagggatgcaatggaggtctgatggactatgcgtttgagttcatcattaacaatggcggtatcgactctgaggaggactacc

SEQ ID NO: 440000 - DNA, 308 bp, Triticum aestivum
tcttcttgtcaccatcaaggtgctcttctgcgggatctgccacaccgacctccacatcgccaagaacgagtggggaaacgccctctaccccgtcgtccccgggcatgagattgttggcgtcgtcaccgacgctggccccggcgtcaagaacttcaaggccggggacacggtgggcgtgggctacttagtcgactcctgccgctcctgcgtgagctgcggcagcgggcacgagaaccactgccccacgctcgtgctcacctccaacgccgtggactacgacggcgccaccacccagggagggttctccg

SEQ ID NO: 440001 - DNA, 264 bp, Triticum aestivum
tcaagaactactggaggaccagggtgcagaagcacgcgaagcagctcaactgcgacgtcggcagcgccaccttcaaggatgccatgaggtacctctggatgccccacctcgtcgagcgcatccacgccgccgtcgtcaccgccggcggcgaccccacaatgggcgacacctcgtgcgcgtcaggagtcacgtcgatggccgtcaccgccaccacatatcccgacaacaactctcccgccagcgcggtcaccaccagcaggtcgg

SEQ ID NO: 440002 - DNA, 232 bp, Triticum aestivum
tcggagaccgccccgactgacattagagggctgctgaacacgctgccgcaattcagtgggtcaggagggatgttcctttcttactgcatggtgttcaccatgtcgctcatgccgcagcctgactggagagtcatgcttggggttttgtcgataccgtcgcttatgtactttgcattgactgtcttctatttgcccgagtcgccgagatggcttgtgagcaaaggaagaatgg

SEQ ID NO: 440003 - DNA, 344 bp, Triticum aestivum
ttgctgaagcttctatggcaatcgcttatgagaagaaatgggcattgttccttagcacaaaagacacaatccttaagaaatatgatggcaggttcaaggacattctccaggagatctatgaagctggctggaaatccaaatatgaggctgctggaatatggtatgaacatcgtctcatcgatgacatggctgcctatgcacttaagagcgaaaggtgctatgtttgggcttgcaagaacctatgacggaaatgtgcaaagtgatttcttagctcaaggtttgggctctttgggcttgatgacgtcagtattgatgtgccctgatggtaaaaccatcgaagctga

SEQ ID NO: 440004 - DNA, 327 bp, Triticum aestivum
tgctgttcgggagcagggagtggtacttcttcacgccacgcgaccgctagtaccccaacggctcgcgccccaaccgctccgccggcaccggctactggaaggccaccggcgccgacaagcccgtggtgcccaaggagagctgcggcaggacggtcggcatcaagaaggcgctcgtcttctactccggcagggcgcccaggggcgtcaagaccgactggatcatgcacgagtaccgcatcgtcgaagccgaccgcgcacccggcaagaagggatccctcaagctggacgaatgggtgctgtgccgggctgtacaacaagaagaacaac

SEQ ID NO: 440005 - DNA, 383 bp, Triticum aestivum
ttcgaagcgcagctccacgggcggcttcgcgatggccgccgccgactacgaccgcgcgtaccgcccctacgcgccctcctccgccgacgactacgaccgcccctaccgcaacgagatcgtgccctacggcgaccgccgcatcgacctcgtcgtcaagccgccgccgcccaccaggtccccgccgccgccgttgcccgtcaccaagagcggaggcggaggcgggataggctccgcctggtgcttcagcgacccggaggtgaagaggcggcgtcgggtggcgagctacaaggcgtactcggtggagggaaaagtcaaggcctccttccgccggggcttccgctggatcaaggacaagtgcacgggcttcatccatggctgaatcc

SEQ ID NO: 440006 - DNA, 299 bp, Triticum aestivum
tgtacgacaggatgatgcggcacctgcgggcagcggtggacgcggagggggtggagcacgacgcggcggtgacggacggcgagcagctgctgcggcagctcatcgacgccgcggcggcgcaccacgtggtgctggcggagctcaagtccgccgtggccagggccgacgtgttccacctcgtctcggggatgtggctgcccgccgccgagcgctgcttcatctggattggcggctcccgcccgtcggacctcatcaaggttatggcgcggcatatggagccactgacggagcaacaggcg

SEQ ID NO: 440007 - DNA, 331 bp, Triticum aestivum
tttcctttcgcatccgcatcgcaccgcaattgtcttccttcctcgacggacgcacgcacgcagatctcatccaaggcaggtacaagatggctctcaccagaattggtcttgctggcctcgccgtcatggggcagaaccttgccctcaacattgcagagaaaggcttccccatctctgtctacaacaggaccacctccaaggtcgatgagactgtccagcgcgccaagctagaaggaaaccttcccctgtacggtttccatgaccctgcatccttcgtcaactccattcagaagccacgcgtcgtcatcatgcttgtcaaggctggcgcacc

SEQ ID NO: 440008 - DNA, 231 bp, Triticum aestivum
tcccacgcgtccgtcttgaggcagtagagcgggagaggaatataagaaccaatcaaactcgaaatacgactatatttcatcatcctgctcttggtgatttcgaagtgcagcatttacctgttgttggtaatgatgctgaacttgaagagcgtatactgcaacacctagctgctgctgcagcaatgggaaggtcacaccaacatggcagaagagaggggcagaggaaccgat

SEQ ID NO: 440009 - DNA, 340 bp, Triticum aestivum
tttctccagctccacgggcagaggagccgacacccaacccagcaccaacgcgctccgagcacaccaaggaaccatgcgtccatctcgggacctccggctggccgcgctcgtcctgctcttctcggcctccgtcctccacccagcagccagagcccagcaggagaccgaccaggaggaggagttcagctactcgctggacgcggagaacgggccggcgcactggggcgacatcaaggaagagtggtcggcatgcggcaaggggaatatgcagtcgcccatcgacctcgccagcccgcgcgtgtccctcgtgcgcggcctcggttacctcaaccactcctac

SEQ ID NO: 440010 - DNA, 381 bp, Triticum aestivum
  unsure (1)..(381): unsure at all n locations
ttggcgccggcgggatgggccagccgccgtcggactcgccgctgctcgactcctccgagcaggtctacatctcctccctcgccctcctcaagatgctcaagcacgggagggccggcgtgccgatggaggtcatgggcctcatgctcggcgagttcgtcgacgactacacggtcgtggtggtcgacgtcttcgccatgccgcagagcgggacaggggtcagcgtcgaggccgtcgaccacgtcttccagaccaatatgctcgacatgctcaagcagaccggcaggccagaaagngtggtaggggtggtatcactctcatcctggttttggttgctggctatcgggtgttgatatcaatactcaccagagttttgaagctttg

SEQ ID NO: 440011 - DNA, 300 bp, Triticum aestivum
tttcttttcacgcgtccgcccacgcgtccgcccacgcgtccgtccacgcgtccgcccacgcgtccgcatgtatctccactccggccgggcagccagtctcttcttcttcttctccagcgagcgagcgagctaggctcggaggtgagcgaaaatgccggtcagcaggatcgccgtggggagccaccgtgaggtgtacgaggtgggcgccctcaaggcggcgctcgccgagttcatctgcacgctcatcttcgtcttcgccgggcagggctgcggcatggccttcagcaagctgagccccga

SEQ ID NO: 440012 - DNA, 312 bp, Triticum aestivum
ttagatttcagctgaagaaatttcttccatggtcctcatcaagatgcgtgagatcgccgaggcttacctaggagtaactattaagaatgctgttgtcaccgtgcctgcttacttcaatgattcccagaggcaggcaaccaaggatgccggtgttattgctggtcttaatgtgatgcgtatcatcaacgagccaacagcagctgcaattgcctatggtcttgacaagaaggctaccagtgtcggtgagaagaatgtgcttatctttgacctgggtggtggcacttttgatgtctccctccttaccattgagga

SEQ ID NO: 440013 - DNA, 244 bp, Triticum aestivum
tggagtctgtatttcttggcaaccggctgcaggtgtcatatgcacctcaatttgagagtattttggataccaaggagaaactggaagtccggagaaacgaagtcctcagccgaataagatcctctgttggaagcagatcagaacggttaactcagtattctccagggcagggatcttctagtgggaacttgcatcatcatatgagccccaataagagggaatacacaaagacacttcatgcttc

SEQ ID NO: 440014 - DNA, 304 bp, Triticum aestivum
tccaagatgtaccagggcgccggtgctgacatgcccggaggcatggacgaggacgcgccggctgcgagcggcggtgctggccccaagatcgaggaggtcgactaagttagtcgcttttatatagtgagaaatacactatacaccattttattcagtcctgggtgccaatcatatcacctgggctggaagttttgttgtactttttggtctgtagcatcacgagacttgtgtgtgtcgtgaacaatgcaatgatgcatgttttggctcattgttgatttcagcttaatgcttattatttggactt

SEQ ID NO: 440015 - DNA, 308 bp, Triticum aestivum
tttccttccgcaagggcgacgcctgcgagtacgcgcacggcgtcttcgagtcatggctccacccggcgcaccaccgcaccaggctctgcaaggacgaggtcggctgcccccgccgcatctgcttcttcgcgcacggcgcccgccagctccgcgccgtcaacccctccgccgcctccatggcctcgccatccccgagctcctcgccttcgccgacgcgctcctcctcctcctcctccaggccggcgctcaccgcgtcgctcagctcgcgggagctcgacttggacgccgacaaccagaaacagtacgcg

SEQ ID NO: 440016 - DNA, 377 bp, Triticum aestivum
ttccatgcgtccggttggatagtagtcatggagatcatccctggattttcactttaccgagggttatatgagtttggtcaatatgcattctctggaactgcaatgggaaccagtggtatggagtggactaatttgagtgacccggtcaatggaatgcgtactgtattgattatcatggttatcgaatgggcaatacttctccccttggcattttatcttgatcaagtctcatcattgagtggtggactccgaaagaggttggttgatctccttgaaatgctttaagaagcgagctgcatcatttcggaggtatagcttcgggcgactaggacctaaagtaacaatcgaaatggagaaccccgacactactcaagaag

SEQ ID NO: 440017 - DNA, 291 bp, Triticum aestivum
ttggattcgtgggtcggaacctaccttgccctgatgactgtcgtcttcttctgggttatccacaagacagacttcttcacaaacaaattcggtgtcaggtcaatcagggacagcgagtttgagatgatgtctgcactgtacctccaagtcagtattgtgagccaggctcttatattcgtgactcgttcacgtagctggtcctttgttgagcgccctggtttcctcttggttaccgccttccttctcgcacaattggttgcaacactcatcgctgtctatgccaactgggag

SEQ ID NO: 440018 - DNA, 222 bp, Triticum aestivum
gctggtcagatccagttaacttctttggaaaaggtcctcaagacggaatctaatggatatgatgtcaaccagaggaaaaatgttattactagaggagtcctttcagtaactgttatatctgcagaggacataccagcaatggatgtgatgcggaaggctgacccatttgttgtcctgtacctgaagaagggggaaaccaaaaagaagacaaagggttgtgac

SEQ ID NO: 440019 - DNA, 429 bp, Triticum aestivum
ttctcacgcgtccgagaccgaccacaaattcacccttaccacctacaccgccaatggcgccgcaattactgctaccagtacaaagaaggctgatcttatactcggtgagatccaatcacagatcaagaacaaaaacatcactgtagatgtgaaggccaactcagcatcgaatgtcattactacaattactgctgacgatcttgcagcaccagggctgaagaccatcttgagctttgctgttcctgatcagaaatctggaaaggttgagctccagtacttgcatgattatgctggtattaatgcaagcattggcttgactgccaatctgtagtcaacctctcgggcgcgttcggaactagtgctctagctgttggtgttgaacgtgtcgcttgatacagccacaagaatttaccaaatacaatgctgcac

SEQ ID NO: 440020 - DNA, 360 bp, Triticum aestivum
ttgaaccgaagccaagaagagtttcctcgttgctagcgccgctaagtagacgtcgacggcgatgggcaagatgaagatgccggccctgttccgccgccgctcctcctccaagtcgcgctccgcgtcgccgccgacgactcctccccgggaggagcagcaggaggagagccggcaggccatcgggtccccggcgcggtcggcggaggaggagatggcagcgggtcttccgcaagttcgacgccaacggcgacggccggatctcgcggccggagctggccgccctcttcgagagcctgggccacgcggccaccgaggacgagctgacccgcatgatgttcgaggcggacgcggacggcgacg

SEQ ID NO: 440021 - DNA, 302 bp, Triticum aestivum
  unsure (1)..(302): unsure at all n locations
ttcctttcgtccgcacttcttcatggtgggctttgcgccgctcacatctcgtgggtcacagatgtaccgctccctcactgtccctgagctcacacagcagatgtgggactcaaagaacatgatgtgtgctgccgacccacgccatggccgctacctcacagcctcggccatgttccgtggcaagatgagcaccaaggaggnttgatgaacagatgatcaacgtgcagaacaagaactcttcctcttcgggaggtgggatccccaacaacgtcaagtaaggcgtgtgtgacatcccaccacgc

SEQ ID NO: 440022 - DNA, 321 bp, Triticum aestivum
ttcctttcgtccgatccgcagcggctttacctaccgagaagaagagagaaaaaaggttcgagtgcgttgcagagtgagaagagatggctccggtgaagctgtacggcgcgaccctgtcgtggaacgtcaccaggtgcgtggcggcgctggaggaggccggcgtcgagtacgagctcgtccccatcaacttcggcaccggcgagcacaagagccccgaccacctcgccaggaacccctttggccaggtgccagctttgcgggatggtgacttgtacgtcttcgattcacgtgctatttgcaagtattgcgtgccgcaagaac

SEQ ID NO: 440023 - DNA, 305 bp, Triticum aestivum
tctcattcagaaacacaggagagagaaaaagatcagattgcatcctcctcttccttccttctcctcgctgttcttcttgccttggtctcatggcaggccactgcctccgatcctagccccctccaggacttttgtgtcgccgacatgaattcaccagtacgtgtcaatgggtttgtttgcaagaacccaatggaggttaacgttgatgacttcttcaaggcagccaccctcgacaagcctagggtgaccaacaagggttggatccaacgtcactttgatcaaacgtcatgcagattgctggactc

SEQ ID NO: 440024 - DNA, 423 bp, Triticum aestivum
tttcctctgacgcgtgggtcgccgtcgcctctccactttcgtctctctcactcactctccccctccgccgccggcgcagcgtcctccccgcgactccgatggccagcaagtgggtcaggcccgaggtgtacccgctgttcgcggcgacgggcgtcgccatcggcatctgcgccttcagcctcctccgcaacatcaccggcaacccagaagtcagggtcaacaagatggggagggcagcgggagtgcttgagaaccatgaggagggcaggcgctacgccgagcatggcctcagagcctatgtgcaggacaagacccccgagatcatgccaggaatcaacaagttcttcaccagcccgaaatgaagcactttagcctgtcagtggctcgctattagtaactgttggggtcaagtgcaaacctatt

SEQ ID NO: 440025 - DNA, 263 bp, Triticum aestivum
tttcctcccacgcgtccgcccgacgctcaagcccccagacgccgcagcgccgccactccacccgcagcggcaaccatggcggtcggcaagaacaagcgcatctccaaggggaggaagggtagcaaaaagaaggccgtcgatccgttcaccaagaagcagtggtatgacatcaaggcgccgctgctgttcaccagccgcaacgtcggcaagaccctcgtgtccaggacacagggtaccaagattgcctcagagaggtctgaagc

SEQ ID NO: 440026 - DNA, 291 bp, Triticum aestivum
ttacctgtcagacacatcgctgcttccatcctcttccccctttccccacccgcgtgcgagcggccacccaagaccaaccgcgtccagatccggcggcggatctccccatggcggccggagccctgggcctggccctcgtcgcggcgctcgcggtcgcgctggcgggggccaactccgagggcgacgcgctctcggcgctgcgccgcagcctgcgggaccccggcggcgtgctgcagagctgggaccccaccctcgtcaacccctgcaactggttccacgtcacctgcgacc

SEQ ID NO: 440027 - DNA, 351 bp, Triticum aestivum
ttccatgcgtccgctgcggggcgcgggcaggcggcggttgctcgttctgcttggcgtatggtcggccggatggagcggcagacggtgtcgacgtcctccgcgtcctgctccccctccggcgcctcgtcctcatcctcctcctcctgcggcggacggaagcggcccgacatactcaacatgatccggagtgcagcatgtcttaattcatcatctactgatactggcaaggggcggagtaagcaatcaagcaccaaggtgacgcatggattccacttggttgaagggaaatctggccatgacatggaggactaccatgtagcagagtacaagtgtgataagaatcatgagctt

SEQ ID NO: 440028 - DNA, 355 bp, Triticum aestivum
tcagcagccacccacctgccgagtgccgagccgcagcctcacacgcacggtgcgagtacgtggtgagagctgtgcgctcgtgcctcgatccatccctcaaccctccgtgtgtgtttgtaaggcagcgagagcagccatgggcgtggggaagaaggtgctgaacgacgtgaagccgtacatgatgatgatcctgctgcagatcgggtaccgccgggatgtacatcgtctccgtcgcctcgctcaagcgcggcatgagccactacgtcctcgtcacctaccgcaacctcgtcgccacgctcgtcatgctgcccttcgccctcttcttcgagaaggggacacggcccaagatgacact

SEQ ID NO: 440029 - DNA, 297 bp, Triticum aestivum
  unsure (1)..(297): unsure at all n locations
tgaggtatggcaacaatttgaggaggctgttcaaagtgactatgtaccaggtttcgggaagaaaatcagcagcctgcttgatagatgtttatcagaatacgacatggaggctatttattttgatgaaggtgtcagaacatcaaaaagacatcaacttgagtctaaactcttgcagcttgtcaatcctgcgtaccaatctcttcttggtcatttacggactagaactttagaagcattncaaagagtcctttgatagggccgttgaaaaggagggatttgctgttgctgctcgcgatt

SEQ ID NO: 440030 - DNA, 270 bp, Triticum aestivum
  unsure (1)..(270): unsure at all n locations
taggttcacacgcacgcggggtgcaaattgcaatgacgcccaccttcgccgtgcgccggcgagaaccagtcctcgtcgtcccggcctccccgacaccccgggaaacaaagcgcctctccgacatcgacagcaaggagtctctgcgggtgctcatgccgggcgtcttcgtctaccgcggtggcccggcgcgcnggcgacgacgacccggtggacgtcatcggccgagcgctgtccgaggcgctggtgcactactaccccctcgccgggcgc

SEQ ID NO: 440031 - DNA, 256 bp, Triticum aestivum
tgtcagatcaggcgcgccgagggcgccgacgggctcttgtccgggatctcggccaccatgttgaaccagacgctctactcacacgggtgggctctacgacatctagaagcgctgacccaggaaacgccgggctgcgtgaccgaagatcgcgcggctatcccggcggcgcgcgcggccgtcggcaacccggccgacctggccatggtgcggatgcaggccgacggccgtctcccgctggccgaccggaggaactacc

SEQ ID NO: 440032 - DNA, 388 bp, Triticum aestivum
tctctgccaccaaggagggtctgaagcttgatgagagcgaggacgagaagaagaagcaggaggagctcaaggagaagttcgagggtctgtgcaaggtcatcaaggaggtgctgggtgacaaggtggagaaggtcatcgtctctgaccgtgttgtggactctccttgctgtctggtgactggtgagatgggtggactgccaacatggagaggatcatgaaggcccaggccttgagggactcgagcatggctggctacatgtcgagcaagaagaccatggagatcaaccctgagaacgccatcatggacgagcttcgcaggcgcgccgacgccgacaagaacgacaagtctgtcaggaccttgtgatgctgctcttcgagacctccctgc

SEQ ID NO: 440033 - DNA, 340 bp, Triticum aestivum
ttgctttcacgcgtccgccacgcgtccgctccagagcagcagctcagccgccgtgatctgtaatcgccgttccaaaagagagcagtttagaaaggttgtcggtggcccaagctctgatcttcagcctgcatctagctagcgcagatgtcgttccgcagcatagttcgtgatgtcagggacggtttcggcagcctgtcgaggcggagcttcgacgtgaccatctccggcctctccggcctcaccgggcaccacagggccaagtgccagagcacggtgcacgagctccgcgacgccgatctcatagtccaggagagccgctgggctagcctccctccggagc

SEQ ID NO: 440034 - DNA, 323 bp, Triticum aestivum
tgcctctggcgtatacttcatcccggcgctcacgagcagcgtcgtgagtgtcggacaactcgacaagggctggttcgacatcggcatccggcgcggtgttctcaccaagcatgaccagcagaagaggctgctcatcaaggttacccgttctcctaaccgcctctacaaattattttttcaacccgtgcatcatgtgtgccttgccgtgggccatgttttcgacgcgtggcgttggcatgccaggctaggacaccagcactttgacgggctgcagaagatgacacgaggcaaccttggtcatgggctacctcacataaagcacg

SEQ ID NO: 440035 - DNA, 286 bp, Triticum aestivum
ttcctttcgtccgaagcaatgtcatctttaggcagttacttcggtcgagacggccatttactgcacaatttactgatgctatgggtaatgagatattcacggtccgccggccattttggttcatcaacagctccatttatgcagaagtggatggcaaggaggtaggtgtagtccacaggcgctggcatctttggcgtagaatttatgatctgtacttagggaacaagcaatttgctgtggttgagaatcctggattttggaactggacttttaccctggattgatg

SEQ ID NO: 440036 - DNA, 225 bp, Triticum aestivum
tgtctttcgtactgttatctggatgggaaagaagcaagagtctgttgaggatgttccctgtggtaacactgttgcgttggttggtttggatcagttcatcacaaagaatgcaaccctgacaaatgagaaggaagttgatgcctgcccaatcagggcaatgaagttctctgtgtcccctgttgtgcgtgttgctgttcagtgcaaggtggcctcctgatcttccca

SEQ ID NO: 440037 - DNA, 303 bp, Triticum aestivum
tcccacgcgtccgctcgcccgccgccgccgcctcctcctcctcctctcggctccttctccttccccagtttcagccatgtgtaaggagaagactcacatcaacatcgtggtcattggccatgtcgactctggcaagtcgaccaccactggccatctgatctacaagcttggaggtatcgacaagcgtgtgatcgagaggttcgagaaggaagccgctgagatgaacaagaggtccttcaagtacgcctgggtgcttgacaagctgaaggccgagcgcgagaaggggtatcaccattgatattg

SEQ ID NO: 440038 - DNA, 262 bp, Triticum aestivum
aagctcgtccaccgtgaccaaggcgctgtacaagcctcaggggctgcagcgcggccgatacagccccaatggctctgatcagtcgctgttctacaattccaccagctactgggatgagtttgtgtggggcggtgcgtggatgtacttcgccacggggaacacatcatacctcaccatcgtcacagctgcagggatggcgaagcacgcgggagcgttctggattggtagcccaaacttgggagtgtttacctgggatgacaag

SEQ ID NO: 440039 - DNA, 220 bp, Triticum aestivum
ttgtgtttgtgcatgatgaattttacattggcttgaggcatagaggggccattggccaggagtatgctgattttctgcatgaatttatggctgctgtgaagcaaaactatggggagaaagttctcattcagtttgaggattgtgcaaaccacaatgcctttgatctccttgcacgatatggaacaacccacctggtattcaatgatgacattcagggaac

SEQ ID NO: 440040 - DNA, 262 bp, Triticum aestivum
gacggagtggttgctgaaaagcacagcatggttggcgctggatctcttgtcaagcagaatacaaggattccttctggggaggtctgggttggtaatcctgccaagttcctaaggaagctgacagaggaggagatcacattcatcgcccaatcggcagccaactacatcaacttagctcatgttcacgccactgagaattccaagagcttcgatgagattgagctcgagaagaaactgaggaaggaagtttgctcacaaagat

SEQ ID NO: 440041 - DNA, 245 bp, Triticum aestivum
tctcttgcggctagggtttcctccgcttcgctctcgcagaatgcctcgctacgatgagcgtgatcgttacggtggcaacacaaggctgtacgtgggtcgtcttccctcgcgcacccgcacaagggacctcgaagacctcttcggcagatatgggagagtgcgacatgtggatatgaagcacgagtttgcatttgttgagtttaagtgatcccagggatgctgatgaagcaaggtacaatcttgat

SEQ ID NO: 440042 - DNA, 369 bp, Triticum aestivum
  unsure (1)..(369): unsure at all n locations
ttccacgcgtccggccacctccccaccatcgttaccaatggcgacgaccccgcgcctcgcctccctgctcctcctgctcgcgctctgcgccgcggcggccggcgcgctccggctgcccccggacgccagcttcccgggcgcgcaggccgagcgcctcatccgcgcgctcaacctgctcccggggcgtcctccggccgcggctcgtgcggggcgggggacgtcgcgcccgggcagctgctggagcgccgggtcacgctccccgggctgcccgagggcgtcggcgacctcggccaccacgccggctactaccgnctncccaacacccacgacccagggatgttctacttcttcttcgagtcgcggggcaag

SEQ ID NO: 440043 - DNA, 258 bp, Triticum aestivum
tctagcacttgctcgaatcattgaagggaagacacctgaggaaatccgcgatatttttcatttaccagatgacttaacggaggaagaaaaattggagccactgaaaaatataaacgatgatcccaggattcgcttattgaatcgattgtatgcaaagaaacggaaagaactacaggagcgccagaaactaaaggatattcaggtacagcaagagcaaaaggatgagcggtctttggacgagttactttgttttataaa

SEQ ID NO: 440044 - DNA, 345 bp, Triticum aestivum
tttctttcagcttgttctctgcatccaccaagaagtcgcctccgttgctttcctccagcagtgcgcgcccctcctctcgagatcttctccgagttcctgagatctggttgtaagcagccaagatggtgaagatctgctgcatcggagctggctacgtcggcggcccaaccatggctgtcattgccatcaagtgcccgcattgagggcggttgtggacatctacaagccccgcattgacgcctggaacagcgacaccctcccgatctacgagcccggcctcgattgatgttgtcaaggcctgcacggggaagaacctcttcttagcactgatgttgagaagcatgt

SEQ ID NO: 440045 - DNA, 343 bp, Triticum aestivum
tttcttttgatttttcaactggtttcggagatgaaagccgaatattttccacctagggaggatgtcattttgcagaatgaagcacccactgacttctacattttagtttctggtagtgtggaattagtagaggttccaaatggtgcggaacatggtgcagaacaggtggttggagtggccaagtcaggagaggttattggagaaattggggttctttgctataggcctcaattattcactgtccggacaagatccttatgtcagcttctacggatgaatcgtacggactttctcagcattgttcaatccaatgttggagatggaactatcatcatgaacaacc

SEQ ID NO: 440046 - DNA, 156 bp, Triticum aestivum
tgtatctgagataccttcctgtccatcatttccagagcctaatgtccgaagaggcgcgtggtttgatgttattgctgtgaaacttccctgtacaagggtggctggttggtcaagagatgttgcaaggcttcatttgcagctctctgcggcaaaact

SEQ ID NO: 440047 - DNA, 141 bp, Triticum aestivum
ttcctttcgttcgttggaggagtcatgactgagctgatcaccaggaacaccaccatccacaccaagaaggagcaggggttatacacctactccgacaaccagactggtgtgctcatacaagtgtttgagggtgagaggaca

SEQ ID NO: 440048 - DNA, 349 bp, Triticum aestivum
tccacgcgtgacccacgcgtccggccaagagctcagagaagcaccggccatggagggcaaggaggaggacgtgcgcctgggcgcgaaccgctactcggagcaccagcccatcggcacggcggcgcagggcggcggcgcggacgagaaggactacaaggagccgcccccggcccccttcttcgaggccggggagctcacctcctggtccttctaccgggccggcatcgccgagttcctggccactttcctcttcctctacatctcggtgctcaccgtgattgccgtggtgggcaacccgtcggggtccaagtgcggcacggtcggcatccagggcatcgcctggagcttc

SEQ ID NO: 440049 - DNA, 315 bp, Triticum aestivum
tttcttttttggctaacgatgctcatgtaacaacgcttaactatcttgttgcatgcatgctcatcactagctggcattgtgcaggcgtcgctgtacgctcacatcagaaccagactggaagggatcatcctgacttcaccagctgtgcgtgtaaaaccagcacatccgattgttggggccgaggcaccgatattctctatcatagcacccatgttactattcaagggatcacacaagcggggcattccggtgtatcgcgaccccgccgtgctgctggcgaagtactctgacccactggtctacaccgggccgatc

SEQ ID NO: 440050 - DNA, 280 bp, Triticum aestivum
tttctttcttccggaggagagagacccagcgcagaaaagggacaccgcaaaagggcccccggggacagcgagaggagaaggcagcagcagcacgcgacggggaggctcattatggtccacatcggccagcccgatatccaggtcgataacgcctgctgagagctctactgcctcgagcacggcatccagcacgatggcaccatgcccagtgataccacgagtcggaggttgcacacgatgcgttcaacacgttcttcagtgagaccggtgcgggcaagca

SEQ ID NO: 440051 - DNA, 376 bp, Triticum aestivum
ttccttaaaaaagtggagaaagtgaaggttgcggtatttgctggtggtgttgacacttctgcaactgaaacaaagggaactgttcttatacattctgctgagcagcttgaaaactatgctaaaactgaggaagcaaaggtggaggagcttatcaaatctgtggctgattcaggtgccaaggttattgtcagtggagcagcagttggcgatatggcattgcatttttgtgaacgttacaagctaatggttctgaaagtcagctcaaagtttgagcttcgaagattttgccgtactactggggctatagcacttttgaagcttagccgaccaaatgtggacgaattaggatatgcagactctgttttggtggaagaaa

SEQ ID NO: 440052 - DNA, 271 bp, Triticum aestivum
tgctcgccatggcgcacgcggcggcggcggcgcaggtcgacgtgcgcatcgcggagccggacaaccacacggacatgcccaacttcgcgcggctggtgaactcggcggacgtgatgatgggggtgcacggcgccgggctgaccaacatggtggtcctcccgagccgcgccgtgctgttgcaggtggtgccgttcggcgggctggagtggctgacccgggtgacctataaggacccggtcaaggacttcgacgtgacctacatggagtacaa

SEQ ID NO: 440053 - DNA, 345 bp, Triticum aestivum
tgtatgacaccaagggccgcttccgccttcactctgacaaggatgaggatgctaacctcaagctctgcaaggtcaggtctgtccagtttggccagaagggtatcccctacctcaacacctatgatggccgcaccatccgctacccagacccactcatcaaggccaatgacaccatcaagcttgacctggagaccaacaagattgtagacttcatcaagtttgacgtcggcaatgtggacatggtgactggtgggcgcaacactgggcgtgttggtgtgatcaagaacagggagaagcataagggaaccttcgagaccatccacgttgaggatgcccagggccacc

SEQ ID NO: 440054 - DNA, 408 bp, Triticum aestivum
ttttaaatcatggcccagcctctgaggatccgcctatctggtctcagataatgcgcttctttacaaatccccggaagcctatgattctggctgttgcccgtccatatcctgaaaagaatataacaacacttgtaaaggcatttggtgagtgccgaccactgagggagctcgcaaatctcacactaataatgggtaaccgtgaggctatttcaaagatgcacaacacgagtgcttctgtcttgacatctgtgcttacactaatagacgaataccatttgtatggtcaagtggcataccccaagcatcacaagcactctgaagttcctgacatataccgtttagccacaagaactaagggggcttttgttaacgtggcttatttcgaacaatttggtgttaccttgatag

SEQ ID NO: 440055 - DNA, 224 bp, Triticum aestivum
tgccgacctcgacgtcgtcgtcaagcacgatcccttcgagctgaccgtccgccgagctggctcgggcgaacccgtgctctccttcaacttccacggcctcttcgacttcgagccggtgcaggagtcaaagcccgagggcgagacctgggaggagcagttgaggagccacaccgacacgcgcccccgcggcccgcagtcgatcaccttcgacgtctgcttctatg

SEQ ID NO: 440056 - DNA, 375 bp, Triticum aestivum
ttctttcgtccgccctcacagtcacggaggcgaaggcgacggtttttttctgccctttttaccatggaggcaaccacccaggagcagcgcaggggtgaggatgtggttcatcctctgaaggttagccttgaggaactgtacaacggaacatcaaagaagctctctcttgcccgcaatgtgctctgctcgaagtgcaatggcaaggggtcaaagtccggggcttcgatgaagtgtgccggctgccaaggtgctggttacaaggtgcagataaggcagctgggaccaggaatgattcagcaaatgcagcagccttgcaatgagtgcaggggaagtggggagaccatcagcgacaaggatcgctgtgggcagtgcaaa

SEQ ID NO: 440057 - DNA, 353 bp, Triticum aestivum
ctgatttaagggaaagagaaaaggagtttgttcagaaaaaatccatggagctcgagcacataaattctcaaaaggtgatgatcatgtcaaaactagatcatgttgcgcttgaattgcagaaacttgaggatgagaggaaagaggctaatttggagcgtgaaaagagagagcaagagctgtctgagataaaaaacaccattgaagcccttaataatcaacgagagaagctgcaagagcaaagaaagcttctacattcagaccgagaatcaataacagaacaaattcagcaacttgatgtgttgaaagaactgaaaagcgattttgagaacaagcaactgtctttgatagagtct

SEQ ID NO: 440058 - DNA, 276 bp, Triticum aestivum
tttatgtcctctttgagtgtgtggtacagacagtaattttccatggtagcaagagagagtgaaagcagaatggtgaagctcgcattcgggagctgcggtgactccttcagcgccacgtccgtcagggcgtatgtggcggagttcatcgccaccctcctcttcgtgtttgccggcgttgggtccgccattgcctatgggaaactcaccgatgatggcgcgctcgacccggctggccttgtggcgatcgcgatcgcccacgccttcgccctcttcgtc

SEQ ID NO: 440059 - DNA, 401 bp, Triticum aestivum
tttctattttgatggatatattacaccagagaccacaataaagatattcattgaacaatttgatactgctatgaagcttaggtccgatcgagaagcctatgatgatttccgttcttttcagcaaaggccacaagccctctctggtctgttgtttgaggagcaatttgcaaatgcttatacgataaatattttccagaagttccaggatcagttaaagcagctgatgaatgtgacttgcactgaagtcagtaggaatggatcgatagtgacctacactgtgaccgtcattgggaaggagaggaagtttgactatagagtgatgtataatagtgccgagaaagaagtgtggtgtatctgcagatccttccagtttaaaggtattttgtgtagccatgctcttg

SEQ ID NO: 440060 - DNA, 274 bp, Triticum aestivum
cttgcgaggaggggggctgtttaacggaagcaggcggtatttaggagatcgagccagagggcggcgagcaagggcgcgatggcgtccaagaggatacagaatgagcttaaggatctgcagaaggacccccctacctcatgcagcgcaggtcctgtgggtgaagatatgttccattggcaggcaacaataatgggcccatctgacagcccatattctggtggagttttcctagttactatccacttgcctcctgattattctttcaaaccaccaa

SEQ ID NO: 440061 - DNA, 257 bp, Triticum aestivum
accaccacttcctcgtctccggcgagcctctgatgaagggtcgcagccgtcggcggggcgaccgccagctccagttccagctcctgcaccgccttctcgcgctctcgtcgctgctcctcctcgcctccggagaggtcatcttcgaggagcgattcgaagatggttgggagactcggtgggtcaaatccgataggaagaagagcgaagggaaagccggtatgctcaagcacacggcaggaaaatattctggagatcct

SEQ ID NO: 440062 - DNA, 300 bp, Triticum aestivum
ttggttggcaacggagccatcgtcgagaaggacccgctcaactggggcgcggcggcggccgagctcaccggcagccacctcgacgaggtgaagcggatggtggcgcagttccgcgagcccgtggtgaagatcgagggcgccagcctccgcgtcggccaggtggcggccgtggcccaggccaaggacgcgtcgggcatctccgtggagctcgacgaggaggcgcggccccgcgtcaaggccagcagcgagtggatcctcagctgcctcgccggcggcggcgacatctacggcgtcaccacc

SEQ ID NO: 440063 - DNA, 408 bp, Triticum aestivum
ttatcgtccgccacgcgtccggttcggcttttcgtcgacatatctgtcccgaggaatgtcggtgcctgtgtatctgaggtggagcatgcacgggtatacaatgtcgacgacttgaaagaggtggtggaagccaataaggaagaccgtgtgaggaaagcaatggaggcccaaacaatcattacccaagaactgaaacggttcgaggcatggagggactcactggagacggttccgaccatcaaaaagctgaggtcgtacgccgacaggatcagggcatccgagctcgagaagtgtctgcagaagatcggggaagacaatctcaacaagaagatgagaaggtccatcgaggagctgagcacgggcatagtgaacaagctccttcacggcccactgcagcacctgagatgc

SEQ ID NO: 440064 - DNA, 198 bp, Triticum aestivum
ccggtacgccttgttgaacgggatgccggcgttcgagtaccacggcacggacccgcgcttcaaccgcgtcttcaacgaggggatgaagaaccattccatcatcatcaccaagaagctcctcgagtcctacaagggcttcgagggcctcaacgcccccgcccacgtcgacgagggtgttgaggccctcgaagcccttgt

SEQ ID NO: 440065 - DNA, 397 bp, Triticum aestivum
ttctatcccctcatcgcctccgctcccacgccgccgaatccgagacctgatctcggattcaccgcgaccagaccctcaggcgatccccggcacctcctccccgacgcttcagccatggcaggaatggcaccggaaggttcccagtttgacgctaagaactatgattctaagatgcaggagctgctgaaccaaggtgagactgaggagttcttcacctcttatgatgaagttcacgagagctttgatgacatgggtctccaagagaacctcctgaggggaatttatgcttatggttttgagaagccttctgccatccagcaaaggggaatcgttcctttctgcaagggccttgatgttatccagcaagcacaatctggaacaggaaagactgctactt

SEQ ID NO: 440066 - DNA, 277 bp, Triticum aestivum
ctccacagaccacgcccaccgcaccgcaccaactatggcgatggctgagcagcagcggcggcgcaggcgcactggatctggccttcgttaccgtcgccgtactgctctccccggccctgtccgcacctctggacggcgccggcttccactcggcgacgtgcccgcagctggagagcatcgagctgtcctccgtccaggcggcgctccagcgtgaggtggcgctcgccgccggcctccttcgcatcttcttacacgactgcttcccgcagggctgcga

SEQ ID NO: 440067 - DNA, 342 bp, Triticum aestivum
gcggacgcgtgggaggcgccaccacccttttttggacccctacaaggcctaccacgccaacgggtgcgtgcacgacaaggccaccaacaagacggcctgccccgccggcagcgacgcctggatgcgccgcgagctcggcgaggaggagctcaagaccgtcgcctgggccgagcgcaactgcctgtactacaactactgcgccgacggctggaggttccccaagggattccccggcgagtgcggacgcgacctatgatgaattgatgattcagtgtttgtagcactagcagtacacctccgagccgagatttcattgattaatttcttcctttgctacagtac

SEQ ID NO: 440068 - DNA, 426 bp, Triticum aestivum
atcgtgagatggtgctgcttgagaattacagcgccctcaactacaccgggctggtgaagattctcacgaagtatgacaagagaactggggctcttatccgtctgcccttcatccaaaatgtgctgcttcagcctttcttcaccactgacctcctgtacaagcttgtgaaggagtgtgaggccatgctcgaccagctcctgccatcaagcaaaccatctgtatcaattgaagagggaaaagaagatggcaacactgcggaccagcatctgaaccccagttcttccttggctaacagcagatgtattccggagcttgatgagattgagttcatggagagcatgtacatgaagagcacggttgcggcgcttagggctctgaaagagatccgaagcaaaagctccacagtcagtgctttctcgttgccac

SEQ ID NO: 440069 - DNA, 314 bp, Triticum aestivum
gtcgttgacgcgtgggctcaccccgaacccccagctgcccttcccggcgccgccgcaacagcaagatggtgaagggacgcaccggccagcgcgtgaggctctacgtccgcggcaccatcctcggatacaagcggtccaagtcgaaccagtacgagacggcgtcgctggtgcagatcgagggggtgaacaccatggaggacgtggcctggtacggcggcaagaggatggcctacgtctacaaggccaagaccaagagcaacggcacccactaccgctgcatctggggcaaggtctctcgcccccacggcaacacc

SEQ ID NO: 440070 - DNA, 365 bp, Triticum aestivum
tttaatcgccatggcggcgccagcaccaacggcaaggccaatattaagaagcacggccacggcggcagcagctggttcatgctgcacatgatgccgtccttgtcgtcgtcgcgggcatcgtccaacgtaccctcggagaagggggacggcgacgaaagcgaggacgacgacgacgaggtactcatccccggcctgccgacccggttcacgttcgtcgacctggagacggccaccaacggcttcaagtggcagatcggctccggcgggttcggcttcgtgtaccgcggcgagctcccggaccggaccaccgtggccgtcaagcggatgaacaacctgtgcatgcagggccggcgcgagttcctcac

SEQ ID NO: 440071 - DNA, 387 bp, Triticum aestivum
tgcccgaacggtctgtgtcaatgaatggatggtgccttgctttccgagcctgtggtgaccggctgattgtcattggaggcccaaggacttctattggtggcatcattgagcttaattcatgggttcccgatgggcaaccgcctgtgtggaatttggttgccacacggcaatccgggaactttgtgtataactgcgccgtgatgggttgctgagtccactgaataaagattggatgcagtggatatttatgaaggatgatagtatgcacaaaggcagcccgttcaattgctccagccctgattcttcgtagcgatttatgccttctgcccagttaactggacatctgctgagcggcagcactcatgtaacccttgagttctaatactt

SEQ ID NO: 440072 - DNA, 338 bp, Triticum aestivum
tcgtatctgccagccacgaactccggcgactccacgacaagcttcccgagcagcccgccctcttcgaccaccgtcatgtagaggcgcggcgactggggctacgagaacaacggcgggacctgcgtggccatcgccggcgcggactactgcggggtcgccagcgacacccgcctatccgtcggatacaacatcctgacgcgcgagcactccaagatctgcgagctggccgaaaaatgtgtaatagcatcttctggctttcaaggtgacatcaaagctgtacagaagaactcagctgccagggaactgctataccaggaccagcacaataaaaggatgag

SEQ ID NO: 440073 - DNA, 393 bp, Triticum aestivum
tctctccatctgactcagttttttatccgacggcatggtcgttcccgcacccgccaagaggagaagcagcggcggtggcggaggcggggagaagaaggatctgttccacgtcgtccacaaggtgcccgccggcgacagcccctacgtccgggccaagcacctccagctcgtggagaaggacgcggaggcgtcggtcgtgtggttctggaaggcgatcaactccggggacagggtggacagcgcgctcaaggacatggccgtggtgatgaagcagcaggaccgcgctgaggaggcgatagaggccatcagatccttcaggcacctctgctccaggcaggcccaggagtccctcgacaacctgctcattgacctctacaagaaatgtggaaaagt

SEQ ID NO: 440074 - DNA, 217 bp, Triticum aestivum
agcggcgcacccaccaaccacccccacccgccgccatgagggagagcatctcgagccacaacggccaggccggcatccaggacgggaacgcgtgcagggagctgaactgcctcgagcatggcagacagcctgatggccagatgcccggagacaagaaccgcgggggaggtgatgatgctctcaacacctccttcagcgagactggggcagggaagca

SEQ ID NO: 440075 - DNA, 360 bp, Triticum aestivum
ttgatctggagcacccggagcgcccgaccaagtacggcaagtactggtgctggtgcttctggtccgtcgacgtcgaggtgctcgacctgctcggggccaaggagatggccgtgcgcgcctgggacgaggccctcaacacccagcccgagcgcctcatctggaacctcatgggcatgatgaacaactgctggttccgggtcaagatcaacgtctgccgcccccacaagggcgagatcggcctcgtattcgaccaccccacgcagcccgggaaccagtccggcggctggatggcgcggcagaagcacatcgagacgtccgagaccacgcagggcacgctcaagcggagcacctgcacgccct

SEQ ID NO: 440076 - DNA, 414 bp, Triticum aestivum
tgtgctttcttttgcatcatttagtgtggccaataggacaataatggcgttatggaaagcaagatcattgagctccgagtctaaagtacagattgctgaggaacaatctcaaaataatacacttcagagtgaggacagtggaatttttgttggtgttgacgattccaagagccttcagatgagtgaagttttctcgtcaaccatttctgctaatatgaattcacttctggaggtgttcgagggtggttcgttggagatgaaagtcatggaaaaagttggatgcctcaaatactcggctacacaatgggaatcagataaacccgacgaatatcaaagacaaattcattacaagtttagcaggaagttgtctcctgttggaggagaagtgactgggacccagctgaaatctcctat

SEQ ID NO: 440077 - DNA, 394 bp, Triticum aestivum
ttctttgaggttgtgctaactcccacacatttggccatagttatggaatacgctgctggcggtgagctatttgaaaggatctgtggttctggaagatttagcgagaatgaggctaggttcttcttccaacaattgctttcaggagttagctattgccattccatgcaaatatgtcatagagatttgaaactagaaaatacgctcctggatgggagcgaagcaccccggctcaagatatgtgatttcggttactccaagtcctctgtgttgcactctcagccaaaatcgaccgtgggtactcctgcctacatcgcccccgaggtcctttctagaagggaatatgatggaaaggtcgctgatgtttggtcctgtggagtaactctatatgtgatgc

SEQ ID NO: 440078 - DNA, 328 bp, Triticum aestivum
ccgcaacggcaatggcaggccaggcagtgaaggtgtttgtccccaccgacacggagctgctccaggcgcagtcggacctgtggcgccacaccctctgctacctcacgcctatggcgctccggtgcgccgtcgaccttggcgtccccactgccattcaccgcctcggcggcgccgcgtccccatccgaactcgtcgccgccctatccctccccacgtccaagctgcccttcctcgcccgcctgctgcgccaactcgccacggcgggcgtcttcagtgcaaccgacgccggaacgtaccgtctcaacccgctctcgtacctcctggtaga

SEQ ID NO: 440079 - DNA, 493 bp, Triticum aestivum
ttgccctatctgccttgaagaatatgatgaagataatccccgctctatcaccaaatgcgagcatcatttccatctttgttgcatactcgaatggatggagcgaagcgagacttgcccagtctgtgaccagataactttgatagatgagatgtatgaatagcatgttgaccctggtggatcctctctaggagcccgtgcgtgcctaccgaggaggtttagtactagtccttttctctatggggaagtaaaatcagcaaactactctgctcctaatatgatagtatgatctggtggaggaggtgctactggaatgcatcttgggagaacaaatgggaaataatgaaaggaaggaacccgcaagaaatatgctctaaaaaaaccatccatccctgtgtttatactagcatttgtgtcaagtttatggtaacaggaggattagcaggctgcatctgcaatatgcacttcatactagtcgaaactctgaatctagctc

SEQ ID NO: 440080 - DNA, 420 bp, Triticum aestivum
ttgcgatctcaccgagaaaatcctcgaccgaccgtacgacaaggccctctcatcctccttctccaagatgcagatcttcgtgaagactctcaccggcaagaccatcacccttgaggtcgagtcgtctgacacgatcaacaatgtcaaggccaagatccaggacaaggagggaatccctccggaccagcagcgcctcatctttgctggcaagcagctagaggatggccgcaccctggctgactacaacatccagaaggagtccaccctccacctggtgctccgcctccgcggaggcatgcagatctttgtcaagaccctcaccggcaagaccatcaccttggaggtggagtcctcggacaccatcgacaatgtgaaggcgaagatccaggacaaggagggcattcccccggaccagcagcg

SEQ ID NO: 440081 - DNA, 458 bp, Triticum aestivum
tcttgctgctcgcaaaggcgaggagggtgcggtgcctggtccagatctcgtggccgccatggcggagcagttcgcggagtcagcgaacaatgtaatcatcgaagaggtgaacaagggcctgaaccctggaatgatagtcctgcttgtggttgcgaccaccctgctgcttttctttgttgggaactatgcgctgtacctgtatgcgcagaagacgctccctccgaagaagaagaagccagtctccaagaagaagctcaagagggaaaagctgaagcaaggggtttctgcaccaggggagtgaagagacccatcgatttctcatgtcgattgctttatgctgggctcctttttttacctgataaaaaatatataccagctggagctgcagtgttgagcgactgtttatgtagaagccttgtcttgagtggtacatcgtcggtattggacaccttatttaa

SEQ ID NO: 440082 - DNA, 424 bp, Triticum aestivum
acctcggacgcgtgggcaagctcatcgaagagattatgattggggaggacaggctgattcatttctccggggttgcgatggggcaagcatgcaccattgtcctgagaggagcaagtgagcatgtgcttgatgaggctgagaggtccttgcatgatgccctatgtgtgctttctcagacagtaactgacacgcgtgtcatatatggtggtggatggcctgagatggtgatgtccaaggaggtggatgaacttgcaaggaagacccctgggaagaaatctcacgcgattgatgccttttcacgcgccctgcaagccatcccaacaatcattgctgacaatgctgctctggatagtgctgagctgatctcccagctccgagccgagcaccacaaagtgaacagcactgctggaattgatgtcatcag

SEQ ID NO: 440083 - DNA, 242 bp, Triticum aestivum
tgtggttctccgattctcctacgcggagttggaccaggcaaccggaaaattctccgacgaacagctcatcggcgtcggtgggacgagcaaggtgtatcgtggccagctcgctgatggcaaagtcgtcgccgtgaagaagcttcggcccctcggcggtgcggacgaagactatgagttcctgtcagagatagagctgctgtcgcggctgaaccactgccacgtggtgccattgctggggtact

SEQ ID NO: 440084 - DNA, 131 bp, Triticum aestivum
gtttcttcgtgggcggcctcgcctgggccaccgacgactacatccttcaacaggccttcagccagtacggcgtgatcctcgacgccaagatcatctacgaccgctagacggggcggtcccgtgggttcggc

SEQ ID NO: 440085 - DNA, 316 bp, Triticum aestivum
gaactgctattccagtggaaggacggtttgagcatattgtgccatcgtgcagcaccactgctgatcatggcattattcggatagagcgagaatcagccttggctctagagctaatgaaggaaaaagagaaggcaacaactccacctgctgaacaaaagacggagagattgcaaagtttcaaggaagaacacaagaatgcgctccacagggcgaaaaccttggatgttcctcatgcgatagacatctctgaagaggaaacccatgagggcgcttcatcttccgatactcacagcgaggcgacttcatcagaaccaaa

SEQ ID NO: 440086 - DNA, 228 bp, Triticum aestivum
tacaagcgttcaacaccggcaacctagctctctaccaagagctttgtggggttcacaatgctgctcttagtgcacagcctgcattggtgcagaatgaacagaaactgcttgagaagatcaatattctgtgtctgatggagataatcttcagccggccatcagaagatagaactatcccattaagtgttattgccaagcagactaagctttcaaccagcaaagtggaat

SEQ ID NO: 440087 - DNA, 324 bp, Triticum aestivum
ccctcgcgtccgcggacgcgtgggcgagaaggtgcaggaccttctcctccttgatgtcaccccactgtctcttggtcttgagactgctggaggagtcatgactgtgctcatcacccggaacaccaccatccccaccaagaaggagcaggtcttctccacctactccgacaaccagcctggtgtgctcatccaggtttttgagggtgagaggacaaggaccagggacaacaacctgcttggcaagtttgagctctccggcatcccgcctgcacccaggggtgttccccagatcactgtctgcttcgacattgatgccaacggtat

SEQ ID NO: 440088 - DNA, 295 bp, Triticum aestivum
cccaacccaaaccctaaccctggaattttagcaaccagccggcggtttttggggcagggttctccaggcggcatgggcaagcagggcggtctccccggtgaccgcaagccgggcgacggtgccgccggcgacaagaaggacaagaagttcgagccccccgccgcaccgtcgcgcgtggggcgcaagcagcggaaacagaggggccccgaggcggcggcgcggctgccccccgtggcgccgctctccaagtgccgtctccgtcttctcaagctggaccgcgtcaaggactaccttc

SEQ ID NO: 440089 - DNA, 358 bp, Triticum aestivum; identical to SEQ ID NO: 435620

SEQ ID NO: 440090 - DNA, 185 bp, Triticum aestivum
ggttcgagaaggaagccgctgacatgaacaagaggtccttcaagtatgcctgggtgcttgacaagctcaaggctgagcgtgagaggggtatcaccatagatattgctctgtggaagttcgagaccaccaagtactcgtgcactgtcattgatgctcctggtcaccgtgatttcatcaagaacatg

SEQ ID NO: 440091 - DNA, 255 bp, Triticum aestivum
gtccgtccatcttctgatcgtctacccgctcgctttctctttccctgcgagcagcccaggccggaggcatgtcggccaagaagatcgtggtgaagctggagctccatgacaacaaggacaagcagaaggccatgaaagccgtctccgttctcgtcggcatcgatgccatatccatggacctggcgtcgcgcaagatgacggtgatcggcacggtggacccggtgcacgtggtgagcaagctgcgcaagggctggg

SEQ ID NO: 440092 - DNA, 328 bp, Triticum aestivum
ttctttctctctcccaacccaaaccctaaccctggaatcgaagcaaccagccggcggcgatggggcagggttctccaggcggcatgggcaagcagggcggtctccccggtgaccgcaagccgggcgacggtgccgccggcgacaagaaggacaagaagttcgagccccccgccgcaccgtcgcgcgtggggcgcaagcagcggaaacagaggggccccgaggcggcggcgcggctgccccccgtggcgccgctctccaagtgccgcctccgccttctcaagctggaccgcgtcaaggactaccttctcatggaggaggagttcgtcgc

SEQ ID NO: 440093 - DNA, 287 bp, Triticum aestivum
ttgacgcgtgggcgacccacgcgtccgccacgcgtccggattcattcaaggcactcagcgacgaggggatgccgatgtaccagaggcctttcatgaagggcaagctctacattcatttcacggtggagtttcccgactcgctggcaccggatcagtgcaaggctctcgaggctgtgcttccaccaaagcctgcatccaagctgaccgacatggagctcgatgaatgcgaggagacgacaatgcatgacgtcaacatggaggaggagatgcgtcggaaagcccatgct

SEQ ID NO: 440094 - DNA, 200 bp, Triticum aestivum
ggaagagccctttggttaatgcatggattttattaagccaatggtggctgtggctacgcgaagaaaccggatttcttgatgcagtctgagccggaagtttttgatccaaaaaagcctcaacctgttaagaagaccttgaaggtaaaagtgcacatgggtgatggctggcggatggacttcaagcagacacactttgacca

SEQ ID NO: 440095 - DNA, 333 bp, Triticum aestivum
ttgtcatgcgtccgggggcatttgagaaagagggtgagatgaacgtatttgttcgagtaagcaaatctattgtaaacacattatctaagcactggacaacaactagagaagctgaatttcttgcttcaacaattgtttcatcccttgctgagaaacgtcaaaaacatgagaaattccttcaatttcttgtcttgtccaagtgccatgaagaactatcttcaaaacaaagagctgcaatgctaagtgtcatggaacatggagaaaagctctctggaatgatccatcttagagaattacaaaatgcccttagccagcagagttcaagcacacgtt

SEQ ID NO: 440096 - DNA, 201 bp, Triticum aestivum
cacgcgtccgcccacgcgtccgtagactgtgtgcacatatccaaacagcctgcattcgatcatcctctcctcaagaaccatactattcagatgcggccttcttacaacccaagaggcatgcatcatgactccaacatcacagcccatgcaatcactcaaatatggcatcaaaatggcacgtgccctaagaacaccatacca

SEQ ID NO: 440097 - DNA, 327 bp, Triticum aestivum
cgcgcccgcaccccaggaaggtaagctcaagaggctgtcctgagaagctcaaatggctcccaaagttgctgttgccaagaagggcgatgccaaggcccaggctgccaaggttgccaaggctgtgaagtccgggtcaatcaagaagaccgcaaagaagatccgcacgtctgtgacatttcaccgtcccaagaccctgtccaaggccagggaccccaagtaccccaggatcagcacccctggcaggaacaagttagaccagtaccagatactcaagtacccgcttaccactgagtctgcgatgaagaagattgaagacaacaacaccct

SEQ ID NO: 440098 - DNA, 332 bp, Triticum aestivum
ttttcgcgtccgcacaagcacactgcaccatggcgctcaccgtcaagagcaccgacgaccaggccgtgctggacgccgagcacgagctctgggcgaccacattctcctacatcaagtccatggcgctcaagtcggcccttgacctccgcctcgccgacgccatccaccaccacggcggcgccgccaccctccctcagatagccgccagggtcgcggtgcacccgtccaagatcccctgcctgcgccgtctcatgcgcacgctcaccgtctcgggcgtcttcagcgtcgtccagcagcaggacgtcgtcgttcctgctgcccccgtgagcaac

SEQ ID NO: 440099 - DNA, 313 bp, Triticum aestivum
ataaaaccagaatatcagaatgaaacatcatggctgcttgcgcaaaaggagctacagaagataaacatgtataaggctccaagggataagcttgcttgcatcctgaactgttgtaaagtcatcaataacttacttatgaatgcttctcatatgtcacatgataacccccctggagctgacgaatttcttccagtcctcatctatgtcaccataaaggctaatcctccgcagttacactcaaatcttttatacatacaaagatacaggtgccaatcacgactggtgtcagaggctcaatatttttttacaaacc

SEQ ID NO: 440100 - DNA, 268 bp, Triticum aestivum
ttttctcgtccgcccacgcgtccgttctccacctactcggacaaccagcctggtgtgctcatccaggtgtacgagggtgagaggaccaggacccgtgacaacaacctccttggcaagttcgagctgtccggcatccctcctgcacccaggggagttccccagatcactgtctgctttgacattgatgccaatggtatcctgaacgtgtctgccgaggacaagacgactgggcagaagaacaagatcaccatcaccaacgacaagggca

SEQ ID NO: 440101 - DNA, 294 bp, Triticum aestivum
gaatactttgataatactctgttggagtacctagtcagtgaatacaaaagatctgataatattgatctgtcaaaagacagactagctctgcaaaggttgcgtgaagcagctgagaaggcaaaaattgaactctcatcaactgcacagactgagatcaaccttccttttatcacggctgatgctgctggagcaaaacatttgaatataacattgacaagatcaaagtttgaaagtttggtgaatggtctcattgcaaggactagagacccatgcaagaattgtttgaaggatgct

SEQ ID NO: 440102 - DNA, 300 bp, Triticum aestivum
  unsure (1)..(300): unsure at all n locations
tgtttccacgcgtccgcctanctgtccgcacaagctagccacagctcgaccggcacgtttcagctagctaggccaggacaatcaacagcgaagatggcctccctcaccgtctcgcagacgacaccggcggccggcaacgccaacaagcagcgcgagggcgcggagatcatcaccggcgctgaggcgtgctacgagcactccaaggagctcctcaaggggctggggttcccgggcggggtgatgccgctgcgcgggctggaagagtgcgggctggtgcgggagaccgggtacgtgtggatg

SEQ ID NO: 440103 - DNA, 326 bp, Triticum aestivum
cacaagctagccacagctcgaccagcacgtttcagctagctaggccaggacaatcaacagcgaagatggcctccctcaccgtctcgcagacgacaccggcggccggcaacgccaacaagcagcgcgagggcgcggagatcatcaccggcgctgaggcgtgctacgagcactccaaggagctcctcaaggggctggggttcccgggcggagtgatgccgctgcgcgggctggaagagtgcgggctggtgcgggagaccgggtacgtgtggatgcggcagggaaagccctacgagcaccactttcgcgccacgggcacccgggtgcgc

SEQ ID NO: 440104 - DNA, 181 bp, Triticum aestivum
tctctcatcaccagcttcacaccgtgcctcagctggctcaccaacagcaccaacggcggggggtcgtcgccgacggcggactgctgccggtccctgtcggcggtggtgaccacgagcaccagctgcgcctgcctcatcctgaccggcaacgtgccgctcggcctgcccatcaaccggaccc

SEQ ID NO: 440105 - DNA, 285 bp, Triticum aestivum
ttcttgtgttgcggtgatcagctggttggctctgccagctatgttcaccatcttcaacttctgtgctcagaaggacgtgtccaactggggcctgttcttctgtgtggcagttggtctgtgggctggtctgattattgggtttgtgaccgaatactacactagcaatgcctacagccctgtgcaagatgttgccgattcctgcagaactggtgctgccaccaacgtcatcttcggtcttgcccttggttacaagtcagtcatcatcccaattttcggtattgctgt

SEQ ID NO: 440106 - DNA, 362 bp, Triticum aestivum
ttggaactggctctggccttggctcgcttctcctggagcgcctctctgttgactatggaaagaagtccaagcttgggttcacggtgtacccatctccccaggtctccacctctgttgttgagccatacaacagtgtcctgtccacccactcactccttgagcacactgatgtctctatccttcttgacaatgaggccatctatgacatctgccgccgctcccttgacattgagcgcccaacatacaccaacctcaacaggcttgtttctcaggtcatttcatcactgacagcttccctgaggtttgatggcgctctgaatgttgatgtcaatgaattccagaccaacttggtgccctacccg

SEQ ID NO: 440107 - DNA, 440 bp, Triticum aestivum
cttcgcgtccgcccccctcgtctcccctcctcactcctctagccgccgccgccgccgtcgcccgcgaagaagcccctgccaccggagatctcccgacctctcccctcgccgcccgcccggagatctcccggactgtccctccgccatcatgggtaagacacgtggtatgggagccgggcgcaagctcaagacccaccgcaggaaccagaggtgggctgacaaggcatacaagaagagccacttgggcaatgagtggaagaaacccttcgctggatcgtctcacgccaagggcattgttttggagaagatcggtattgaggccaagcagcctaactctgccatccgtaagtgtgctcgtgtccagctggtgaagaacgggaagaagatcgctgcctttgtgcccaatgatggttgcctgaacttcatcgaggaaaacgacg

SEQ ID NO: 440108 - DNA, 362 bp, Triticum aestivum
ttttcggatggggctacgactcgctcaagaacttccgcgagatctcccccgccgtgcagtcccacctcaagctcgtttacctgaccctatgctttgccctggcctcatctgccgtgggtgcttacctgcacattgccctgaacatcggtgggatgctgacaatgcttgcgtgtatcggaaccattgcctggatgttctctgtgccagtctatgaggagaggaagaggtttgggctgctgatgggtgcagccctcctggaaggggcttcggttggacctctgattgagcttgccatagactttgacccaagcatcctcgtgacagggtttgttggaaccgccatcgcctttgggtgcttctct

SEQ ID NO: 440109 - DNA, 496 bp, Triticum aestivum
tttctcgtccgctttcagcgaaatctgttgttctgaacttcatttgtcagctgattatatttctgtacctgcttgacaatgatacatcatggatgattcttgctagctctggagttggtgtgtgcattgaattctggaagataggaaaagcgatgcatgttgagattgacagaagtggaaagattcccatgttgagattccgggatcgtgagtcatatgcacagaataagaccaaggagtatgatgcgcttgcgatgaagtatcttacatatgtccttctagtccttatggctggttttgctatctattcactcaagtatgataaacacaagagctggtactcgtggatactctcttccctcacaagttgtgtttacatgtttggtttcattatgatgtgcccacaattatttatcaactacaagctgaagtccgttgctcacatgccatggagacaaatgacctacaagttcctcaacactataattgatgatct

SEQ ID NO: 440110 - DNA, 430 bp, Triticum aestivum
cttacgcgtccgcacgggcccacgatacacgtgcggctcaggttctgcgacgtcgccgccaatccccgcgagtggggcgcgggcctcggcggcgcgcggcaccccggcgtgccgtacaccttcttctcccagcggcccgggtgcagggtcaccctgtaccaggacgcgcacaccccggacgcgttcgcgcccaggatcccgctctccggcggtcggacctaccagcagggccggtgctgggaggacgtgttcgacgccatcagtgacgcgcgccacctgatatacgtcaccggctggtcggtgtacaccgagatcacgctgatacgggacggctcccggccgcgccccggcggcgacgccaccctcggcgagctcctcaagcgcaaggccagcgagggcgtgcgcgtgctcatgctggtctgggatgacc

SEQ ID NO: 440111 - DNA, 307 bp, Triticum aestivum
ttttgcgtccgcatggtctcactatgctcctgctgggaacctataccctgctcctcaaccctcttcgcggggcggggcggcgcggcacagcacagcggagccggcggagatgtcgggagtgacggtggacgaggacaagaagcccgcggacgacggtggaggcgcccacattaacctaaaggtcaaggggcaggatggcaatgaggttttcttgcgcatcaagagatccacacagctgaagaagctgatgaacgcttactgcgaccgccagtctgtggatctcaactccattgctttcctttttgat

SEQ ID NO: 440112 - DNA, 472 bp, Triticum aestivum
ctttcgcgtccgcatcttcttcctctgctcctgctgggatcctataccctgctcctcaacccccttcgcggcgcggcgcggcgcggcacagcacagaggagtcggcggagatgtcgggagtgacggcggacgaggacaagaagcccgcgggcgacggtggaggcgcccacatcaacctcaaggtcaaggggcaggatggcaatgaggttttcttccgcatcaagagatccacacagctgaagaagctgatgaacgcttactgcgaccgtcagtctgtggatctcaactccattgctttcctttttgatggtcgtaggctccgtggtgagcagacccctgatgagcttgagatggaggaaggcgacgagatcgacgccatgcttcaccagaccggagggtgctttcctggcccttagaaggagcttgctgcagcctggctgttctatgtcgtatgctacctttagaactagag

SEQ ID NO: 440113 - DNA, 462 bp, Triticum aestivum
atgtactacctcctctttcctactgggtaggtggaggaaatcgcctactcgcaaatctgggcggcttcagatgccttcactcgcgtcggaggtgctgacaaaaattgcccggagctggcgcgcgtgtgcacgtgggtggtggggctgtgctgggcccagccatggactacatggccatggacagaagctgaactgatgatgaccttcgaccaccatatgctaataatgcgcataataggagtataacaggcagcggacgtgccagtggtaatggcagagctattgctcctgtcagtggtaatggaaggggcattgctcctgccagctcgtaccctagagcccagaccgatatggaaacacaaattcaacagcttgagcaagaagcgtattgtgcagttctgcgtgcttttaaagctgagtctgatgccctcacatgggagaaggagggtctgattactgaac

SEQ ID NO: 440114 - DNA, 429 bp, Triticum aestivum
tgtcagatataaatgtgcccgcggcgcatgtggcacttcaccagtggcaaccaaatactccagatggtcaagggacacctttcctttttcatcatggtagaaatgctgcaagttcaacaagtggtgcattcatgcgtatgttcaaaggatccactagttctggagaagattatgagttcccaagagctatagcgtttgctgcttcggcaatccgtagttcagctattgttgctgtcacttgtgacaaagacatcatcactggtgggcatgcggactgttcggtgaagttgatctccccagacggagcaaggacaattgaaagtgcttctgggcatcttgctccagtaacctgccttgcactttcccctgatagcaactaccttgtgacaggctctcgagatactacagttatactctggaggattcatc

SEQ ID NO: 440115 - DNA, 283 bp, Triticum aestivum
tttacgcgtccgcacgggcccacgatgcacgtgcgggtcaggtactgcgacgtcgccgacaatccccgcgagtggggcgcgggcctcggaggcacgcggcaccccggcgtgccgtacaccttattgtcccagcggaccggatgcagggtcaccctgtaccaggacgcgcacaccccggacgcgttcgcgcccaggatcccgctctggggcggtcggacctaccaagatggacagagctgggaggacttgttagacgccactagtgacgcgcgccacctgatat

SEQ ID NO: 440116 - DNA, 389 bp, Triticum aestivum
cttacgcgtccgcatcttcttcctctgctcctgctcggatcccataccctgctcctcaacccccttcgcggcgcggcgcggcgcggcacagcacagaggagtcggcggagatgtcgggagtgacggcggacgaggacaagaagcccgcgggcgacggtggaggcgcccacatcaacctcaaggtcaaggggcaggatggcaatgaggttttcttccgcatcaagagatccacacagctgaagaagctgatgaacgcttactgcgaccgtcagtctgtggatctcaactccattgctttcctttttgatggtcgtaggctccgtggtgagcagacccctgatgagcttgagatggaggaaggcgacgagatcgacgccatgcttcaccag

SEQ ID NO: 440117 - DNA, 456 bp, Triticum aestivum
ctttaccggaggaggaggagagcggcggccaagatggtgtcgctgaagctgcagaagcgcctggcctcgagcgtcctcaagtgcggcaagggcaaggtctggctcgaccccaatgaggtcaacgagatctccatggccaactcccggcagaacatccggaagctggtgaaggatggtttcatcatcaggaagcctcagaagatccactccaggtctcgtgcaaggagggcacatgaggccaagcagaagggccgtcactctggatatggtaagcgtaggggtaccagggaggctaggctccccaccaagatcctgtggatgcggaggatgcgtgtcctgaggcgccttctgcgcaagtaccgtgaggccaagaagatcgacaagcacatgtaccatgacatgtacctgaaggtcaagggtaacatgttcaagaacaagagggtcctcatggagagt

SEQ ID NO: 440118 - DNA, 403 bp, Triticum aestivum
ctttgcgtccgggcagtcttggcaaagtatatacgccaacccgctcgatccctgcactccgtatgctacctgtgggccattcacggtctgtactggtaattcacatccttactgtgactgtatggagggattctctcagaagtcaccacagggttgggaccttgatgatcgaacaggagggtgcatcagaaatactccattgcagtgcactagcaagaagaacacgataaattcaacggacaagttccaccccattgctcgtgttacattgacctatgaaccccgaagcatgggcaatgctaccactcagagcgaatgcgcagaaactcgtctcggatcctgctcctgcactgcttacacctataacagtagcgggtgctctatctggcatggggaattgctt

SEQ ID NO: 440119 - DNA, 484 bp, Triticum aestivum
tgtctctccggccaaatcaatccacccgccggcggcgagcacggagacagaggggtaggagccgacagccgaggcagtccaccaccgcgccatggcgccgcccccgagcaccagcgcccccgacggcggcctggatcccagggacgtgtgcgtcgtcggcgtcgcccgcacgcccatcggcgccctgctcggctccctctcctccctccccgccaccaggctcggctccgtcgccatccagggtgctctccggcgagccagcgtcgacccggcgctggtgcaggaggtgttcatgggcaacgtcctcagcgccaacctcggccaggcccccgccaggcaggccgccctcggcgccggcctgcccaacaccgtcccctgcaccaccgtcaacaaagtctgctcctcggggatgaaggctgtcatgcttgctgtgcagtcgattcagctggggatcaacgacgtcgtggtcgccggcggcatggag

SEQ ID NO: 440120 - DNA, 457 bp, Triticum aestivum
cttacgcgtccgctcacctcctggtccttctaccgggcggggatcgccgagttcctggccaccttcctcttcctctacatctcggtgctcaccgtgatgggcgtggtgggcaacccgtccgggtccaagtgcggcacggtcggcatccagggcatcgcctggagcttcggcggcatgatcttcgtgctcgtctactgcaccgccggcatctccggcggccacatcaaccccgcggtcaccttcgggctgttcctggccaggaagctgtcgctcaccagggccgtgttctacatcgtgatgcagtgcctgggcgccatatgcggcgccggcgtggtgaaggggttccagaccacgctgtaccagggcaacggcggcggcgccaactccgtcgcgcccgggtacaccaagggggacgggctcggcgccgagatcgtcggcacgttcgtgctggtgtaca

SEQ ID NO: 440121 - DNA, 320 bp, Triticum aestivum
acgtttgcgtccgggcagtcttggcaaagtatatacgccaacccgctcgatccctgcactccgtatgctacctgtgggccattcacggtctgtactggtaattcacatccttactgtgactgtatggagggattctctcagaagtcaccacatggttgggaccttgatgatcgaacaggagggtgcatcagaaatactccattgcagtgcactagcaagaagaacacgataaattcaacggacaagttccaccccattgctcgtgttacattgacctatgaaccccgaagcatgggcaatgctaccactcagagcgaatg

SEQ ID NO: 440122 - DNA, 450 bp, Triticum aestivum
gttgtcttcgtactcgcctctctccgcgcaaccgagccttccgcccacctcctccccatttcgccagcggcgcacccaccaaccacccccacccgccgccatgagggagtgcatctcgatccacatcggccaggccggcatccaggtcgggaacgcgtgctgggagctgtactgcctcgagcatggcattcagcctgatggccagatgcccggtgacaagaccgttgggggaggtgatgatgctttcaacaccttcttcagcgagactggggctgggaagcacgtcccccgtgctgtcttcgtagatctcgagcccactgtgattgatgaggtgaggactggcgcttaccgccagctcttccaccctgagcagcttatcagtggcaaggaggatgcagccaacaacttcgcccgtggtcattacaccattggcaaggagattgttgatct

SEQ ID NO: 440123 - DNA, 385 bp, Triticum aestivum
ctacgcgtccgcccacgcgtccgatcggatcggggaaaaggcctccacgagctctcgtctggactgccgccgccgcccgagatggcgatccgccgtgggccctcctgcgccgccctcgccctgctcgcgctggcctccgtcgccgcggtctccgccgacgtcttcttccaggagaagttctaagatggttgggaaagccggtgggtcaagtctgagtggaagaaggatgagaacatggctggtgaatggaaccacacatctggaaaatggcatggagatgctgaggacaaaggtatccaaacctcagaggactacaggttctacgccatctcggcggagtaccctgagttcagcaccaaggacaagacacttgtgctgcagttca

SEQ ID NO: 440124 - DNA, 446 bp, Triticum aestivum
tttacgcgtccggtccgattcgaaatactgcttgcccagctagggttttgctgcctccgccgccgcctcccggcagcgtcgtccccccatggcgctgccgaaccagaacaccgtcgattaccccagcttcaagctcgtcatcgtcggcgatggcgggactggcaaaaccacttttgtgaagaggcatctcactggagagtttgagaagaaatatgagcccactattggtgttgaagttcacccattggatttcaccactaactgtggaaagatccgtttctactgctgggacactgctgggcaagagaagtttggtggccttagggatggatactatatccatggtcagtgtgcgataatcatgtttgatgtcacttcaaggctgacatacaagaatgttcctacgtggcacagggacttgcgcagggtgtgtgagaacatcccca

SEQ ID NO: 440125 - DNA, 421 bp, Triticum aestivum
tttcacgcgtccggagccgagctcctcgcgattcccaatccccgcacgcctcctcgccctcctcctccggccccgccgccgccgccgcctcgccacaggctcacggttattcaagatggaacacaaggaggcgggttgccagcagccggagggcccaatcctatgcgttaataactgtggcttctttggcagtgcggcgaccatgaacatgtgctccaagtgccacaaggagatggtcatgaagcaggaacaggccaagctggctgcctcctccttcgatagcatcgtcaacggtggcgacggtgggaaagcacctgttgttgcggctgtagccgcgagcgcagaggtggtggttgctcaagttgacgtgaaggcgctcgttgtgcagcctgctgctgatgttgcaggcaccagcgaagct

SEQ ID NO: 440126 - DNA, 462 bp, Triticum aestivum
tctaccgcaagcgccctccgaaccaaatcgaacaaccgagagaagccatggagcgacttcagcggatcttcggcgccggcgggatgggccagccgccgtcggactcgccgttgctcgactcctccgagcaggtctacatctcctccctcgccctcctcaagatgctcaagcacgggagggccggcgtgccgatggaggtcatgggcctcatgctcggcgagttcgtcgacgactacacggtccgggtggtcgacgtcttcgccatgccgcagagcgggacgggggtcagtgtcgaggccgtcgaccacgtcttccagaccaatatgctcgacatgctcaagcagaccggcaggccagaaatggtggtagggtggtatcactctcatcctggctttggctgctggctatcgggtgttgatatcaatactcaacagagtttcgaagctttgaaccccagggcag

SEQ ID NO: 440127 - DNA, 418 bp, Triticum aestivum
ttttcgcgtccggtggagaagtgcctgagggatgccaagatggacaagagcactatccatgatgttgcgcttgttggtggttccaccagaatccccagagttcagcagctgctgcaggacttcttcaacgggaaggagctctgcaagagcatcaaccctgatgaagctgttgcctacggtgctgccgtccaggctgcaatccagcggtgaggggaacgagaaggaacaccaccatccccaccaagaaggagcaggtcttctccacctactccgacaaccagcctggtgtgctcatccaggtgtttgagggtgagaggacaaggaccagggacaacaacctgctcggcaagtttgagctctctggcatcccgcctgcgcccaggggtgttccccagatcactgtctgcttcgacattga

SEQ ID NO: 440128 - DNA, 399 bp, Triticum aestivum
ctgtcgcgtgggtgacaagcgtgtgatcgagaggttcgagaaggaagccgccgagatgaacaagaggtctttcaagtacgcctgggtgcttgacaagctgaaggccgagcgtgagaggggtatcaccattgatattgccctgtggaagttcgagaccaccaagtactactgcaccgtcattgatgctcctggtcaccgtgacttcatcaagaacatgattactggtacctcccaggctgactgtgctgtgctcatcattgactccaccactggtggttttgaggctggtatctccaaggatggccagacccgtgagcatgccctccttgctttcactcttggagtgaagcagatgatctgctgctgtaacaagatggacgccaccactcccaagtactc

SEQ ID NO: 440129 - DNA, 351 bp, Triticum aestivum
attacgcgtccgagccaggctcgctccccccgtcgcgccccagcttcccagcaccatccagatccgcgcctgctgccatggccgacccaggagacgagcagcgcgcgggcctgctcgccgcggcgtacctcttccccgtgcccgacggcgcgaccttctcctacgggacggtgggattccgtgccgacgggagcaccatggcccccgcggtgtgccgcgccggaatcgtggcagcgctgcgctccgtgaagctgggcggcgccgccgtcgggctggtcatcacggcgtcgcacaaccccgtcggcgacaacggcgtcaagatcgtggacgccgacggcggcatgatgtcgc

SEQ ID NO: 440130 - DNA, 427 bp, Triticum aestivum
tgtgacagttgattctggaaagcccaaggacgaagcagttgcggacatggacgatgtcgctgcatgctttgagttctatgctggtctggctgaagccttagatggtaaacaacatgcgccaatctctctgcccatggaagaattcaagacctatgttcttaaagaacccatcggggtttttggactcatcactccctggaactatcctctgttgatggctacttggaaggttgcacctgccctggctgctgggtgtacagctgtgttaaaaccatctgagctggcttctctaacttgcttagagctcggcgcaatatgtgaagaggtaggactgccttcaggagttctgaacataattactggtctgggccctgatgctggtgctccaatagcttcacatccccatgtggataagattgcttttaca

SEQ ID NO: 440131 - DNA, 387 bp, Triticum aestivum
gtggaggatgtcgggccgcggcaagggaggcaaggggctgggcaagggcggcgcgaagcgccaccggaaggtgctccgcgacaacatccagggcatcaccaagccggcgatccggcggctggcgcgcaggggcggcgtgaagcgcatctcggggctcatctacgaggagacccgcggcgtgctcaagatcttcctcgagaacgtcatccgcgacgccgtcacctacaccgagcacgcccgccgcaagaccgtcaccgccatggacgtcgtctacgcgctcaagcgccagggccgcaccctctacggcttcggaggctaggccgagggttcatcgatccagctcgcgacgccgccgtccgaccgagagtagtagtgctatctatctag

SEQ ID NO: 440132 - DNA, 537 bp, Triticum aestivum
tctttaatcaatttgctcaaactcgcccagttcgcggtcatagggtcgcgccaatatcccgacaaggatgccgccatcaccttcctcgaggggataatcacaaagcttcgtgagaccagggagctgcggatcaatgagcctatccttcacgtcaagatgcagatcgcggcaattcacctcgacaaagggaaccacaaggagtgcaagaacctgctggaggaagggaagaccaccctggatggcatgactgatgtggatccaacagtccacgctagcttctactgtatatcgtctcagtaccataagtcgctccaagagtttgctgagttctataagaacgcacttctctatctggcctacacaaccgtagggtccctctcagagtcattcaagctggacttggcatttgacctttcccttgcagccttgctgggggacaacatctacaacttcggggaattgttagctcaccctattatcaatagtcttattgggaccaaggtggagtgggtctatcacatgttacaagcgttcaac

SEQ ID NO: 440133 - DNA, 411 bp, Triticum aestivum
gttaggttgcacctgccctggctgctgggtgtacagctgtgttaaaaccatctgagctggcttctctaacttgcttagagctcggcgcaatatgtgaagagataggactgccttcaggagttctgaacataattactggtctgggccctgatgctggtgctccaatagcttcacatccccatgtggataagattgcttttacaggaagtaccgcaactggtaagacgataatgaccgctgctgcccaaatggttaagcctgtttcattagagcttggtggcaaaagtcctcttgttatctttgatgatgttgctgacattgacaaagctgttgaatgggccgtgtttggttgttttttcaatagtggtcaagtttgcagtgcaacttctcgtctacttctccatgagaaaa

SEQ ID NO: 440134 - DNA, 408 bp, Triticum aestivum
gttttctcctcctaaaccactctccctatccccgtgtccagaagctaccccccggctccaatggcggcgaaggaaccgatgcgcgtgctcgtcaccggcgccgcaggacaaatcggatatgctcttgttcccatgattgccaggggagttatgcttggtgcagaccagcctgttattctgcatatgctggatattgaatttgctgctgaagctcttaaaggtgtcaagatggagttgattgatgccgcatttccacttctcaagggagttgttgcaacaactgatgttgttgaggcctgcactggtgtgaatgttgcggctatggttggtggattccccaggaaggaaggaatggaaaggaaggatgttatgacgaaaaatgtttcaatctacaaagctcaagcatct

SEQ ID NO: 440135 - DNA, 388 bp, Triticum aestivum
ttcttggtgactacttaggcgtcaaggtgcatgcttgtgttggtggaacttctgttcgtgaggaccaaaggattcttgccagtggggtgcatgttgttgttggcacacctggtcgtgtgtttgatatgttgcgcaggcaatccctccgcccagataacatcaagatgtttgtgttggatgaagctgatgagatgctttcacgtggtttcaaggatcagatctatgatatcttccagcttcttccatcaaagattcaggttggggtgttctctgctaccatgcctcctgaggcccttgagattacccgcaagttcatgaacaagcccgtgaggattctcgtcaagagagatgagcttacccttgagggtatcaagcagttctatgtcaa

SEQ ID NO: 440136 - DNA, 184 bp, Triticum aestivum
tatcatagcactctggacattgcccaccgtgaggcccctaaagggttcctacagctattttctgcactcaacccaatgccctgtcagcttcgatgtatgcagtatgcacccagaagaaatatctctccagagtggcctcctatggagcgggcgctctctttggattgcttgatccttcgagcta

SEQ ID NO: 440137 - DNA, 361 bp, Triticum aestivum
gtctaccttgcctccagcttctctgagggtgttcgtgctcgcaacatctgcccttctgtgccatcctatgagaggcgcttcaccacaagcagctacatgactcagaaccttggcatcagtgtcccaatgatgtcatcttctccattgattgccaatgcaccccctgagaagaaaggtgtcaagaactttgcgattgacttcctcatgggaggagtgtcagctgcagtttccaagactgctgcagctcctattgagcgtgttaagctgcttatccagaaccaggatgagatgatcaaggctggcaggctctctgagccatacaagggtattggtgactgctttgggcgcaccatcaaggatg

SEQ ID NO: 440138 - DNA, 387 bp, Triticum aestivum
ttttacgcgtgggcggacgcgtggggcttccagtatgtcctggctcatttggacggcaggcagctgctcatcaagtccaaccctggcgaagtggtcaagcctgattcattcaaggcgatcaacgatgagggcatgcccatgtaccagaggccgttcatgaagggcaagctgtacatccacttcacggtggatttccccgactcgctgaacctggaccagtgcaaggcgctcgagactgtcctcccgcccaagccggcgtcgcagtacacggacatggagctggacgagtgcgaggagacgatggcctatgacatcgacattgaggaggagatgcggaggcggcaacagcagcaggcacaggaggcctacgacgaggatgaggacatg

SEQ ID NO: 440139 - DNA, 131 bp, Triticum aestivum
gtttaccttggctccagattatctgagggtgttcgtgctagcaacatctgccgttctgtgccatcctatgagaggcgcttcaccacaagcagcttcatgactcagaaccttggcataagtgtcccaatgat

SEQ ID NO: 440140 - DNA, 372 bp, Triticum aestivum
gttacgcgtccggaaaatcaacaagatcaagtggggccaaacagccaacaatgctctctttatcttgtctacaaatgacaaaacaatcaagtactggaaggtgcaagacaaaaaagtgaaacggatttcagtaatgaatttggatacttcccagagtgcagacaatgggacaacttctagttcgagtaccaatagctctagaggtcttcctaatggaggatcctcagaaaagtcatacaattgtgcaaacaatgatctgccattccctcctgggggatatgcatcattgcgtttgcctgtggttacaggccaagagttaaaccctgtcgctagatgaccgcgtgtatatgcacacgcccatgattaccatat

SEQ ID NO: 440141 - DNA, 318 bp, Triticum aestivum
tccacgcgtccgccacgcgtccgcaagttgggtgacaaaggttactacatccagccaacaattttctcagatgtgcaggatggcatgaaaattgcccaagaggagatatttgggcctgttcagtcaatcttcaagttcaatgacctcaacgaggtgatcaagagggcgaacgcaagccagtacggattggctgccggtgttttcaccaacaacctggacacggccaacaccttgacgcgtgccctcagggccggcacggtctgggtgaattgctttgacatcttcgacgcggcgatccccttcggcgggtacaagatg

SEQ ID NO: 440142 - DNA, 220 bp, Triticum aestivum
tttgacgcgtgggggacgcgtggggtccatgtcatgcccgcacgtgagtggcataggcgagctgcttcggcaggcgaggccggagtggaaccccgccatgatcaagtatggcctgatgaccaccgcgtacaacatggacagcgccggtggtgtcatccgcgacatgtgcaccggccaagtgatcacgctattcgcacgaggggctagacacgtgcacccc

SEQ ID NO: 440143 - DNA, 425 bp, Triticum aestivum
tttttccctctccctcctgctgctgacaagatgaaaatggctggctctgctgtgctgctcatttcgctcctgtcggctgtcgcccccctaccctctgaagccctcaacgtgagaggccatctgctgaaatcaaagacgttccgttctccgcccatcttattgggacctggatcagtctcaaacaagtaccaccatgatgtcgacttcccccgaggccaccttgcagtcaagagctttgatgcagaggtcgtcgatgagaatggcgtccctgtcccgctccatgagacttacctgcatcactgggttgcagaaccatactatgctctgaagaacagtcagagccccgatacgcaaaatcttccaaaagggatgcttaaaaggaatgatggagtgtgcaagaccacactaggccagtactttgggct

SEQ ID NO: 440144 - DNA, 456 bp, Triticum aestivum
ttctcacgcgtccgggaacgcccacgagcaatggatgcgagacaggggtacatgattcggttcgacggccacttcgagttcgaggacccgtcgaccgccgagccgccgccgcctccgttcgcggccagggcgatctcgtctgagcaggagcatacccccatggtcgccgcgctgctgcacgtcatctcagggtataccacgccggtgccggacttcttcttcccagcgagcaaggaggtgtgcacggcgtgcgggatggatgggtgcctcgggtgcgagttcttcggcgcgggggccaggccggcgatcgcaccgaaggcgacggtgggcgggccgcagaggaggcggagaaacaaaaagacccagtaccgcggcatcaggcagcgaccgtggggcaagtgggcggcggagatccgcgacccgcgccgcgccgtgcgggtgtgactcgggaccttc

SEQ ID NO: 440145 - DNA, 270 bp, Triticum aestivum
tgttttcctccgcctccccgtctcgctcgctcccacctctcgccgccgccgccgccgtccgcgcagccgcaaaatgccgttcaagaggttcgtggagatcgggcgggtggccctggtgaactacggcaaggactacggccgcctcgtcgtcatcgtcgacgttgttgaccagaacagggcacttgttgatgctccggacatggttcgctgccagatgaacttcaagcggctctctctgaccgacatcaagattgacatcaagcggatccc

SEQ ID NO: 440146 - DNA, 266 bp, Triticum aestivum
ttttccacgcgtccgcccaaggatgtcaacgctgctgtggccaccataaagaccaagcgcactatccagtttgttgactggtgccccactggctccaagtgtggtatcaactaccagccacctggtgtcgtcccaggcggtgaccttgccaaggtccaaagggctgtgtgcatgatctccaactccaccagtgttgtctaggtcttttcccgcatcgaccacaagtttgacctgatgtacgccaagcgtgccttcgtccactggta

SEQ ID NO: 440147 - DNA, 251 bp, Triticum aestivum
ttcttccacgcgtccgcccaaggatgtcaacgctgctgtggtcaccatcaagaccaagcgcactatccagtttgttgactggtgccccactggcttcaagtgtggtatcaactaccagccacctggtgtcgtcccaggcggtgaccttgccaaggtccagagggctgtgtgcatgatctccaactccaccagtgttgtcgaggtcttttcccgcatcgaccacaagtttgacctgatgtacgccaagcgtg

SEQ ID NO: 440148 - DNA, 398 bp, Triticum aestivum
gcgattacacaccagcacgcggcacgcgcccgagacgctcgtacgggccggcgcaccctagccgggccgcgatgcccacggctaacgtgcgcgcggcgcagactagcgccgaccgcaggttaagtacgctggtgcgccacctgctggcttcttgcccacgaacatgagcagcgaccgccacctccgccgactcgctccaacctttccccaccatggcagtcgccctccgtcttcgccgggatcgcgcagggcccggaggaccccatcctcggggtgacggtcgcgtacaacaaggatcccagccccgtcaaggtcaacctcggcgtcggcgcctaccggaccgaggaagggaagcccctcgtgctgaatgtggtcaagcgcgccgagcagatgctgat

SEQ ID NO: 440149 - DNA, 319 bp, Triticum aestivum
tgcctcctctcttcgccgctcccgctccgccgccgcgccaccgccgtcagccatggcaccgaagaaggagaaggccccggcggcgtcgtcgaagccggccaagtcgggcggcgggaagcagaagaagaagaagtggagcaagggcaagcaaaaggagaaggtgaacaacgcggtgctcttcgaccaggccacctacgacaagctgctcaccgaggtgcccaagtacaagcagatcacgccctccgtcctctccgagcgcctcaggatcaacgggtcactggctcgcagggccatcaaggacctgatggagagggggctc

SEQ ID NO: 440150 - DNA, 418 bp, Triticum aestivum
tcccacgcgtccgcaccactgcactacactggtgcggtacagaggaagcagcagaggagcaacgcacgaacgagctggcggcatggcgaggccgtacatctccctgcacctctggctggccgtcctggccatggccgacgccgcgtccgaggccgggttctacgaccagttcgacgtggtcggctccggcaacaacgagcgcgtgaacgacgatggcctggcccagcaggtggcgctcacgctcgaccagggcaacggcggctccggctacagctccaaggacaagtacctctacggcgagatcagcgtccagatgaagctcatcggcggcaactccgccggcaccgacacctccttctacctgacgtatggggagggcgacagccatgacgagatcgacatcgagttcatgggcaac

SEQ ID NO: 440151 - DNA, 378 bp, Triticum aestivum
gttttgctgcctccctcccccaccgccgccgtcgccgcccgcgtccaccatggcgctgccgaaccagaacaccgtcgattaccccagcttcaagctcgtcatcgtcggcgatggcgggactggcaaaaccacatttgtgaagaggcatctcactggagagtttgagaagaaatacgaacccaccattggtgttgaagttcacccgttggatttcaccactaactgtggaaagatccgtttctactgctgggacactgctgggcaagagaagtttggtggccttagggatggatactatatccatggtcagtgtgcgattatcatgtttgatgtcacttcaaggctgacctacaagaatgttcctacgtggcacaggga

SEQ ID NO: 440152 - DNA, 277 bp, Triticum aestivum
  unsure (1)..(277): unsure at all n locations
tccttgttccattctcttcctccgggagcgccgccgcttcctcatctctcacctctcggctcgggagaccgaagcgaaaccccaaggaactatagtcccagtgtgacattcaaaagcagtcaagatggtgaagttcacagcggaggagctccgtggaattatggataaaaagaataatattcgcaacatgtctgttattgctcatgttgaccacggcaagtctacgcttacggattcccttgtggcagctgctgggattatcgcccangaagttgct

SEQ ID NO: 440153 - DNA, 400 bp, Triticum aestivum
tgtgcatagctggcaactatctctatgcgtggcggatggtctctgggctgggctagtcattggatttatcacagagtactacacaagcaatgcatacagacctgtgcaggatgttgctgattcctgcagaactggagctgcaaccaatgtcatctttggtcttgctctgggatacaaatcagctattatccctatcttcgccattgccttcagtattttcctcagcttcagccttgccgcgatgtatggtgttgctgtggctgctcttggaatgctcagcacaattgcgaccggtcttgccattgatgcctatggccctatcagtgacaacgctggaggcattgctgaaatggctggcatgagccacagaatacgtgaaagaactgatgctctggatgct

SEQ ID NO: 440154 - DNA, 342 bp, Triticum aestivum
gcgtccgcccacgcgtccgcccactgaacagttgcagaaccaaatggagcaagattatgatatcggatctaccatcagagacaagattattccacatgctgtttcatggttcactggagaggccgctcaagatgaggactttgacggcatcatggatgatgatgaagatgatgacgaagatgatgaggaggatgaagatgaggatgaggatgacgaggaagatgaagatgatgacgatggtgataagaagaagggtgggcgagttcctgcaggggaaggtcaggcaggggagcggcccgcggagtgcaagcaacagtgaggtccttcccagatgaagactat

SEQ ID NO: 440155 - DNA, 441 bp, Triticum aestivum
tgcggcagcaacagcaatagcagcaatacctgcagctgcagcccaccaccaaccgcgccacgccatttaccaccatataatcatcacccgcccccaggcttgtcgggagcgaagccaagccagtcttgtgttggaagaacgcctcaccatccatcagagcagctcggcttgcagatcgagagtgagggagtgagaggcaatggcgacttcgttccaggggacgaccaccaagtgcaacgcctgcgacagacggtgtacctcgtcgacaagctcaccgccgacaaccgggtctaccacaaggcctgcttcaggtgccaccactgcaagggcaccctcaagctcgcgaattacaactcgttcgaaggagtgctctactgcaggcctcactttgaccagctcttcaagaggaccgggagcctcgacaagagcttcgaaggcact

SEQ ID NO: 440156 - DNA, 327 bp, Triticum aestivum
ttacggaatacgggtggcgataaagcgggcgcagtccgggtcgatgcagggcgcgccggagttcaagaacgagatcgagctgctgtcccgggttcaccacaggaacctggtgagcctgatcggcttctgcttccagcaaggggagcagatgctggtttacgagttcgtcgccggtgggacgctgagggagaaccttgttgttagagggacgtacttgggctggaagaagaggctgaggatcgcgctcgggtcggcgagggggctggcgtaccttcatgagctcgccgacccgccgatcatccaccgcgatatcaagtccaccaacat

SEQ ID NO: 440157 - DNA, 319 bp, Triticum aestivum
tgcttaattaccctgacagacattgttaggtcttgtgttagtgaagctagctaggtaagaaaaaccatggcggcttcccgcgccttggctgcactgcttgctgtggtggtattcatggtctgctctccggcgcctcgtgttctcgccactgaccccacccagctccaggacttctgcgttgctgatataatgaaccctgtgattgtgaatgggttcgtgtgcaagaacatgaagatggtaacggcgaacgacttcttcttgcccgggcttaacaagccgggcatgttgaacgctcagggctcggcggtgacaccggtga

SEQ ID NO: 440158 - DNA, 427 bp, Triticum aestivum
tcttatccagtttccctcaacagtgagaacctgcaacttctgagacaaagatattattatgctacgtggaaagctgatggaacacgatacatgatgcttataatgcgggatggctgtttcttaatagaccgaaacttctgctttagaagagttcagatgcgttttcctattaggaatgttaacgatggtttccacaactttacattgatcgatggagaaatggttgtagacgccataccaggtggtggattgaagcggaggtacttagcgtatgatctaatggcaattaatttctcctccaaagtcaagttgcccttttctgacaggtggaagctacttgaggatgaaataattcgtccacgcatctatgagagaaagcagtttgaaactggtctgaaggcaatccatcatacagatatgacctgga

SEQ ID NO: 440159 - DNA, 376 bp, Triticum aestivum
tcttaggtttcagttctcctccgcctccggtctcgagagctcgccagaatggtcgcccacaggttccaccagtaccaggtggtgggtcgcgcgctgccgacccccggcgatgagcagcccaagatctaccgcatgaagctctgggccaccaatgaggtccgcgccaagtccaagttctggtacttcctgaggaagctcaagaaggtgaagaaggccaacggccagatgctcgccatcaacgagatctttgagaagaaccccaccaccatcaagaactacggcatctggctgaggtaccagagcaggaccggttaccacaacatgtacaaggagtaccgtgacacgaccctcaacggcggggtggagcagatgtaca

SEQ ID NO: 440160 - DNA, 350 bp, Triticum aestivum
tgcccgctcctcctccccgtccgtccccacacacacacgcacgcgtttgacattttccgcccaccaccgccggagggagctccagccatggccgccaagtgctacccgacggtcagcgacgagtacctggccgccgtcgccaaggccaagcgcaagctccgcggcttcatcgccgagaagaactgcgcgccccttatgctccgcctcgcgtggcactcggccgggaccttcgacgtggccaccaagaccggcgggcccttcggcaccatgaagtgccccgcggagctcgcgcacggcgccaacgccggcctcgacatcgccgtcaggctgctcgagcccatcaaggagca

SEQ ID NO: 440161 - DNA, 350 bp, Triticum aestivum
ttcagtttggtcgccttccgattcgaacctccccgaaatccgcagcagtcgacaggaggccaaaggcgccgccatggcccgtacgaagcagaccgcccgcaagtccaccggcggcaaggcgccccgcaagcagctcgccaccaaggcggcgaggaagtctgcgccgacgaccggcggagtgaagaagccccaccgctacaggcccgggaccgtggcgctccgggagatccgcaagtaccagaagagcacggagctgctgatccgcaagctgcctttccagcgcctggtccgcgagatcgcgcaggacttcaagacggacctcaggttccagagccacgccgtgctggccc

SEQ ID NO: 440162 - DNA, 378 bp, Triticum aestivum
tcgtacagaagccatcttgctccgttccagctcaggcgagcagcgaccaccttccggcgagggcagtgggcagcagcgatggagggcaaggaggaggacgtgcggctcggggcgaacaagtactcggagcgtcagcccatcggcacggcggcgcaggggtccgaggacaaggactacaaggagcccccgccggcgccgcttttcgagcccggcgagctcaagtcctggtccttctaccgcgccggcatcgccgagttcatggccaccttcctcttcctctacgtcaccatcctcaccgtgatggggtacagcggcgccgcctccaagtgcgccaccgtcggcatccagggcatcgcctggtccttcggcggcatgatc

SEQ ID NO: 440163 - DNA, 350 bp, Triticum aestivum
tcgttcgcgtggggttgtcaatgacaggattcttgtattccgctttacagatgttggcaaactcccaccaccagtgctgcagtttgctgatgtcacatttggttacactccggataatctcatctacaagaaccttgacttcggtgttgaccttgactcgagagttgcactggtcggtcccaatggggctggtaagagcacacttctgaagctcatgacaggtgacctatctccgttggatggcatggtcagacgccacaaccacctacgcattgtacaatttcatcaacatcttactgagaagctggacctggacatgcccgacctgcagtacatgatgagggagtacc

SEQ ID NO: 440164 - DNA, 372 bp, Triticum aestivum
tcgttgatcctgatcctccaggccgtcctggtcatggggatcctctcacacgtgaacgccgactatttccccaagtgctgcaacagttgcaggtccttctcgggggtcgacgtctgcgacgacgcccacccccagtgccccaagggctgctcggcctgccgcgtggtgacgcccagccctcacaagacgttccggtgcgccgacatgaagagcaccgtcgacggcacctgcggcgggccatgcaaaaagcactgatccgttcagggcttcaggctcagacgaggtgtgccgcctaaaataaagctcagatgagatgagcagtcatggtgcctatgcttgtgtgtgggtcgtgctatacggccaacagtatgt

SEQ ID NO: 440165 - DNA, 322 bp, Triticum aestivum
tcctacgcgtccgcccacgcgtccgatcttccccgataccaaagctcatcttcttctccttgaaatctttttgggttcacagatttggaggatgtcttgcaactgtggatccggttgcagctgcggctcagactgcaagtgcgggaagatgtaccctgatctgacggagcagggcagcgccgccgcccaggtcgccgccgtggtcgtcctcggcgtggcgcctgagaacaaggcggggcagttcgaggtggccgccgggcagtccggcgagggctgcagctgcggcgacaactgcaagtgcaacccctgcaactgttaagct

SEQ ID NO: 440166 - DNA, 436 bp, Triticum aestivum
ttcagcattactgagttattcagataacgtgaggggcaatggggtggatcaagcatcccatagtttaacagttgcaactcgtaatactttcggagagcttgatcaaagcgttcgaccagttgcacctcttcacttcttacagatgctgcggaaaaaatacccccaatttgctcaacagcaaaataatgtttacatgcagcacgacgcagaggagtgctggacacagctgatctatacgctttctcaaacacttacatcagaagcaagtgaacctactgctgctcagatgaaggaactcttcgggattgatcttgtgagcagggtacactgtgcaaaaagtggtgaggagagttcagaggcagagtcggtttattctctgaagtgccatatatctcatgatgtaaaccaccttcatgaaggactgaagcatggtttg

SEQ ID NO: 440167 - DNA, 391 bp, Triticum aestivum
tgtggaagagaaggtcttgttgacacagcggtcaaaacagcagaaactggatacatgtcccgtaggttaatgaagggtttggaagatctctcagttttctatgatcagacagtccgcaacgctagtggtggtatagttcaatttgtctatggagatgatggcatggatcctgtaaagatggaaggaaaaggtggcaatcccttgaatctggaccaattgtttatgaaagtcatggccacatgtcctcaaaggggacatgaaacattatctcctgagggaatctcacaaatgttaaatgataagctctccgaacaagacccctcagctggtggttgtagcgataggttcaaggaattgttaacaaaatttgtcgggaatcgcatcaaaatgc

SEQ ID NO: 440168 - DNA, 386 bp, Triticum aestivum
tctggatggtcatcgtcttgctactggctcttacagtaatttattccgtgtttttggttgtactcctggaaatactgaggcaaccactttagaagcaagcagaaaccctatgaggcgtcaggttgctaatccaacaaggcctacaagaaccctgacctctttgacccgtgctgtgaggagagggggtgaaaatgcaggagccgatggcaatgggaattctaatgacttctcaacaaagttactccatcttgcgtggcacccaactgaggattccattgcgtgtgctgctgggaatagcttgtacatgtattatgcatagggaatgtgctagagaagattcactgtttttggtttgttcaatgtgaaagcttgggcctcgcacatgc

SEQ ID NO: 440169 - DNA, 215 bp, Triticum aestivum
tttggggaaagcctcctgtggatgagcatggacgccccctctacggagatgtttttggtatcctacagctggatgaacctaattatgatgaggagcctgttgaccgcagcaagcattggggagacttggaggaggaagaggaagaggaggaggaagatgaggaggaagaggaaggaggaactaatggaagatgaagacatggaagctggcatgca

SEQ ID NO: 440170 - DNA, 400 bp, Triticum aestivum
tcccacgcgtccgcccacgcgtccgcggacgcgtgggggtttgcactacctccatgaggaatgccatattgttcatcttgacttgaaacctcaaaatatattgatggatgctaccatggtaccgaaaattgcggactttggtttatcaaggatctttggtgagaagcaatcccaaatcatcactcaaaattgtcagggaacacgaggatacatggcaccagagtacataatccaaggcatagtctccatcaaggcagatatatacagtttgggtgtcataattatcgagatacttactggctctagatcatatcccctcagagaggacaatagtcgtgagtgtaccgacaagtctatccaacaattcaaagagcaaatacttgaaacttgggggaaaaga

SEQ ID NO: 440171 - DNA, 309 bp, Triticum aestivum
tgtgctccgaaccaacctgttggaatggttggtttgactgacagcatgcctgctgaagttggtacttctgagccgcagcagatgaatagttctgacaatgccatgcaagagccgcagtctgaaaatgttgctgacaagtcagcagatgatggctacaactggcgcaaatatgggcagaagcatgtcaagggaagtgaaaaccctagaagttattacaagtgcacacatcctaattgtgaagtaaaaaagctattggagcgtgcggttgatggtctgataccgaagttgtctataaggggcgccataatc

SEQ ID NO: 440172 - DNA, 366 bp, Triticum aestivum
  unsure (1)..(366): unsure at all n locations
tcgttgtcgtccgcaaggaggccgagaactgcgactgcctgcaaggatttcaagtctgccactctctgggaggaggaactggttctggtatgggtacactgctcatctccaagatcagggaggagtacccagataggatgatgttgacattctcagtcttcccatcaccgaaggtgtctgacactgtggtggagccttacaatgctacactttctgtacaccaacttgtcgagaatgctgatgagtgcatggtgcttgacaatgaggctctctatgacatctgcttccgcactctgaagcttgctacacccacantttggtgatctgaaccatcttatatctgcaaccatgagtggcgtcacttgt

SEQ ID NO: 440173 - DNA, 317 bp, Triticum aestivum
tctgtcgcgtgggctccgctacagccctgactcggagatccaaacccaggattcctgagctcctcatacctacaaattattaggtcgtgcttttcggcttccttctgtctccttagctttccccatttattgcaaccttctcaaatctcaagattccaactggtcaaggaagtgaagaacaaggacagaaggacatggatgccttaagttcaatgctcgacaaggcgaaagacaaggtgaaaagcaaccctgatgtgatggagaaagtcaattcggtcctcgacaaggttaagaaccacccagaagtcatggagaaa

SEQ ID NO: 440174 - DNA, 429 bp, Triticum aestivum
  unsure (1)..(429): unsure at all n locations
tcttcacgcggtcgggcggtggggggcacgctggcctaacctccgaacccggtggggcctctttcccatccgtcctccgctgccgtggctgtaccgcactgccgcgctcgccgttcccacacaccctcactagccactcccattattcccacctgtcccagttgatcttccgatcgcctgcccgttcaccttctctctgcgagcagcccaggccggaggcatgtcggccaagaagatcgtggtgaagctggagctgcatgacaacaaggacaagcagaaggccatgaaggccgtctccgtgctcgtcggcatcgacgccatatccatggacctggcgtcgcgcaagatgacgngtgatcggcacggtggacccggtggccgtggtgagcaagctgcgcaagggttgggcggcctacatcgagtccgtcg

SEQ ID NO: 440175 - DNA, 298 bp, Triticum aestivum
ttcgctaatgttcggaacgatgttctgggaccttggaagtaaaactcgaagatcacaggatctattcaatgccatgggatcaatgtatgctgcagtactatacatcggagtgcaaaattctggttctgttcaaccagttgtcgtggtggagcgaacagtcttttaccgggaaagagcagctggcatgtattcagcttttccatatgcatttggacaggttgctatcgaatttccgtacgtattggttcaggctttgatatatggcgggctagtctattccatgattggattcgatgga

SEQ ID NO: 440176 - DNA, 308 bp, Triticum aestivum
tcttcacgcgtccgctcctctccgtccccatcgcgtgatcgatcgcctccgccttttccgcgagcctcttcttccccgatcatggagcagactttcatcatgatcaagcccgacggcgtccagagaggcctgatcggggatatcatcagccgattcgagaagaaagggtactacttgaaggggatgaagtttatgaatgtggataaatccttcgcgcagcagcactatgccgatctctctgcccagcccttctttgccaagttggtggattacatcatttccggccctgttgtggccatggtgtggga

SEQ ID NO: 440177 - DNA, 284 bp, Triticum aestivum
ttcttaaacccaaccccgccgccgccactgccgtcgccgccgcagcgcgcggaggcgaccaccccgccttcgccaagatgcagatcttcgtgaagaccctgacgggcaagaccatcacgctggaggtggagtcctcggacaccatcgacaacgtcaaggccaagatccaggacaaggaggggatcccgccggaccagcagcgtctcatcttcgccggcaagcagctcgaggacggtcgcaccctcgccgactacaacatccagaaggagtccaccctccacctg

SEQ ID NO: 440178 - DNA, 224 bp, Triticum aestivum
ttcttcatgagaacctggtgaagctcgtcggctactgctccgactccgacagcaactagctgctggtgtacgagtacatgccccagggcagcctggagaaccacttgttccggcggggcagccagccgccgctgccgttgtccacgcgcgtctccgtcgccgtcgacgtcgcccgcggcctcgccttcctccactcccgcgacgtcatcttccgggacctcaag

SEQ ID NO: 440179 - DNA, 254 bp, Triticum aestivum
ttttgcgtctccatggcggcgctcgcgctcatgaaccaggacaaggtcctcatggagagctggtactacctgaaggacgcggtccttgacggcggcatcccgttcaacaaggcgtacgggatgtcggcgttcgagtaccacgacacggacccgcgcttcaaccgcgtcttcaacgaggggatgaagaaccactccatcatcatcaccaagaagctcctcgaggtctacaagggcttcgagggcctcggcaccat

SEQ ID NO: 440180 - DNA, 146 bp, Triticum aestivum
ccgctgacactgtgcctgcttacttcaatgattcccagaggcaggcaaccaaggatgcaggagtttttgctggaactaatgtgatgcgtatcatcaacgagccaacagcagctgcaattgcctatggtcttgacaagaaggctacc

SEQ ID NO: 440181 - DNA, 367 bp, Triticum aestivum
ttgtgcagttgacgctcactgtgccgggcttgcgagggtgagcgataccagctagccacagcgcacgtacgacggccatggcgagcagcggcgggctggccggtctggcggtgctgctcaccgccgtgctgtgcctgcagctgccggtccacagccgcgcgcagctgcgcgtggggttctacaacaccacctgccccaacgccgaggccatcgtccggcaggccgtcacggccgccttcgccaccaaccccggcgtcgccgccggcctcatccgcctccacttccacgactgcttcgtcgagggctgtgattcatcggtgctcctgtccgtcaaccccggcggaggcacgacggagcgcgaggcagc

SEQ ID NO: 440182 - DNA, 442 bp, Triticum aestivum
tcccacgcgtccgccacgcgtccgtgaacaaaagaggagagctggttgattttctcctgatatcacccttcaagttcctggttgattttctggtgatgtcacccttcattgtgccctctgatgacattccagttctagacttcttcagcatttggttcctggggatgctattgctgaaattctggactaatttggctcattggacaagggacgcgcctttcctggctcatttcattgatggaagatgggactggaagcttactcgggcaaaggatgatggctttgcagggttgagggcaaagtgggtcttgcaagatatattgatgcctatcaccatgaagctagtgattgttctgtgtgttccttatgtgcttgcgaagggccttttcccaaggtttggctactctgctgcggtgaactcgacggtgtaccatttcgcatg

SEQ ID NO: 440183 - DNA, 415 bp, Triticum aestivum
tggacgcgtgggcggacgcgtgggaaaatgttctggcacttcgaggagatcctccacatggccaggacaaatttgttcaagttgctggtggattttcttgtgctctagatctggtggagcacattaaagccaagtatggtgattactttggcataactgtcgctggctatccagaggcacaccctgaggtaatactaggcgaggaaggtgctacggaggaagcatatagcaaagatcttgcttacttgaagagaaaggttgatgctggtgctgacgttatagtcacccagcttttctatgataccgatatctttctcaagtttgtgaacgactgccgtcagattggtataacctgccctatcgttcctggcataatgccaataaataactacaaaggatttgtgcgcatgactgg

SEQ ID NO: 440184 - DNA, 358 bp, Triticum aestivum
ttttatgacttgcgcttaaacaccaactattctggaggttatcatccggaccatgagattatcgatatgttgtgggaggttctaaagagcttcagttcagataatcagaaaaagtttctcaagtttgtgactggatgttctcgcgggccactccttggatttgagtaccttgatcctaaattctgcattcagagagctggtgtccccggcttggaggaacatggagaccgtttgcccacctcggctacttgcatgaaccttcttaagctccctccttacagaaccaaggagcagttgcaaaccaaactgttgtatgcaataaactctgaagccggtttcgatctgagctaattgcatt

SEQ ID NO: 440185 - DNA, 276 bp, Triticum aestivum
agcaccggagccggcctcccacacactgttcaacgacaagagcagctaccgcgagctctctgagatcgctgagcaagcaaagagaagagctgagattgcaaggttgagggagctcaacacactcaagggccacgttgaatccgtggtgaagctcaagggccttgacatcgacaccatcaaccagaactacaccgtgtgaggaaattggacattgaaccaacaaacatgacattcgtgttggagctagattggaatggagctccgctttaagatttt

SEQ ID NO: 440186 - DNA, 331 bp, Triticum aestivum
agcggcggccgggtatgatccatggaggacaagaaggttgggctgaagctggacgtgcacgacgacaggcacaagcagaaggctatgcacgtcgtctcgggtctccacggtatcgaccagatcgccgtggacacgaaggaccagaagatgactgtcattggcaccgtcgaccccgtcgtcctcgtcgaaaggctgcgcagcaagttccccatggcacagatgatctccgtcggcccggccaaggaggagaagacggacggcgccaagaaggaaggcgagaagaatgaaggcgacaaggaggagggcgacaagaaggagcaagtggtgtacc

SEQ ID NO: 440187 - DNA, 346 bp, Triticum aestivum
tttctgatccagctggcgctcatgtaatcagccacgcgtatccccacacatacgggcagccactggctcatttcctcaggaaggctgctaatgttcctgatgctaaagtcatatcagagcaccctgccgtcagggttggtattgtattctgtggaaggcagaccccaggaggccacaatgtcatatggggactccatgaggccatcaaagctcacaacgtgaacagcaaacttattggtttcctcggaggaaccgatggtcttcttgcacaaaaaactttggagatcacaaatgaagttctttcttcctacaaaaaccaaggtggttatgatatgcttggtcggac

SEQ ID NO: 440188 - DNA, 345 bp, Triticum aestivum
aaagctgcactggaagaagcatgcccacacacaatctcttgtgctgatactattgccctagctgccagaggttcaacagtattgagtggtggaccatactgggaactctcgctgggaaggagggattcaaagacagcatatatgaagctagcaaataagaacctgcctccacccaatgcaacactgcatcgtcttgtaaaattcttcggaaggcaaggactggataaaagggaccttgtagcactatcaggtagccacaccattggaatggccagatgtgttagtttcaaacaacggctctacaatcagcatagagataacaaaccggacatgacactggagaaa

SEQ ID NO: 440189 - DNA, 410 bp, Triticum aestivum
tttctgattcaagcaactggagctgatatagtaaaaattgcgaccactgctactgaaattgttgatgtttcaagaatgtttgaaatacttgtacactgccaagaaaagcaggtgccgatcataggactggtgatgaacgacagaggatttatttctcgtgttctctgccccaaattcggtggataccttacttttggctctcttgaaaaaggaaaagaatctgcaccttcacagccaaccgctgcagacttgatcaatgtgtacaacattagacagataggcccagataccaaggtgtttggtattattggaaatcctgttggacacagtaaaagcccggttttgcataatgaagctttcagatcagtgggtttgaatgctgtgtatgtgccatttttggtggatgactt

SEQ ID NO: 440190 - DNA, 348 bp, Triticum aestivum
ttttaccatcagttatggctattaagattgctggctgcttcttggctgtcattttgatatgggaagttcctggggtattcgaaattttgtgggccccctttacgttcctgcttggctataaagatccagagccttctaagtcacacttacccttattgcatgagtggcatttccgatctgggcttgatcggtacatatggattgttggaatgatctatgcttactttcaccctaatgtggaaagatggatggagaagctggaagaatctgagactaaggttaggttgtcgatcaagggtaccattgtgactctatcagtcctggctggctatctgtggtatgaatata

SEQ ID NO: 440191 - DNA, 450 bp, Triticum aestivum
ttttcacgcgtccggatccagttgaagatggtgatactgtgcttcacctggcatgcttatatggacatctaccttgcgtgcagctactgctggaacgtggagcaaacttagagtgcaaagatgaagaaggggcaattcctctccatgatgcttgtgctggaggcttcactgagatagttcagtacattctcagttttgctgcaaatgctgagggttgtgcaacgcgaatgctcaacaccgttgatgctgaaggcgatactccactccaccatgctgccagaggggaacacatggacaccgtcaagcttctgctcgaagctggcgcatgtcccaagaaggagaatgcctacgggcaggcagccgccgagatggccgatcaagataccgaagtccgggccctgttaaccgccaagcaagtcgaggccagcatacatatggcggactgatgat

SEQ ID NO: 440192 - DNA, 403 bp, Triticum aestivum
ctgagcgccgccacgagtccttcaacaagctgcgcatcttccaggtgctcagcgtcgccttcctcgcgggcctcctctggtggcgcacgcccgcggcgcacctgcaggaccgcacggcgctcatcttcttcttctccgtcttctggggcttcttcccgctctacaacgccgtcttcgtcttccccctcgagcgccccatgctgctcaaggagcgctcctcggggatgtaccgcctctcctcctacttcgccgcccgcaccgccgccgacctccccatggagctcggcctgcccaccgccttcgtcctcatcctctactggatgggcggcctcgacccacgcccggcctccttcctcctctccctcctcgtcgtcctctacagcgtgctcgtcgcccagagcct

SEQ ID NO: 440193 - DNA, 341 bp, Triticum aestivum
tctgatggtttcaacgtgtcatcattcacagcaggggcaaggacattcaattttgatgagaacccttgcgattacttccagggtggcaaaataaaagcaacaaccctctccctgtctgtcttggtgtccattgagatgttcaactcactgaatgccctgtctgaggatggcagccttctgagcatgcctccattggttaacccctggcttcttctggcaatgtcggtgtcatttgggcttcattttttgatcctctacgtgcctttccttacccaaatcttcgggattgtgcccctcagtttcaacgaatggcttttggtcgtagcagttgcattcccagt

SEQ ID NO: 440194 - DNA, 394 bp, Triticum aestivum
tttgagactctgaccttgaggagctgaggtgtttatggatttctagctagcagcacgtagggacgagcgtcgtcattggtcgtacgcactagccatgaacggcaagagcaagaagagcaagggcacgccattgctgggcaagtacgagctcgggcgactgctcggccgcggcacgttcgccaaggtgtacttcgcgcacccggtcactggcggtgagccagtggcagtgaaggtgatcgacaaggcggaggtgatgggcatggagggcatggcgcctcgcgtgctccgggaggtggtggccatgcgccggcttcgccacccgggcgtgctccgcctccacgaggtgctcgccacgcgctccaggatctatctcgtcatggagctagccccccgt

SEQ ID NO: 440195 - DNA, 221 bp, Triticum aestivum
tttgtctcattccgtcgtctccatgctctaggacaacgagcacgcggagcccacgtctccacccccaccgccggccgcatctcagagaatttcgaggatgtcgactccttcaaggaagaggctgatgagggacttcaagcggctgatgcaggaccctcctgcgggcataagcggggcgccgcaagacaacaacataatgctgtggaatgctgtgatttttg

SEQ ID NO: 440196 - DNA, 442 bp, Triticum aestivum
ttctttggacaaggcattcaaatgggcagagaagtacaatctaggcgtcatcattgacctacatgcagctcctgggtcgcaaaatccctttgagcacagctcctccaaggatggctcacaggactggggcaccaccgacactaacatcgcacaaactgtgcaagtggtagatttcctcgcatccaggtacgccaaaagcccaagcctcctcgcagttgagctaatgaacgagccgttggcgcccggcgtatccctggagagcctaaaaacgtactaccgcgacgggtacaatgccgtcaggaagcactcatcggatgcctacgtgatcatgtccaaccggctgtcatccccggacccaacagagttcctcgggctcgctggcgggttacccggatctgtcattgatgtgcattactacgcgttgttcaacaacatgtttgat

SEQ ID NO: 440197 - DNA, 345 bp, Triticum aestivum
  unsure (1)..(345): unsure at all n locations
ctcntaaccccccacgtcaaaaaaatcgatttcgccgtcctcctcgcctcgcccccgccccctccccccagatccggcaccgccaccgcccgcgccccgatccccgccccctcgtctgccggtcgggggatcagcaccagcgccgatcgaggggtaggaggaggaggaggaggacgaggaggaggcgggtgcgcgcgacatggctgcgccgccggcgagggcccgggccgactacgactacctcatcaagctcctgctcatcggggacagcggtgttggcaagagtcgccttcttctgcggttctctgatggctccttcactacgagctttattaccacgatcgg

SEQ ID NO: 440198 - DNA, 447 bp, Triticum aestivum
tgagaaactggaagcgctgatcgctgctgtgaacagcagtgatagcagccacatcgtccatgtccctccgggtgaccatgccctttctgatgttcttataagcactcctatctttactggcgaagaaggtggaagtggctttgctgcttctgcagcagctgctgcagccaccggagctactggatatgattttggcgtggacccaaatgtggacccagagttggcacttgccctacggttgtctatggaggaagagcgagctaggcaagaggctatcgcgaaaaaggctgcagaagacaacaaggatcagccctcaagctctaccgatgctattatggctgaagcggaacttaccttaaatgctcctgctgatgttgacgcagatctactcaaggatgatgatgatgctcagctactacagcaagcacttgctatgtcaatggatga

SEQ ID NO: 440199 - DNA, 459 bp, Triticum aestivum
  unsure (1)..(459): unsure at all n locations
ttgcccacgcgtccgcccacgcgtccgccatcccccccttccttccttccttcctccacccacctcccccctctcctctccggcgcgcctccccccaccggcgaatccgcaaccgaatcgaatcccaggatccgcgtcggcgggcggcggcggaggcacatggcgcaccgggtggacaacgagtacgactacctcttcaagatcgtgctcatcggcgactccggcgtcggcaagtccaacatcctctcccgcttcacccgcaacgagttctgcctcgagtccaagtccaccatcggcgtcgagttcgccacccgcaccctccaggtagaaggcaagacaattaaggctcagatatgggatactgctggccaagagaggtaccgtgcaatcacaagtgcttactacaggggagctgtgggagctctnttggtgatgacataacaaagaagctatcattcg

SEQ ID NO: 440200 - DNA, 385 bp, Triticum aestivum
tgcgcacccctctcgctctccgctccatctggtccgattcgattcgattcgatctcggcttcctctccaagccacgcgagaccagccatggcggcgacgatccagtccgtgaaggcccgccagatcttcgacagccgcggcaaccccaccgtcgaggttgatgtgtgctgctcagatggaaccttcgccagggccgccgttcccagcggtgcatcaactggtgtctatgaagctttggagctgagggacggtggatctgactacttgggcaagggtgtttccaaggctgttaacaatgtgaactccattattgcacccgctttggtcggcaaggaccctaccgctcaaactgagctcgacaactttatggttcagcagcttgatg

SEQ ID NO: 440201 - DNA, 391 bp, Triticum aestivum
tttatactctagccgatcagttgcatagcaagcaatggggtgctctaaaaccctagtagctggtctcttggccatgctcttcctagctccgaccatcctagccaccgaccctgatcctctccaggacttctgcgtcgccgacctcgacggcaaggcaatctcggtgaacgggcacacatgcaagcccatgtcggaggccggcgacgacttcctcttctcatccaagctggccaaggctggcaacacgtccactcctaacggctcggccgtgacggagctcgatgtggcagagtggcccggcacaaacacgctgggcgtgtccatgaaccgcgtggactttgcgcccggaggcaccaacccgtcacacattcacccgcgtgccaccgagatc

SEQ ID NO: 440202 - DNA, 409 bp, Triticum aestivum
ttcttacgcgtccgatcgccgccgcaggctttgaccccatcgcccctccgtcctcttcgtctccggtaggccaggtagttaacagctccagcagccatgggaaaggagaagatccacatcagcattgtggtcattggccatgtcgactctggcaagtcaaccacgactggccacctcatctacaagcttggaggcattgacaagcgtgtgattgagaggtttgagaaggaagccgctgagatgaacaagaggtctttcaagtatgcctgggtgcttgacaagctcaaggctgagcgtgagaggggtatcaccattgatattgctctgtggaaattcgagaccaccaagtactcctgcactgtcattgatgctcctggtcaccgtgatttcatcaagaacatgatcaccg

SEQ ID NO: 440203 - DNA, 374 bp, Triticum aestivum
tcttctcgcgtccggatcaaatcacatagaagtgcatagaggtcgtggcgtttgcccaatttcattcccaccatgagcaagccatgcgacggtgccaatcccaagacggagtggcctgagctggtcgggcgcacgatcaaggaggcggaggagaagatcaaggcggaccgaccggacctcaaagttgtcattgtcccggtaggaagtgttgtgacacaggaggtcgatctgaaccgcgtccgcgtctgggtcgacacagtggcggaggttcccaagattggctaagctagcttgtaattagccaactggaataaaagcccatgcaagtctcaacatcgtccagttaatttgccgaacaaataagcatgggtatg

SEQ ID NO: 440204 - DNA, 291 bp, Triticum aestivum
ttggttatggcagtttcctgttcaaaggttcctaaaattaccataattgtccgtggaagtttcggtgctgggaattatggaatgtgtggacgtgcatacagcccgaattttttgttcatgtggccaactggtaggatatctgttatgggtggcattcaggcagctggtgttctcgcccaaatagagaagaacaacaggaaaaggcaaggagtggagtggaccaaggatgacgaacaagccttcaaagccaaagtcgtcgtggcttatgacaaagaaggaagcccgtactac

SEQ ID NO: 440205 - DNA, 276 bp, Triticum aestivum
ttccagatccagccggcgctcccctcccctccctccacctccggcctccgaccaagctgcccgcggccaatccctaagccgcgatgagctggtggtgggcgggcgcggtgggcgcggtcaagaagcggcaggacgagcgggcggcggcggccgagcccaccttccagagcgtggcgctcatcctcggctccacggggatcgtcggcacctccctcctcgacatcctcccgcgggacgacaccccgggcgggccctggaaggtgtccgccgtctccc

SEQ ID NO: 440206 - DNA, 453 bp, Triticum aestivum
tcccacgcgtacgcccacgcgtccgcggacgcgtgggcagcacacaactctctccacccccagcagtccatccacccccacccccctttcccctcccctcccgagctcggccatggcaaacgcttcgtcaggagctgggatccatgatgactgcaagctgaggttcgtggagctcaagtccaagaggatgcaccgcttcataacctacaggctggagaaccagaaggaggtcattgtggaccaaactggggagcgcgaggccacctatgaggacttcaccaagaccctgcctgagaacgactgccgattcgcagtgtttgacttcgacttcaccaccccggaggatgtgccaaagagcaggatcttctatatcttctggtctcctgacaccgcaaaggtgaggagcaagatgacgtacgcgagcaccaacgagatgttcaagaggaccctgga

SEQ ID NO: 440207 - DNA, 447 bp, Triticum aestivum
tttccacgcgtccgcgccgagttcgtcgccacgctcctcttcctctacatcaccgtggccaccgtcatcggctacaagcaccagtccgaccccaccgtaaacaccaccgacgcggcctgcagcggcgtcggcatcctcgggatcgcctgggccttcggcggcatgatcttcgtcctcgtctactgcaccgccggcgtctcaggtggacacatcaacccggcggtgacgttcgggctgttcctggcgaggaaggtgtcgctcatccgggcgctgctctacatcattgcgcagtgcctcggcgccatctgcggcgtcgggcttgtcaagggcttccagagctcctactacgtgcggtacggcggtggcgccaacgagctcagcgcaggctactccaagggcaccgggctcgcggccgagatcatcggcaccttcgtgctcgtctacacc

SEQ ID NO: 440208 - DNA, 338 bp, Triticum aestivum
tctcggacgcgtgggtcccgctctccctagggcttcctccctcctctcctcggcggcgcggcggcgaagtccaaccaggccccaccggagctccgaccatgggcggcgagaaggagaacctcgacctctccgacctcaacagctccctccccgccgccgccgccgccctcagcgccgaggaccgcgtcggtctcgtcaatgccctgaaggataagctgcagagcttggcggggcagcacgcggacgtgctcgagtcgctctcgcccaatgtcaggacgcgtgttgagtttctgaggggcattcagagccaacatgatgagattgaggcgaagtttttt

SEQ ID NO: 440209 - DNA, 422 bp, Triticum aestivum
tttctacgcgtccgcgctcggctgctcggcaaggggctcgtgctcaccgactgcgacgactggaagcgccaccgcaaggtcgtccaccccgccttcaacatggacaagctcaagatgatgacggtgaccatgtccgactgtgccgggtcaatgatgtcggagtggaaggccaagatggacaaggggggcagcgtggagattgatcttagccaccagtttgaggagctcaccgcggatgtcatctctcacacggcattcggtagcagctacgaacaggggaaaaaggtattcctcgcgcagagggagctccagtttcttgccttctccaccgtattcaacgtgcaaattccagcattcaagtaccttccaaccgaaaagaacctcaagatatggaagcttgacaaggaggtgaggaccatgct

SEQ ID NO: 440210 - DNA, 394 bp, Triticum aestivum
tttttcggcttccagatcgccatcgagaacatccactccgagatgtactccctgctcatcgagacctacatccgcgacgacgtcgagaaggaccgcctcttccgcgccatcgacaccatacccgccgtgcgccgcaaggccgactgggccctgcgctggatcgacggtggggagcgcttcgccgagcgcatcgtcgccttcgcctgcgtggagggcatcttcttctcgggctccttctgcgccatcttctggctcaagaagcgcgggctcatgccgggcctcaccttctccaacgagctcatctcccgcgacgagggcctgcactgcgacttcgcctgccttctctacgacatcctgcgcggcaagctggacgagtcacgcgtcttcgagatcg

SEQ ID NO: 440211 - DNA, 478 bp, Triticum aestivum
ttgttcccgctttccttggtaacggcttggccccgaccccgcgttgatcaagcacaaaccagcggcagcactagcaccaccaccaccgccggcccccgtacgtctcccgatcggatcggccgtcgtccccgccggcgagcgagcgagcgagcgatcaagatggtgctctcccacgccgcgtcggctggatcctccgatgactccgtgcactccaccttcgcctcccgctacgtccgcgcctccctgcccaggttccggatgccggagaactcgatcccgaaggaggcggcgtaccagatcatcaacgacgagctgatgctggacgggaacccgcggctgaacctggcgtccttcgtcaccacgtggatggagcccgagtgcaacaagctcatgatggactccatcaacaagaactacgtcgacatggacgagtaccccgtaaccacagagctccagaaccgatgtgtgaacatgatcg

SEQ ID NO: 440212 - DNA, 286 bp, Triticum aestivum
tgttggcttctgctccccttccggttcgggttctggttcggttctggtccgagagtagctagcctagtctagggtttccgtagagaggaagggagagggagatccatccatggcggagacggagtaccgctgcttcgtgggcggcctcgcctgggccaccgacgacaacaacctccagcaggccttcagccagtacggcgagatcctcgacgccaagatcatcaacgaccgcgagacggggaggtcccgcgggttcggcttcgtcacgttcggcagcgaggagtcg

SEQ ID NO: 440213 - DNA, 394 bp, Triticum aestivum
ttacacacaccgcacgcatttgacattttccgcccaccaccaccggagggagcgagctccagccatggccgccaagtgctacccgacggtcagcgacgagtacctggcggcggtcgccaaggccaagcgcaagctccgcggcttcatcgccgagaagaactgcgcgcccctcatgctccgcctcgcgtggcactcggccgggaccttcgacgtggccaccaagaccggcggccccttcggcaccatgaagtgccccgcggagctcgcgcacggcgccaacgccggcctcgacatcgccgtcaggctgctcgagcccatcaaggagcagttccccatcctctcctacgccgacttctaccagctcgctggagtcgtcgccgtcgaggtgaccggc

SEQ ID NO: 440214 - DNA, 420 bp, Triticum aestivum
ggcctctctcttctgcccgacctctcgtggccgccgcgaagaaaaggagcttatcatggcttcaaaacgtatcctgaaggaactgaaggacttgcagaaagatcctccgacatcatgcagtgcaggtccttctggtgaggatatgttccattggcaggcaaccattatgggtcctgctgatagtccctatgctggaggtgttttcttagtgaatatccatttccccccggactaccccttcaagccgccgaaggtatcgttcaagacaaaggtcttccatccgaacatcaatagcaatggaagcatatgccttgacattctgaaggagcaatggagtcctgctttgacaatctctaaggttctgctttcaatctgcttgctgcttaccgaccctaacccggacgaccctctcgtccccga

SEQ ID NO: 440215 - DNA, 404 bp, Triticum aestivum
gcagaatgggatgacaatccagtggaccgggtacccggtcgggtacaacccgatgggtagcagcgaggattatatcattaaccatctcaagttcagggttttggtccacccctaccaggcacaaggtgatgttgtggtcacgagtgaggatggtgttgccatggttgagtctgaccgcaagagtggcttccagattgttggttttgaggttgttccttgcagtgtgaagcgtgatcctgcagccatggccaagctcaagatgtatgagaaggttgactctgtgaactgcccgttggagctcgagaaatctcaggtgatccgtgaaaaggagcagattacatttacctatgaggttgagtatgtcaagagcaacatcaagtggccgtcaaggtgggatgcatacc

SEQ ID NO: 440216 - DNA, 301 bp, Triticum aestivum
tgacagaggaccagctcacgggtttgaaagctcactctagttgggtcgaatcactggctatggacccaagccggtcatttgtgctggcagcatctgccgactgcttgatcaagctttgggactgggagaatgactggaccagcgttcgaacattcagtgaacactcagacaatgtgcagcaagtcatgttacaccagcaggaaaccaacacttttggcagtgtttcaaaggattgcaccgcaaaggactcgagcattacttctggtgattctttggccacattgagcagtaaatcacaaca

SEQ ID NO: 440217 - DNA, 392 bp, Triticum aestivum
ttccacgcgtccggttctgttcctcggccattctagccaccatgccgggctccatcgccttcggtcgcttcgatgactccttcagcttggcctctttcaaggcctacatcgctgagttcatctccaccctcatcttcgtcttcgccggcgtcggctctgccatcgcctacactaaggtgagcggcggcgcgccccttgacccatccgggctgattgccgtggcgatatgccacgggttcgggctgttcgtcgcggtcgccatcggcgccaacatctccggcggccacgtgaaccctgccgtcaccttcggcctcgccctcggcggccagatcaccatcctcaccggcatcttctattgggttgcccagctcctcggtgccatcgtcggcgcc

SEQ ID NO: 440218 - DNA, 405 bp, Triticum aestivum
tcttctctccagatggcacaaaggttaatgctgctgaggcatttaagatcgccgacatccagcatggcttcttcgagctgcagccaaaggaaggcctagccatggtgaatggcacggcagtgggctcagggcttgcatccatggtgcttttcgaggctaacatccttagcctccttgctgaggtcttgtcagccgtcttctgcgaggtgatgaacggcaagccggagtacaccgaccacttgacccacaagttgaagcaccaccccgggcagatcgaggctgccgccatcatggaacatatccttgaaggcagctcctacatgatgctcgcgaagaagctcggtgagcttgacccattgatgaagccaaagcaagataggtatgccctccgcacatcaccgcagt

SEQ ID NO: 440219 - DNA, 458 bp, Triticum aestivum
ttttcctcctcgggcgcagccattgtcttctggctcatatctcccctccccctcccctcctcgtccgcctcagacgccattaaaccccacctcgcctacgactgccggcggcgagccccgaccggagcagggatcgagcccgccgaaggggggaagacatggggacactcgggcgcgcgatctacacggtgggcaagtggatccgtggaacggggcaggccatggaccgcctcggatccaccatccagggcggcctccgcaccgaggagcaggtgtcaaggcatcgtacagtcatgagcatatttgacaaggagcctaggatcaacaaagatgtttttgttgctcccagtgcatctgtcattggtgatgttgagattggacatggatcatcgatctggtatggctccgttttgagaggtgatgtcaacagtattcgtattggatctggatcaaatata

SEQ ID NO: 440220 - DNA, 413 bp, Triticum aestivum
ttcttcccacgcgtccgatcaaaccccacacacgcacacgcgcgcgcgcacacacacacaaaaaaaagcagagagggaggagatggccggagacgggcgtcgcgtggtggtcttccccttcccgttccacggccacgccacccccctcctccgcctcgccagcgttctccacacccgcggcttcgcggtgaccatcttccacaccgagctccgggcgcccgacccggccgagtaccccgcggactaccgcttcgtgcccctgcgcgtggacgtgcccccggagctgatggcgtccgaggacatcgcggggatggtcacggccatgagcgagtactccgaggcgcccttcaaggaacgcctgaccgcggcgctcgccgaggaaggcgccggtgtccggtgcgtcatcgccgacg

SEQ ID NO: 440221 - DNA, 382 bp, Triticum aestivum
ttcccacgcgtccgctcaatgatggtactatcatgacaatatccaaggacagagttaagccatctcccttgcccgacagctggaagctcaatgaaatcttcgccactggtgttgtgctcggaacctaccttgccctgatgactgtcgtcttcttctgggttatccacaagacggacttcttcacaaacaaattcggtgtcaggtcaatcagagacagtgagtttgagatgatgtctgcactgtacctccaagtcagtattgtgagccaggctcttatattcgtgactcgttcacgtagctggtcctttgttgagcgccctggtttcctcttggttaccgccttccttctcgcacaattggttgcaacactcatcgctgtcta

SEQ ID NO: 440222 - DNA, 310 bp, Triticum aestivum
tttatatgggaaacataggaggacaactttgcaagaatgatggccactccttcaaggagagctgcagtatcacaaattctgaagtcctcaccagagtgaaatggtcagaagaggaagataaggtgctcactcaaatgatcaacaaacatgggctgaaaaactggcaaacggtcgcacatgctatacctggccgaagtgcaccgcaatgccgacaaaagtggagatacaaaatagactctgcaataaacaaggaggcgtggtcggaacaagacgagttgagactgattcgtgctcatcaaatctatggaac

SEQ ID NO: 440223 - DNA, 248 bp, Triticum aestivum
ttccacgcgtccgcgggaaggagctctgcaagagcatcaaccctgacgaggccgtcgcgtacggagccgccgttcaggctgccatcctcactggcgagggcaacgagaaggtgcaggacttgctcctgcttgacgtcacgccgctctcgcagggcctggagacggccggaggcgtcatgaccgtgctgatcccgaggaacacgacaatccccaccaagaaggagcaggtcttctccacctactctgac

SEQ ID NO: 440224 - DNA, 297 bp, Triticum aestivum
  unsure (1)..(297): unsure at all n locations
ttcttcccacgcgtccgccacgcgtccgccacgcgtgcgtccacgcgtccgccaaaatccaaacccaagccaagaacacacgctgttctgaatctgtccatcagtctccgcttccactgattcgtccagccgagaagaagaagagctgcagaagatgagcaagctctggaccatnctcacccacctccacaccctcgcagggcctggcgtgatgctcctgtacccgctgtacgcgtcggtgcaggcgatggagagcccgtcgaagctggacgacgagcagtggctggcctactggat

SEQ ID NO: 440225 - DNA, 300 bp, Triticum aestivum
ttctgctgcctgacccctgcctcttcgagcaggcacacagcgtggcgctgtgggagatgtccgagcacgatgcgccattggacgcgctgatcaacaacgccatggtctcggacagccgcttcatcatggacatcgccgtcagggagagcggcgacgttttccgggtgataagctccctggtcgacgtcggcggtggcctcggcgcggcggcccaggtcatctcggaggcgttcccgcacatggagtgcagcgtgttggagctcgagcacgtcgtcagcaaggcgcccgccggcaccagcg

SEQ ID NO: 440226 - DNA, 390 bp, Triticum aestivum
tgtacagcaagtcctcagctaaggggacttcggaacattttgcggctttacattaaaagggcaaattgttctgaatgggagcaaattcaaatgccttcaagtgttagatcactagtggtcttaaatctgtacaactacggcagtggaaggcatccatggggtgatcttaaaccagattatcttgaaaagaaaggttttgttgaagctcattcagatgacggtttgattgaaatatttggtctgaaagaaggttggcatgcttcattcgttatggctgagcttatcaaagcaaagcacattgctcaggctgcagctatcaagtttgaaatgaggggaggcgagtgggatcgagcatatgttcaaatggatggcgagccatggaaacaacca

SEQ ID NO: 440227 - DNA, 429 bp, Triticum aestivum
ttctttatccccccccgcccctccccccacgaacccacagcgcgcacccgagatccgcagccgaagcccgtgagaacagcgaagcgcgacaggaaaggcactgaactagtttgcaacaaagaagagagaaaatgtctaccgctgaggcaacccgtgaggagaatgtgtacatggccaagctcgccgagcaggctgagcgttatgaggaaatggtcgaattcatggagaaggtggccaagaccgctgatgtaggtgagctcactgttgaggagcgcaacctgctctctgtggcttacaagaatgtgattggtgcccggagggcttcctggaggatcatctcctccattgagcagaaggaggagagccgtgggaacgaggcctatgtcgcatcaatcaaggagtaccgtaccaggattgaaaccgagctca

SEQ ID NO: 440228 - DNA, 459 bp, Triticum aestivum
tttcggtcccgatcctcgatctgttctcaaccctccctccgtccgtcgcagctccagatttccttccccatggctccgatcaagatcggcatcaatggtttcggccggatcggcaggcttgtggccagggttgcgctccagagccccgatgtcgagctcgtcgccgttaacgaccccttcatcaccaccgactacatgacctacatgttcaagtatgacactgtccacggacagtggaagcaccatgaagttaaggtgaaggactccaagacccttctcttcggtgagaaggaggttgcggtgtttggctgcaggaacccagaggagatcccatgggctgctgctggtgctgagtacgttgttgagtccaccggtgttttcactgacaaggacaaggctgcagctcacattaagggtggtgccaagaaggtcatcatttttgctcccagcaaggatgct

SEQ ID NO: 440229 - DNA, 377 bp, Triticum aestivum
ttgcccacgcgttcgcccacgcgtccgcccacgcgtccgctttgatggacctgtgccatcgccgttcgaggacgtgcatggcgcggccatcttcgaggagagcatgacgctcctggacccggagatggatcagctgatccacgacgccgtcgctgctcacgaccacatggggatcggccccgtgctccggcagtgccgtgagctcttcgaggggcttgagtctctcactgactgcggcggcggtgatgggacgacggccaggtccatcgtcgaggcctacccgcacatcaagtgcactgtgctggaccttccaaaggtcatggacaaagttcttcttcccgctgaagaaggagcggttaagtatgtttctggtgacc

SEQ ID NO: 440230 - DNA, 413 bp, Triticum aestivum
ttccagcagctgcgcaaaggctcctcaaaccctaaccctagtcctagcttagcttccttcttctcgatctagctagagccatggcgccgaccaagggcgaggggccggccatcggcatcgacctcggcaccacctactcgtgcgtcggcgtgtggcagcacgaccgcgtcgagatcatcgccaacgaccagtgcaaccgcaccacgccctcgtacgtcgccttcaccgactcggagcgtctcatcggcgatgccgccaagaaccaggtcgccatgaaccccatcaacaccgtcttcgatgcgaagcgtcttatcggcagaaggtttgctgatgcccctgtccagagtgacattaagatgtggccgtacaaggttattcctggccctgcagacaagcctatgattgtagtgcag

SEQ ID NO: 440231 - DNA, 306 bp, Triticum aestivum
tttttgttcgcgcccaccgacaacgccttcacctcgctcgcctccggcacgctcaactcgctgtccgacagccagaagaacgcgctcatccagtaccacgttctctccaccgccatccccatgtcgcagttcgacaccgtcagcaacccgctccgcacgcaggccggcagcacctcccccgcccagtacccgctcaacgtcaccgccgagggccagcaggtcaacatcaccaccggcgtcgtcaacgccaccgtcgacaacacgctctacaccggcgaccagctcgtcgtctaccaggtcaacaag

SEQ ID NO: 440232 - DNA, 392 bp, Triticum aestivum
ttcttggatgcgcagccagcggcatccgtgctgtacgtgagcttcggcagcctggcgtgcatgtcagcgcgggacctggtagagactgcgtggggcatcgccggcagcggcgtgccgttcctctgggtggtccggccgggccttgtagcctcggacgggctgacgcggctgccggacgggttcgaggcggcgacgagcgggcgcgggatggtggtggagtgggcgccgcatgaggaggtgctccggcacgcggccgtggccgggttctggacgcacggcgggtggaactcgacgacggagagcgtgtgcgagggggtgccgatgctgtgtcgcccgcacttcggcgaccagatggggaacgccaggtacgtcgagcacgtgtggagggtggg

SEQ ID NO: 440233 - DNA, 320 bp, Triticum aestivum
gtccgggaaaacaagagaaaagatgagtgaaagaagctcaaatcaaatggcatcctccccttccttccttctccttgccgctcttcttgccttggtctcatggcaggccattgcctccgaccctggcccgctccaggacttttgtgtcgccgacatgcattcaccagtgcgtgtcaatggatttgattgcaagaacccgatggaggtcaatgctgatgacttcttcaaggcagccgccctcgacaagcctagggtgaccaacaaggttggctccaacgtcaccttgatcaatgtcatgcagattgccggactcaacaccc

SEQ ID NO: 440234 - DNA, 391 bp, Triticum aestivum
tctgtccacgcgtacgaggacgcgtgggcgcagccgccgcctcctcggatcgtccctgccggagagacgccagagagagcgagcaaaccctaacctccgacgatggtgctgcagaacgacatcgacctcctgaacccgccggcggagctcgagaagctcaagcacaagaagaagcgcctcgtccagtcccccaactccttcttcatggacgttaagtgccagggctgcttcaacatcactactgtgttcagccactcccagactgtcttggtgtgcccaggctgccaaacagtgctctgccagccaacgggtggcaaggccaggctaaccgagggttgctccttccgccgcaagggcgactaaacctccgaagtctatctgaaaaagcaag

SEQ ID NO: 440235 - DNA, 396 bp, Triticum aestivum
ttttcgcggacgcgtgggcgccgccgctctccaaggtcccaaggctccagatctccctctctcgcagctacctcggtggcctttggagcgcacgagatggcggaagaagccccatcaccagttgttgtcccagctgaggcacctacccccggttcttggggaagccaaggaactgtgtgactgctctacagcttgtcatgaagaagtcaagcgctcatgatggccttgtgaaggggctccgtgaggctgccaagtccattgagaagcatgctgctcagctttgtgtgctggctgaggattgcgaccagcctgattacgtgaagctcgttaaggcactatgcgctgagcacaatgttcacctggttactgtgccaagtgctaaaactctcggagagt

SEQ ID NO: 440236 - DNA, 285 bp, Triticum aestivum
tgcggggatcacgctgctcgactggtgccgcaacgagcagttctacatgatcggggccacgggcgtgtacccgacggcggtgctttacatggcgctcaagctcgtcaccgggaaggggatatacttcaggctcacgtccaagcagacggacgcctgctccaatgacaagttcgccgacctgtacaccgtgcggtgggtgccgctgctgctcccgaccatcgtggtgctcgtcgtgaacgtcgcggccgtcggggcagcgataggcaaggcggcggcatgggggtt

SEQ ID NO: 440237 - DNA, 187 bp, Triticum aestivum
gcttgtcgttgtgctctcggccctgctcctgctttctctcgtcgccgtctcatccgccgaggaattcgatttcttctaccttgttcagcaatggccagggtccttctgtgacacgaagaaggggtgctgcttcccggacaccggcaagccggcgacggacttcggcatccacgggctatggcccaac

SEQ ID NO: 440238 - DNA, 353 bp, Triticum aestivum
cccgaccggcgcgctggaccccgggctggtgtacgacctcgcggcggacgactacctgagcttcctctgcaactacggctacggcgcgtcccagatcaagctcatcacctcccctccggccgccttcagctgcgccggcaacgcgagcaaggatctcatctccgacctcaactacccgtcgatcgccgtcacggggctcggcgccggcgccagcaggacagtgacccgtgaggtcaccaacgtcggagcgcaggaagacgccacctataccgtcgccgtcagcgcgccggccggtctggatgtgaaggtcgtgcccagcaagctccagttcaccagcagcgtgaagaagctgg

SEQ ID NO: 440239 - DNA, 322 bp, Triticum aestivum
gcgtccgcggcggaagaaagaggagagagctccagccatggtgcacgtcaacttctaccgcaactatggtaagacattcaagaaaccaaggcgtccttatgagaaggagcgtcttgatgcagaactaaagctggtcggtgaatatggactgaggtgcaagcgtgagctctggagggttcagtatgcactgagcaggattcgtaatgctgcaagacacttgctcacactggatgagaaaaatccccgccgtatctttgagggcgcggcccttctccgtcgcatgaaccgctatggtctccttgctgagggccaggataagctt

SEQ ID NO: 440240 - DNA, 244 bp, Triticum aestivum
tgatgactggcattgcgtacagacattagctgaagctggtaacggtggtcattcctcaacagtatggtcggtatcttttaaccagaaaggagataggatggtcacatgcagtgatgactgtactttgaagatttgggatacgagtgctgatttgtctgagccaacaactggagaaggtcatgaatcttggtttcatctttctactttatctggacatcatggtcgaactattttttcagcccat

SEQ ID NO: 440241 - DNA, 350 bp, Triticum aestivum
tctctgacgcgtgggatgcattgccagaaatgttcctcgtgggcttggttctcctgtatttgacaaacttgaagctctactggcaaaggctatgctttctcttcctgcaagcaaggggtttgagatcggtagtggatttgcaggtactgacctaactggaagtgagcataacgatgagttctatatggatgaggctggaaatgtgagaacacgaaccaatcgctcggcggtgtacagggagggatatcaaatggtgaaactatatacttcaaagtagctttcaagccaacagcaactattgggaagaagcaaaatactgtaacaagggatcatgaggatatcgaacttct

SEQ ID NO: 440242 - DNA, 328 bp, Triticum aestivum
ttctagcaacatgcacaagctaactttagatggcattgatgtgatgggtgaacggttggcacaagaggttattgaagaaatcaacaaaagaccacagataacaaagatatcttttgttgcgcattccgttggaggattggttgcaagatatgccatcggaagactttatagacctcctggacaatcacttgaaaattctcctcaaagtttgagagacagcaacagaggcaatatacatgggcttgatgcagtcaacttcataactgttgcatcaccacatcttggttctagaggaaacaagcaggttcctttcctttttggagttact

SEQ ID NO: 440243 - DNA, 363 bp, Triticum aestivum
tttttgcactctgtgattgagaagtacgctgagcgtgggcttcgttcgcttgctgttgcaagacaggaagttcccgagaaatccaaggattctcctggtggaccatggcaattcattggtctgttgcccctgtttgatcccccaaggcatgacagtgctgatgaccatccgcaaggcacttgttcttggtgtcaacgtcaagatgatcacaggtgaccaacttgctattggaaaggagactggtaggaggcttgggatgggcacaaacatgtatccttcttctgcattgcttggccaaagcaaggatggttcacttgagtcacttcctgttgatgagctgattgagaaggctgatggatttgc

SEQ ID NO: 440244 - DNA, 322 bp, Triticum aestivum
ccgatcaaggacaaataccccagtataacttatgcggatttattccagttggcaagtgctacagcaattgaggaagctggtggcccaaagattccaatgaaatatggacgggttgatgtcacaggacctgagcagtgtccacctgaagggaagcttcctgatgctggcccgagtgctcctgctgaccacttgaggctggtattctacagaatgggccttgatgacaaggaaatcgttgctttgtctggggcacatacacttggaaggtctaggcctgaacggagtggctgggggaaacctgaaacaaaatatactaaaaatg

SEQ ID NO: 440245 - DNA, 370 bp, Triticum aestivum
tctttttatgacaatggcagagcgcctcgggactgctcttatgcaggatcctactatgtccagtatgctggaaaatttgactagtccaacacataaggaggagcttgaagagcgcatgtctcggattaaggaagatccagccttgaagccaattcttgatgagttagagaatggtggtcctgctgcaatgataaagtactggaatgaccctgaaactcttcaaaagattggccaggcaatgggaactaccatgccgtttagcactgtctctactgctgaaccttctggtactgaagaaactgaagaagaaggtgaagatgaagacgaatccattgtccaccacactgccagtgttggtgacggtgagggt

SEQ ID NO: 440246 - DNA, 413 bp, Triticum aestivum
tgatcgcccacgcgtccgcggacgcgtgggtaaagattgcacaaggggctaagcctggtgaagggggtcaacttcctggcaaaaaagtcagcgcatacatagctcggttgagaaactccaaacctggtgttcctctgatatccccaccaccacaccatgacatctattctattgaggatctggcgcagctaatttttgacctacatcagatcaatcctaaagcgaaggtgtcggtaaagcttgtagctgaagcaggaattggaactgtagcctctggagtatctaaggcaaatgcagacgtaattcagatatcaggtcatgatggtggtactggagctagcccaattagctcaatcaagcatgctgggggtcctagggaacttggtcttacggaaacacaccagacactcata

SEQ ID NO: 440247 - DNA, 231 bp, Triticum aestivum
ttttcaaaggccatcccgacgcacggtgtggcggcggtcatgaacgagttcgagggcgtggtgatggagatcgtcatcaccttcgcgctggtgtacacggtgtacgccacggcggcggacccgaagaaggggtccctcggcaccatcgcgcccatcgcgatcggcttcatcgtcggcgccaacatcctcgccgccggccccttcagcggcggctccatgaaccctgcccgc

SEQ ID NO: 440248 - DNA, 198 bp, Triticum aestivum
gcggcgcagttgctccgcgagcccttcgagcggttcttggccgacaaccgccccgacgccgtggtgtccgacagcttttggcactggtccgcggacgccgtcgcggagcacggcgttccgcgcctcgcgttcctcggcaccagcatgctggcgcggtcctgcaccgaaagcatgctgcgcaacaacccgctggagacc

SEQ ID NO: 440249 - DNA, 340 bp, Triticum aestivum
tcgtacgcgtccgcggacgcgtgggtcgtcaccccatcctcacatgcggtgttatgtgtttgggcatcccttttcttcacggtggctcctccttcactgccatgcccgaaggcttctatatactgcgttggcgggaaccaggaagagcagaggcagactttggcaggtatgacgtcaagcgagtcgtgcacaccatctacattctcttctctagaagcgaaatcccgacagcgaaggaagatcaagaaatcacggatctcgcggacctgtcgactccccttccagagtggttcaccgaggaggatcttgcagtctacacgtccctctatgagaaatcagg

SEQ ID NO: 440250 - DNA, 363 bp, Triticum aestivum
tcgtagcattctaccaccgcaccgcacgagtgaagtgagagctttgcacgaaaagttcatcagcgaccatgaagggcaccaagctcgcggcgatcctcatcctccaggccgtcctggtcatgggagtcctctcacacgtgaacgccgactatttccccaagtgctgcaacaactgcaggtccttctccggggtcgacgtctgcgacgacgcccaccccaagtgccccaagggctgctcggcgtgccgcgtggtgtcgacgagccccgaaatgtggcgctgcgcggatatgaaatccaccgtcgacggcacctgcggtgggccctgcaagaagtactgatcggctcatgccagcatgatatgtt

SEQ ID NO: 440251 - DNA, 366 bp, Triticum aestivum; identical to SEQ ID NO: 436529

SEQ ID NO: 440252 - DNA, 274 bp, Triticum aestivum
tttgttcgcccacgcgtccggtcttgaaggaccagaatatcatgcctggtatcaaggttgacaagggtttggttccattgcccggatccaacaatgaatcctggtgccaaggtcttgatggtttggcctcaaggtgtgctgagtactacaagcaaggtgcacgcttcgcaaagtggcggactgttgttagcatcccttgtggtcctactgcattagctgtcaaggaagcggcatggggacttgctcgctatgctgctattgctcaggacaatgg

SEQ ID NO: 440253 - DNA, 264 bp, Triticum aestivum
tttcgtcgccaggacgcagggtaccaagattgcctcagtgggtctgaagcacagggtgttcgaagtatctctagctgatcttcagaacgatgaggaccaggcctacaggaagatcagactccgtgctgaggatgtgcaagggatgaatgtcctcacaaacttctggggcatggacttcaccactgacaagctcaggtctcttgtgaggaagtggcagacactcattgaggctcatgtggatgtgaagaccactgacaactacat

SEQ ID NO: 440254 - DNA, 335 bp, Triticum aestivum
ttcttcacgcgtccgcggacgcgtgggttgatgtccgggatgacagcagcgtcgccgctctagcgcgacacatcgagagcagatacggaaagcttgacatcttggtcaacaatgcagcggttgttggagttgcagcagacgaggaaggcctcaaagctctgaaccttgatgcagagacatggacatctggcagagcagccactctgctcaaagacgtgttccagaatacctatgaggtggcacgggactgtctcgacaccaattactatggatccaaacgggtaacagaagccctcctttctctactgaaactatccacgtcgggagcaaggatc

SEQ ID NO: 440255 - DNA, 379 bp, Triticum aestivum
tcttcacgcgtccgctcgttgcacaagaattcctcccaccctcgccgtctcgccgccgtcaccaccgcagctagataagagaaaaaaagagagagaagaactcgtcgggagggctcgagatctgtgttcggagaggggaattcttgaggtcggaatcggaacaagcgggcgcgctcgggatcggggttaccatacaatttttcccaggaacctttagtgaatgtgctaatggagtcaaagggtggcaaaaagtctagcagtagtagttccctgatgtacgaagctcccctcggctacagcattgaagacgttcgacctgctggaggcgccaagaagttctctgctgcatactcgaactgcgcgaagaagccatcctgat

SEQ ID NO: 440256 - DNA, 186 bp, Triticum aestivum
actgccacgcgtccgggccgattccctctttctggcactgagcggtgggctcatctttgggacgggcatgggattcgtgctgtggactaccacggtctgcaccaggttactagcagagcttgcttccagcggcgatgagcataggggactcattgcctacgcgtgctggctcgtctacatgctctt

SEQ ID NO: 440257 - DNA, 319 bp, Triticum aestivum
ccacagggcctattataatggtaggccctgggactggccttgcaccttttaggggcttcttacaggaaagattagctttaaaagagaccggggtggaactgggccgtgccatcctgtttttcgggtgcagaaaccgccagatggacttcatatatgaggatgagctgaacaactttgccgaatccggagccctgtctgagttggtcgacgccttttctcgtgagggtcctacaaaggagtacgtccaacataaaatggcagagaaggtaacctgattgataactcaccgattatccatgtactgtcgttgattatatag

SEQ ID NO: 440258 - DNA, 278 bp, Triticum aestivum
tatcgctctctcgactccggccagtctcttcttctctagaaagctagcgaggcttggaggtgagcgaaaatgccggtcagcaggatcgccgcggggagccaccgtgaggtgtacgaggtcggcgccctcaaggcggcgctcgccgagttcatctccacgctcatcttcgtcttcgccggccagggctccggcatggccttcagcaagctgagccccgacggcgcggtgacccccgccggtctgatctcggcggcgatagcgcacgccttcgccctgtt

SEQ ID NO: 440259 - DNA, 347 bp, Triticum aestivum
tcgtcgatggcgatggcgtccatccgcctccttccgctcgctctgctgctcctcctgctcgctgcggcgcacgccgggaccccacggcaggagcccgccatccggctgccgtcgcagcgcgcggcggccgggcaggaggacgatgactccgtcgggaccaagtgggccgtcctcgtcgccggctccaagggctaccagaactaccgccaccaggcagatatctgccacgcctaccagatcttgaagaagggtggtctcaaggatgagaacatcattgtcttcatgtatgacgacattgcgcataacccggagaacccgaggccgggcgtcatcatcaaccaccccca

SEQ ID NO: 440260 - DNA, 378 bp, Triticum aestivum
acctgcatgcagccgccgccagcagctgcgcaaagggtccacaaaccctaaccctagctccaagcttagcttccatcttctcgatctagctagagccatggcgccgaccaagggcgaggggccggccatcggcatcgacctcggcaccacctactcgtgcgtcggcgtgtggcagcacgaccgggtcgagatcatcgccaacgaccagggcaaccgcaccacgccctcgtacgtcgccttcaccgactcggagcgcctcatcggcgatgccgccaagaaccaggtcgccatgaaccccatcaacaccgtcttcgatgcgaagcgtcttatcggcagaaggtttgctgatgcctctgtccagagtgatattaagatgtg

SEQ ID NO: 440261 - DNA, 328 bp, Triticum aestivum
tcgtcgcccacgcgtccgccacgcgtccgctccccccaccgccgcgcgatcccatctgacgccgccccggccgacgacccccgcacgccggccgccatggcgcacggcgaccgcatgaccaccttcgaggagggcgagcgcgagagcgagtacggctacgtccgcaaggtctctggacccgtggtcgtggccgatggcatgggcggtgccgccatgtacgagctcgtccgtgtcggccacgacagcctcatcggggaaatcatccgtctcgagggcgattcagctacaatccaagtttacgaggaaacagctgggctaacggtcaacg

SEQ ID NO: 440262 - DNA, 317 bp, Triticum aestivum
tcgttcctccccttccggttcgggttctggttcggttcgggtccgagagtagctagcctagtctagggtttccgtagttcggagaggagagaaagggagagatccatggcggagacggagtaccgctgcttcgtgggcggcctcgtctgggccaccgacgaccacaacctccagcaggccttcagccagtacggcgagatcctcgacgccaagatcatcaacgaccgcgagacgggcaggtcccgtggcttcggcttcgtcacgttcggcagcgaggagtcgatgcgccaggccatcgaggagatgaacggcaagga

SEQ ID NO: 440263 - DNA, 369 bp, Triticum aestivum
acaaaacgcatgactcaaggggcatgatgcaattgtcgatgctttggccatcactagggactctgatgataaagaagccaacattcttggaccagctagtcaagctgcaagtgtcatcggaaaatctggttctgtcatcaagaggctgcgctcagtttcaaaatcattcattaaaggtaaaccaaaagatccaagtgacgttacacactcatgtgctatgagttttgataatttcgctcagataactggggacactagagctgtcaagaaggcattgatagcaggatcaacaattctctacaaatgggcatcgaaagagaacatttctcttgaaacatctattgatgaacatactccaaccattatact

SEQ ID NO: 440264 - DNA, 308 bp, Triticum aestivum
tgtttgcgacgtcactccatccaagttgaaccacacaccacactgccgtcgcgtcccgtgctcccaggtgagatcgagcgcgagtagccagccgatgagccgtctagtttcccggtggcacctcgacgacgacgcggtcctccgacgatcccccgccgggttcgctttcaggtggctgcacacgccggcatttgcgacggtgtcccccgtggagatctcaggttcaagcccggcggaagtgcagaattttgtgcagggaaaatggataaagtctgctaactggaactggatagtcgatcctttaaatg

SEQ ID NO: 440265 - DNA, 400 bp, Triticum aestivum
tgttcgcccacgcgtccgcggacgcgtggcgagaatgctattttcaccatcccaccagagcttgcatatggtgaggatggctcccctccagtcatccctccaaatgcaacgctgcagtttgatgttgagcttctctcatgggcaagtgtcaaggacatttgcaaagatggcagcatctttaagaagatactagctgaaggcgagaagtgggagaatcccaaagactgtgatgaagtttttgttaaatatgaggcaaggcttgaggatgggactcttattacaaaatctgatggtattgagttcactgtcaaagaagggcatttctgccctgctatatcgaaggctgtcaagacaatgaagaagaatgagaaggccctccttactgtcaaaccacaatatg

SEQ ID NO: 440266 - DNA, 348 bp, Triticum aestivum
tgtttcgagtgagcatgtgctagatgaggttgagaggtccttgcacgacgccctatgtgtgctttctcagacaggaaatgacacgcgtgtcatatttggcgggggatggcctgagatggtgatgtccaaagaggtggatgaacttgctcggtggacccctgggaagaaatctcatgctattgatgctttttcgcgtgccctgcaagccattccaacaatcatagctgacagtgctggtctggatagtgccgagctgatctcccagctccgagccgagcaccacagggagaacagcactgttggaatcgacgtcatcagcggcgggctgggagacatgcagaagcgtgg

SEQ ID NO: 440267 - DNA, 369 bp, Triticum aestivum
tcgtaatatcttgagaatagtagacatacttttatcgattatatttctgctgggtgtcaattgaatttgatggtagccatcgactacacagcttcaaatggaaaccctcggcttccagattccttgcattatattgacccctccggacggtcaaatgcgtatcaaagagtaatactggagattggagatatactacagtactatgacccagctaagcgtatcccctcttggggctatggggcaagacctattgacggtcctgtttcacactgtttcaacttaaatggcagcacttatcagcctgaggttgagggaatacagggaattatgtcagcttatatcagtgcgctacgcaatgtgtcattggct

SEQ ID NO: 440268 - DNA, 384 bp, Triticum aestivum
tcggtacaatgctggctcaaccgatttgggctgacaaattgcgtgggttcatgaattatagaggtaccgcaaaaattaggttgcaagtcaatgctacgcctttccaggctggtaggcttatcctagcatatattcctcaatatgttcatgagccaaggagttatactatccatttaacttccttaacaacaattactcaattgccccatgtggaaatgtccttgcaagacactgaggcggagctggtcataccatatatagctccaaccactcattatagtgccttgtctggtttctatgattggggtacagtcttttgttatgtttattccccattagcaactgggacgggtagcaatactgatcgctatactgcttggatga

SEQ ID NO: 440269 - DNA, 327 bp, Triticum aestivum
tcgttccgtcgccccgctgacctcaaccagccgccggtgaaatggcccctaagcgaggcggtaaggcgccggtcccggcgaagaagaaaacggagaaggtgaccaacccgctgttcgagaagaggacgaagcaattcggcatcggtggcgccctcccgcccaagaaggacctccaccgcttcgttaagtggcccatggttgtgcgcatccagcgccagcgccgcatcctcaagcagtgcctcaaggtgcccccggcactccaccagttcacccgcaccctcgacaagaaccttgcaacaaacttgttcaagatgcttcttaagtacc

SEQ ID NO: 440270 - DNA, 320 bp, Triticum aestivum
atcgttgacgcgtgggcggacgcgtgggcgagggtgggacgtttgctttgtattcactactctgcaggcatgcaaagatgagcctgcttccaaaccagcaagcggcagatgaagagctgtcaacatattatcagcctggggttgatcggactgctatgtcctcaccattcaaaaggtttctagagaagcacaagaagctgcggacatgtttgcttctttttgttctgcttggagcatgcatggtgataggtgatggcgtccttacacccaccatctccgttttggcagccttgtctggattacaagaccgaggcacaggt

SEQ ID NO: 440271 - DNA, 347 bp, Triticum aestivum
ttttatagcgtgcgacgaatctctgcccgatcgaatctccagggtgataacagggatggctaccggtagtgatgctggaaagtccgctgaggcagtgttggagtggcctaagcaggacaaaaagaggatgctgcatgctgtttaccgtgtgggagatctcgaccgcacaattaagtgttacacagaatgctttgggatgaagctgctgaggaaaagagatgtccccgaagagaagtacaccaatgcctttcttggatatggacctgaggatactaattttgcacttgagctgacttacaattatgggtgttgacaagtacgacattggagcgggctttggacatttt

SEQ ID NO: 440272 - DNA, 342 bp, Triticum aestivum
ttgttcgcggacgcgtgggcggacgcgtgggtgccgtgatgctgtgccttgagacatggtactttcaggtgcttgtgatcattgctggattgctccccaaccctgagattgccctggattccctctctgtgtgcatgacgatttatggttgggtgttcatgatctccgttgggttcaatgccgctgcaagtgtaagagtgagcaatgagcttggcgccggcaaccccaagtctgcatttttctctgtgtgggtcgtgaccgggctctctgcaacaatctctaccatccttgctgttgtgatcctctgcctccgcaaccacatcagctacttgttcacagatg

SEQ ID NO: 440273 - DNA, 215 bp, Triticum aestivum
tcgtcttgagggtgacaacatgattgagaggttcaccaaccttgactggtacaagggcccaacccttcttgaggcgcttgacccatatcaacgagcccaagaggtcgtctgacaagcccctccgccttccccttcaggacgtttacaagattggtggcattggaactgtgccagttggtcgtgttgagactggtgtcatcaagcctggtatggtt

SEQ ID NO: 440274 - DNA, 278 bp, Triticum aestivum
gcgtccgaaagacagtgtagctagtaagtgagactgtaagtgtcgagacatggagtactctcgccgcagcaggttgctcctggtgtgctcagttcttgtgctctgcctcgtaaccggagactcatggtgcaccaagttaagcagcaatttctatgactggacgtgccccggagtgtacaacgtggtccagcaacacgtgttttctgccatgagggaagagctgaggatgggggcctccctgctcaggctccatttacatgactgctttgtcaatgggt

SEQ ID NO: 440275 - DNA, 205 bp, Triticum aestivum
tcttctttcagaagcgttgtatgttgcagagcagaaggcgagggaagcagtgcagatgcgctccaaggtgcagagggagctaatgctaaaggagaaggagaggaaggagcaagagttgagggcacttgcacagaaggcccgcatggaaaggtctggtgctccacctccatccacgggtatgcctgttggaggtgggagggagaga

SEQ ID NO: 440276 - DNA, 262 bp, Triticum aestivum
tgtgttcgcccacgcgtccgtccacgcgttcggcttggtgacaaggctaagatcagcatttatgatcctcaggtgactgaggactaattccagcgtgaccttgcgtggaactaatttgtctgggaccaccctgttcatgtccagcccatgagccccacgactacaaaggaagtctcggctacgtgggatgcatatgcggctaccaaagatgcccatggcatctgcatcatgactgagtgggatgagttcaagactgtggact

SEQ ID NO: 440277 - DNA, 440 bp, Triticum aestivum
gttctgctgtagcggatgcggctgtcggaccccaacggcgtgctccagagctgggatcccaccctcgtcaacccctgcacctggttccacgtcacctgcgacagcgccagccgcgtcgtccgcctggatttaggcaactccaacgtctccggctccatcggccccgagctcagccgccttgtgaatcttcagtacctggagctgtacaggaacaacctcaacggcgagatcccaaaagagttgggcaagctgaagaatttgatcagcttggatctgtatgccaataagctcaccggaagaatcctcaagtccctttccaagctcagctcactgagattcatgcgtttgaacaacaacaaacttgctggatcaattccacgggagctggccaaactcttcaacctgaaagtcattgatttgtctaacaatgacttatgtgg

SEQ ID NO: 440278 - DNA, 453 bp, Triticum aestivum
tcgcttcgcgtccgaacgagagcagcgagatcatccggatgctcaacgccgagttcaacgacatcgcggagaaccccgggctggacctcaacccggcgcacctccaggtctccatcgacgaggtcaacggcctggtctacgacgccatcaacaacggcgtctacaagtgcggcttcgccaagaagcaggggccatacgacgaggccgtcacgacgctgtacgaggctctggacaagtgcgaggagatcctgggcaagcagcggtacatgtgcggcaaccagctcacggaggccgacgtccgcctcttcgtcacgctcataagatttgacgaggtttacgccgttcacttcaagtgcaacatgaagctcctgagagagtaccctaacctgttcaactacaccaaggacatctaccagatccccgggatcaacagcacggtgaacatggagcaca

SEQ ID NO: 440279 - DNA, 400 bp, Triticum aestivum
tcgcctacgcgtccgcccacgcgtccgcccacgcgtccgctcgaagtggtcatacagtgactagagcaggccctgttttaattctttttgggggcgaggataccaaagggaagaaactacatgaccttcatatgtttgatctgaagtccttaacatggcttcctttgaactataaaggtgctggaccttctccaagatccaatcatgttgctgcactttacgatgacagaattcttttgatttttggaggcgaatcaaaatccaagaccttgaatgatgtccatgctctagattttgaaacaatgttatggtcaagaatgagaacacatggtcatcatccatcacctcgggcaggttgctgtggagctctctgtgggacgaaatggtatatagcaggggg

SEQ ID NO: 440280 - DNA, 481 bp, Triticum aestivum
tcggtatcggacgaggggcgcgtggatggcttcagcggcggtgaccgttctcagggcatgcgagagctagcgcaggcgatacggcgccttggtgaggcctacgagcgcgtggagacagcgaagctggagcaggccgccgagatggagcgccagcgtctggacttcgcacgggagcttgagtcgcaacgcgtgcagttcttcctcaatacgcagaaggagctctcacagggcaagagccacatctctcccgctgcggctgcctcccactcccaggtaggtgccgccactgttggtggctcatctaggaggatggcgtccgtaccagattccacatcgagaagaatggcaccgtttcctgatgcccggacgagcagcaatcaccatgaccggtaccgtgccagcgacggtagcagacaccatcaccgccctgccctgcgtccgcattatcagtaccatgagaacaatatggcagactctgcag

SEQ ID NO: 440281 - DNA, 175 bp, Triticum aestivum
cattcaatatcccctgaattcatcaagatgaacccccttgggaaggttcctgttcttgagactcctgatggtgctgtttttgagagcaatgctattgcacgctatgttgctcgctcaaagggtgacaacctgctttggggtggttctctcattgaatatgcacgtgttgagcaat

SEQ ID NO: 440282 - DNA, 426 bp, Triticum aestivum
cttaatttggggaacacgtgactctggattaatatcccctattgaagatcccatggcaattatgcagaaaggctattctattactatactgcttgctgttcttacctttggagggtctactcgttggctcctgtacactgaacaagcacctactgcatggttcaattttgccttgtgtggcttggtgggcatcatcacagcatatgcttttgtttggatttccaagtattatacagattataagcatgagcctgtccgccttttagctctttcaagttccacaggacatggaactaatattattgctggagtaagtttgggaatggaagcaacagccttaccagttctagtgatatctatagccattatatcagcattttggttgggacgtacctgtggcttggtagacgagcttggcaatccaac

SEQ ID NO: 440283 - DNA, 243 bp, Triticum aestivum
ttgctgtcgcgtggggcgccttcccacaccgtgcccttactgatctgggtcgccggcatgggccagtgatgctcctcaagctaggcgaggtccccctcgtggtgatctccagcgccgaggcggtggcccaggtgttcaaggcgaatgatgtcgccctgtcgaaccatagtagctccaggttgcaggacattcgtgggcttcggcggtaagggcatcttgatcgccccctatggtgagcacttg

SEQ ID NO: 440284 - DNA, 470 bp, Triticum aestivum
ttgcttatcgcgtccgcttcgattatattgaggaagacaggttaaagatatacgagttgcttactggtaacatacaaggcgctttacttgattcaccaatcgactggaaaaggtaccttggtttaatcatgtggtatcagttgtcaccagatacatcacttgatattatcattcggtgttatcaccaactacttggtgagggcaaagttccaaatcctgttcctgtatacatcgatgaaggacctctcgaggaagcacttcagtggtccccaggtgaccggtttgacatatctttttatttaatgcttcttcatgcaaaccaagatgagaagtttgggcttctaaagactatgttcagtgcattctcgtcatcgtatgatcccatggactaccatatgatctggcatcaacgatctattctcgaagctattggtgctttcagtacaaatgatcttcatgtactggatttg

SEQ ID NO: 440285 - DNA, 248 bp, Triticum aestivum
tcgactcctttgtcgtcggcctagagggctcgcctgatctcaaggccgcgagagaggtggctgactatcttggaaccatccatcacgagttccacttcaccgtccaggatggcatcgacgccatcgaggaggtgatctaccacaacgagacgtacgacgtgacgaccatacgcgcgagcacgccgatgttcctgatggcgcgcaagatcaaggcgctcggggttaagatggtgctgtctggggaaggc

SEQ ID NO: 440286 - DNA, 341 bp, Triticum aestivum
tcgcctcacgcgtccgctcgcggtggccctggccaagtacacagcggatatttccgcgaagttcgccgccgagaggggcgccgtcaccgtcgtgctctccggcggatccctcatctacgccctcaggaagctgacggaggcgccgtacctggagacggttgactggagcacgtggcatgtgtactgggtagacgagagggtcgtgcccaaggaccacgaggatagcaactacaagctcgccctggatgggttcctctccaaggtaccaattcctgctggtcaagtgtatgctatcaatgatgccttgtctgctgagggagcagcagaggactatgaaacta

SEQ ID NO: 440287 - DNA, 320 bp, Triticum aestivum
gggattgtcccgtggttccagcacgcgctgccggacccctgcctcttcgagcaggcgcacggcgaggcgctgtgggagatgtccgggcacgacgcggcgctggacgcgctgatcaacagcgccatggtctcggacagccgcttcatcgtggacatcgccgtcagggagagcggcgacgttttccgggggataagctccctggtcgacgtgggcggtggcctcggcgcggcggcccaagtcatctcggaggcgttcccgcacctgcagtgcagcgtgctggagctcgagcacgtcgtcagcaaggcgcccgccggcacctg

SEQ ID NO: 440288 - DNA, 450 bp, Triticum aestivum
tcggttataacttcttttacttccgcgcggcgatctccactcccgtccaaacccatccaactcaccgcccaaggtcgccgcggatccagtagcctcgtcggagcggagatgaagatcacggcgctcgtcgtgctgaagccgtcggcgggaggcgccgggggctcctcctccagcggcgggcagggctcggaggcgctcgtgctggccaacgccacggacgtcagccacttcggcttcttccagcgcggcgccgcccgcgagttcatcgtcttcgtcgcccgcaccgtcgcccagcgcacccagcccggccagcgccagtccgtccagcacgaagaatacaaggttcactcacacaacagaaatggcctctgcgtggtggcattcatggatgatcactatcctgtacgaagtgcattttctcttctgaataaggtacttgacgaataccag

SEQ ID NO: 440289 - DNA, 348 bp, Triticum aestivum
tcgggctattctgtcacatactccagatttgggacaaggtggctccactgccgtaactgccatccttataaacggcagtaagttgtgggtagctaatgttggggattcgcgagctgttcttctgaaaggaggtgaggccatacagatgtcaattgaccacgacccgaatgctgagcgcggcgctattgaaaataagggtggttttgtttcaaatatgccaggagatgttcccagagtctgtggacagttggccgtgtccagagcgtttggggacaggaatctaaaatcacttttgaaatcagagcctgatgtgaaagttgatgatatcgatcacactgctgagctagt

SEQ ID NO: 440290 - DNA, 425 bp, Triticum aestivum
ttcgttttcagatgctcagcttcaccctcgccatcaccattgtcggtgttcccgtcggtcttcctgccgtcgtcaccaccaccatggctgtcggtgctgcctacctcgccaagaagaaggctatcgtccagaagctgtctgccattgagtcgcttgctggtgtcgagattctctgctctgacaagaccggtaccttgaccaagaacaagctctctcttgctgagccttactgtgttgccggtgtcgaccctgaggacctcatgctcactgcctgccttgctgcctcccgcaagaagaagggtattgatgccatcgacaaggccttcctcaagtctctccgcttctacccccgcgccaagtctgttctgtccaagtacgccgtcaaggagttcttccccttcgaccccgtctccaagaaggtcact

SEQ ID NO: 440291 - DNA, 254 bp, Triticum aestivum
cctatcctcccagttctgttcctcggccattctagccaccatgccgggctccatcgccttcggtcgcttcgatgactccttcagcttggcctctttcaaggcctacatcgctgagttcatctccaccctcatcttcgtcttcgccggcgtcggctctgccatcgcctacactaaggtgagcggcggcgcgccccttgacccatccgggctgattgccgtggcgatatgccacgggttcgggctgttcgtcgcgg

SEQ ID NO: 440292 - DNA, 211 bp, Triticum aestivum
cctcgcgtccggtgaagccctgctcccgcgcctactcccacgactggaccgagtgccccttcgtgcaccccggcgagaacgcgcgccgccgcgacccgcgccgctactcctacagctgcgtgccctgcccggagttccgcaagggcgggtcgtgccgtaagggcgacggctgcgagtacgcgcacggcgtcttcgagtgctggctccaccc

SEQ ID NO: 440293 - DNA, 293 bp, Triticum aestivum
ctttctttcccccgaccgccgccgccgccgccgcctcctcctctcggttccctctccttccttcgagagcttcagccatgggtaaggagaagactcacatcaacatcgtggtcattggccacgtcgactctggcaagtcgacgaccactggccacctgatctataagcttggaggcattgacaagcgtgtgatcgagaggttcgagaaggaagccgctgaaatgaacaagaggtctttcaagtacgcctgggtgcttgacaagctcaaggtcgagcgtgagaggggtatcacc

SEQ ID NO: 440294 - DNA, 393 bp, Triticum aestivum
tctgcttacgcgtccgacatgattgagaggtccaccaaccttgactggtacaagggccccacccttctcgaggccctggaccagatcaatgagcccaagaggccctcagacaagcccctccgtcttccccttcaggacgtgtacaagattggcggcattggaactgtgccagtgggccgtgttgagactggagtcatcaagccaggcatggttgtcacctttggtcctactggcctgaccactgaggtgaagtccgctgagatgcaccatgagtctctcctggaggcgcttcctggtgacaacgtcggcttcaacgtcaagaacgtggctgtcaaggatctcaagcgtgggtacgtcgcttccaactccaaggacgaccctgccaaggaggct

SEQ ID NO: 440295 - DNA, 327 bp, Triticum aestivum
acgcgtgggcggacgcgtgggcgcgggcaagaagcctaaggccgtgaagcggctgccggcgggcaagacggcgtccaaggaggccggcggcgagggcaagacccggggccgcatgaagggcagcaaggcgaagaagggcgtggagacgtacaagatctacatcttcaaggtgctgaagcaggtgcaccctgacatcggcatctcctccaaggccatgtccatcatgaactccttcatcaacgacatcttcgagaagctcgccggggagttcgccaagctggtccgctacaacaagaagcccaccatcaccttccgggagatccagac

SEQ ID NO: 440296 - DNA, 287 bp, Triticum aestivum
tcggtttccgccagcagctgcgcaaaggctccacaaaccctaaccctagctccaagcttagcttccatcttctcgatctagctagagccatggcgccgaccaagggcgaggggccggccatcggcatcgacctcggcaccacctactcgtgcgtcggcgtgtggcagcacgaccgggtcgagatcatcgccaacgaccagggcaaccgcaccacgccctcgtacgtcgccttcaccgactcggagcgcctcatcggcgatgccgccaagaaccaggtcgccatgaac

SEQ ID NO: 440297 - DNA, 347 bp, Triticum aestivum
cctcgcgttcgcccacgcgtccgctcattccttcctaccacccccggcaccaccagcccaagcagagccatggcgcccagcggagacaacaccgtggccaacgtccacagcggcatcgacagcaccaacaagacgctgctcaagagcgacgccctctacacctacatcctcgacaccaccgtgttcccccgcgagcacgagtgcatgcgcgacctgcgcctcatcacggacaagcacccatggggctacatgcagtcgtcctcggacgaggcgcagctgctggggatgctgatcaagatggcgggcgccaagaagacgatcgaggtgggcgtgttcacgggctactc

SEQ ID NO: 440298 - DNA, 346 bp, Triticum aestivum
cttattttggctagtgatgggctgtgggatgtggttccaaatgaggacacgccgtctcgctcgttaagatggaggaggaccccgaggcggcagcccggaagctgacggagactgctttcggccgtgggagcggcgacaacatcacctgcgtcgttgtcaagttccagcacagcaagacgggcggtggtgactcccctcccatctctcccccgggcaatcaaatttgattgctactattcgtccgctatacatgttgttgttagcctttaaatttacagcagctggatggatgttttctctgttgaatgagttgtatgtacattggcggctggtactagatggcgac

SEQ ID NO: 440299 - DNA, 427 bp, Triticum aestivum
tcgcttgaacagtggttgcaatacaagatgagagatcacagcatcagaacaaggccaaggctctcaaagttctccgggcaagactatatgaattggaaaggcataggctccatacagaccggtcgaagctccgatcagagcagattggaagtggtgacaggtccgagcgcatcagaacatacaacttcccacaagggcgtgtcactgaccatcgtgtcggggtcacgcaccactccatagtggacgtcatggagggagagagcctggacgtcttcatcgaagcgctgctgctgcaagaagagatggatgcaattgcttcgtttgcttcgtgagccctaatttttgtggatttcttcctggagcgacaaaccgcatcataaacacactgaacactgaaccaacatagaggagaaactctaggattatg

SEQ ID NO: 440300 - DNA, 366 bp, Triticum aestivum
ggttaaggagcaggcggcggcggtgcccgaagaggagaagcacggcgacctagcccgagctcgcaaccatggctaggggtttgaagaagcatctgaagaggctcaatgccccgtctcactggatgcttgacaagcttggtggagcttttgcccccaagccatcatctggtcctcacaaggccagggagtgcctgcctctgatcctcatcctgaggaacagactgaaatatgctctcacctaccgtgaagtgcaatctatccttatgcagcgtcatatcatggctgatggaaaggtccgcactgacaagacctaccctgctgggttcatggacatcatttccattcccaagactggtgagaactaca

SEQ ID NO: 440301 - DNA, 284 bp, Triticum aestivum
tcggttaggcaatctccgctatggcatggggaactgcatcatgcccaaaggttgagaaaatatttggtcccggcaaccagtatgtcacagctgctaaaatgattcttcagaacagcgaagctatggtctctatagacatgcctgctggcccttcagaagttctggtaattgctgacaagtatgccaacccagttcatgttgccgctgatctgctatctcaggcagaacatggcccagatagtcaggttgttctagttattgcgggagatggtgttgatttaggt

SEQ ID NO: 440302 - DNA, 275 bp, Triticum aestivum
ctttaattatagtcatggctgctattggaggaaacactgctggtccaggtgatgctgttcttaatgtgtacataaaccatgacaagaaattcgcttttgtggagatgaggtctgtggaggaagcaagcaatgcaatggcactggatggcattttatttgaaggtgcaccagtgaaggttagaagaccaacagactataacccttctctggcagctgccctgggcccaagccagccaagctccaatttgaatcttgctgcggttggcctaacacca

SEQ ID NO: 440303 - DNA, 431 bp, Triticum aestivum
tctgctttgttctgcttgggcggcgtcttctgaggcgcaggcttttctccccctccgctctaccccggcggccgattcgcgcccccctcgctcgaccctccaggtcagggaggcttctctcctaggagaggatcaatgtccaattatcacgacgatcacgtcgaagacatggaggatgattatgacatggacgaccccgctgaggacatggttgacgcccaccacgagcgaggtttaagagactccgattcggaggatgacgagtatgcccattcgaatgataagatcccagatacttcggcagcggatgcaagaaaagggaaagacatccaaggaataccatgggagaggctagctatcacatgggaaaactacagacagaccagattagagcagtacaaaaactatgagaacattcctaattctggaga

SEQ ID NO: 440304 - DNA, 359 bp, Triticum aestivum
  unsure (1)..(359): unsure at all n locations
tcgcaaaccttgattcgacatggcgaagtcgcccatggcgatcttggctctcgggctagcagcactagtcctatccggcgccgggctggtggccgcgcagaactgcggctgccagccgaacgagtgctgcagcaagtacggttattgcgggaccgatgccagctactgcggacaagattgtcggtcgggcccgtgcacggcgagcggcggcgggagcggcgatcccgtggagagcgtcgtcaccgacgcgttctttgacgggatcaagtcccaggccgccgacgggtgccccgggaagagcttttacacgcgccagttnttcctggacggcgcccaggcgaaccccgacttcggcaaag

SEQ ID NO: 440305 - DNA, 132 bp, Triticum aestivum
ttgcatcccgccgccgcctcctctcggctccttcttccttcgagtttcagccatgggtaaggagaagactcacatcaacatcgtggtcattggccatgtcgactccggcaagtcgaccaccactggccattc

SEQ ID NO: 440306 - DNA, 312 bp, Triticum aestivum
cctatcgctagcgcccacgcgtacgcggacgcgtgggtgcatacgacacaaagcataacaagatgaatttcttcgacccatcgaggaaagaggacttcctgttcatctctggcacaaagatgcgtagccttgccaagaaccgtgagagcccaccagatggttttatgtgcccgggtggctggaaggtcctcgtcgagtactacgacagcttggcaccaccagaaggcagcagcaaaccgcgagaggcggttgcggcttagaagccgtggcgttgattctcgtatcatgaaccaatgatatatgattgtatat

SEQ ID NO: 440307 - DNA, 181 bp, Triticum aestivum
ctttggttatccactccaatccaatccccacagaaatccccatctcaaaaccctagcccgtccgatcccggcgagatggccaacccgagggtgttcttcgacatgaccgtcggcggcgcgccggccgggcgcatcgtgatggagctgtacaaggacgcggtgccgtggacggtggagaact

SEQ ID NO: 440308 - DNA, 361 bp, Triticum aestivum
gtcttgttcatccacggtggcaacttccaaggcacccccattggtgtctccatggacaacacccgcctcgccattgctgctattggcaagctgatgtttgcgcagttctcggagctcgtgaacgacttctacaacaatggcctgccttccaacctgtccggtgggcgcaacccgagcttggactatggtttcaagggcgccgagatcgccatggcctcgtactgctctgagctgcagttcttgggcaacccggtgactaaccatgtccagagcgcggagcagcacaaccaggatgtgaactcacttggtctgatctcatccaggaagaccgccgaggctattgacatcttgaagatcatgt

SEQ ID NO: 440309 - DNA, 281 bp, Triticum aestivum
tcggtacgcgtgggccgtagtttaggatttttatgcaattttattctgactcttttctcccaccaatctctctggcctgcttcacgataatcgaccagttctctagtcttactccctctgttcctctctgctctgctttctgactcaaactgcaacaatggctgccccgacctctgcaatcgggttcgagggctactagaagcgcctcgagatcaccttctccgaggcatcgatctttgccgaccctcatggtcgtggcctgcgcgccctctctagggccc

SEQ ID NO: 440310 - DNA, 206 bp, Triticum aestivum
tcattaacattactttatctaaggaaggtatcctctctgcaattgatactgggaagtctgaaggaggtccatctggccgacattgggttctggatccaattgatgggactaaaggtttcttgagaggaggccaatatgcaatcgcactggcactgcttgatgagggcaaagttgttttgggcgtgttgggatgtccaaatcttcct

SEQ ID NO: 440311 - DNA, 142 bp, Triticum aestivum
ctcgcctacgcgtccggggagcagccgcagccatgggtcgcgtccgcaccaagaccgtgaagaagacctcccgccaggtcatcgagaagtactactctcggatgaccctcgacttccacaccaacaagaaggtgctagagga

SEQ ID NO: 440312 - DNA, 332 bp, Triticum aestivum
tgcttagttgtaccaccgtcccagcatcttacaaagcgaattgttaagcttgaaaggggtttgaggtattattatccagcaatgtgcttgaatcagcaggatgaaaattcttctcttctgcattatattcagattcatcaggatgatctcaaacaaaatgtcctacttcagttgcttgctgttgtagctaagcaaccggcttttcaccaattacgttcggtcgagcaacttggttacatagcactgcttagacagagaaatgattcaggagtccgcgggttgcaatttataatccagtcaaccgtgaaggatccatccaatctggatgccag

SEQ ID NO: 440313 - DNA, 324 bp, Triticum aestivum
tcgcttcgcgtccgcctgccaatcccctcaccggctgcgctcccacgccgccgaatccgagacctgatctcggattcaccgcagcgcgaccaaaccctcaggcgatccccggcacctcctccccgacgcttcagccatggcaggaatggcaccggaaggttcccagtttgacgctaagaactatgattctaagatgcaggagctgctgaaccaaggtgagactgaggagttcttcacctcttatgatgaagttcatgagagctttgatgacatgggtctccaagagaacctcctcagaggaatttatgcttatggttttgagaa

SEQ ID NO: 440314 - DNA, 231 bp, Triticum aestivum
gaaaaggacttatagtgtccgatgttccttatgccgagacatgtccattcagaaatgaagccatcaagaataacctagagcttgtgctacttacaacaccagccacaccagcagagagaatgaagaaaatcactagcgcttcagaagggtttgtataccttgtaagtgtcaatggagttacaggtccacgaccaaatgtgaacccgcgtgtcaaagatcttcttaaggaga

SEQ ID NO: 440315 - DNA, 451 bp, Triticum aestivum
tgcttttccccacggatccttctcgtcttccacgtgattcgagtcgtctcgcctctctccgtcagcccaaacatggactcaagcaggcgcccgagtggaatccagcaattgcttgctgcagagcaagaagctcagcaaattgtaaatgctgctagggctgctaaaacggcgaggcttaggcaagccaaagaagaggctgagagagaaatagctgagtaccgtgcacaaatggaggctgatttccagaggaagctcaccgagaccagcggtgactctggcgcaaacgtcaaacgccttgagcaagagacaaacgtaaagattgagcagctcaagcagcaggcagcaaacatctctccagaggtgattcagatgcttctgaggcacgtcaccactgtgaagaactaaaggttgatgagtcagccctgcatatgatggcaactttgtactatct

SEQ ID NO: 440316 - DNA, 380 bp, Triticum aestivum
ttaaaaaatatttttcttgggaggagtgcatcaatctccgtgaagttaagtccctccgaaggatgaaccatccaaacattgtgaagctcaaggaggtcataagagagaatgatatgctgttctttgtttttgaatacatggaatgcaatctctatcagctgatgaagagcaagggcaagcctttttcggagactgaaatccggaactggtgctttcaaatatttcaagctcttagtcacatgcatcaacgtggatactttcatcgtgaccttaagcctgaaaatctgctagttacaaaggagctcatcaaggtagctgattttgggcttgctcgtgagattatttctgaaccaccatacacagaatatgtgtcaactcgc

SEQ ID NO: 440317 - DNA, 230 bp, Triticum aestivum
tggcttatcgggacagtgcagagcttccctgtagagaagtttaggagcaacgatgaagagtagcacactcgtggtcatcctggttctccaggccgtcctggtcatggggatcctctcacaggccaacgccgagttcccaaagtgctgcgacagctgcaggttcttctcgggggccgtggtctgcgacgactcctgccccaagtgccgcgacggctgcgtgaactgccgcg

SEQ ID NO: 440318 - DNA, 340 bp, Triticum aestivum
tcccacgcgtccgaccaaaccaaagctgcggcggcgcgcgcataggaggcgaatcagcagcggaaccaagccgccgacgccaccatgggtatctcgcgtgactccatgcacaagcgccgggccaccggtgggaagcagaaggcttggaggaagaagcgaaagtatgagctcggccgccagccagccaacactaagctttcaagcaacaagacagtgaggagggtccgtgttcgcggaggtaacgtgaagtggagggctctccgtcttgacactggtaacttctcatggggtagtgaggctgtgacccgcaagacccgtctctggatgtggtttacaattc

SEQ ID NO: 440319 - DNA, 231 bp, Triticum aestivum
tccctgaccaagagagagatccaggacttggccggccggccgtagatcgagaaggaggaggagacatggtgcgcgggaagctggaggtgctgctcgtctacgccaagggcctcgacgactccgatttcttcaatagcatggacccgtacgtgatcctcacctgccgcagccacgagcagaaaagcaccgtcgcatcaggagcagggagcgagcctgagtggaacgagacct

SEQ ID NO: 440320 - DNA, 270 bp, Triticum aestivum
tgccctcgcgtccggccagacctggaggagcattactgcgggatgtacgtgggcaatggctacgcgaagcgtgcgtacatgctaggccccgtgtcactacgaccgccgtcgtcaccggaagccgacgactcacggtacaccgactggcttgactcgaagccaagccggtcggtggtgtacgtgtgcttcggcagcctcgcccacgtctccgacgctcagctggacgagctcgctctcgggcttgaggcctcagggatggcgttcctgtgg

SEQ ID NO: 440321 - DNA, 314 bp, Triticum aestivum
tttgtgtcaacatgcagattgacccggcgaaatacaagagcatctcatctggatttggtgttctgttaaaggagcaaggagctaggggattcttcaggggatgggtgcctaccttgcttggttacagtgctcagggggcttgcaagtttgggttctacgagttctttaagaagacctactcagatatggctgggcctgagaatgctgtgaagtacaagaccctgatttaccttgcagggtcagcttctgctgaggtaattgctgatatcgctctgtgcccctttgaagctgtcaaggtccgcgtgcagacacag

SEQ ID NO: 440322 - DNA, 346 bp, Triticum aestivum
agccgtcctccgcctccccgtgtcgctcgctcccacctctcgccgccgccgtcgtcgcccgcgcagccgcaaaatgccgttcaagaggttcgtggagatcgggcgggtggccctggtgaactacggcaaggactactggcgcctcgtcgtcatcgtcgacgttgttgaccagaacagggcacttgttgatgctccggacatggtccgctgccagatgaacttcaagcggctctctctgaccgacatcaagattgacatcaagcggatccctaagaaggcaactttgatcaaagcaatggaggaagctgatgtgatgaccaagtgggaaaacagctcatggggcaag

SEQ ID NO: 440323 - DNA, 409 bp, Triticum aestivum
ttaaacctttctccttctgtcccgcaaacccccgagagatcacagcatgttcggcttcggtcaccacggccaccatggccagaaccccccggcccacgctccggccgccgccggaggcaaccagcccaccttcaagatcttctgcaaggccgacgagggctactgcctctccgtccgtgacggcaacgtcgtcctcgccccgtccaacccccgtgacgagcaccagcactggttcaaggacatgcgcttcagcgcccagatcaaggacgaggagggtaaccccgccttcgccatcgtcaacaaggccactggcctcgccgtcaagcactcgctcggccagtcccacccggtgaagctcgtgccattcaacccggagtacctcgacgagtccgtgatgtggacggagagc

SEQ ID NO: 440324 - DNA, 227 bp, Triticum aestivum
tggattgcctttgtggcctccttggtagccatcatccttgtccagacggatattctggtcaggcaccacgtgctggaggcagccatgatactcgatctgtttggcctcatcggcgcgtatgccgccgggagctgccgggacgtgaacacctccatttatgccatagctttggcaggcgccgtcctggtctatgtggtgatccatatcgtcttcttcacgctggacca

SEQ ID NO: 440325 - DNA, 335 bp, Triticum aestivum
tttcatgtccacaacacacaacgaacccatctcatccactctttcaagcaaggcaagagagatcgagcgagcaatggctcccatgctcaaggggatcgtggaggacgcgccgaagagggcggcgtacgtgaccttcctcgccggctccggcgactactggaagggcgtggtgggcctggccaagggcctccgcgccgtcaactccgcctacccactcgtggtggccgtgctccccgacgtccccgaggaccaccgccgcaagctgctcgcccagggctgcctcgtccgcgagatcgtgcccgtgtacccgccggagagccagacccagttcgcca

SEQ ID NO: 440326 - DNA, 313 bp, Triticum aestivum
ttggactctgtgcttgacgcgtgcctcgcccaagacgctgacagcaaggttgcctgtgagacatgcaccaagaccaacatggtcatggtttttggtgagatcaccaccaaggccactgttgactatgagaagattgtgcgtgacacctgccgcaacattggcttcatctctgatgatgttggccttgatgctgaccggtgcaaggtgcttgtcaacatagagcagcagtctcctgacattgcccagggtgtgcacggacattttaccaagcgccctgaggatattggtgcttgtgaccagggtatcatgtttg

SEQ ID NO: 440327 - DNA, 296 bp, Triticum aestivum
tgacgaatgtctcatcaagaggacgctggatacaaatgtggattttgactgtggcctgactgacagagcgattggataccctacagaaatcgtacctgtgttatttgcattacctcgcatggctggttggctagcacattgctaggagcgacttgatgaccctgtccataaaatgatgaggcctcaacaggtatacgcgggcggttggctgaggcattacacccccgtgagggaacgagtggcatctaaccagggcgaggaacttggtcagatcgctacatcgaacgcaacgaggc

SEQ ID NO: 440328 - DNA, 147 bp, Triticum aestivum
tcgctcgcaacacggatggcctagacgactccaaagagtttgttgcagcaactgtccacatacatcagatggctgagctggactctgaaaggtggggcctgcgctgccaagctgctttaagcaaattcgatctggatggtgatggat

SEQ ID NO: 440329 - DNA, 376 bp, Triticum aestivum
ttggtttgtaataggcacgagatggcccgtgtagcggagcaaaaactccagcctagttgcctcggtgacgcgctgacggcgaggaacgatgccgacaacctcaccgagctcatcccgtcgctgcccgtcgagaagcggctagtgccgccgcccgccgacatgcagaggcgacagcaccgtgggtactggttccccgagtggcacctgtcggccctggcggcagtccgcgatcacttcgagcccaagccaacggacatcttcctcgtgagctgccccaagtctggcaccacatggcttaaatctctagccttcgccactgtgcaccggcacgtccacccgtcatccagccaggagcaccctctgctccaccaaaacc

SEQ ID NO: 440330 - DNA, 227 bp, Triticum aestivum
tgcatggacctcttgaggaagcgcatggagccagaggagaagtgcctgagggatgccaagatggacaagagcactatccatgatgttgtgcttgctggcggtcccaccagaatccccatagttcatcagctgctgcaggacttcttcaacgggaaggagctctgcaagagcatcaaccctgatgaagctgtggcctacggtgctgccgctcaggctgcaatcctcag

SEQ ID NO: 440331 - DNA, 216 bp, Triticum aestivum
tgcgttcatggggatggcggactggttcaggaaggactttgttggacctgtgccatcgccgttcgaggacgtgcatggcgcggccatcttcgaggagagcatgacgctcctggacccggagatggatcagctgatccacgacgccgtcgctgctcacgaccacatggggatcggccccgtgctccggcagtgccgtgagctcttcgaggggcttga

SEQ ID NO: 440332 - DNA, 305 bp, Triticum aestivum
ttcgtttgaccagaagaagatggagacgagccggcgcggcgggttcgcggacgaggccctggcgcccaccgagtcggacatcgacgagaccttccagcggatggtgggcgggctgggcaagacgccccaggaggtgttcgacgcgctcagggcgcagaccacggacctcgtcttcaccgtgcaccccacccagtccatccggcggtcgctcctggagaagcacgccagcatccggacgtgcctcacgcagctgtgcgtggagggcgtgtccgagaacgagaagcaggagatcgacgaggccctgc

SEQ ID NO: 440333 - DNA, 124 bp, Triticum aestivum
tgctttatctgcgagtttttccgtgatgcccaagagaaggttcttccgtatgcggactatatctttggaaatgaaactgaggcaaggatcttctctaaagtccgagggtgggagactgagaatg

SEQ ID NO: 440334 - DNA, 217 bp, Triticum aestivum
tctgttgggaacatttctcaacttgcaaaggtgaagatcatgaaaagacctggtgccaaatgggaagagcttaaaatccccagcagtattcgatcaattatctgtctcaatttgccaagtttctcgggaggattcaatccctggggaactcctggcacaaggaagaaacaagacagagacctgactgcgccttatgttgatgatggactcattgagg

SEQ ID NO: 440335 - DNA, 305 bp, Triticum aestivum
aaaccgaggaaagagagagacggacaggatatactcgctgctctgccgcccccttcgcctttagttgatctcgccatggctgccaccgtcgccgtggacaacctgaaccccaaggttttaaaatgtgagtatgctgtgcgtggagagattgtcatccatgctcagcgcttgcagcaacagctgcaaactcaaccaggatctctaccttttgatgagatcctctattgtaacattgggaacccacaatctcttggtcagcaaccagttacattcttcagggaggttcttgcactttgtgatcatcc

SEQ ID NO: 440336 - DNA, 288 bp, Triticum aestivum
tgcccacgcgtccgcccacgcgtccggccagctgtcagaaaaaataggcaatctgaaatccctctcattcctatcacttgttaacaacaatcttacaaatatcacaagtacacttccgatacttgcaagatccaagagtctcaccacccttcttattgggctcaacttcatgaatgagaccatgccagacgatgacatcattgtcagttttgagaatcttcaggttctagcaataacagattgctcactgttggggaaagtaccacattggttatcaaagctgacaaa

SEQ ID NO: 440337 - DNA, 256 bp, Triticum aestivum
gcaaggggaatttctgccttctaatactttgcttgcaggatgattccccttacaaggctctgggcgactccgacacacactgccattttgccacaaccctacagataccataacaggacggataattcattgggaccaggtggagatcttcaggtgtatctagagaaccttgctgctgcagatgatgttcagcgttatgtacaggagcacccttttggtcaacctttcattactgagagtgatccgaattgggatt

SEQ ID NO: 440338 - DNA, 171 bp, Triticum aestivum
tgctgctgctggtgtcgctggcggcggcggcggacatgtcgatcgtgtcgtacggggagcggcgcgaggaggaggtgcggcggatgtacgccgagtggatgtccgagcaccgcaggacgtacaacgccatcggcgaggaggagcgccgcttcgaggtcttcagggacaacc

SEQ ID NO: 440339 - DNA, 310 bp, Triticum aestivum
tcggaccccaaggtgctcacggcgttcgccaacacgggcgtggagttcatcatctccgtgggcaatgagaacctgcagaccatggccagcagccccggcgcggcgcggcagtgggtcgcgcagcacgtgcagcccttcatcccggccacacgcatcaccggcatcatcgtcggcaacgaggtgctgggcaacaacgacaccaccatggcggccagcctcgtgccggccatgcaggcggtctacgacgcgctcgccgcgctcgggctcagcggccaggtgacggtctcgtcggcgcactcggtgaacgtgc

SEQ ID NO: 440340 - DNA, 386 bp, Triticum aestivum
tttaagacaggaagtacccgagaaatccaaggattctcctggtggaccatggcaattcattggtctgttgcccctgtttgatcccccaaggcatgacagtgctgagaccatccgcaaggcacttgttcttggtgtcaacgtcaagatgatcacaggtgaccaacttgctattggaaaggagactggtaggaggcttgggatgggcacaaacatgtatccttcttctgcattgcttggccaaagcaaggatggttcacttgagtcacttcctgttgatgagctgattgagaaggctgatggatttgccggagtcttccctgagcacaagtatgagattgtgaagaggctgcaagagaagaagcacattgttggtatgactggagatg

SEQ ID NO: 440341 - DNA, 434 bp, Triticum aestivum
  unsure (1)..(434): unsure at all n locations
tttaaaactcacgtaatgtagattcactccctttgatggagggtgaagggcgtgctttaaaagtttatggattcaatcacgttcaacgaacacaattcctacagacactcatgaggtatggttttcagaactatgattggaaagagtatcttcctcgtttgaaggggaaaagtgtcgaggaaattcagagatatggtgagcttgtcatggcccatcttgtagaggacacaaatgactcaccaacctatgcagatggtgtgccgaaggaaatgcgtgctgatgagacattggtcaggctagccaaaatatcacttgtggaggagaaggtggctgccatggagcaaggaaaaattacaaaactcttccccaactacttgttgcatgaatntactggcttatcaggtggaagaatatggaaaggggaacatgatcta

SEQ ID NO: 440342 - DNA, 276 bp, Triticum aestivum
tagtgggccagtaatagcgtctactatcttttaagtctctggtcaaggctggtgacatctgtgccttacttgaaaggcgatacaccaagtctgcttgatgaaactgtacccaaaattacggagggttttatcacttctagaattaattctgtccaggccagctttgcggacaactcaccagacccagataatccgttagaaaatgcggaaagtctccaggatcagctggagagtcttccttatctttgcagattcaagtatgaaagctgtagcctc

SEQ ID NO: 440343 - DNA, 345 bp, Triticum aestivum
ttttagggagccctgctgctcaaagctgctgtgtgttatggtcgctgatggtatccagatcaccggcatggcagtcgttacaatcgtgtttgctgctctgggttttctctcacctgcttccaggggaatgctcttgaccggaatgatcatcctctacctcttccttggaattattgctggatatgttggtgtccgtctctggaggaccatcaaacaatccacagaaggctggaaatctgtcgcttggctgacctcctgcttcttccctggcattgttttcatcatcttgaccgtgctgaactccatcctgtggggtaagaagagcactggagctttacccatttc

SEQ ID NO: 440344 - DNA, 369 bp, Triticum aestivum
tacgcgtccgccacgcgtccgcggacgcgtgggcggacgcgtgggggcgacccctcagatctaccgcaaaaccctcctccccgtgctcctcctgctcgccgccgcggcgctctacccagccgccgccgacggcgacgaggtgctcgccctcacggagtccaccttcgagaaggaggtcggccaggatcgtggcgcgctcgtcgagttctacgctccctggtgtggccactgcaagaagcttgctccagaatatgagaagcttgctgcaagctttaaaaaagctaaatcagtcttgattgccaaggctgactgcgatgagcacaagagtgtgtgcagcaagtatggagtttctggctaccccacaatcca

SEQ ID NO: 440345 - DNA, 278 bp, Triticum aestivum
tggacacgagtatcagggaggaagacgaggaaacgttgatggccggcggtgaagagctgaagctgctggggtggtgggcgcccggggtgagtccctacgtgctgcgcgcccagatggcgctcgccgtaaaggggctgagctacgactacctccccgaggaccgctggtccacgagcgacctcctcatcgcgtccaaccccgtgtacaagaaggtgcccgtcctcattcacaacggcaggcccgtctgcgagtcgctgctcatcctggagtacctcgac

SEQ ID NO: 440346 - DNA, 335 bp, Triticum aestivum
ttgaacgcccttgccaaggcattggctggtcaaaaggatgaggcttacttctctgcaaatgctgctgctctggcctcaagaaggtcgtcaccacgtgtcacaaatgaggaggtccagaaggctgccaccgccctcaagggctctgatcaccgccgtgctaccaccgttagcgctaggttggatgcgcagcaaaagaagctcaaccttccgatccttcccacgaccaccattggttcattcccacagacagtggagctcaggagagtccgccgtgagtacaaggcaaagaagatctctgaggaggagtacaccaatgccatcaaggaggagattag

SEQ ID NO: 440347 - DNA, 353 bp, Triticum aestivum
cgtccttttacgcgtccggatccagaccatgcaagttgaaacaactgaaaagaatgaagcacttacaagcaagatgcaggagcatgcaaacttagtccatgaaaaagatcagttggagcaacaattgctggaagttaggaaggaactggaggctgcttaccgtaccatcgctaaccaggaagagcaagcttcagtgagggagataaagtgggatgcgtttaagacgtattcagcggatcaactagaagctgcacaaaaacacgctgcagagctggaagtacaagtatcagctctaaatcagcagctgcaagaagctgagatccattacaagaaaaaggttgcaaaggagagtg

SEQ ID NO: 440348 - DNA, 275 bp, Triticum aestivum
ttctgcccaaagcgtgtctttgaaacattagcgtcgcctacaaagacaataaagaacatgttgactgtccctagttccccttcatcacctgtcaatggtggctcagttaaggtagtgcagatgacaccagtgacttctgccatgacaactgctaagtggcttcgtggggtgatatcttcgctgccagagaagccttcgtctaaacttgagaaatttctttcgtcttgtgatacagatttgacaagtgatgtaacaaaaaggggcagcataatttt

SEQ ID NO: 440349 - DNA, 265 bp, Triticum aestivum
tccacgcgtccgcacccgtctccacccagataaccacgagagatatttcgtccgccccgacgaccgacgaacggcagagaaaagtgaggtgatcatgagcaccatggcgatgtcggcgctgaacccggacgcgcccatgttcatcccggcggcgttcaagaaggtggaggactactcgcccgagtggtgggagctggtcaagaccaccgcctggttccgcgaccactggttccgccagcaccagctctacgaggacctcgccgac

SEQ ID NO: 440350 - DNA, 347 bp, Triticum aestivum
tacacttctcccgtcccgtccccagccaacctcccatccccgtctcgcgtcgcagcggcagttccactccctcgccatgggcaagattaagatcggaatcaacggtttcggaaggatcgggaggctcgtcgccagggtcgccctccagagcgacgatgtcgagctcgtcgccgtcaacgacccctttatcaccaccgagtacatgacctacatgttcaagtacgacaccgttcacggccactggaagcacagtgacatcaagctcaaggacgacaagacgctgctctttggcgagaagccagttaccgtcttcggcgtcaggaaccctgaggagatcccgtggggtg

SEQ ID NO: 440351 - DNA, 342 bp, Triticum aestivum
ttgaagaacaggaagtaccttgctgctgctgtgcctgatgaagccgcccagatgctcctgctccagtctatcgaggcgttctgtggcaagtgcagcgccgaggccctgaaggagctgcctgtcgtcctgaaggccctctacgacggagacgtcctcgaggaagagactattgtgcagtggtacaatgaggctgttgctgccggcaaggactcccagatcgtgaagaatgccaagcccgtcgtggagtggctccagagcgctgagtctgacgaggagtgagaccctgtactgcttgctcccattccgcacttactttttaccaccgctacttgcttaagtgtc

SEQ ID NO: 440352 - DNA, 301 bp, Triticum aestivum
tttagttcagctacagcaagatcctcaaagacctcaagaatgagttttgctgcaatggtacagttgtccaggacacagaacttggacaggtcattcaactccagggtgatcagaggaagaacgtctcaaacttccttgtccaggccggcattgtgaagaaggaacacatcaagattcatggtttctgagcaactgccagctccatatcagagtctacatgcaaagcagctatatattggtggtgcagtatatttagttgtgtgctagcgctagcaggcgttaccagcttgcgcgctctgag

SEQ ID NO: 440353 - DNA, 454 bp, Triticum aestivum
tgagcgccgccgcttccccacctctcatctctgggcgaacccgcaaggaactatattcccagtgtgatatccaaaaccagtcaagatggtgaagtttacagcggaggagctccgcggaattatggacaagaaaaataatattcgtaacatgtctgttattgctcatgtcgaccacggcaagtctacgcttacggattcccttgtggcagctgctgggattatcgcccaggaagttgctggggatgttcgcatgactgatacccgtgcagatgaggcagagcgtggtattacaatcaaatccacgggtatctctcttttctatcagatgactcctgaatcacttgagatgtacaagggcgacagggatggagatgaatacctgatcaaccttattgattcacctggccacgttgacttttcttcggaagtcacagctgctcttcgtatcactgat

SEQ ID NO: 440354 - DNA, 410 bp, Triticum aestivum
ttcctccgtctcctgggacaagacgctcaaggtctgggcgatcccgtccctccgctgcttgcagtcgttgccggcgcacgacgatgccgtcaacgcggtcgccgtcgcgccggacggcacggtgtacactggctccgccgacaggcgcgttcgtgtctgggcgcccaggcccgcgtccgacaagaccaccaaacgacagagcaagaagccggtttactacctggtggccaccctctcccgccacacggcggcggtgaacgccgtggccgtcgggtgcggggggcaggtgctgtactccggcggcaacgatcgctgcgtggtggcgtgggagcgggaggacagcgcgagccacatggtcgcgatcggggcgctgcgggggcaccgcaaggcggtgctctccatcgcgtgcg

SEQ ID NO: 440355 - DNA, 362 bp, Triticum aestivum
ttcgattcccgccgcctacgccctctgccgccgcagccgttgccatgggcgcgtacaagttcgtgtcggagctatggaggaggaagcagtccgacgtgatgaggttcgtgcagcgcgtgcgttgctgggagtacagacagcagcccgccatcgtccgcatcaccaggcccacccgccccgacagggcacgccgtctcggcttcaaggccaagcaggggtatgtggtctaccgtatccgtgtgagacgtggtggcaggaagcgcccagtgcccaagggtattgtttatggcaagcccaagcaccagggtattacccaacttaagttccagaggaacaagaggtctgttgcggaggaaagagct

SEQ ID NO: 440356 - DNA, 343 bp, Triticum aestivum
tccacgcgtccgcccacgcgtccgcccacgcgtccgcgcacttcctcccctgctagattcgtccctccaccgaccggcaaggcctctctcctgcacttccctcgcccaaggttgcaccagagaaggcggaaaacatcacagtttgcgaaatcgtggagcggtagagagagatggccgagacggtgttcgctccgtgtttggaagggatgaagcatgtcaggtcggacagcggggtcatgctcgccaagcccttccttgatgtctgcaagcaaatcttgcctgtcctggataaatttggtgctgctatggcaattgtgaagagtgatattggaggtaatatcac

SEQ ID NO: 440357 - DNA, 329 bp, Triticum aestivum
ttcacgcgtccgatttcaaatcatcaattgtcccaacctgacaactttgcctgaaagcatgaagggccttacttctttaacatatctgtatataaagaagtgccaagaattagctgtgttgccacaaagcctagggcagctcattaccctgcaagacatttccatcatcaattgtcccaacctgacaactctgcctgaaagcatgaagggccttacttctttaacagagctttggatagaggagtgccaaggcctagctatgttgccagaatgcctaggacagatgatttccctgcaaaaaatttgcatcatcgattgccccaacctga

SEQ ID NO: 440358 - DNA, 324 bp, Triticum aestivum
ttctgttcctattcatcatctggatcgatctcttgatttccatgccttgtgtgctctttattcagtcactgatgtggctcttgtaacatcactgagggatggcatgaatcttgtaagctacgaatatgttgcatgccagggatcaaaaaaaggagttttgatattgagtgagtttgccggtgcagcacaatcgcttggtgctggtgccattcttgtaaatccctggaatattacagaagttgcagactcaataaaacatgctttaacaatgacatctgatgagagagagaagcggcacaggcataactacgcgcatgtaacaac

SEQ ID NO: 440359 - DNA, 249 bp, Triticum aestivum
ttatggaggaggaagcagtcggacgtgatgaggttcgtgcagcgcgtgcgttgctgggagtacaggcagcagccggccatcgtgcgcatcaccaggcccacccgccccgacagggctcgccgtctcggcttcaaggccaagcaggggtatgtggtctaccgtatccgtgtcaggcgtggtggcaggaagaggccagcgcccaagggtattgtctatggtaagcccaagcaccagggtattacccagctc

SEQ ID NO: 440360 - DNA, 383 bp, Triticum aestivum
tccacgcgtccgcccacgcgtccgctcgcgtcgcggcggtagttccactccctcgccatgggcaagattaagatcggaatcaacggtttcggaaggatcgggaggctcgtcgccagggtagccctccagagcgacgatgtcgagctcgtcgccgtcaacgaccccttcatcaccaccgagtacatgacctacatgttcaagtacgacaccgttcacggccactggaagcacagtgacatcaagctcaaggacgacaagactctgctctttggcgagaagccagttaccgtcttcggcgtcaggaaccctgaggagatcccgcggggtgaggctggtgccgattacgttgtggagtccaccggtgtcttcactgacaaggacaa

SEQ ID NO: 440361 - DNA, 391 bp, Triticum aestivum
ttcttgctgaaggatgaatttcctgatgttcgactcaacataatcagcaagcttgatcaagttaatcaggtcattggaattgacttgctgtcgcaatctctattgccggctattgtagaacttgcggaggataggcactggagggttcgccttgcaataattgagtacatccctctgctggctagtcagttaggtgttgggttttttgatgacaagctgggggcactttgcatgcaatggttggaagataaggttttctcgatcagagaagctgccgcaaacaacttgaagcgcctggcggaggagtttggtccagagtgggcaatgcaacatataattcctcaggtgttggagaagataaacaacccacattatctgtatcgcatgacca

SEQ ID NO: 440362 - DNA, 395 bp, Triticum aestivum
tcataggcgaagcacgcgcggcaccgcgccaccggggagctcttcgccgtgaagatcctggaccgcggcagggtgctctctctccgcggcgccgacgaccaggtccgcagggagatcgccacgctcaccatgctcgcgcaccccaacgtcgtccgcctccacgaggttgctgctagcaaaacaaagatctatatggtgcttgagcttgtcgatggaggcgaactttttgacaggattgcaataaagagaaaactatctgaacgagaaggaaggaggctttttcagcagctaattgatggtgtcagctattgtcatggaaagggtgtctaccacagggacctcatgcctgaaaacgttcttatcgaccggaaaggcaacatcaagatctctgattt

SEQ ID NO: 440363 - DNA, 343 bp, Triticum aestivum
ttcacgcgtccgcccacgcgtccggcctgcgggtttttataatgtggacattcctatggattcaactaaggatgtgaagaaaaaggaaaaagaactccaagcgatggaagccgagctaaacaaaagagaaaaggaactgaaaaggaaggaagaggctgcgtcgcgagctggcattgtcatagaagacaaaaactggccaccctttttccctctcattcatcacaatatttcaaatgagatacccatccatctacaaaaaatgcagtaccttgcattttcatcatttttgggaattgctctctgcctcttctttaatatcatagcgactacaactgcatggatt

SEQ ID NO: 440364 - DNA, 329 bp, Triticum aestivum
tgacggacgaggggcgcgtggatggcttcagcggcggcgaccgttctcagggcatgcgagagctagcgcaggcgatacggcgccttggtgaggcctacgagcgcgtggagacagcgaagctggagcaggccgccgagatggagcgccagcgtctggacttcgcacgggagcttgagtcgcaacgcgtgcagttcttcctcaatacgcagaaggagctctcacagggcaagagccacatctctcccgctgcggctgcctcccactcccaggtaggtgccgccactgttggtggctcatctaggaggatggcgtccgtaccagattccaca

SEQ ID NO: 440365 - DNA, 361 bp, Triticum aestivum
tttttcccaaccatacaggctacaggcctacagcaataccatggcggcatcagtagcctgcgccttcttcttcgaggccgagccggtgggcgagcccggcatgccggcgctagacgcgtgcgcgctctgtgccaagcggctggtgcgcgacagcgacgtcttcatgtacagaggggacacgcccttctgcagcgaggagtgccgccacgagcagatgcagctcgacgccgtctccgccaggcaggccgcccggaggctgcagcggttctcggcgggagcagagtccgggcgtgcacgccatggggtgtccgtctcgagctaaccggcgagagtgccaagcgacatacagtacgtgcctgac

SEQ ID NO: 440366 - DNA, 238 bp, Triticum aestivum
ttcgcgtctgctacacttcctctcccggcccggctagatctcgccggcaggagatggcggacgcgaagcagcagcaggccgcggcgcccaccggcgtctggaagacgatcaagccattcgtcaatggcggtgcctccgggatgctcgccacctgcgtcatccagcccatcgacatgatcaaggtgaagatccagttgggtgagggatctgcagctcaggtcgcaaagaccatgtatgc

SEQ ID NO: 440367 - DNA, 279 bp, Triticum aestivum
taaaccgatgcctttatggttgctagaggtgatcttggaatggagattccagtcgagaagatattccttgcacagaaaatgatgatctacaagtgcaaccttgctgggaagcctgtggtcacagcgacacagatgctcgagtccatgatcaagtcccccaggccaacccgcgctgaggctactgatgttgcaaatgctgtgctcgatggaactgattgcgtcatgctcagtggcgaaagcgctgctggagcataccctgaggtggctgtgaagatcatg

SEQ ID NO: 440368 - DNA, 419 bp, Triticum aestivum
ttcacgcgtccgctcacgcgcaacgttagtgccgctccccctccctgcgaaaccctaaccctagccaccatcagcgcgctccctccctcgatcctcatgtccgattccgaagcatccccgacgcccgcggttgcggtcgcggcggtggaggtggcggcgggcgagaactccccgactccggcgaggagtgaggagctgctgccggtggcggagaagatctcggaactaaatgaatcacagtcagagctcccgggaagacttcgaggccttaaggaggatttgcagagctggagaagcaatttagacacccaagtgcagaaatacaaaactgaaatctccgatatcaaaactgcacttaatagtgaaatagaccagctgaaatcagatttccaagaactgaggaccacccttaagaagca

SEQ ID NO: 440369 - DNA, 289 bp, Triticum aestivum
tttacgcgttcgacaccccagaaatctcacccgcctccacccagaaggaaaatcgcgagagatatttcgtcccggacgcgtccgccccgacgacagacgaacagcagagaaaagtgaggtgatcatgagcaccatggcgatgtctgcgctgaacccggacgcgcccatgttcatcccggcggcgttcaagaaggtggaggactactcgcccgagtggtgggagctggtcaaaaccaccgcctggttccgcgaccactggttccgccagcaccagctctacgaggacctc

SEQ ID NO: 440370 - DNA, 365 bp, Triticum aestivum
tatcagctctctttcttccttcttcctccccaactcctccgccctctcgacctcatcgcccaccacccacgcaagcgcctggatcgccgccggtcccgaccatggatccctacaagcaccggccgacgagcggggccaactccggctactggaccaccaactccggcgcgcccgtctggaacaacaacaacgccctcaccgtcgggcagcgaggacctatcctccttgaggattaccatctgattgaaaagcttgcgcagtttgaccgggagcgtatccctgaacgtgttgttcatgcacggtgagccagtgcaaagggattctttgaggtgactcatgatgtttctcagctcacatgtgctgac

SEQ ID NO: 440371 - DNA, 405 bp, Triticum aestivum
ttcgcaagggagataagatttcatcagctgcgactggtcgcacatatgaagtctttgatgttggcattatgcatcctgagcttacccctactggagtgctttacactggacaagttggatatgttataactggaatgcgttcaactaaagaagcacggattggtgatactcttcatcaggctaagactatcgttgaaccacttcctggtttcaagcctgtgagacacatggtcttctctggtgtatacccagctgatggttctgactttgaggctcttagccatgcaattgagaagctaacatgtaatgatgccagtgtgtctgttacaaaagagacaagcactgcacttggcatgggcttcagatgtggtttcctaggattgctgcacatggatgtgtttcatc

SEQ ID NO: 440372 - DNA, 347 bp, Triticum aestivum
ttttcgaagaagacaaaaatttccatgttgttctcaattctgttattgctggtcgttaccatgtcacggagtatttgggatcagcagcgttcagcaaagctatccaggcacatgatttacacacaggaatggacgtgtgtgttaaaatcattaagaacaacaaagattttttcgaccagagccttgatgagatcaagcttctgaaatatgtaaacaagcatgaccctgcggacaagtaccaccttctgcgtctatatgattacttctactatcgggaacatttgttgatagtttgtgaacttctgaaggcaaatttgtatgaatttcaaaagtttaacagagaatca

SEQ ID NO: 440373 - DNA, 380 bp, Triticum aestivum
tttcgcgtccgaagctcaactcaccagcttaattaccttgacagacattgttaggtcttgtgttagtgaagctagctaggtaagaaaaaccatggcggcttcccgtgccttggctgcactgcttgctgtggtggtactcatggtctgctctccggcgcctcgtgttctcgccactgaccccacccagctccaagacttctgcgttgctgatataatgaaccctgtgattgtgaatgggttcgtgtgcaagaacatgaagatggtgacggcgaacgacttcttcttgcccgggcttaacaagccgggcatgttgaacgctcagggctcggcggtgacaccggtgacggtgcggcagctgccggggctgaacacgctgggca

SEQ ID NO: 440374 - DNA, 328 bp, Triticum aestivum
gtcacacgcacgcgtttgacattttccgcccaccaccgccggagggagctccagccatggccgccaagtgctacccgacggtcagcgacgagtacctggccgccgtcgccaaggccaagcgcaagctccgcggcttcatcgccgagaagaactgcgcgccccttatgctccgcctcgcgtggcactcggccgggaccttcgacgtggccaccaagaccggcgggcccttcggcaccatgaagtgccccgcggagctcgcgcacggcgccaacgccggcctcgacatcgccgtcaggctgctcgagcccatcaaggagcagttccccat

SEQ ID NO: 440375 - DNA, 324 bp, Triticum aestivum
ttccgccccggccctccgcctctgcctccctatctcgcccccggccgcagcagcctcgtcgtcgcccccctccttcgccgtcggacgagtttccctccgccgtcgccgtcgccgtcgccgccgcgcttccttcagcggctgccgctgctcctcgtcctcccactcagaaatggaggccggcgctgggacagctctgtaccccgcgcaccgatgcaaaaccatatacctggtgaggcatgcccagggtattcacaacgtggagggcgagaaggattttgcagcatacaagtcacatgcgctgcttgatgctcaacttaccccttt

SEQ ID NO: 440376 - DNA, 365 bp, Triticum aestivum
tgtctttgctccgctcccctcctctctctcctccatcctccggtttctgatcgcgaccatgggaacccgcgggctcgccgtgctgctcctcgcggcggtgctgctgcagggcctcctcccggcctcggaggcggagggcctggtgcggatcgcgctgaagaagcgcgccatcgaccggaacagccgcgtcgccaagagcctctccgaccgcgaggaggtgcacctcctcggcggcgcctccaacaccctcccctccgaggaggagggcgacatcgtgtccctcaagaactacatgaacgcgcagtacttcggggagatcggcgtcggcacgccgccgcagaagttcaccgtcatcttcgacaccg

SEQ ID NO: 440377 - DNA, 268 bp, Triticum aestivum
ttcaatcaagtctttcatcttcgacggccgagcttacagcatcacgaaggatgtcttgcagctgtggatcaagctgcggctgcggctcaaactgcaactgcggcaagatgtaccctgacttggagaagagcggcgccaccgtgcaggccaccgccgtcgtcctcggcgtcgggcctgcgaaggtgcagttcgaggaggccgccgagtccggtgaggccgaccacggctgtagctgtggcgccagctgcaagtgcgacccttgcaactg

SEQ ID NO: 440378 - DNA, 414 bp, Triticum aestivum
tttcgttccacagtccactccacttcccatttatccagctagccttcccacctcctccattccaagaagcagagcagagcagagtaaaaatggcgatgccgcgggccgtgtccttatcggtcgccgtgctcctggcgctcctggcgtcggcggagtcgtggctgtacgaggagttcaccacggacggcaacgtgcgcgccgactacaacgcgcaggggcagcaggtggcgtcgctcgtcctcacccagcagtccggcggcggcgccttcggctcccggcaaaagtacctctacggccagttcagcatccagatgaagctcgtccccggcaactccgccggcaccgtcacctccttctacctgtcgtcgggcgacggccccgggcacgacgagatcgacatggagttcatgggca

SEQ ID NO: 440379 - DNA, 402 bp, Triticum aestivum
gtcttgagcaatatgtggactatgcattagacgtcccaatgtattttgtataccggaacaagaattacattgactgtaccggaatgtcatttcgggattttatggcaggaaagctcccacaggtcccaggggagttgcccactttgaacgattgggagaaccatctaacaacaatttttcccgaggttaggctgaagagatacatggagatgagaggtgctgatggtggaccttggaggagattgtgtgctttgcctgcattttgggttggtttgttgtatgacgacgaatcactacagagcattattgacatgactgctgactggacaaaggaagaaagagagatgttgagacggaaggtcccagtaactggtttgaagacaccattccgggatgggtatg

SEQ ID NO: 440380 - DNA, 280 bp, Triticum aestivum
ttcacgccgccgtctaccctacgttcgttctttttcttctggttgggtagttgacgtctacccaccagccatgggtaaggagaagactcacatcaacatcgtggtcattggccacgtcgactatggtaagtcgacgaccactgggcacctgatctacaagcttggcggcattgacaagcgtgtcatcaagaggttcgagaaggaagccgctgaaatgaacaagaggtgtttcaagtacgcctgggtgcttgacaagctcaaggcctagcgtgagagaggt

SEQ ID NO: 440381 - DNA, 313 bp, Triticum aestivum
ttacagcattactcccttaatgtccctttagatgatggtattgatgacgaaagctaccagtccctgtttaagcctataatggccaaagttatggaggttttccagcctggtgcggttgttcttcaatgtggcgccgattctttatctggggataggttgggttgcttcaatctttcgatcagaggtcatgcagaatgcgtgaagtacatgaggtctttcaatgttgcattgatgcttcttggcggtggtggctataccataagaaatgtcgcacgatgttggtgttatgagacaggagttgcacttggccaag

SEQ ID NO: 440382 - DNA, 322 bp, Triticum aestivum
ttcattcctcctaccacctcggcaccaccagcccaagcagagccatggcgcccaacggagacaacaccgtggccaacgtccacagcggcatcgacagcaccaacaagacgctgctcaagagcgacgccctctacacctacattctcgacaccaccgtcttcccccgtgagcacgagtgcatgcgcgacctgcgcctcatcaccgacaagcacccatggggctacatgcagtcgtcgtcggacgaggcacagctgctggggatgctgatcaagatggcgggcgccaagaagacgatcgaggtgggcgtgttcacgggctactc

SEQ ID NO: 440383 - DNA, 238 bp, Triticum aestivum
tctcccgcgcctacacgcacgactggaccgagtgccccttcgcccaccccggcgagaacgcgcgccgccgcgacccgcgccgcgtgccctactcctgcgtcccctgccccgacttccgccgcgacccgcaagcctgccgcaagggcgacgcctgcgagtacgcgcacggcgtcttcgagtcctggctccacccggcgcagtaccgcaccaggctctgcaaggacgaggtcggatgccc

SEQ ID NO: 440384 - DNA, 350 bp, Triticum aestivum
tctcatttctctcctcctcctcctgccaccgatcccgatccagggaggaacccggcgcgaggcgggcaaaggaagagaagaggagatcaccgagcccagcgcgcgcacaggacagcaggcgccgcgatctcgcgcaggagcggagatggggctcacgttcacgaagctgttcagccggctcttcgccaagaaggagatgaggatcctcatggtcggtctcgatgcggctggtaagaccaccatcctctacaagctcaagctcggagagatcgtcaccaccatccccacaatcgggtttaatgtcgaaactgtagagtacaagaacattagtttcaccgtttgggatgtcg

SEQ ID NO: 440385 - DNA, 416 bp, Triticum aestivum
tttcactgccacttcaccgctccccccctttccccactcttctccaacccccggacggaggtgctgccggagcccggaagtgatcggaagcctgcagtatgggcaatctgtgctgctgtgttcaagtcgaccagtctaccgtggccatcagggagcagtttgggaagtttgacagtgtgcttgagccaggatgccactgcctgccttggatctttgggaaacgtgtagttggccatctcacactcaggttgcagcagctggatgtgcgctgtgaaactaagacaaaggacaatgtgttcgtcactgttgttgcatcgattcagtaccgacctctggctggcaaagaaagtgacgcatactacatactgaccaacacatgatcccagattcaagcctatgtctttgatgtgatcagg

SEQ ID NO: 440386 - DNA, 434 bp, Triticum aestivum
ctctcttagtccgcgctctgcactctacactcgacaactagctactctactactcttcagtcatcacctacttcagaccaccaacacacagagagatcatggcgggtgcggcgaaggcgtcttggatggtggcgatgagtgtgggcgccgtggaggccctcaaggaccaggtcggcctctgccgctggaactacgccctcaaatccatccaccgggcagccaacgtccgcggcggcgtcttgcagggcgccaagcagcttccggcctctgctgaggcggcggccgagaagcggcgaggggagaaggccgtggaagggctgaggacggtgatgtacctcagctgctggggtcccaattagaagctgcaacttggtactagctaggcgtgtgtgtgtttgctgcaacaaccatggcctggaaccacgatgtaaaaa

SEQ ID NO: 440387 - DNA, 459 bp, Triticum aestivum
ttttcgcgtgggcggagacttcattctgtgcaccggaactctggcttggctgtggctggattagcagcagacggtaggcagatagtctcaagagcaaagtcagaagcagccaattatgaaaaggtatacggagaacccatgcctgtaaaggaattagctgatcgcgttgctagctatgttcatctgtgtacactctactggtggctcaggccttttggctgtggagttattcttggaggctatgatagggatgggccacagctctacatgatcgaaccttcaggcctctcctataaatattttggtgctgctctgggtaaaggaagacaagctgcaaagacggagattgagaaattgaagctctctgagctaacctgcagggaaggcatcgttgaggttgccaagataatttatggtgtacacgacgaagcgaaagacaaatctgttgagctggaactg

SEQ ID NO: 440388 - DNA, 444 bp, Triticum aestivum
ttgtggaggagctgatgaaggtgcagttagaagcaacagcaaaatcagagcagctcggagaggttcatggagcatggttgccaccttggttagcagcacatgcagctcactatatggagttgatgtcaagtcactggagtgaacatggaaaacctgctgtcaacaatttattgcaaaaggcatcagagaaaacagtgcaggcgaaggaatgggctgaaccccatatagaaactgctaaggcgaaatggattcctgtcattaaagaaaattgggctactgcaaaggaaattgcagaaccttatgtgcaaatggtctcagcaaaatcagtagagctttatcaagcatcaaaggatgctatctcacctcatgttgtgaaagcacatgagcttgctgatccctatttccaggaagccaagaagttatccaaaccttatattgatcaag

SEQ ID NO: 440389 - DNA, 381 bp, Triticum aestivum
tcgacttgctagccatggcatcttccaagagtagtcttgctatgtttgcactggccatagtcatggccgtggtggctgacgtctcggcgcagaacaccccgcaggacttcgtcaacctgcacaaccgcgcccgcgccgtgtacggcgtcggccccgtggcatgggacaacaacgtggccaggtttgcgcaggactgggcggcgcagcgcgccggcgattgccggctgcagcactccggcgggccgttcggcgagaacatcttctggggttccgggcagtcgtggacggccgccgacgcggtgaagctgtgggtggacgagaagcagaactaccatcttgacagcaacacctgcgacgccggcaaggtgtgcgggcactaca

SEQ ID NO: 440390 - DNA, 218 bp, Triticum aestivum
tcggttggttcatcgcaatgtatgctactctagctagtcgtgacgtggattgttgcttaatcccagagtctccattctaccttgaagggaaaggaggcctccttgagttcgtcgagagacggctcaaggacagtggtcatatggtcattgcggtggccgagggtgctggccaagatctcatcgcccaaagcatgaactttgtggacactcaggatgct

SEQ ID NO: 440391 - DNA, 403 bp, Triticum aestivum
ccttcattgcctccgctcccacgccgccgaatccgagacctgatctcggattcaccgcgaccagaccctcaggcgatccccggcacctactccccgacgcttcagccatggcaggaatggcaccggaaggttcccagtttgacgctaagaactatgattctaagatgcaggagctgctgaaccaaggtgagactgaggagttcttcacctcttatgatgaagttcacgagagctttgatgacatgggtctccaagagaacctcctgaggggaatttatgcttatggttttgagaagccttctgccatccagcaaaggggaatcgttcctttctgcaagggccttgatgttatccagcaagcacaatctggaacaggaaagactgctactttctgttctggaat

SEQ ID NO: 440392 - DNA, 481 bp, Triticum aestivum
tgttgatgcagcttttgatgttctgttagggaagacaacaatgttccccccaaatatcttgttagaccacaatgttcctgtttataaagctgtgcagaagcctggagagtttgttataacattccctcgttcgtaccattcaggtttcagccacggcttcaattgtggagaggctgtcaattttgctattggcgactggtttcctctgggctctctggctagcaaacgctacgcacttctgaacagaacaccctttcttgcacacgaggagctactttgccgttctgcaatgcttctgtcccacaaactgagtgatccagaaacaattaattctgaacatccatacactcaatattgtgtgaagtcttcctttgtgaggttgatgcgactgcagcggcgcacacgcagcttactcgctaaaatgggttctcagatatactacaagccaaaaatgtattcgaacctatcctgtagcatgtgc

SEQ ID NO: 440393 - DNA, 352 bp, Triticum aestivum
gatgcagaagctccgcgacctcaagccttgcgccttgtgcggtctcgatgccacgctgggtgtactgctccgctacgtcaaggcctccttcggtaagcgtgcatgatcagaggactcgatcgagttcgatttcacctactaccggagctacacccaaggcgagccacgtgccaactctgatgtggtcgatgagctcgagcagttggcactgtgcaagtacgacgccgtacctcactggggcaaaaatcgcaactttgcctttgacggcgtcattgccaagtaccccaaagccgctgagttcctcaaggtgaaggccaggtacgaccctgatgggatcttttccagcgagtgg

SEQ ID NO: 440394 - DNA, 378 bp, Triticum aestivum
ggtgctctacctcaaggacgaccagatggaataccttgtggagcgccgcatcaaggatctagttaagaagcactctgagtttatcagctaccccatctccctgtggaccgagaagaccactgctaaggcaatttctgacgatgaagacaatgaggagaagaaggatactgaggagggcaaggttgaggatgttgatgaggagaaggaagagaaggaaaagaagaaaaagaagatcaaggaagtctctcatgagtggaacttggtcaacaagcagaagcctatctggatgaggaagccagaggagatcaacaaggaagagtatgctgctttctacaagagcttgaccaatgactgggaggagcatttggctgtcaagca

SEQ ID NO: 440395 - DNA, 380 bp, Triticum aestivum
tgctcgtcgaccgcctcgcgctttcttcatgtccagggagcggcggttgccgctcgtcctggccctggcggcggcggtggtgggcgtcctcgcggttgcgtcgccgcgggcggaggcggagctgcaggtcgggttctacaatgcgacgtgcccgatcgcggagggggtggtgttcgcggagatgcacgccatcctgcacgaggaccccacgctggcgccctcgctgctccggatgcactaccacgactgcttcgtccagggctgcgacggctccatcatgctcaggtcccgccggggcacggcggagcgggacgccaccccgaaccggagcatgcggggctacgacgccatcgagcggatcaaggccaggctcgagacgc

SEQ ID NO: 440396 - DNA, 455 bp, Triticum aestivum
acttgttacacacctaatgcagggactatggagctgaggaaagctatctgcaacaagcttcaagaggagaatggtctaacctacagcccagatcaggtgctagtgagcaatggagctaagcagtgcattacacaagctgttcttgctgtttgctcacctggtgatgaggttttgataccagcaccattttgggtcagctatcctgaaatggctaggttggctggtgcaacaccagtgatcctcccgacaagcatatcagacaatttcctgctgaagccagagtcacttgcctcagtgatcactgagaaatcaaggctcttgattctatgctctccatctaatccaacaggctctgtgtatcccaaggagctgcttgaggagattgctgctatagtcaagaagtatcctaggctcctggttctatctgatgagatctatgagcatattatctatca

SEQ ID NO: 440397 - DNA, 432 bp, Triticum aestivum
gtgtcatcccagcaccgcctccggcgcccgggaagcccaaaccaaaccctaagcctccgcgccggcgatggcccgctacgaccgcgcgatcaccgtcttctcccccgacggccacctcttccaggtcgagtacgccctcgaggccgtccgcaagggcaacgccgccgtcggcgtccgcggcaccgacaccgtcgtcctcggcgtcgagaagaagtccacccccaagctccaggactccaggtccgtgcggaagatcgcgagcctggacacgcacgtcgcgctggcttgcgcggggctcaaggcggacgcgcgggtgctcatcaaccgcgcccgcgtcgagtgccagagccaccgcctcaccgtcgaggaccccgtcaccgtcgagtacatcactcgctacatcgccggcctgcagcagaagtacacccagag

SEQ ID NO: 440398 - DNA, 493 bp, Triticum aestivum
tttcgcgtccggctccgcccggtgtcgacggacaccggcggcggcccgctcgtcgtgcggaaggtgagctacaccgacggccggagcaacgtcatcgtcgagtaccccggcaccgtccccggccgcgtcgtctccttcgtcggcatgcacatggacgtcgttccggccaaccctagcgaatgggacttcgatcccttctcactaaccttcgaaggtgatgacaaggaaaagcttaggggccgtgggacgacggactgccttggtcatgtggcgctagtgactcagctcatgcggcggcttggtgaggtgaaaccaccattgaagcattctgtcattgtggtgtttattgccaatgaagagaattcatcggtcactggcattggtgttgatggtcttgtcaaggatggtttgctggataagctcaagactggacccttgttttggatagatactgcggataagcagccatgcattggtactggtgggatgatcc

SEQ ID NO: 440399 - DNA, 430 bp, Triticum aestivum
tgtttaaaaccgattcagagcttatggtgtgatagaacgagttgtgcttgctcgcaatatgtctagtgctaaaagaaacgattttggatttgtcaacttctcaacccatgaggaggctcttgcttgtattgaagccaccaacaacaccgagctgggtgatgatggaaaagcaaagctaaaagtaagggttagactttcaaaccctttacctaaaagtcaggctgtgaaaggtgaaatgagtggcgggtttcgaattggacatcctggatctggttttaacaggcctggtagaggttttaatagggacagagctgcccctcgccgggaaggtttccatggtgataggggtttcaataatcacactcctggtcgtggtgcgagatttaattctgcatacagtaacaacagttttgaagcttcgccctctgat

SEQ ID NO: 440400 - DNA, 429 bp, Triticum aestivum
gaaaggatagctctgaccgccatagaattggaagcaagagacgaaccgatggagcagcaggacggcctgtcttcttcttcctcctacgcctcctctttctacgccatgaggcagtgcaggatttgccacgaggaggaggacgagagctgcgcggcaatggagtctccctgcgcatgctccggctctctcaagtatgcgcacagggggtgtgtgcagaggtggtgcgacgagaaggggagcaccctctgcgagatttgccttcagggtttcgagccaggctacacagtccctcccaagaaagctccggccgttgaggtgctggttactgtcagcgaggatgaggatgaggaggaggagctggacgggcaccagggcatgcagtatgcgccgtcagacgggccgatggacggcccggacgccgtcggctgc

SEQ ID NO: 440401 - DNA, 425 bp, Triticum aestivum
gttgttccatgacaaagtgggtgcctcctctcggtctcaggttctcacttcctcctcctgctgctggcggcagtgattgctcccgtccatgcctatggcaagcttaaggtcgggttctacaggcaatcatgccccgacgccgaggccattgttcgcaggatcgtcaccatggctgtggaagatgacctaacggtcaccgcgccgctgctaaggctccacttccatgattgcttcgtcaggggttgcgatggatcggtgctgctcaactcaaccaagaccaacatcgcggagagggacgccaagccgaacctcaccctggacgccttcaacgtgatcgacgccatcaaggagaagctggagaagaagtgcccgggcaccgtctcctgcgcagacatcctcgccgtcgccgccagagacgcggtctc

SEQ ID NO: 440402 - DNA, 409 bp, Triticum aestivum
ccctctcgtccgctccattgctcgccaggccgtccttaagccaactcaggtagcagcaactagagccgacatgatggcggaggcgtggatggacgtgctgccgccgccggcgccctacttcgccgggcagccgtgttgggccgtgcagcaggagcgtcgcggaggcggcgcctggacgctggaggagaacaaggtgttcgaggaggcgctcgcggcgatcgacctggacgcgccggaccggtgggagatggtcgcgctgatgttgcccaggaagacggtcgccgacgtggtgaaccactaccgggccctcgagaacgacgtcgggttcatcgaggccgggctggtcccgttccctcactacgacagctcgtccccttcgtccgggttcactctggactgggacgggggc

SEQ ID NO: 440403 - DNA, 457 bp, Triticum aestivum
ccttcttctccttccccaagccgcaacctcccacaaatgtccggctcccctgccctccccggccgcagcagagcgccatgtcgccctcccctacccccgcgccagacgccggcgccgccgcgatggccgtcgacgactcgtcggagaccgaccagctcgactccatgtccacggaggacatcgttcgggccacccgcctcctcgacaacgaggtccgcgtcctcaaggacgagctgcagcggaacaacctggagctcgagaacgtcaaggacaagatcaaggagaatcaggagaaaataaagctcaacaagcagctgccctacctcgtcggcaacatcgtcgagattttggaaatgaaccctgaagatgaggctgaagaggatggtgctaatatagatctggactcacagaggaaaggaaaatgtgttgttcttaagacatccacaagacagactat

SEQ ID NO: 440404 - DNA, 426 bp, Triticum aestivum
gcgccttcacctccgcgactcgacacgcacagccgcgtgccagcccacctcaatctcacctcgccgccggcagctaacccgcacccccgcgatgcagaagacggcgcagtcctggttcaccggcggctccgcctcccccagcaccgccgcggagtcgcagccctccctgctcgccgactggaactcctacgcagccacccggtcggacgtctcctcctcctcccccctcccgttcgacatcgaggccgccgtccgctcggccaacgacaccgtctccggcaccttcaatgtggtgtccaagggcgtgcgggagctgccggggagcttccagggcgccaccagcagcttcccctcggggaaggcgctcacgtacttcgggctcttcctcgccaccggcatcttcttcgtcttcatcgccttcacgct

SEQ ID NO: 440405 - DNA, 452 bp, Triticum aestivum
tttacaaagcgtttgctaacgaggttcagaacattatggctctccaccatgaaaatgtactgaagttggtcggctactgtcacgaaggtcaaaagaaagtggtgctgaacaacggaagatatattgtggctgacattgttgaaagtttactttgccatgagtacttaccactgggaagccttcagaaacatctttttgaagtacatacaaaaatggactggaacatacgcttcaacataattaaggggatttgcaatggtttgcactttgtacacagcattcctattgtccatatggatctcaagccggaaaacatactgttggatgataacatggtgccgaaaatcgccgatttcggtctctccagactctttggtcaagaacaaacacggatgaacacacagaatgttgttgggtcatatggatacatagctccggaatatctatacaga

SEQ ID NO: 440406 - DNA, 434 bp, Triticum aestivum
gttgtccaggaggaagaggaggaaggatcatcctgtaatcctgctgggtgcgagatagccgcagcatggatttcgaactccgtgttatcgaagctatcacaaacaactttgcagatgatcagatagttggcagcggtggatacggagttgtttacagggcgacccatgaaggggaagaaattgccgtgaagaagcttcgtcaactgccaggactcgatgataagcaattcgacagcgagttccgcaaccttcgtaacattcgccaccaaaatgttgtgcggctaattggctactgctacgagtctcggcatagatacatggatcacaacggggaccttgttttcgctcaactaatggagcgagtgctctgcttcgaatatatgcacggcggaagcctcgatgaacatattcaagataaatcttgtgaacttgag

SEQ ID NO: 440407 - DNA, 457 bp, Triticum aestivum
tatctcaaacagaaaaacaggagagagaaaaaatcagatggcatcaccctcttccttccttctcctcgctgttcttctcgcgctggtctcatggcaggccactgcctccgatcctagccccctgcaggacttttgtgtcgccgacatgaattcaccagtacgtgtcaatgggtttgtttgcaagaacccaatggaggtcaacgctgacaacttcttcaaggcagccgcgctcgacaagcctagggtgaccaacaaggttggatccaacgtcactttgatcaacgtcatgcagattgctggactcaacaccctcggcatctcaattgtgcgcatcgactatgctcccttgggtcaaaacccaccacatacgcaccctcgcgccactgagatcctcacggtgctcgaggggacactgtacgttggctttgtcacatccaaccagcccgccccaaacaga

SEQ ID NO: 440408 - DNA, 374 bp, Triticum aestivum
cgctttccgccgctactcccctgcctcccccagagctcgttagggttttctcttttttcgggggagaaatctcaagaggcggcaccatgctcgtgtaccaggacaagctttccggcgacgagcttctgtcggattcgttcccttacagggagctggagaacggcgtgctctgggaagtcgatggccattgggtcgttcaaggagcagttgatgtggacattggagccaatccctctgctgagggtggtggtgatgatgaagggtgttgatgaccaggccgtgaaggtggttgacattgttgacaccttccgtcttcaggagcaacctgcttttgacaagaagcagtttatctctcacatgaagcgctacatcaa

SEQ ID NO: 440409 - DNA, 370 bp, Triticum aestivum
cttgttcattcagctaatttttttcaggagaggactcaagtgccttgaggcacttgaaccccatgtaaaagcaatagctgagaaacagcacattgactatcagttcaccggccttgaggacaatgaatgtgacaacgatggctccagctcttaccaagagacttgtagtgatgacagagaactgagtttcgactatgaaataaatgatagagaccaagattttattgcttcgagaggttcaatggatttggataaaggagacctgaggacttccccaacgccaataaaagagatcaagcaggaagaggtgaagctactgaaggcagaagcagcagctccacaagtgaagcctgagatcatcacacattca

SEQ ID NO: 440410 - DNA, 447 bp, Triticum aestivum
ccctctcgtccgcccaccctagcctcgctcgccccgaagtcaaacaacagacaacgcatttcctcgaacacctagcctccctccatggccacctccgccctcgccaccctctcggccaccgccgccgccgcgggggccaggcgcgtcctcctctcgcgcggcccctcctccctctccttcgcctcccgccgcctcgcgtccgcgggcccccctccgcgccgggcccctgccccgcgcggcgactcgggccctctccgcgaccgcgtccccggccgccacaacgaccatcgcggtcggcgaccggctccccgacgcgacgctgtcctacttcgacgcccccgacggcgagctgaagacggtgacggtccgcgacctcaccgcgggcaagaaggtggtcctgttcgcggtcccgggcgcgttcacgcccacctgcacccagaagcacct

SEQ ID NO: 440411 - DNA, 446 bp, Triticum aestivum
tttctgggccatgtggtagtctgcttgttgttttctacctccagcgttatcggtacttggaagcatatgatgtccatcgtagtcttcagaactttgagcaaaacacactggaaactgccagtgaagagattgcatccaaaatcagtacaattgctcggtggagagaaggtttggtggctaaatgccttgaaatgcttcctgaggtccagagggatgtgaggtccatcagcagcggggaccaaagtcagtttgccatccgaaccatgcaaatgtcttctccagttaatcctgttgtcaaatcagccagtcctaccattggattgagctcgtccttcacccctgctcttcagaataaatcaaaccctctccactccaggaatatccatgggctgactgattctggtgctcttatcggtagtgtccgttcagagtttggcagaaaggtt

SEQ ID NO: 440412 - DNA, 503 bp, Triticum aestivum
tcgctcggcgatgcttgtccgcgtcaacaccctgctccaaggatactccggcatccgcttcgagatcctcgagaccatcgccacgctgctcaatgccaatgtgacaccgtgcctgccgctccggggcaccatcaccgcttccggcgatctcgtcccgctctcctacatcgcgggacttgtcaccggccgcccgaatgccgtggccgtggctcctgatggcacaaaagttaatgctgccgaggcatttaagatcgccggtatccaacacggcttcttcgagctacagcccaaggaaggccttgctatggttaatggcacggcggtgggctccgggctcgcgtccattgttctctgtgaagcaaacatccttggtgtccttgctgaagctttgtcggctgtgttctgcgaagtgatgaacggtaagccagagtacaccgaccacctgacacacaagttgaagcaccaccccggacagatcgaggctgcagccatcatggagcaca

SEQ ID NO: 440413 - DNA, 387 bp, Triticum aestivum
tttttgtactctccgttatcctatgcattcgctcagacatgcgtggaggtgatctacagcatcgcgcaggggattgaatacacggtgatcatctatgcgatgattggatatgagtggaaagcggcaaagttcttttatttgctattgttcatagtttcaagcttcaactacttgacattgtttggcatgatgctggtatcattgaccccgtcttccatgctcgcaaacatactgatatcgtttgtactccctctttggaacctgtttgctgggttcctcgtcgtcagaccgttgataccgatctggtggaggtggtactactgggccaaccctgtgtcatggaccatctacggcgtggtggcgtcgcagtttggcgacaacaagagt

SEQ ID NO: 440414 - DNA, 474 bp, Triticum aestivum
agtttttaaacttcagaagatagtgacgggtgcaaagaaggtttatcggaagttcaagcattttaagggtaccacagtcgatcagacatgcagatccgtgacatatcgatgttgtctttgtggggtgtcatcaaattcgttccagttgttgcccactgaagagcaagaaagggaaaaaccttgtgtgaaaaattcaaacttgaacttacctgccgaggaatgtgctgctgcttttgtatttttcaaaacgcggtatgcagcgctaattgtatccaaaattctccagacatccaatcctatgaaatgggtcactagtctggccccagaacctaaagacatgtactggtcaaatctttggttaccgtacaagcagctttggattcgccgcatagctacacttcttggttctattgtttttatgttcattattcttgtacctgtgacatttatacaaggtctaactcagctggaaca

SEQ ID NO: 440415 - DNA, 451 bp, Triticum aestivum
cctcttcgtccgcggacgcgtggggttgagaagccctttggaagggacctggactctgcagaagaattgagttcccaacttggggagctattcgaggaagatcaactctacaggattgaccactacttgggaaaagagttggtccaaaacttgcttgtgcttcgttttgcgaaccgtttgttcttaccactttggaaccgtgacaatgttgataatatacagattgtattcagggaggacttcggaactgatggacgtggaggatattttgatcaatatggaatcatccgtgatatcattcagaaccatttgttgcaggttttctgtttggttgcaatggaaaagcctgtatctcttaagcctgagcacatcagagatgagaaagtcaaggttctgcaatccgtgaacccgataaaggacgaagaggtagtccttggacaatatcagggct

SEQ ID NO: 440416 - DNA, 455 bp, Triticum aestivum
ctttgttaccctctgctcgccctcctcttcctcgcagcagcagcagcgtcggcagcccagatcgccatggcggccgagccggagcagcaggcggccgtgcacatcgtgtacgtcgaccgccccgaggacgccgaccccgaggagttccacatccgcaccctcgcccccgtcctcggcagcgaggagaaggccaggggcgccgtcctctaccactacaagcacgccgccagcggattctccgcaaagctcaccaccgagcaggtcgaggacctcaagaagcaaccaggtgtccttcaggttgtgccgagccagacctaccagctccatggacatgagggtggacatgccagcacaacgcgcacaatgggccttatgtgaaagccttgagtaggctctgttcttctaatatgggaatggttgcatctcatggctgtaacctaagaataagagatgta

SEQ ID NO: 440417 - DNA, 453 bp, Triticum aestivum
atttatttcaatctcactcaagagccacctaagcttcttgaagctggaagaaaattggacatgacatattcagtgaagtgggtgcaaacaaatgtggcatttgcacggcgttttgaagtttacttggactacccgttcttcgaacaccagattcattggttctccatcttcaattctttcatgatggtcattttcttaactggtttagtatcaatgatattgatgagaaccctgagaaatgattatgcaaaatatgctcgtgaagatgatgatcttgagtcacttgaaagggatgttagtgaggaatctggatggaagcttgttcatggagatgtatttcgacctccacgcaacctaatgtttctgtctgctgttgttggcattggcactcagatggcagctcttatcctgcttgttattgtacttgccattgttggtatgctttatgttgga

SEQ ID NO: 440418 - DNA, 445 bp, Triticum aestivum
tttacgcgtccgccacgcgtccggcgcgttctgcaaggttctccgggatggcgtcgtcggaggtggtggaggacgaggcgtcggcggcggcgatgctcgccaacggggccgcggacgtccgccggaggagggaccaggccaaggcgatgctgtcgaagcaggccgtcaagatcgccaccaaggcagaggagcacgagcgcttcatcttcaaggtcacacacctgatgggtgttcttggatttgggacattttgctacctcttgggtgctagaccacaggatgtgccgtatgtgtattgcctgttctatgtcatatttgttcctctcaggtggatctactatcgctacaagaagtggcactactatcttctggatttctgctactatgccaacacttttctccttgttatgattctcttttatccaaaggatgaaaagcttttcat

SEQ ID NO: 440419 - DNA, 445 bp, Triticum aestivum
tgtttcgcgtgggcgccgagccgggaagagccaccaccccatcttcctcgcctccgcttccgaagggtcagagatggcggaccgtgctaaccacccgtctgtcatgcagaagtttggtggacagttccaccttgccttcagcttctatgagggtgttcgtgctcgcaacatctgcccttctgtgccatcctatgagaggcgcttcaccacaagctgctacatgactcagaaccttggcatcagtgtccccatgatgtcatcttctccattgtttgccaatgcaccacctgagaagaaaggtgtcaagaactttgcaattgacttcctcatgggaggagtgtccgctgcagtttccaagactgctgcagctcctattgagcgtgttaagctgcttatccagaaccaggatgagatgatcaaggctggcaggctctctgagccatac

SEQ ID NO: 440420 - DNA, 422 bp, Triticum aestivum
ccttcttcgtccggcaggctgccaagagcatcattgctagcggtcttgcacgccgctgcattgttcagatctcctacgccattggtgtgcctgagcccttatctgtcttcgttgactcttatggtactggcaagatccccgataaggagatcctcaagattgtgaaggagaactttgacttcaggcctgggatgatcagcatcaaccttgacttgaagaagggtggcaacagattcatcaagacggctgcttatggccactttggccgtgaggatgctgacttcacctgggaggttgtgaagcccctcaagtttgacaaggcctctgcttgagacgtgggtatgaaggagtctatcattactgctgctgccgctggtggttgtatcttggataattgaattccttctctatagaaggaagca

SEQ ID NO: 440421 - DNA, 426 bp, Triticum aestivum
agagctttgcggcaaaccatagaagcaaccatgaagaacaccaagctcgtggcgatccttgtcctccaggccatcatggtcatgggaatcctcgcacacgtgaatgccgattacttcccgaagtgctgcaacaactgcaggtccttctcgggggtcgacgtctgcgacgacgcacacccccagtgccccaagggctgctcggcctgccgcgtggtgacgccgagccctcacaagacgttccggtgcgccgacatgaagagcaccgtcgacggcacctgcggcgggccatgcaagaagcactgatccgttcagggcttcaggctcagacgtggtgtgccgtctaaaataaagctcagatgatgagccagcttgtcacagtgtttgtgcgtgcctgtggctccaccttgcataccgacaatatataca

SEQ ID NO: 440422 - DNA, 319 bp, Triticum aestivum
cactatctccctccgcccccaacagcagcggggagctggcctgccgccgccgcgcgccgccggggaggcgatccggcgaccggaggagagcccgccatggcgcggaagcacggctggcagctcccggcccacaccctgcagatcgttgcaattactgtattcttccttctggtggttgcattttatgccttctttgcaccatttctgggaacgcaagtccttgagtatgttgcgataggcatttatactcccatggcattggctgtcttcatcctttacatccggtgcacaagtattaatcctgctgatcctggtatca

SEQ ID NO: 440423 - DNA, 399 bp, Triticum aestivum
tctacgcgtccgccggaggaggctgccggggacaagaaggaggaaattgaggagcagtccgcggccttctggacgacaatcgcgccaaacgtagacgactacagctcgtcggtggcgaggcttatcgccaagggctcggggcagctggtaaggggcatcatctggtgcggggacatcacagcctccggcctgaaatgcggggaggcggtgttgaagaagggtgcgggggcgaacggcaagcatacgcaggtgaagccgagctccctcaagaggatgaagagggccagaagggtcactaaaatgtcgaacaaggtagcaaattcaattctctcaggtgttctcaaagtctcaggatttgttaccagcactgtggtcaactccaaacctgcacagaagttc

SEQ ID NO: 440424 - DNA, 462 bp, Triticum aestivum
cacaggaccttatgttgtttcatttctcttaaggtttatctatggagttatgcatatacttaccaaagctgcttttaaccaaggtacaagtacatatgttcttaatttctacaggcatgcaatagccacaatgttcttactgcccattgcttttgcgattgaaaggtatgccgagttttggcttcttagttacctagttctggatgtcatctaggaagcatgcactgagatttattttgcaggaaaactgccccacaaatgtcatacaaactctgtgtgaagctatttgtgcatgcattatatgggatgtctgctccttttaacatatcatgtgttggcctcaaatatgcttcagcagcttctgcttctgcagtaataaatctcctgccagttttaacttttattttggctcttctgttgggaatggagtctttgcaattaaagcgcttccatgggattatg

SEQ ID NO: 440425 - DNA, 351 bp, Triticum aestivum
tgtgtgagtgagctcgccacactccccccagcttagccgagctacctcactcaagaaagcatggatccctgcaagttccggccgtcgagctgcttcgacaccaagacgactaccaccaacgccggccagccggtgtggaacgacaacgaggcgctcaccgtcggcccgcgcgggcccatcctgctggaggactaccacctgctggagaagatcgcccacttcgcgcgcgagcgcatgccggagcgcgtcgtccacgccaggggcgccttcggcaagggcttcttcgagtgcacccacgacgtcaccggcctcacctgcgccgacttactccgcgcgcccggtgcgcgcacc

SEQ ID NO: 440426 - DNA, 434 bp, Triticum aestivum
atgggttcagctccaaacaatggaggcagtttcagaaacgcgcgctctgttcatccagggtctctcgggagtgtagggtttcctggtagccctcaaatgtatccatcagatgtccctgtcttcgcacctgccaggggaggttacagggagaccatgttctccccagttggcgctggattcccgtcgctgcaacaaatgtgcaatgcaatgaacagaaggaaccctatggtccaggtttccgcttcctatgatgctacaaatgatcggatgaggaaccgcagacatgatggaaacactgtccagccagaaaacaaaaggctatttgagcttgacattgaacgcatagcttagggtgaagacccacgcaccacactgatgatcaaaaacattccgaacaagtacaactgtaaactgcttctgggtgtcattgatga

SEQ ID NO: 440427 - DNA, 402 bp, Triticum aestivum
gtgctccaatggcgttctcctccctcgccaccccttcctcctgctccccctcctcgtctttcaccctccccaccaagccctccccgggcgcaggctccctctccttctgcagggcgtccacggagaagttcaggacggcggctgtgagggcggaggcggtggacacgtccatcagcccgcgtgtgagcgcgctgcggccgtccaagaccatggccatcaccgacatggtcagcgcgctgcggcaggccggggtgcccgtcatcggactcgccgctggggagcccgacttcgacacgccggcggtgatcgccgaggctgggataaatgcaatcagggatgggtctactaggtacacacctaatgcagggactatggaggctgggaaagctatctgcaacaagc

SEQ ID NO: 440428 - DNA, 420 bp, Triticum aestivum
tgtttaaagatgtgacagatgaatgcaatggtttgcgtgtgaaggttgatgaactttctggagaagttgaggcatacaaggagaaatcagcgagtctcgaggctttattagcagaagcaaaccaaaaagaggatgagttgtcagggaagttggctcaagctaatgaagagaaggagaagtatgaagaattgtcaaacaaggccaccacagcgcatttggaagccgagaagcaggtccagactttacaggctgatctagaatctgcccggggtaaaatggaagaggtggagaatgatcttcaggccctgggtgttagagaaagctcagtacttgacaagcttaaatctgcagaggagcatcttgagcacagtgtaagggcactagaacatgccacttacaagaaaattgatctggaatctc

SEQ ID NO: 440429 - DNA, 376 bp, Triticum aestivum
ttgatatcgagcatatagccatggactactaccgcgagacctacggcgggtacgggatggcgacgcccgggtacgcggcgccggtgccgtacggcatgtcgcaggtgaacatcgacggcaactgcggcgggcggccgatgccgccgcagcccacggtgaagatctactgccgcgccaaccccaactacgccatgtccgtgcgcaacggcaaggtggtgctggcgccggacaaccccaaggacgactaccagcactggatcaaggacatgaggtggagcaccagcatcaaggacgaggagggctaccccgacttcgccatggtgaacaaggccaccgggcaggccatcaagcactccctcggccagtcacaccctgt

SEQ ID NO: 440430 - DNA, 311 bp, Triticum aestivum
tcgtgtggcgaagatggtgtcgctgaagctgcagaagcgcctggcctcgagcgtcctcaagtgcggcaagggcaaggtctggctcgaccccaatgaggtcaacgagatctccatggccaactcccggcagaacatccggaagctggtaaaggatggtttcatcatcaggaagcctcagaagatccactccaggtctcgtgcaaggagggcacatgaggccaagcagaagggccgtcactctggatatggtaagcgtaggggtaccagggaggctaggctccccaccaagatcctgtggatgcggaggatgc

SEQ ID NO: 440431 - DNA, 382 bp, Triticum aestivum
ttgcgaaaaacacaccagagctcacctctcccctcgcttcctcgcgaaaatgtcgactgaagtggctgccgctgacatcccggtgcctcaggtggaggtagccgccgacgccgccgttgacacaccggcggcgaagccggccaaggcgcccaaggcggccaaggccaagaagtccactggcccgaagaagccccgcgtcaccccggcccacccgtcctacgccgaggtaagcccccgagtccttcgccgtcgttcctcgttccgtctgttctcccgtgtttcccctgatctgactttggttttgtccgttcgtgcgtgctcagatggtgtcggaggcgatcgccgccctgaaggagaggagcgggtcgagcaccatcgcgat

SEQ ID NO: 440432 - DNA, 389 bp, Triticum aestivum
tccacgcgtccggcttaattaccctgacagacattgttaggtcttgtgttagtgaagctagctaggtaagaaaaaccatggcggcttcccgcgccttggctgcactgcttgctgtggtggtattcatggtctgctctccggcgcctcgtgttctcgccactgaccccacccagctccaggacttctgcgttgctgatataatgaaccctgtgattgtgaatgggttcgtgtgcaagaacatgaagatggtaacggcgaacgacttcttcttgcccgggcttaacaagccgggcatgttgaacgctcagggctcggcggtgacaccggtgacggtgcggcagctgccggggctgaacacgctgggcatctcaatggcgcgcatcgacttc

SEQ ID NO: 440433 - DNA, 411 bp, Triticum aestivum
ttcacgcgtccgaatccttggacatgataaagtttgggtcttagatggaggtttccctcagtggcaagcttctggattcaatattggaagcagctgccctgatgatgcagttctgaaatccaaagctgctaatattgctgttgaaacagcttataatggtgaattggcaaatgctgccacatttcagacagagtttcgacatcagctattgtggacactagaaaaggtcaaacacaatgtagctgctaaggctcaccaagtagttgatgcccgagtaaagggcagatttgatggtgtaatgccagaaccaagggaaggagttagaagtgggcatatacctggaactaaatgtgttccgttccctgagatgtctgatggtgcacaaacgctcctccctgcagatgagctatc

SEQ ID NO: 440434 - DNA, 329 bp, Triticum aestivum
gccttcaagtcccgggtcgacgcggcctgtcccggcaccgtgtcctgcgccgacatcctcgccgtcgacgcgcgcatcggagcttacctgctgggcgggccgtcgtggggggtgccgctgggccgtcgggacgcgcgcacgacgactcaggcagcggcgaacagcaacctgccgtcgccgtcgtcgagcgcggccacgctgatctcggcgttcgcgtccaaggggctggactcccgcgacatggtggcgctgtcgggcgcgcacacgatcggcgcggcgcggtgcgcgagcttccggtcgcgcgtgtacaacgacagcaacatcaacgc

SEQ ID NO: 440435 - DNA, 326 bp, Triticum aestivum
tttggttgttggctgtggcggcaggttcccggtcgaaaaggacgccaaagaggaagtaaagctcttcttgggtaatgctggaactgcaatgcgtccattgacggcagctgtagtagctgctggtggaaatgcaacttatgtgcttgatggagtaccaagaatgagggagcgacctattggtgacttagttgtaggtttgcaacaactcggcgcagatgctgattgtttccttggcactaactgcccacctgttcgtatcaatggcaaaggagggctacctggtggcaaggttaagctctctggttccattagcagtcaatacctga

SEQ ID NO: 440436 - DNA, 424 bp, Triticum aestivum
tcgttccagggttcgtttcccctcggagccgaaaccctagccgccgccgccgacgaccgcgagcaggctcagatgggaggcaagtgcccgcaccgcaaggtcaaaaagcgccgtctcaactgcaagcaggtgcgccgcggcaagttcctcgtcaaagccgacgacgccgtctacgacgagctcgtcaagctggccgaccagggcaaggattccgagggcaaggcgcttcccgtcgacgaggacctccccggcatgggccagttctactgcctccactgcgatcggtacttcgcggatgagaccgtgaaggaggatcactaccgctcaaagcgccacaagaaaagggtcaagcagttgtctggaccagccccacacacgcaaatagatgccgatctcgctggtggaatgggaatgccggacaacg

SEQ ID NO: 440437 - DNA, 427 bp, Triticum aestivum
tcgttcgccggccgcagtcgtgcagcgatttgcttcgcggcgccagtccagtctgcagtctgcatggcgtccacggccgcgggcctctacggccggctcaacaggaccagcacgcgcgcgttcctcgcctacgtcgccgccgggggcgtctgcgccgccgtcctcgcctgcttcgtcgtctcctccgccgaccccgccgccgcacccaatggcgcgccccgcctctcctcgcgctccgcgcgcgtctggcccgatctcgagttcaactggcggctcgtggtggccaccgtcgtcggcttcctcggctccgcgtttggcaccgtcggcggcgtgggcggcggcggcatcttcgtgcccctgctcaacctcgtcctcggcttcgacaccaagtccgccgccgcgctctccaaatgcatgatcatggggg

SEQ ID NO: 440438 - DNA, 414 bp, Triticum aestivum
tcgttcacgcgtccgccacgcgtccgccacgcgtccggggggacagcatgatggataaggatgaagatctgagcagcgatagtgaggacgaagaggatgaggaagaggagaatgctggggctggccagaagaagaagggctggttctcctccatgttcaagagcattgcaggtaacaatgtacttgagaagtctgatctgcaacctgcactcaaagctcttaaagatagactgatgacaaagaatgtggctgaagaaatagcagaaaagctttgtgaatcagtagcagctagccttgagggcaagaagctaggatccttcacaagaatttcttctactgttcagacagctatggaggaggctctccttcgcattttaactccaaggcgatccattgacatattaagggatgtac

SEQ ID NO: 440439 - DNA, 374 bp, Triticum aestivum
  unsure (1)..(374): unsure at all n locations
tcgttccaaagcccccctccccctttctcctctttccctcccaagcaaatcctctgcgctccccacgcctccttcttcttcctctgccgcttgccgtgtttgattcgggaccgaaatggcattccacgacgaggcgccgctgctgctcaggatcaacaccgccagaggcggccacatgggcggaggcgagtgcgacgaggccgagaaccagcggtggccgccgtggctcaagccgctgctggcgaccagcttcttcgggcaatgcaagatgcacgcggacgcccacaagtgcgagtgcaacatgtactgcctcgactgcatcaacggcgccctctgctcccagtgcctcgcctaccaccacggncaccacgcca

SEQ ID NO: 440440 - DNA, 395 bp, Triticum aestivum
  unsure (1)..(395): unsure at all n locations
tcctcgcgtccgcccacgcgtccggtgctaacatccactgcgtcctggctagcaatgattggggttcttgcaggtctgacctttgtgatggggcctcttaaaatgctaaagctctatgcagtcccatatgtgatatttgttatgtggctggattttgtcacatacttgcatcatcatggtcacgaagacaaggttccctggtatcgtggaaaggaatggagctatctgcgcggaggattgacaacacttgatcgggactacgggttgatcaacaacatacaccatgacattggcactcatgtcattcaccatcttttcccgcaaatcccgcattacaatcttgtctaggcgactgaggcagcaaagccagttcttggcangtactacaaagaacc

SEQ ID NO: 440441 - DNA, 408 bp, Triticum aestivum
ttctcgcgtccgcccacgcgtccggtggggagaccatcagcgacaaggatcgctgtgggcagtgcaaaggcgagaaggtggtgcacgagaagaaagtcctggaggtggtggtcgagaagggaatgcagcatgggcagaagatcaccttccccggcgaggcggatgaagcgcctgatactgttactggagacataatcttcgtcctccagcagaaggagcaccccaaattcaagcggaagggcgatgacctcttctacgagcacaccctgaccctgaccgaggcactgtgtggcttccagtatgtcctggctcatttggacggcaggcagctgctcatcaagtccaaccctggcgaagtcgtcaagcctgattcgttcaaggcgatcaacgacgagggcatgcccatgt

SEQ ID NO: 440442 - DNA, 295 bp, Triticum aestivum
tggtcgcgtgggcggacgcgtgggcttaacaatgctaggtacaaggactcgataacgaagaacacccgtgggtggaaggaacggtggctctctcggagtgacacgatatcgagtcttggttctgatgtgaggagggaggttaatgccggaatcgctgctgtgtctcgcatgatggagcggctagaaacgagggatgggagtggctctgggccctcatcggcttcttcggacaatgtttcttctgctacaaataatcagggggccgcgtcgtccaacttttgtgcttccgtaaatg

SEQ ID NO: 440443 - DNA, 314 bp, Triticum aestivum
tttttccgccgcgatctcgtctcgatccgcactctctatctgagatttggaatcgggtgaagcctgcagctccagacgacaataagctcgttttgcattcaggcagcggcaacaagaatgccttcaaggcacttattgctgcagagtactgtggggtcaaggttgagctccccaagaacttcgagatgggtgtatcaaacaaaacccctgaattcatcaagatgaacccccttgggaaggttcctgttcttgagactcctgatggtgctgtttttgagagcaatgctattgcacgctatgttgctcgctcaaag

SEQ ID NO: 440444 - DNA, 350 bp, Triticum aestivum
tctctcacgcgtccgtactcctcctcctcccctagggttttgctgcccccctccacacccgtgccgccgccgccgtcgccgcccgcgtccccccatggcgctgccgaaccagaacaccgtcgattaccccagcttcaagctcgtcatcgtcggcgatggcgggactggcaaaaccacttttgtgaagaggcatctcactggagagtttgagaagaaatacgagcccaccattggtgttgaagttcacccattggatttcaccactaactgcggaaagatccgtttctactgctgggacactgctgggcaagagaagtttggtggccttagagatggatactatatccatg

SEQ ID NO: 440445 - DNA, 417 bp, Triticum aestivum
tcgtagaaactgcagaatttgctaggaagtgggttccgttttgcaagaagcacaacattgaaccaagggccccggagttttactttcagcaaaaaatagattacctaaaggacaaaatccagccttcttttgtgaaggaaagacgagcaatgaagagagagtacgaagaatttaaaatacgaatcaatgcacttgttgccaaagcccaaaaagtgcctgaagaggggtggaccatggccgatggcaccgcttggcctgggaataaccctagggaccatcctggcatgattcaggtgttcttggggcacagtggtggccttgacactgatggtaatgagttgccacggcttgtgtatgtctctcgtgaaaagagaccaggtttccagcatcacaagaaggctggtgcaatgaatgcac

SEQ ID NO: 440446 - DNA, 383 bp, Triticum aestivum
tcgttgacgcgtggtggcgctcctcgacccggagatggatcagctgatccacgacgcggtggctgcccacgaccacatggggatcggccccgtgctccggcagtgcggtgagctcttcgaggggcttgagactctcactgactgcggtggtggtgatgggactacggccaggtccatcgtcgaggcctacccgcacatcaagtgcactgtgctggaccttccaaaggtcatggacaaagttcttcttcccgctcaagaagaaggagcggttaagtatgtttccggtgacctgttccacgtcgtcccacctgctcaagctgtgttgctcaagcttgttctgcacttctggagcgacgaggattgcatcaagatcctcgcacaat

SEQ ID NO: 440447 - DNA, 358 bp, Triticum aestivum
tcgtttcctggtcaccgtgacttcatcaagaacatgattactggtacctcccaggctgactgtgctgtgctcatcattgattataccactggtggttttgaggctggtatctccaaggatggccagacccgtgagcatgccctccttgctttcactcttggagtgaagcagatgatctgctgctgtaacaagatggacgccaccactcccaagtactcaaaggcccgttacgaggaaattgtcaaggaagtctcttcgtacctgaagaaggtcggctacaaccctgacaaggttccctttgttcccatctctgggtttgagggtgacaacatgattgagaggtccaccaaccttgact

SEQ ID NO: 440448 - DNA, 354 bp, Triticum aestivum
tggtttcaagggagctgagattgccatggcctcatactgctctgagctccagttcttaggcaacccggtgaccaaccatgtccagagcgccgagcaacacaatcaagatgtcaactctcttggtctcatctcctccaggaagaccgccgaggccattgacatactcaagctcatgtcctccacattcatggtcgccttgtgccaggccatcgacctccgccatctggaggagaatgttaaggatgccgtcaagagctgtgtgaagatgacggccaggaagacattgagcaccaccaacaatgggcacctccacaatgcgcgattctgcgagaaggacctgctgctcacgattga

SEQ ID NO: 440449 - DNA, 362 bp, Triticum aestivum
tcctagtccacgccgcgcaggctggaagagctcgaatttcctcactcccgcgtcgcctcgcctcgcctctgctcgctccggagaaggctagctgccccgcgagccgagcgcggcgcccatggcgttcgacaagatccaggtcgccaaccccatcgtcgagatggacggtgacgagatgacacgaattatatggaaatggatcaaagataagcttatatttcctttcctggacttggatataaaatactttgacttaggtctacctaaccgtgatgctactggggataaagtaacgatagaaagtgcagaggctaccctaaagtataacgtggccatcaaatgcgcaactgtcaccccagatg

SEQ ID NO: 440450 - DNA, 379 bp, Triticum aestivum
tctttcacgcgtccggcgaacacaagctactagccggtacttggagaaaccaacaatggcgccgctcgcagcccggaggccagcctgcctcctggccctcctctccgtcgccgcggccttattcctgaccccgacggccttggcggcggggggaaagaccggccaggtgacggtgttctggggacggaacaaggccgagggctccctgcgtgaggcctgcgactccggtatgtacaccatggtcaccatgtccttcctcgacgtcttcggcgccaacggcaagtaccacctcgacctctccggccatgacctctcctccgtcggcgccgacatcaagcactgccagtccaagggcgtccctgtctccctctccatcggc

SEQ ID NO: 440451 - DNA, 391 bp, Triticum aestivum
tctttcacgcgtccgtagctagccatggcatcttccaagagtagtcttgcaatgtttgcactggccatagtcatggccgtggtggctgacgtctcggcgcagaacaccccgcaggacttcgtcaacctgcacaaccgcgcccgcgccgtggacggcgtcggccccgtggcatgggacaacaacgtggccaggtttgcgcaggactgggcggcgcagcgcgccggcgattgccggctgcagcactccggcgggccgttcggcgagaacatcttctggggttccgggcagtcgtggacggccgccgacgcggtgaagctgtgggtggacgagaagcagaactaccatcttgacagcaacacctgcgacgccggcaaggtgtgcgggcactaca

SEQ ID NO: 440452 - DNA, 353 bp, Triticum aestivum
  unsure (1)..(353): unsure at all n locations
tgttcttctggtgcttcatggattcagtttgatgagcccacccttgttaaggaccttgctgctcacgaattggccgcgttctcttcagcatatgctgcactcgagtcggcactctctggattgaatgtgcttattgagacatactttgctgatgttcctgctgaatcttacaagaccctcacatcattgagtggcgtgactgcctatggttttgatcttgttcgtggaaccaagacgcttgagcttatcaagagcgctggtatcccatctgngaagtacttatttgctggtgatgtagatggaaggaacatctgggctgatgatcttgctgcatctctcagcactcttcagtc

SEQ ID NO: 440453 - DNA, 411 bp, Triticum aestivum
ttcattatacatgggcaaataaaatttctgctccccgtggacagatttatggctacagaatgtccctctgggctgagcatattggaattatcgaggaagactttaaccatccagagagcctagagtgcatgaggcgggttcgtcaactcgggcaacataactgggatcagttctttgcaaatgaggtgactgagatgagaggccacctcctcaagtaccctgtaagtgttgaccgtaaaggcaaggtgaaacccttgccaggatgtgcgacattcccagacatgggcggaaacatttgtggctccttcacggccatccaggaaaacctcacaatatgaattctgcttatgcaagcatgcaattgttggtgacttcttgggtattatggacaacagagatgccgaagtagca

SEQ ID NO: 440454 - DNA, 416 bp, Triticum aestivum
ttcacgcgtccggccggcgaggactccgacccgctggtgctcggcctcgtcccctgcgcggtcggcggcaccaggatctggatgtgggctaggggccagccgctgtacgaggccgccgtcgccagggcgcgcgccgccgtggcgggcggcggcggggcgctcggcgccgtgctgtggttccagggcgagagcgacaccgtcgaggtcgacgacgcccgcgcctacggcggcaacatggagcgcctcgtcgccgatctcagggaggatctcggctcgcccaatctgctcgtcatccaggttggtcttgcatcaggggaggggaattacaccgacatcgtaagagatgctcagaaaagtatcaatctttccaacgtgattctcgtcgacgccatgggcctgccgctcagcgacgacca

SEQ ID NO: 440455 - DNA, 416 bp, Triticum aestivum
ttctaagtttagttgagagatcgccggcggccatggcgactgaacagctcaacgtgttgaaagcactcgatgttgccaagacgcaactgtaccatttcaaggcggtcgtgatcgccggcatgggcttcttcacggacgcctacgacctcttctgcatcgccctcgtcaccaagctgctggggcgcatctactacaccgaccctgccctcaacgagcccggccacctcccggcaaacgtgtcggccgccgtgaacggcgtggccctatgcggcacacttgccggccagctcttcttcggctggctcggtgacaagctcggccgcaagagcgtctacggcttcacgctcatcctcatggtcctctgctccatcgcgtccgggctctcgtttggacacgaggccaagggcgtaatgggg

SEQ ID NO: 440456 - DNA, 453 bp, Triticum aestivum
cttgccaacccgtgtgactcaaccatgtccagagtgctgagcagcacaaccaggacgtgaactctctgggccttgtctcggccaggaagaccgccgaggccgtggacatcctcaagctcatgtcctccacatacatggtggcgctgtgccaggccatcgacctccgccacctggaggagaacatcaagacctccgtgaagaactgcgtgacgcaggtgtcgaagaaggtgctgaccatgaaccccaccggcgacctctccagcgcgcgcttcagcgagaagagcctcatcaccgccatcgaccgcgaggccgtgttcagctacgccgacgacgcctgcagcgccaactacccactgatgcagaagctgcgcgccgtgctggtcgaccacgccctgaccgccggccccggcgaggccgagagcgaggccacggtgttctccaagatcaacaagt

SEQ ID NO: 440457 - DNA, 361 bp, Triticum aestivum
tcttgcagatttcattacccaacgtagctgcggctagcccacggaggcggggcaaccgggaagtgggaggatgagcgcgcgagcaccaccgccgccgaccatgccggagtgcgactgggcggtcaggcggatccgcaaggagctgaatttgctctggctcgaccccccggcgttctgccggcccggcccggcgcccgtgacggacctgttccactgggaggtggtcatcgatgggcccgacggcagcccctacgccggcggcacgttccccgtcgacgtcgcgatccccaagaagtaccccatgaagcccctcaagatcaccttcaaaactaaggtgtaccatcccaacatcgggccggag

SEQ ID NO: 440458 - DNA, 332 bp, Triticum aestivum
ttctcgcgtccgccacgcgtccgcgtccgcatggcaccgtacaccaaccaaacactcgcctgccttccttccttccttgttcgttcctcgacgcacgcacgcagatctcatccatccaagccaaggcaggtcaggtcaggtcaggtacgagatggctctcaccagaatgggtctcgctggcctcgcggtcatgggccagaaccttgccctcaacattgccgagaaaggcttacccatctctgtctacaacaggacaacgtacaaggtcgatgagactgttcagcgtgccaagctagaaggaaaccttcctctctatggtttccatgaccctg

SEQ ID NO: 440459 - DNA, 457 bp, Triticum aestivum
tatggtcatctccacaatgcgcgcttctgtgagaaggacttgttgctcacaatcgaccgtgaggcggtgttcgcttacgcggatgacccctgcagcgccaactacccactgatgcagaagatgcgtgcagttctcgtggagcatgccttggccaatggtgaggctgagcgcgatgcggagacatcagtgtttgctaaacttgccatatttgaacaggagctccgtgcagtgcttccaaaggaggtcgaggctgcccgaagtgccgtggagaacggtactgctacacaacaaaaccgtatcaccgaatgtcgatcataccctctctaccgattcgtgcgcaaggagcttggaactgagtatttgaccggtgagaagactaggtctcccggtgaagaggtggacatggtgttcgttgctatgaaccagggcaagcacattgatgcactacttgagtgtc

SEQ ID NO: 440460 - DNA, 364 bp, Triticum aestivum
tcgtaaagttgaacgctctcttgccgacggccgcatcacggagattgtgtacaagggcgcgcatgaccacccgaagcccctctccacgcgccgcaactcctcctccggctatgccgcggcggtcgttgcggaggatcataccaacggctcggagcactctggcccgacgcccgcgaattcatctgtcactttcggagacgatgaggccgacaacgggttgcagctcagtcatggcgcggagcccgaggccaagcgccggtaagtaattcatcattgcttgccaaatactacctctatatagattcttagattaatttgaagattgtgtgtttggttggttgtcaggaaggagcatggtgacaac

SEQ ID NO: 440461 - DNA, 433 bp, Triticum aestivum
tcttattattgtagtctgatcatcaacattatctatcctttgtagcggcagatattccttagatatcctttgtagacatcccgagcaactgagtgtgcgtgaaattgttataggttattaggcttaacttattgccgcaatttggttgacattgatagcctcatatgatttacaatgcctctgtccgagcaggaggacatttttgagtggcaatttgctatcctggggccccgagacagcgaatttgagggaggaatctaccatggacggatccagttgccctcagactacccgttcaagccaccatccttcatgctgctcacgccaagtggaagattcgagattcagaagaagatatgtttgagcatttccaattaccaccccgagcactggcagccatcgtggagtgtacgcacagcactagtagcattga

SEQ ID NO: 440462 - DNA, 382 bp, Triticum aestivum
tcgtccacgcgtccgcttccttagcgacgaggccacccagagttccacaggaaagaagcgcgaccggagaaagaagaagaagagcaagatgtcgtcggtgttcagcggcgatgagacggcgcccttcttcggcttcctcggcgccgccgccgccctcgtcttctcatgcatgggggcggcctacgggacggccaagagcggcgtcggggtggcgtccatgggagtcatgcggccggagctcgtcatgaagtccatcgtgcccgtcgtcatggcgggagtgctcggaatctacggcctcatcatcgccgtcatcatcagcaccgggatcaaccccaaggccaagccctacttcctcttcgacggctacgctcacctctcatca

SEQ ID NO: 440463 - DNA, 458 bp, Triticum aestivum
  unsure (1)..(458): unsure at all n locations
tcgttcacgcgtccgggcaatactcgtgaagtgcttcacaaattcagtgtggatctccccaagaagcatggaagaggagggcaatctgctctgcgttttgctcgccttcggatggagaagcgtcacaattatgttcggaaaacagctgaacttgctactcagttcttcatcaacccagctaccagccagcctaatgttgcgggactaatattggctggttctgctgattttaaaacagaactgagccaatctgacatgtttgatcagcgccttcagtgcaaaatacttaatgtggttgatgtttcttatggtggcgagagcggtttcaaccaggccattgagttatcagctgaaattctagcaaatgtgaagttcatacaagagaagatgttgatcgggaagtactttgaagagattagtcaggatactgggaagtatgtctntggagttgatgacac

SEQ ID NO: 440464 - DNA, 348 bp, Triticum aestivum
tccacgcgtccgtcttgtatcaaaggtcccaactctcatcttgggaatggatgtgtcccatggatcccctggacagtctgatataccgtccattgcagcagttgttggttctcgggaatggcctcttgtctcgaaatatagggcttcagtgcgctcgcagtcaccaaagctcgaaatgatagattcattgttcaagccacaaggaactgatgatgatggccttgttcgggagtgtctcattgacttctacaccagttctggaaaaaggaaaccagatcagatcatcatcttcagggatggtgttagtgagagccagtttaatcaggtgctgaacattgaattggatca

SEQ ID NO: 440465 - DNA, 202 bp, Triticum aestivum
ttctttcgtacgtccacgcgtccggcaaactctgtatgtaagcgtctgtatcacatgacaaagaatgatcacctttggagaatggtttgtcagaatgcatggcgcaaccatgctactctggctcttgagaatgtggctggtacaaaacgtttggcatggggacggatagcacgggagccgactacactggaagccgtcacct

SEQ ID NO: 440466 - DNA, 411 bp, Triticum aestivum
ttcgtatcctcaaggagctcaaggacctgcagagggatccccccacctcctgcagcgccggccctgtggcggaagatatgttccactggcaagcgacgatcatgggtccatcggaaagcccatatgctggtggtgtatttttggttactattcacttccccccagactacccattcaagccacccaaggttgcatttaaaacaaaggtttcccacccaaatatcaacagcaatgggagcatctgtcttgatatcttgaaggagcaatggagccctgcattgacagtttcaaaggtgctcctttcaatctgctctctactaacggacccaaaccccgacgacccgttggttccggagattgcacacatgtacaagagcgaccgtgcgaagtatgagtccacagcgaggagct

SEQ ID NO: 440467 - DNA, 437 bp, Triticum aestivum
tcttgacattcttccgactttaatgcctttgattcagcaaaatttggctcggacagatgatgagtcctggaaggagcgggaagctgctgttttatcgattggtgctatagcagagggatgcatcactgggttatatccccaccttccacagatggttgccttcctaattccacttctcgatgataagtttcctcttattcggagtattacttgctggaccctctcccgatacagcaagttcattgttcagagccttggccatccaaatggtcgcgaacaatttgataagatcctcatgggtttgctaagaaggatattggatactaacaaaagagtgcatgaagctgcctgttctgcatttgcaacgcttgaagaggaggctgcagaagactagtaccgcgactggaagtcattttgcagcaccttatgtgtgcata

SEQ ID NO: 440468 - DNA, 347 bp, Triticum aestivum
tcgttcttctcctctgatcagtgtggagtactcaaatggatgggacaccatgtcaggtggaggctgcggatcatccggtgaggttggcgatagctttaggttcaaccttgaagaggtcgagtgtgcgactcagtacttctctgaggttaacttgctaggcaagagcggctttgctgcgacgttcaaggggatcctgagggatgggtctgttgtggcggttaagagcctcaataagacaagttgcaagcaagaggagtctgatttcctgagaggtctgaagacgctcaccatgctgcggcatgagaaccttgttggcctgaggggcttctgctgctccagggggaggg

SEQ ID NO: 440469 - DNA, 392 bp, Triticum aestivum
tcgttcacgcgtccgctcccccacccctttcttcttcctccccacgcccgccgccgcccgggacctagggtttcctcgccgccgccgcccccgccgccgaatcgccgcaggaggaggagatgggcacgccggagacctcgcgggagccgtgcccggaccgcatcctggacgacgtgggcggcgcgttcgggatgggggcggtgggcggctccgtcttccatttcctcaagggcacctacaactcgcccaacggcgagcgcctgctcggcggggcccagcaggtgcgcctcaacgcgccgcgcgtcggcgggagcttcgccgtctggggcggcctcttctccgccttcgactgcaccatggtcttcgtgcgccagaaggaggacccctggaac

SEQ ID NO: 440470 - DNA, 479 bp, Triticum aestivum
tcgtgctccaatggcgttctcctccctcgccaccccttcctcctcctccccctcctcgtctttcaccctccccaccaagccctccccgggcgcaggctccctctccttctccagggcgtccacggggaagttcaggatggcggcggtgagggcggaggcggtggacacgtccatcagcccgcgggtgagcgcgctgcggccgtccaagaccatggccatcaccgacatggccagcgcgctgcggcaggccggggtgcccgtcatcggactcgccgctggggagcccgacttcgacacgccggcggtgatcgccgaggctgggataaatgcaatcagggatgggtctactaggtacacacctaatgcagggactatggagctgaggaaagctatctgcaacaagcttcaggaggagaatggtctaacctacagcccagatcaggtgctagtgagcaatggagctaaacagtgcattacac

SEQ ID NO: 440471 - DNA, 315 bp, Triticum aestivum
ttcctcgcgtccgcccacgcgtccgcccacgcgtccggcgttcaggaagcaggcgagcaagttcaaggagcaggtcgccaagcagcagcaggctgtgataaaacaattcagcactactggttacgagcgttcagattctgttgtcattgatgaagttgaattacagcaacatcaaaggcttgagaaattgtacagttctactcgttctggaagggattttcaaaaggacatagttcgagcagctgaaggcttggtgtctattggaagcaagcatattgaagtgggaacaaaattttctgaggattgctatagata

SEQ ID NO: 440472 - DNA, 292 bp, Triticum aestivum
tcctcgcgtccgcgcaacacacctaccacgcgcagcgcgcagagggagatcgagatggcgacggagctgacggcggcgcagctgcgggcgtacgacggcaccgacgcgtccaagccgatctacgtcgtcatccgcggcaaggtcttcgacgtctcggccgggcgcggcttctacgggcccggcggcgactacgcgctcttcgccggccgcgaggccgtccgcgcgctcgccaagatgtccaaggacgccgccgacgtctccggcgacctgttcggcctctccgacaaggagc

SEQ ID NO: 440473 - DNA, 405 bp, Triticum aestivum
tcgtttcgccatcaccggcgccaccgcgctcgacacgccctacttcgaggccaggggcctcggcgccgtcatctggaactccggcgccctcatgacccaaatccagtggttccgtgacctcaagcctttcttctgcaactccaccaaggaagaatgcatggagttctatgccaactcgctgttcgtcgtctgcgagttcggtggcaacgactacaacgcgcccctgtttgccgggaagggcctcacagaggcgtacaagttcatgcccgatgtcatccagggcatctccgatggcctcgaggaattgatcgccgagggggcagtggatctcatcgtgccaggggtgatgcccactgtgtgcttccacgtgtacctgaacatgctcgacatgccagcccacgagta

SEQ ID NO: 440474 - DNA, 362 bp, Triticum aestivum
tcttccaaaccctctcgccggagccccagcaaggaagatggacggcagcaaggcgaagaaggtggcggcgaagaagttcggcgggccgaggaagaagtcagtgacgaggtccatcaaggccggcctccagttccccgtcggccgcatcgggcgctacctcaagaagggccgctacgcccagcgcgtcggctccggcgcccccgtctacctctccgccgtactcgagtacctcgcagccgaggtgctggagctggccgggaacgccgccaaggacaacaagaagacccgtgtcgtgccgaggcacctgctgctggccatgcgcaacgaccaggagctcgtgaggctgctgtccggcgtcacca

SEQ ID NO: 440475 - DNA, 311 bp, Triticum aestivum
ttccttacgtccgcccacgcgtccgatccagacctggtgtaaattagaggaaatcaaaacattgttcagttctgattctatttctcgagcaaagcagattcttgccatgatacctggaagagcaacaggagcatacagccatagccagggtataaaaggactccgtgatgcaattgcttctgggatcgcttcacgagatggattccctgctaatgctgatgacatttttcttacagatggagcaagtcctggggtgcacctgatgatgcaattactgataaggaatgagaaagatggcattcttgtcccga

SEQ ID NO: 440476 - DNA, 332 bp, Triticum aestivum
ttaatatttggtggagaaggagcaagttcagagaaccagtctgctgaggtgactaacaaaattttaaagaaatgtggtggtgtgcctttagcgatcattacaatagctagcttgcttgttggtaaacgatgtgaggattggtctaaggtgtatgatgccattggttttgggcatgaagacaacaaagttgctcataacacaagaaagatattgtcttttagctattatgatctaccttcccatttgaagacctgtttattatatctaagtatgtctcctgaagatagcttgattgggaaaaggacactgatttggaggtgggtctgtgaagg

SEQ ID NO: 440477 - DNA, 352 bp, Triticum aestivum
tctccgcctcttcctctggctctccgacaagccggcggcggtgaccactgtctgtgcggtgtcaggaccaggttctcctaccacttccagcccgccaagaactggcagaacgatcccaatggtcccatgtaccacaacggcctgtaccacttcttctaccagtacaaccccgacggcgtgacgtggggcaacggcaacctctcgtggggccactccgtgtccgtggacctggtgaactggttcgcgctcgacgccgcgctccagcccagccgctccttcgacgccaacggctgctggtcgggctccgccaccatcctccctgacggcagccccgtcttgctctacaccggca

SEQ ID NO: 440478 - DNA, 427 bp, Triticum aestivum
tttgtagctttctgttagtggccataattggggcgcggtcgacatcaatggcaatatgcttagctttaatgttggctcaaaggaagcatttgaagtctctctatcagatgtatcacaaactcagttgcaaggaaaaacagatgttgttcttgagttccatgttgatgatactacaggggctaatgagaaagattcgctgatggatttaagttttcatgtaccaacttcaaatactcagttcctcggtgatgaggaacgtccctcggctcatattttttggcagaaaatcttggctatagctgacgttggctcatcagaagaggctgttgcctcattggagggaattgcaattcttaccccaagaggtcgatacactgttgagcttcatatgtcattcttgcgactccaaggacaagctaatgatttc

SEQ ID NO: 440479 - DNA, 398 bp, Triticum aestivum
ttcttccacgcgtccgcgcaccttcagcttcattgctttttctacccacccacccacatctaccaatccatagccatctccgtgcaagcatcgaagaagaggtagcaggatggccggcgccggtgccgcagcagcgatcagctcggagcagatgagcgagttccgggaggccttcgccttcttcgacaaggacggcgacggctgcatcacggcggaggagctgtccacggtcatccgctccctgggccagtccccgacgcccgaggagctgcgggacatggtgcgcgacgtggacgccgacggcaacggcaccatcgagttcgccgagttcctggcgctcatgtaccgcaaggccgacgccgacgcggacgccgcggacgccgccgaccccgaggagg

SEQ ID NO: 440480 - DNA, 225 bp, Triticum aestivum
tttaatccacttccgcccgcggccatggccggggccgacccctaccggagcttcatgaaggacgtgaagcgcatcatcatcaaggtgggcactgcagtcatcaccagaaatgatggaagactggctttgggcaggattggagccctgtgcgagcaggtcaaggatcttaatgctcaaggatatgaggtgattatggtcacctcgggcgctgttggtgtggggcga

SEQ ID NO: 440481 - DNA, 140 bp, Triticum aestivum
tggctcgaccccaatgaggtcaacgagatctccatggccaactcccggcagaacatccggaagctggtaaaggatggcttcatcatcaggaagcctcagaagatccactccaggcctcgtgcaaggagggcacatgaggc

SEQ ID NO: 440482 - DNA, 343 bp, Triticum aestivum
acgaagaacccatctgtaaaattaatatgcgttgaaccagctgaatgttcattgatttcaggtggcgagccaggcttccacaacatcctaggaatagggcctggctttgtcccagaaatattggatagatcccagatagatgagattgtcacagtgactactcaagaagctatggacatggctagaacattggcaagggaagaaggattgcttgttggcatctcttcaggggcaaatgcagctgcctgcttaaaggttgcatcaagagaggagaacaggggaaagatgactgtgacaatgttttccagtggtgcagagaggtatctgaactcggagctctttg

SEQ ID NO: 440483 - DNA, 299 bp, Triticum aestivum
ttcgtgatgtattctgaaaatggatcaccactgtatttggattaacaattgtgttgggcatgagaattacaaaattttcctcgtctttgtgttgtatgctgcaaccgcaagcttctattctttggctctgatgattggaggcgtagtgcatagtgtgcctacagatgaacaatcaggaattgattctccaagaaaatcgttagttatttgtggcgtctttgtgggtgtaatgactttggcgttgtctatcctcttggtctggcatgtttacctcatcttacataataagactactattg

SEQ ID NO: 440484 - DNA, 241 bp, Triticum aestivum
tgagtggttaagtatgtttctggtgacctgttccacgttgtctcacctgcccaagccgtgttgctcaagcttgttctgcacttctggagcgaccaggattgcatcaagatcctcgcacaatgcaagaaggccgttcctccccgagaagcatgaggaaaagtcatcgtcatagacattgtgcttggatcggtttctgcagggccaatgctggaaacccaacacctcatggatatgctcatgc

SEQ ID NO: 440485 - DNA, 194 bp, Triticum aestivum
gggctggcctaccgctacgtgggggacgtgcttggggacgcccaggtctacgccgaccacgcggacaagccccagctcgacgccgacgacgtccgcctcgccatccaggccaacgccaacttcttcttcttccagccgccgacccgcaaggttctacttgaataggcacgcagccggaacaagatcccgctgcc

SEQ ID NO: 440486 - DNA, 279 bp, Triticum aestivum
tttcctggctacgtcatccacctctcctccggcatcgccggcttcaccgccgcctactgggtgggaccgaggctgaagagcgaccgggagcggttctccccgaacaacatcctgctcatgatcgccggcggcgggctgctggggatggggtgggccgggttcaacggcggcgcgccctacgccgtcaacatcacggcgtccatggccgtgctcaacaccaacgtcagcgcggcgacgagcctcctcacctggacctgcctcgacgtcatcttcttcggc

SEQ ID NO: 440487 - DNA, 403 bp, Triticum aestivum
tttcctgcgacaggatgccatcttctgtcagtaatgctgatgctagcacatcaggaacagatgctccattctatcaactgaggaaagatgctacaaaacttgttgcatatacatttgaaagggggcggagaaatctttggcaactggcaacaagtcgcctgtctgttttactggcttgttcagctgtttcttcaactagcatataccaatttctgaagaactatgaagatctcacaatatttattttggccggtgaagcattttgtgggtttgaagctagcgaattccgacagaagctgaagacagtctgtttgaactacatagtgacctttcaccggcaaaatatatacgcacttaaaatggtactggaaaaggagtcttggacaataatgtctgctgaagc

SEQ ID NO: 440488 - DNA, 337 bp, Triticum aestivum
ttagttatcccctcaccgcctccgctcccacgccgccgtatccgagacctgatctcggattcaccgcagcgcgaccaaaccctcaggcgatccccggcacctcctccccgacgcttcagccatggcaggaatggcaccggaaggttcccagtttgacgctaagaactatgattctaagatgcaggagctgctgaaccaaggtgagactgaggagttcttcacctcttatgatgaagttcatgagagctttgatgacatgggtctccaagagaacctcctcagaggaatttatgcttatggttttgagaagccttctgccatccagcaaaggggaatc

SEQ ID NO: 440489 - DNA, 181 bp, Triticum aestivum
ttccattcgtccgcccacgcggccgctggccggaaggattctttataggcaagagcggttgatgagagagctcgatggcccgacgatattcacctgggttgcagtaatagccgggatgctggctgcgttctcggccgttttccttccacccgtcggtccggtcaaatgggtgctcgccatc

SEQ ID NO: 440490 - DNA, 250 bp, Triticum aestivum
tcgatgcgtgggcgaacccctctctccccacttacgattcttcggctcccaacgcccaaagccttcgcatccagagctccaaaccctaggcgaggcgaggcgcggcgcaccggagggagaggccatggatcccgattcggtctcgaaggcgttcgtgcagcactactaccagacgttcgactccaaccgcgccgcgctggtggggctgtaccaggacggctccatgctcaccttcgagggcgagaagttc

SEQ ID NO: 440491 - DNA, 180 bp, Triticum aestivum
ttacctgttcggcaatggcggccacgaacatggtctggctgctgtagcgacaagggcggtcatgctcgtccgtgtcaacactctgctccaggggtactccggcatccgctttgagatcctcgagacggttgttgcgctttttaacgccaacgtgacaccatgcctgtcgctccggggcac

SEQ ID NO: 440492 - DNA, 321 bp, Triticum aestivum
tacctctctctgcaagtctctttcattagacacacgcatacagtagtaagtgcacacgaattggagatggcgatggcacccagcaaggttgtggtgctcatggcgttcatggccgctgcgctgagctctgtgtcgatggccgcggggctgcagcacggcttctactactcgtcgtgcccgcaagccgaggacacggagaggaacgtcgtgcaaggcatgatcaacaatgaccccaccatgggcgccgcctttgttcgcctcttcttccacgattgctttgtcaggggttgcgatgcctctattctgctggacccgaccacc

SEQ ID NO: 440493 - DNA, 359 bp, Triticum aestivum
gctcctacggcatcgtctgctccgcgctcaactccgagacgggggagcaggtggccatcaagatgatcgccaacgccttcgacaacaagatcgacgccaagcgcacgctgcgggagatcaagctgctccgccacatggaccacgagaatattgttgcaataagggatattatacctcctgcacaaaggactgcattcaatgatgtctatattgcatatgaattgatggacaccgatctgcatcaaattattcgctcaaatcaagctttatcggaggagcactgccagtattacctttatcagatccttcgtggcttgaagtacatacattcagcaaatgttctccaccgagacttgaag

SEQ ID NO: 440494 - DNA, 376 bp, Triticum aestivum
gttatttcaggcattgcatctgctcgtgccttgtcaaatgctttatttaaggtcacattgctagagtcgcgggagcgacttggtggccgtgtgcatactgactattcttttggctgcccaattgacatgggagcatcttggttgcatggtgtttgcaatgagaattctttggcgccattgattaggcttcttgggcttagattatatcgcaccagtggtgataactctgtgctttatgaccatgatttggagagctacgcgctctttgataaagatggtcgtcaaattccccaggagatagtaaccaaagttggggaaatatttgagcagattctgaaggagacggtgaaaggtagagatgaatatgcaaacgaca

SEQ ID NO: 440495 - DNA, 357 bp, Triticum aestivum
gttttgcctatgtgattggagacccagcgaagcctggccagaagtggcacatctactatgccaccgagcaacctgagcagcccatggtcaccctggagatgtgcatgactgggctcgacaagaagaaggcctctgtgttcttcaagacttctgctgatggccatgtctcctgtgctaaggagatgaccaagctctctggtatctctgacatcatccctgagatggaggtctgtgacttcgacttcgagccctgcggctactccatgaacgccatcaacggatctgccttctccaccatccatgtgacccccgaggacggcttcagttacgcgagctacgaggtcatgggcatggacg

SEQ ID NO: 440496 - DNA, 345 bp, Triticum aestivum
ttgtaggagtccaccctccacctggtgctccgcctcaggggtggtatgcagatctttgtcaagaccctcaccggcaagaccatcaccttggaggttgagtcatccgacaccattgacaacgtgaaggcaaagatccaggacaaggagggcatccctccggaccagcagcgcctcatcttcgctggcaagcagcttgaggatggtcgcaccctcgctgactacaacatccagaaggagtccaccctccacctggtgctccgcctgcgtggtggcatgcagatcttcgtcaagaccctcactggcaagaccatcacccttgaggtcgagttctctgacacgatcgac

SEQ ID NO: 440497 - DNA, 321 bp, Triticum aestivum
tgtccaccgaattcctcgcgattcctctcccctcgcctcctcgtcctccccctcctaggggatcgccggagaggaatcgcgacgagggcttcctcctatcagttaaatcaaagtcatggagcacaaggagaccggctgccagtctcgtgagggccccatcctttgcgtcaataactgcggcttcttcggcagtgcggcgaccatgaacatgtgctccaagtgccacaaggagatggcgatgaagcaggagcaggccaagctggccgcctcctcttttgacagcatcgtcaacggtggtgatgccgcgaaagaacatcttgc

SEQ ID NO: 440498 - DNA, 403 bp, Triticum aestivum
ttgtgttcatgacattactgaggaacccattttacctggccgtcatgtttgtagttttcctagtcgggaaagccatgtgggtacaactagacattgccaatgaattccgaaatggatttcttccagctctcctttcgctgtcgacaaaatttgttccgacaattatgaacattctgaagagactagctgatgagggggcagcgcccgcagccccagagaggcagagagagacggagctccaaccaaggaataatagttcaaacagcaacgtgacatcagcaggttcctccagcttaacctcttcagagaatggacctgaatattcaagcccggtagcacaatgatgagtggatccctagcttttagctgaaagctctagttgtagctgcaacggtttgagcct

SEQ ID NO: 440499 - DNA, 364 bp, Triticum aestivum
tggggtggcacttttgatgtctctctccttaccattgaggagggtatttttgaggtgaaggccacggctggtgacactcaccttggtggggaggactttgacaaccgtatggtgaaccactttgtccaagagttcaagaggaagcacaagaaggatatcagtggaaaccccaggtctttgagaaggctcaggacttcttgtgagagggcgaagaggaccctttcttccactgcccaaaccaccattgagatcgattcactcttcgagggaggtgatttctattccaccatcaccagggccaggtttgaggagctcaacatggacctcttcaggaagtgcatggagccagtggagaagtgcctga

SEQ ID NO: 440500 - DNA, 309 bp, Triticum aestivum
gtctcagttcaaaccagagttctatgagagaactgacagcattatcgcccgctataagcagggacaggtgtgtatgccagtttttgtggagcacctcaaggatgaggtcattggcttgaagaaagtggaggcccagaagacacgagtattttctggtagtccagcggacttcgcagtggtgatgaggaagtatcttctcacgacagtgcgagtgatccaaaacaatcgatatgttttcgaatgtgctcctggaaccaatgcaacctcgttggagtggtgtgagatttatcactacctcatccaacatgg

SEQ ID NO: 440501 - DNA, 419 bp, Triticum aestivum
ggtctggcggcagcggtgccggcgactccggagagtacagcgcagcggcggctggaggtgcgaagcctcctcaggcggctcaataagcctcctgtcgcaagcattcagagctcggatggtgatgtcatagactgtgtgcacatatccaaacagcctgcattcgatcatcctctcctcaagaaccatactattcagatgcggccttcttacaacccaagaggcatgcatcatgactccaacatcacagcccatgcaatcactcaaatatggcatcaaaatggcacgtgccctaagaacaccataccaatccgaaggaccaaggaggaggatgtcctgagggccaattctattaggaggtttggcaagaagatgcctaggagcatcccacacctcaatccaaccaatgacactgacacacc

SEQ ID NO: 440502 - DNA, 367 bp, Triticum aestivum
  unsure (1)..(367): unsure at all n locations
ttttangtggcatgcacccatgattgacaaccctgcctacaagggaatctggaagccccaagaaatccccaaccctgaatactttgagcttgacaagcctgactttgatccgattgccgctattggaattgagatctggacaatgcaggatggcatcctttttgacaacattcttatcgccgatgatgagaaggtagccaccgccatcttggagaagacatggaagcccaagtttgatgttgagaaggaaaagcagaaggctgaggaggctgcagcagccgattcagaggacctttctgagttccagaagaagatcttcagcgttttgtacaagatcgccgacattccattcttggaaccttacaag

SEQ ID NO: 440503 - DNA, 350 bp, Triticum aestivum
gtagcaaacaccattcaagctagctacagggcactagctagacagagctagcaatggcgaaggacattgaggcggccccccaggggggcgagttctccaccaaggactactcggacccgcccccggcgcccatcgtggacttcgaggagctgaccaagtggtcgctctaccgcgcggtgatcgccgagttcgtcgccacgctcctcttcctctacatcaccgtggccaccgtcatcgggtataagcaccagtccgaccccaccgtcaacaccaccgacgcggcctgcagcggcgtcggcatcctcgggatcgcctgggccttcggcggcatgatcttcgtcctcgtctac

SEQ ID NO: 440504 - DNA, 276 bp, Triticum aestivum
gatctttgaggtgaaggccacggctggtgacactcaccttggtggggaggactttgacaaccgtctggtgaaccactttgtgcaagagttcaagaggaagcacaagatggatatgacaggaaacccgaggtctgtgagaaggcttaagacttcttgtgagagggcgaagaggatcctttcttgcactgcccaaaccaccattgagatcgattcactcttcgagggagttgatttctattacaccatcaccagggccaggtttgaggagcttaacat

SEQ ID NO: 440505 - DNA, 410 bp, Triticum aestivum
ctttcgcgtccggtgaggaaagctctgtatgcctccaagatctgcagctatgcccagggcatgaacatcatcaaggccaagagcgtggagaagggatggggcctgaacctgggcgagctggccaggatctggaagggcgggtgcatcatccgcgccagcttcctggaccgcatcaagaaggcgtacgacaggaacggcgagctcgcgaacctcctcatcgaccccgagtttgcgcaggagatcatggacaggcaggccgcatggaggagggtcgtgtgcctcgccatcaacaacggcgtgagcacccccggcatgtcggcgagcctggcctactttgactcgtacaggagggagaggcttcccgcgaacctcgtgcaggcccagagggattactttggggcgcacaccta

SEQ ID NO: 440506 - DNA, 421 bp, Triticum aestivum
ttgtctccgtgtgggcggagcgaagtgggagccaacgccaagccagccgagcggactcctctcctcctcgcagcagttcgcgattcgcccccaaatccagcgccctccccgccggaatccggcgccgaatcttgcagagagcttgaaccgagctatggacaacttgtggcatctcggagatgagttccgtgggcaatcaaaggtggtggaggaccgccaatggtctctcatgacatcaaagctggctgagatcacaaagtcaaaggctgagaggatgaatgactttgagtatgcacggatgaacaccgtccctgatgtgaagcaatgggataagttatcctaccaccaagaagacaacaagatggaccacctcaatcttggcctcatgaacctggatcttaagatgaatgatctcaagatg

SEQ ID NO: 440507 - DNA, 316 bp, Triticum aestivum
tggacgcgtgggcgaccggatcgtcgccaggggccactacacggagcgcgccgccgctgtggtcaccaagaccatcgtcgaggtcgtgcagatgtgccataagcatggagtgatgcaccgggacctcaaaccagagaatttcttgtttgcaaacaagaaagaaaccgcggcgctgaaagcaattgattttggcctgtctgtttttttcactccaggtgaacggttcactgagattgttggaagtccttattacatggctccagaggtgttaaagagaaactatggccaagaggttgatgtttggagtgcaggagtg

SEQ ID NO: 440508 - DNA, 333 bp, Triticum aestivum
tccgccccgtttattcccctccggcgcagccgcccccgtgtcctgtgcgcaccttctcgaagcctcctccctccctcatggcggaccagctgaccgacgagcagatcgccgagttcaaggaggccttcagcctcttcgacaaggatggcgacggttgcatcaccaccaaggagctcggaaccgtgatgcggtccctcgggcagaaccccacggaggcggagctgcaggacatgatcaacgaggtcgacgcggacggcaacggcaccatcgacttcccggagttactgaacctgatggcgaggaagatgaaggacactgactcggaggaggagc

SEQ ID NO: 440509 - DNA, 400 bp, Triticum aestivum
tttttgcgtccgcccacgcgtccgggaggatgccatttcctttctcctccttgctgcacttcttgcgttagtctcatggcaggccactgcttctgatcctagcccactccaagacttttgtgtcgccgacatgaattcaccagtccgtgtcaatgggtttgcttgcaagaacccgatggaggtcaatgcagatgacttcttcaagggggccaacctcgacaagcctagggtgcccaacaaggctggatccaacgtcactttgatcaacgtgatgcatattgctggactgaacaccctcggcatatcaattgcgcgcatagactatgctcccttgggccaaaacccaccacatacgcaccctcgcgccactgagatcctcacggtgctcgagggaacactg

SEQ ID NO: 440510 - DNA, 355 bp, Triticum aestivum
ttataggagcggagccgccgagccgggaagagccaccaccccatcccatcgcccgcctccgcttccgaagggtcagagatggcggaccgagctaaccacccatctgtcatgcagaagtttggtggacagttccaccttgcctccagcttctctgagggtgttcgtgctcgcaacatctgcccttctgtgccatcctatgagaggcgcttcaccacaagcagctacatgactcagaaccttggcatcagtgtcccaatcatgtcatcttctccaatgtttgccaatgcaccccctgagaagaaaggtgtcaagaactttgcgattgatttcctcatgggaggagtgtcagctgcag

SEQ ID NO: 440511 - DNA, 332 bp, Triticum aestivum
ttttccttctctccctagtagcttcattcttcttcttcttccaaacagactggagttcatcaaggatctcgtcctgaaactggagcctacaagcactcaaaggaagaagagcaagaagacaggctcccagccgatacaaggtaggagcgaacaacgttagggtactgtcgttatatcctgagttgatatggtgacagtgagagaagagacacgcaaagggccatggacagagcaggaggacatgcaactggtatgcactgtccgtttgttcggtgaacgccgttgggatttcattgccaaagtatcaggcctcaaccgcacaggaaagagct

SEQ ID NO: 440512 - DNA, 274 bp, Triticum aestivum
ttgtcgcgtgggcggaggcgatagcacaggagaggaaagaagccaagaggcggggccgtcggtccaccgagcccgagagcaccttggccgacagcatggcgctgctgatggagcccgggtcggagcccctgacggagggcgagaaggccgacctggacgccatcctcgacatcaaggagtcggtggagcgcgagtacagggaggagggcaaccaggtcggcaagaagggccggaagcactaccccgacgacgacgactgctacaccaagggcat

SEQ ID NO: 440513 - DNA, 414 bp, Triticum aestivum
gacccaaatgttagataaatgttcccttggttacttgggttggatatgtgatacatccctcatggcaccgtccggcatgcccctgcttccaagagatacaaatcatgactgtcctccggagttgaagcatttgtcaaaggaaatagttaacaagtgcaaaggcttgcctcttgttattgtgttagttggtagccttttgcgtgtgcgtgagaaaactgtggaagaatggagaaaaataaatgaccaattgggttgggagctaattaacaattcgaggttcgatcacataaggaatgttttgcatctgagtttcatgtatcttccaacacatttgaaaagttgtttcctgtactgcagtttatttccagaagactatattttcaaaaggaaagaacttgtacgattatggatagc

SEQ ID NO: 440514 - DNA, 339 bp, Triticum aestivum
tattgcgccttcttcgactacgccagaggaaatgccgtcggcatggcaccgggcgcgcgcatagccgtctacaaagtgtgttggaaagggtgcgcgagctctgacatcctcgccgcgtttgatgaggccattgcggacggtgtcgacgttatctctctctccctcggctccaacggcaaggccccggacttttatagcgatacgaccgccgtgggtgcgttccgcgccgtcagcaagggcatcgtcgtctccgcctcggcgggaaactccggccccaaagagtccaccgtcgtcaacgtcgcgccatggttcttgacggtcggcgcgtccactctcaac

SEQ ID NO: 440515 - DNA, 327 bp, Triticum aestivum
ttcacgcgtccgcccacgcgtccgcccacgcgtccgcccacgcgtccggcagacctgactttgactgtagaagtactgaagaaaccgaggcttggttcatagattcttttgaggaatggcgcaaagcaaaaaacctcagtaattttatattgcttggtcattctttcggaggatatgttgcggcaaagtatgccttacagcatcctgaacatgttcagcacttgattttggttggttctgctggcttttcgtcagaaacagatcatagttctgagtggttaaccaagttccgtgcaacgtggaaaggcatgctagtaaaccatcttt

SEQ ID NO: 440516 - DNA, 363 bp, Triticum aestivum
ggcttccaattggtcaacatatcagttgcagaggtcaagatgctacaggtgaagaagtaatcaagccttacacacctactacattggattctgatctcggaaattttcagcttgttataaagatgtaccctcaaggaagaatgtcgcatcacttccgtgaaatgaaagttggtgattatatgtctgtgaagggacctaagggtcgtttcaagtaccaagtaggacaagtgagagctttcggaatgctggctggtggatctggcattactccgatgttccaagttgcaagggcaattctcgagaaccctaatgacaaaacgaaggggcatctagtctatgcaaatgtcacacctgaagacattc

SEQ ID NO: 440517 - DNA, 385 bp, Triticum aestivum
cttttcccctaggctctccttcgccgtcggtcgggctccctctccgacacgccgccgtcgatacatccacccgaggcatggcgacggcgttcaaggcgttcgtgaacagccccgtcggccccaagaccacccacttctggggccccgtcgctaactggggcttcgtcctcgcgggtttggttgacttgaacaagcctcctgagatgatatctggcaatatgacagccgccatgtgtgtgtattctgggctctttatgaggttcgcgtggatggtacagccccggaactacttgctcctggcatgccatgcctccaacgaaaccgttcagctctatcatttatctcgctgtgctagggctcaggggtatctggattccaagaaaga

SEQ ID NO: 440518 - DNA, 354 bp, Triticum aestivum
gtcatatgccctttcaaactgctgatgagtttccggtgaacacagtatcaatcaggtttcctcgtctatagtacttttccttcatcaatcttgtacacaaactatctggtcgctcaatcaaacgccaagcttgcctcgaaagcaaagcctggttaaagaggcccatgtcacgaaaaccgagaccaccttgattctttgggagaattaatttttcccatgcaatccagtgtgtcttatgttttcctttctccacaccccaccagtacctccggaccatcttggtcagttcatcacacaccgacaatggagtttaaatacgctcataacatatgtcgggatagcattagcaactgc

SEQ ID NO: 440519 - DNA, 311 bp, Triticum aestivum
gtttgacagtaatgttgtccaacaaggaattgataaatgcccattcctgaggaacatcaacgagcctacaagtttttccttgacatccattaatttccccactccggcaaccggagcaaagggtccaatttttgaagacgggcccaactttgacacggcatttcgagttttccacggcagagacggggttgttccactttcagaaggagcatttgctcatattgagaagcctctgccaaagcccgctccagaatttaaccccttggcagccaaagcagctaccatcagtctctcaggattcggaggctttt

SEQ ID NO: 440520 - DNA, 261 bp, Triticum aestivum
ctcacgcgtccgcccacgcgtccgctcggccccgccatggaggtgttctactacctcgtcttcggcggcctcgccgccgtcgtggcggcgctggagctcggcaagtccggcaaggaccgcgtcgccaccccgacggccttcaactccttcaagaacaactacgtcctcgtctactccctcatgatgtctggggactggctgcaggggccctacgtgtactacctctacagccagtacgggttcgacaagggcgacatcggc

SEQ ID NO: 440521 - DNA, 302 bp, Triticum aestivum
tttgtatcaacgaggacaacacggtcatcaaccgcgagggcctgatgaacatccacatgccggcctacttcgacgctctcgccaagggcgtctccaccgtcatgatctcctactccagctggaacggggtcaagatgcacgccaaccaagatctggtcaccggatacctcaaggacacgctcaaattccagggcttcgtgatctcagattggatgggcattgacaagctcacgaccccttatggggcggactacccctactcggtcaaggcttccgttcttgccggccttgacatgatcatg

SEQ ID NO: 440522 - DNA, 400 bp, Triticum aestivum
tttgctcgtgacgctcggcctccccatgatcctcgaggagccgctcctccacaccgtgcacctcccgcccatcctcgtcagcggcgactacaaggcgctgtacaagtacttctacgccgccgcgaccaaggcgctcgacaccgccgagggcctcgggctgaagcgggacgaggcatgccacaacctgctgttcgccaccgtcttcaacagctacggcggcctcaaggtgctgctcccggggatcctcgcgcgcatcgcgggggccggagagaagttccaccagaagctcgtcgcggagatacgcgccgccgtggctgacgccggcggcaaggtgacgatagaggcgctggagaagatggagctgaccaagtcggctgtgtgggaggcgctgcggctggac

SEQ ID NO: 440523 - DNA, 353 bp, Triticum aestivum
gtgttctcagctgaagaaatttcttccatggtcctcatcaagatgcgtgagatcgctgaggcttacctaggagtaactattaagaatgctgttgtcaccgtgcctgcttacttcaatgattcccagaggcaggcaaccaaggatgccggtgttattgctggtcttaatgtgatgcgtatcatcaacgagccaacagcagctgcaattgcttatggtcttgacaagaaggctaccagtgtcggtgagaagaatgtgcttatctttgaccttggtggtggcacttttgatgtctctctccttaccattgaggagggtatttttgaggtgaaggccacggctggtgacactcacct

SEQ ID NO: 440524 - DNA, 213 bp, Triticum aestivum
tgaaggggaccgggaagtggacggtgcagcaggcggcggagcttgcagtcgctgcacccaccattgcagcatcactggatgggaggtacttgtcggggctcaaggatgagcgagttgcagccgcaagtgtgctagaggaagaggggatgccagttgggcttctggagaagattaatgtctataagaaggagctggtggacagggtgaggtagg

SEQ ID NO: 440525 - DNA, 195 bp, Triticum aestivum
tgtggccaccatttatgcccatcattcatcatgacattttaaatgagataccaatccacctacaaaggatgcagtaccttgcattttgttcattgttgggattgacgttatgcctcttttggaacatcattgcaactaccgcagcatggattaaaggggcaggtgttgtcatctggttgctagcaattatttact

SEQ ID NO: 440526 - DNA, 253 bp, Triticum aestivum
gtttgtatgctgaggaacaagcaggcagtccgggatgcggcgatcggcgatggcgctccgctccacggcggaccggtgcttcggccaccactcaccgttgacgaacggtattcaatcaacattcagtgcaaacgtcggttcaagatggggaagtcttgcaagagctttcagtgcaaaaccacttggaaatgaggttattgggattgatttgggaacaacgaattcaggtgtttctgttatggagggaaagaat

SEQ ID NO: 440527 - DNA, 172 bp, Triticum aestivum
ctactgcacccggaagggctggcccaacagtgtgggttttggcacctaccagagagccagcatcacagataatggacgaagctgaggcattgggcggatcatcaagaattgcttctacgtgcctttatggcggagctcctaaagggccccagtttagagatttagaaagagg

SEQ ID NO: 440528 - DNA, 317 bp, Triticum aestivum
taaaataaaactctcgacgcataccagatttttaagtttcatgatggcgtcgttgaagatgttgcttggcatttgaggcatgaatacttattcggctcagttggtgatgatcatcatctcctaatttgggatatgcgtagtcctgcacctaccaagcctgtacagtctgtggtggcacaccagggtgaggtgaattgcctggctttcaatcctttcaatgaatgggttgctgtaactggttcaaccgacaagactgtcaaattatttgatcttcggtagattgatactccgctgcacacttttgattgtcacaaaga

SEQ ID NO: 440529 - DNA, 184 bp, Triticum aestivum
ctacgcgtccgcaaggtctggcccaacagtgttagttttggcacctaccagagagctcgcaacacagattttggacgaagctgtgaaatttggcagatcatcaagaattgcttctacgtgcctttatggcggtgctcctaaagggccccagttaagagatttagaaagaggggttgatgttgtt

SEQ ID NO: 440530 - DNA, 371 bp, Triticum aestivum
ttctgcgatacgagatcaacaggggcttcgctagcctgtgggcgattggtcaaggccgtgacctgaagaaattcctgattgtggttgcaggcctgtggatcctctcttttcttggcagctgctgcaatttcctgaccttgctctacataggtaaatgtggtttcttgctacagtctgtttgttacttacatatgtgcaataagcttgcctagcattgtttcgctgatcatgccttcttgtttgcagtcttcatggtgctttacaccgtgcctgttctgtacgagaagtatgaggacaagatcgatgcttttggagagaaggccatggtcgagctgaagaagtactacgccatcttcgatgagaagtgcctg

SEQ ID NO: 440531 - DNA, 352 bp, Triticum aestivum
ttcggccacggcttatctaaaagaaccatggaagatgggtgtgcacaaaagaaatggtgttgtataccttgatgtccataaactccctgaaagaccacagagtgaaattgaccgcaggagatgtttttggggctattcttttgaaaatcttgccactgagaactccattgacgaagaggaagcggtattgatgctaatgtagagtattgttctgtaataaagacgaaattgggcgcgcatcgcattgtcatgggtgctgagatggactgctgtgattcaaccgacgatggagggcggttcttgtgggagttgaaaacaagcagagagctggagtatcatacggtggaaaaat

SEQ ID NO: 440532 - DNA, 305 bp, Triticum aestivum
tttccacgcgtccgctccgcgagctcatctccaactcctccgatgccttggacaagatcaggttcgagagcctcacggacaagagcaagctcgatgcgcagcccgagctcttcatccacatcatccccgacaaggcgaccagcacgctcacgatcgtcgacagcggcattggcatgaccaagtcggacctcgtcaacaacctcgggaccatcgccaggtcggggaccaaggagttcatggaggcactcgctgcaggcgctgacgtgtccatgatgggcggtttcggtgcttgggttctactccgc

SEQ ID NO: 440533 - DNA, 253 bp, Triticum aestivum
ttctttccacgcgtccgggaaaggcgtcttcgaactcgcctctctccgcgcaaccgagccttcgccctcctccttccccattgcgacagcggcgcagcccaccaaccacccccacccgccggcatgagggagtgcatctcgatccacataggccaggccggcatccaggtcgggaacgcgtgctgggagctctattgcctcgagcatggcattcagcctgatggccagatgcccggtgacaagaccgctgggg

SEQ ID NO: 440534 - DNA, 384 bp, Triticum aestivum
ttctcggcggcggcgcgcgcataggaggcgaagcagcatcggagccaagccaccgacgccaccatgggtatctcgcgtgactccatgcacaagcgccgggccaccggtgggaagcagaaggcgtggaggaagaagcgaaagtatgagctcggccgccagccagccaacactaagctttcgagcaacatgacagtgaggagggtccgtgttcgcggaggtaacgtgaagtggagggctctccgtctggacactggtaacttctcatggggtagtgagggctgtgacccgcaagacccgtctcgtggatgttggtttacaattcgtcaaacaatgagcttgtgaggactcaaacccttgtcaagaatgccattgtgcaagttgatg

SEQ ID NO: 440535 - DNA, 322 bp, Triticum aestivum
ttcttcgccgccgtgcctactactcgcccaaggttggagcttgtgaaagttctctaaggctgacaagatggttctgaagaccgagctctgccgttttagcggccagatgatttaccctgggaagggtatcaggttcattcgttcggattcgcaggttttcctctttgccaactcaaaatgcaagcgctacttccacaaccgcctgaagcctgcatagctttgctggacagcaatgtacaggaagcagcacaagaaggacatccatgctgaggctgccaagaagaggcgccgcaccaccaagaagccgtactcacggtcgatt

SEQ ID NO: 440536 - DNA, 330 bp, Triticum aestivum
ttgttcagtttcaaactggagccgaagggtcaaagttaaggagggatgtttccgcacaaggcaatgttggtgcagggccctctactagaggtctagtgtcaatgctgtctggtcaagaagagatgttcgcgttccaaagggcgatatctcggctcgtagaaatgcagaccccgctgtatctcgagcgcgtccagcatgtccattcttccgcccttcaacaacagcagggcacccctgttctcgcataacagagcactggatcctcagtctgctccctggtagactggtagtactattctattcattcttggaaaataatcttgcaactgt

SEQ ID NO: 440537 - DNA, 343 bp, Triticum aestivum
  unsure (1)..(343): unsure at all n locations
ttttgaacgccgccgtgcagcctagctcctccttctctcctccaaccttttcccccctgttctgcaagccctttccgtctacttctggctgcttcctcgcgcaggtgctattatttctgagcttccgaggcgacagagctgcacaagagcagagcagagcacgcatagggagagagggagatgagnggagatcataagcatccacatcgggcaggcgggcatccaggtggggaattcctgctgggagctctactgcctcgagcatggcatccagcccgacggcctcatgcccagtgatacctcggttggggttgcaaaggatgcattcaacacattcttcagc

SEQ ID NO: 440538 - DNA, 392 bp, Triticum aestivum
tttaaggaggtgaggaccaggctgatgaacatcatccaaagcgtcttgccaccaaagacaccatgggctacggcaacgacctgcttgggcttatgttggaggcgtgcgcggcagagggcgggcataatccgattttaagcatggacgagatcatagatgagtgcaagaccttcttctttgccgggcatgacaccagctcacacctgctcacatggaccatgttcttgctgagtacgcaccctgagtggcaggagaagctcagggaggaggtgctaagagaggtgggcagttgaggttcccaccggtgacatgctcaacaaactgcacttgctcaacatgttccttctagaaactcagaggttatacgcccctgtgtcactcattcagaggta

SEQ ID NO: 440539 - DNA, 411 bp, Triticum aestivum
tttcggtcgcgtgggtacaaattgagcaactcatggaccaggaagttattaatttatcaggtggagagctccagagagtagcattatgtttgtgccttggaaagcctgcagatatttatttaattgatgagccaagtgcatatctcgattcagagcagcgtattgttgcctcgaaggttatcaaaagattcatccttcatgcaaagaaaactgcatttattgtggagcatgatttcattatggcaacctacttagcggacaaggttattgtttatgagggacttgcttctattgactgtactgccaatgcaccacagtctttggtatctgggatgaataaattcttatcgcatcttgacattacatttagaagagacccgaccaactacaggccacgaatcaacaaactgg

SEQ ID NO: 440540 - DNA, 236 bp, Triticum aestivum
tgtggtctgaggatcaacgcgcgcggggcctctcaccaaccaacccaggaataagctcaccgtgtgcgcgtcggggtcgacggtggtgcagcgggcgaggaggaagtaggtgccgggggagtcggtgacggggggctggatgcgcgcgagcggctcgtcgacggagcggaactcgagcgtgccgacgcaggtggaggcgagcagcggcgtgaagaccatgtggttgcgcggggaga

SEQ ID NO: 440541 - DNA, 209 bp, Triticum aestivum
taggacgcgtgcgtgactgtcttggatgtcctgccatccacaaagcttgtgacgtctggcaagcttcctgattacaatgctagaaaggtgggggtgcaatacttccatgaccatgcaactactgctgccgctgttggcatgaagccctctcctgtggtcgatttttcttgggtagtgggccctaaaggacttgccttcggtggggaagc

SEQ ID NO: 440542 - DNA, 442 bp, Triticum aestivum
tcggctaaatccggggctggttcccgggccgttgctccggcgatcaggagcgcttccttcgttggttacaccaagcaaacaccaaacttgtcaggcctaaggatgtcaaacacgttcagggtgtctgccacggccgtgcacaaggtgaagctcataggcccggacggagaagagcacgagtttgaggcccctgaagacacctacattctcgaggcagctgaaactgccggagtggagctgccattctcttgccgcgccggatcgtgctccacatgcgcgggcaagatgacgaccggggaggtcgatcagtcggagggctccttcctcgatgagagccagatgggtgcagggataccttctgacctgcatttcataccccaaggcggattgcgtcattcaaacccaccaagaggaggaactctactaattggctcacatgtgc

SEQ ID NO: 440543 - DNA, 386 bp, Triticum aestivum
tcgagccacggcacaatcgtcaggtcctccgccatgtctctcacggtctagttcgttcgttctcgccaacgcgatggcgacgccggcccgccggccgtcggcgcagcagcagcagccgctgacggtggacttcgaggcgctgagctacatcagcaggctcgtggaggcgttccaggcgttcgactccgacaacgacggcctggtcacggcccccgagctccggggcctcctggcctccctgggcctggacaagtcggaggcggaggcgcgggacatgctggcccgccccgacgccgaccgtgacggccggcttggttggtaggagttcttggacgtgatgaacgcaggcgagctcggcttggggcgcgctcggcgcgctcctgcag

SEQ ID NO: 440544 - DNA, 320 bp, Triticum aestivum
tcgcccacgcgtgcgccagggtctgctgaaggtgttagccgggatcgacaccaacttcacggttacctcgaaggcaaacgaccaggacggcgactttgcggagctatacgtgttcaagtggaccaggctcctcatccctccgaccaccgtactggtgattaacctggtgggcatggtggcaggcatatcatatgccatcaacagcggttaccaatcctggggtccactcttcggaaagctcttgttctcaatctgggtgatcctccatctttactccttcctcaagggtctcatggggaagcagaaccgcacgccaacca

SEQ ID NO: 440545 - DNA, 281 bp, Triticum aestivum
gtcggcgtcttcgcctccgtctccgccgatggctccgtccgcgtctttgatctccgggacaaggagcactccaccatcgtctacgagagcccccgcccggacacgccgctcctcaggcttgcctggaaccgctatgacctgcgatacatggccgccctgctcatggacagcaacgccgtcgttgtgctcgacatacgcgcacccggggtgcctgtggccgagctacatcggatgggggatgcgtcaacgctgttgcgtgggcaccgcaggctgcaagacac

SEQ ID NO: 440546 - DNA, 228 bp, Triticum aestivum
gtactgtgcatatgttggtgaccagggcgtgtctggtctcatctgttccgcgacagcctcgcttgccaaggtctgccttcagggtttgagcatcactgatgcttctcttgctgtgattgggtactatggaaaggcgatcacaaacctcaccctcactcgcctgtccgcggttggcgagaggggtttttgggtgatggcacatgcccttggcctgcataagctcatatg

SEQ ID NO: 440547 - DNA, 372 bp, Triticum aestivum
  unsure (1)..(372): unsure at all n locations
tcgtgttcgcccacggtctaatccgattcaaacgcaccgcttcctcgtgtccgaactaagccccaatcccgtcaccaccgccgctggtgctcggcgcgatggcgcagaaggacgccgccaatggcaacggcgccaccacgcgcccgtcgcccactccctcccccatccgcttctccaagttcttccaggccaacatgcggatcctggtcaccggcggagctggcttcatcggctcgcacctcgtcgacaagctcatggagaacgagaagaacgaggtcattgttgctgacaactttttcactgggtcaaaagacaacctgaagaagtgggatcggacaccntagatttgaactcatccgcaacgatgtcacc

SEQ ID NO: 440548 - DNA, 348 bp, Triticum aestivum
tgttcgcttcataggtggaaagcaaactttatcactaaagctatggccaaccaaactgccttagttactgatagagcaaggttatcagcttttaaccaagtctcctcattgggactgattgcacttggtataatgggtcttgctgaggcttgtggtgtagctgttcaatcaatattaactgttggtggtgtgggcaggtgttgctacggcttttgctgcttgagatgtctcgggcatcgtgttgaatgggttctccttacaattttctaggccattctgagctggagaatacataaaggctgggtcaatagaaggcatggcactcgatataggacttacttcaacttt

SEQ ID NO: 440549 - DNA, 353 bp, Triticum aestivum
tcgtcgcccacgcgtccgctctcccctgctccctcccctgctcccccactggttttgtgtcctgagccatggctgccaagctgactcgcctccacagcctcagggagcgcctgggtgccaccttctcctcccaccccaatgagctcattgcactcttctccaggtatgttcaccagggcaaaggcatgctccagcgccaccagctgcttgctgagtttgacgaactgttcgaatccgacaaggagaagtatgcgccctttgaagacatcctccgagctgctcaggaagcaattgtgctgcccccatgggttgcacttgccatcaggcccaggcctggtgtctgggactacatt

SEQ ID NO: 440550 - DNA, 400 bp, Triticum aestivum
  unsure (1)..(400): unsure at all n locations
tcgttctcctcctgccaccgatcccgaaccagggaggaacccggcgcgaggagggcaaaggaagagaagaggagatcaccgagcccagcgcgcgcacaggacagcaggcgccgcgatctcgcgcaggagcggagatggggctcacgttcacgaagctgttcagccggctcttcgccaagaaggagatgaggatcctctacaagctcaagctncgagagatcgtcaccaccatccccacaatcgggtttaatgtcgaaactgtagagtacaagaacattagtttcaccgtttgggatgtcgggggtcaggacaagatcaggcccctgtggaggcactacttccagaacacccagggtctcatttttgtcgtggacagcaatgacagagagcgtgttgttga

SEQ ID NO: 440551 - DNA, 266 bp, Triticum aestivum
tcgctcaaggagatcatcaagtacaagggcttccaggtggcgccggcggagctcgaggccctcctcatcacgcacccggagatcaaggacgccgccgtcgtatcactgaaggacgatcttgctggcgaagtcccggtcgccttcgttatgcggatcgaaggctccgaaatcaccgaggatgacatcaagaaattcgtcgcaaaggaggttgttctctacaagaggatccacaaggtcttcttcactgactccattcccaagaaccc

SEQ ID NO: 440552 - DNA, 454 bp, Triticum aestivum
tttcccacgcgtccgttccgatcaaacgcggcggcagcagcagcagcggcagcgcaagtagagcaattggaattttcgccgacacatctcttcaattgatcgtaatcagaggtagattggagtatcaccaccaccactcaagaaatggcggccgagactttcctcttcacctctgagtctgtgaacgagggccaccctgacaagctctgcgaccaggtctctgacgctgtgcttgacgcgtgcctcgcccaagacgctgacagcaaggttgcctgtgagacatgcaccaagaccaacatggtcatggtttttggctgagatcaccaccaaggccactgttgactatgagaagattgtgcgtgacacctgccgcaacattggcttcatctctgatgatgttggccttgatgctgaccggtgcaaggtgcttgtcaacatagagcagcagtctcct

SEQ ID NO: 440553 - DNA, 351 bp, Triticum aestivum
tcgctcgtccaccgcctccgccttctgagaagcgccgtcgtctccccttcttcggcgctgctgccgtgcagccgcccgcgcctcgctatccccttcgcgcagccgccgctccgcgccgccgccttcgccggcgcctcgtcgccgctgctccgcccggtcggcgccagattctcgctgttcagcagcatggccgccgccgcctcctccgcctcctccgtccacgacttcaccgtcaaggatgcaagtggaaaagatgtcgacctgagcacctacaaggggaaggctctcctcattgtcaatgttgcatcccagtgtggcttgaccaattccaactacacggagctcgctcag

SEQ ID NO: 440554 - DNA, 198 bp, Triticum aestivum
tcgtagcctttaagttgaactgggcatcctatagcatgggtgaaaagcgatcagaagttgtctctgaccactcaatttttgttggtgatttagctgctgatgttactgatgaaatgttgatggagctttttgcttgcaagtatcgctccctgaaaggagctaaagttatcattgatgcaaacacaggccgttctaggg

SEQ ID NO: 440555 - DNA, 201 bp, Triticum aestivum
tcgtcacgcgttcgcccacgcgtccgggaacactgtatactcagcagtcctacaaagtaagtgatacctttcccttcaagtggataaacaagaaatggcgtgatggtttctatgtgacttccatggcaactgctggaaataaatgggcgattgttatgtcccgcaatgcagggttttcggaacaggtatcatcatttgcac

SEQ ID NO: 440556 - DNA, 365 bp, Triticum aestivum
ttgcttactacctccctcgcctgcgacccatcacacatacacagcgcgagcgtcttaaccgggcctgcgcgaagagaagagtgcagaggagcgcacagattaagcaacagcaatggtgagggctccttgctgcgagaagttggggctcaagagaggcccgtggacggcgaaggaggacatgaccctggtggctcacatcgagaagcacgggcacagcaactggcgggcgctgccgaagcaggccggcctgctgcgctgcggcaagagctgccgcctccgatggatcaactacctgcgccccgacatcaagcgcggcaacttcaccagcgaggaggaagaagccatcatccaactccacgccatgc

SEQ ID NO: 440557 - DNA, 392 bp, Triticum aestivum
tcggtcggagcaacctggaacagggttgttggatctgagccagtgaaggagtggccgactgcctctgcgacctcccgccgccagccgcaggcagatgctgccgaccggcaggggcaggcctcagcccaggcctgcgcccagatcttggtccttctcagacatggacttctctgatccgaagcgcaactccagatacctcagcaagatcatcatggtcgcgctcctcacggccatgtgcgtcgtcatgctcacccagccgccctgccacaggaaggctcccagtgtgttctccatccatgaactcggagtaacacatgtgtctggtgacgggtggcgctggctacataggatcgcatgcggctcttcgactgctcaaggactccttcagagtc

SEQ ID NO: 440558 - DNA, 399 bp, Triticum aestivum
tgcgggcccaagttcctgaacgccagcgtggggttcggcgggtcgtgcttccagaaggacatcctgaacctggtgtacatctgcgagtgcaacggcctgccggaggtggccaactactggaagcaggtgatcaagatcaacgactaccagaagagccggttcgtgaaccgcgtggtgtcgtccatgttcaacacggtgtccggcaagaagatcgccgtgctcgggttcgccttcaagaaggacacgggcgacacccgggagacgccggcgatcgacgtgtgcaagggcctggtgggcgacaaggcccaggtgagcatctacgacccgcaggtgacggaggatcagatccagcgggacctggccatgaacaagttcgactgggaccacccgttgcacctg

SEQ ID NO: 440559 - DNA, 241 bp, Triticum aestivum
cgcccgctgaggtttccgccgcgatctcgtctcgatccgcactctctatctgagatttggaatcgggtgaagcctgcagctcctgccgacatggcgctcgttttgcattcaggcagcggcaacaagaatgccttcaaggcacttattgctgcagagtactgtggggtcaaggttgagctccccaagaacttcgagatgggtgtatcaaacaaaacccctgaattcatcaagatgaaccccc

SEQ ID NO: 440560 - DNA, 414 bp, Triticum aestivum
  unsure (1)..(414): unsure at all n locations
tgtctgatcaacccggcggtgacgttcgggctgttcctggcgaggaaggtgtcgctcatccgggcgctgctctacatcattgcgcagtgcctcggcgccatctgcggcgtcgggcttgtcaagggcttccagagctcctactacgtgcggaacggcggtggcgccaacgagctcagcgcaggctactccaagggcaccgggctcgcggccgagatcatcggcaccttcgtgctcgtctacaccgtcttctccgacaccgaccccaagcgcaacgcccgtgactcccacatcccggtgctggctcctctcccaatcggattcgccgtgttcatggtccacctggccaccatccccatcaccggcaccggcatcaacccagcgagaagcttgngagctgctgtcatctacaacact

SEQ ID NO: 440561 - DNA, 234 bp, Triticum aestivum
ttgtggcctcccctgcattccatctcgaacccattaaacaaccggagccgtcctcctcctcctcccaccagatctcagatccgcggagctccagtgcgcctcccatggcggtcaaggtctacgtcgtgtactactccatgtatggtcatgttgctaagctagctgatgagatcaagaaaggtgcttcctctgtcgaaggcgtggaggttaaagtgtggcaggtccctgagatcc

SEQ ID NO: 440562 - DNA, 213 bp, Triticum aestivum
gcgtccgctaatttctttcctaccagaaaaaaaacacagtctcgatctgcatcggcgccattccggcgacgccatgcgcgccgatgaggagcgcgatgccgtgtgcgtgccgtacccggcgcaggggcacgccaccccgatgatgaagctggccaaggtcctccactccaggggcttccacgtcaccttcgtctacaccgagcacaaccaccg

SEQ ID NO: 440563 - DNA, 254 bp, Triticum aestivum
gcgtccgctttcctctcgccagtcgcaacctggtggtgccgccgctgacatcgtctgcctccgcccccgcaccacgatggaccccacctcacgccccgccgtcgtcattgacaacggcaccggctacaccaagatgggattcgccgggaacgtggagccctgcttcatcacccccaccgccgtcgccgtcaacgagtccttctccgaccagacgagggccaccgccaaagggaactggctggcgcagcacagcg

SEQ ID NO: 440564 - DNA, 172 bp, Triticum aestivum
ctcgcggacgcgtggggttgccaaattctgtgcaaaatatctacacagggaagttctcaaaagtgaagtttatttagctggtgacctgggagctgctgcccatggagctttcttcagaatggatgagatgatgcggggtcaaagaggctggcgagaactacaggcactcgga

SEQ ID NO: 440565 - DNA, 367 bp, Triticum aestivum
ttcacgcgtccggccacgcgtccgtcctagccgcctgcagcacgctgctcctccgcctcgagcagctgatggacgcgcgcagacatggcgacggagaccgagaccttcgccttccaggccgagatcaaccagctcctctcgctcatcatcaacaccttctactccaacaaggagatcttcctccgcgagctcatctccaactcctccgatgccttggacaagatcaggttcgagagcctcacggacaagagcaagctcgatgcgcagcccgagctcttcatccacatcatccccgacaaggcgaccagcacgctcacgatcgtcgacagcggcattggcatgaccaagtcggacctcgtcaacaacc

SEQ ID NO: 440566 - DNA, 287 bp, Triticum aestivum
tgttcttctctcgggacacttcccaacctagtctacctggatctaggcgttaatcgtctcgaggcaggaggttggtctttcttaacctcattgaccaactgcacccaactggtggaattattcttggatgcaaacatccttcagggagatttgcctagttccattgcaggcctttcaaagagcttagaggtattgttattaacagcaaataaaatatcaggcactataccacaggagatagagcagctcacaaacatcaaacgtctttacatggaaaaaaatctgct

SEQ ID NO: 440567 - DNA, 98 bp, Triticum aestivum
gtcttaagacttacgatcctggatatctcaacactgacgctgtgcgttcttacatctgctacattgatggggatgagggaattcttcgctacaggggt

SEQ ID NO: 440568 - DNA, 484 bp, Triticum aestivum
ttgttcacgcgtccgcccacgcgtccgggaattcggcattgctggattaaagagggcccttgaagcattgaacacacacctggcatcaaacacattccttgttgggcattctgtcactctggctgatattgtcatgacatgcaacctctaccatggttttgctcggatcttgaccaagactttcacatctgagttccctcatgttgagaggtacttctggaccatggttaaccagcctaacttcaagaaggtcattggcgaattcaagcaggcagaggttgtacctcctgttcagaagaaggctgctcctgctaaacaaaaggaggccaagaaagaggctcccaaggcggccccaaagccagcagtagttgaggcaccagaggaagaggcaccaaagcctaagcccaaaaatccccttgatctactgccaccaagcaagatggtacttgatgactggaagaggctatactcaaacactaagagc

SEQ ID NO: 440569 - DNA, 397 bp, Triticum aestivum
ttgtcacgcgtccgcgccatgatcgccctcgtgggcctgctccggtacgccaagtgcgtcctgttcagtgccacgccccggccttcagattccaaggcggacgtcgatgtcgaagacgacggggagtccccggcgcccccaccggacctccggtgccccatctccctcgatctaatgcgcgacccagtcgtcgccgctagcggtcagacctacgaccgcgagtcgatcgaccggtggttcagctccggcaagtcaacgtgccccaagacggggcaagtcttggccaatctggagctggtgcccaacaagtctctcaagaacctcatctccaagtggtgccgggagaacggcgtggccatggaagtctgcgaggccagcaagagcgagcaggcccagg

SEQ ID NO: 440570 - DNA, 111 bp, Triticum aestivum
tgcttacgcgtccggtcatggcatcttccaagagtagtcttgcaatgttcgcactggccatagtcatggccgtggtggctgacgtctcggcacagaacaccccgcaggact

SEQ ID NO: 440571 - DNA, 356 bp, Triticum aestivum
gctccgtcgcttgggcgcgtaacgcgatggccgtagtcacaccccactcgccgccgccgcagctttcatcgcccttcctggagtatattacggcccccggcggcctcgacaaggtcgtgctccgtggcaggcgcagctgctccgtggagatccgtctttttggaggtcaagtaacttcatggaagaatgaccatggcgaggagttgctttttgtcagcagcaaggccatcaagcctccaaaacctgttcgtggcgggatacctatttgctttccccagtttggaactcagggaaatcttgagcaacatggatttgcaagaaatcggctttgggctattgatgataatccaccccct

SEQ ID NO: 440572 - DNA, 471 bp, Triticum aestivum
cccacgcgtccggccgccgccagcagctgcgcaaaggctcctcaaaccctaaccctagtcctagcttagcttccttcttctcgatctagctagagccatggcgccgaccaagggcgaggggccggccatcggcatcgacctcggcaccacctactcgtgcgtcggcgtgtggcagcacgaccgcgtcgagatcatcgccaacgaccagggcaaccgcaccacgccctcgtacgtcgccttcaccgactcggagcgtctcatcggcgatgccgccaagaaccaggtcgccatgaaccccatcaacaccgtcttcgatgcgaagcgtcttatcggcagaaggtttgctgatgcccctgtccagagtgacattaagatgtggccgtacaaggttattcctggccctgcagacaagcctatgattgtagtgcagtacaagggtgaggacaagcagttttcagctgaagaaatttc

SEQ ID NO: 440573 - DNA, 435 bp, Triticum aestivum
ttgtttacgcgtggggtcttctgcttatgtccgttggggtgggcgccatggagtcctaggttggtggaggctgtggtttttggctgcattccagtcatcatagctgacgacatcgtgctgcctttcgcggatgcaatcccttgggacgaaattggtgtttttgttgatgaggaggatgtgccaaagcttgattcaattctgacatcgattccgattgatgatatcctaaggaagcaaagattgctcgccaacccatcaatgaagaaggccatgctgttcccgcagccagcgcaacctagagatgcattccatcagattctaaatggccttgctcgcaaactcccgcacccagagaccatatacttacaaccaggtgagaagcatctcaactggacagctgggcctgttggagacttgaagccttggtaacataaa

SEQ ID NO: 440574 - DNA, 354 bp, Triticum aestivum
ttgtttccaagtttccaacttccaacagaacaaagatggcgagcagacagtttccggcaatgctgctgctcaccgcggtgacaatggccggactggccgccggagcgcgcgcgggcggcatcgcgatctactggggccagaacggcaacgagggcacgctggcgcaggcgtgcgcgacgggaaactacaagttcgtcaacgtggccttcctcttcaccttcggcaagggccagaagccgctgctgaacctggccgggcactgcgacccggcgaccagcggctcgtgcaccttcgtgggcgccgacgtcaagtcctgccagagccgcggcatcaaggtcctgctctccatcggcg

SEQ ID NO: 440575 - DNA, 304 bp, Triticum aestivum
tcgtcgtggacgcgtgggttcgaagcccaccgaattcctcgcgattcctctcccctcgcctcctcgtcctcccccttctaggggatcgccggagaggaatcgcgacgagggcttcctcctatcagttaaatcaaagtcatggagcacaaggagaccggctgccagtctcgtgagggccccatcctttgcgtcaataactgcggcttcttcggcagtgcggcgaccatgaacatgtgctccaagtgccacatggagatggcgatgaagcaggagcaggccaagctggccgtctgctcttttgaca

SEQ ID NO: 440576 - DNA, 417 bp, Triticum aestivum
ttttgcccacgcgtccgcccacgcgtccggagggattgaatcagctatctcctcgtctgagactacgggcaacctgtgatgattttatagagggaaaagttggtaccctggatgggttatatggcaccggagctaagttaccctcagaggagtttatcagcagtaagttgacaccaaagcttgctcggcaaattcaggatgttcttgcactctgcagtggtagtttaccttcttggtgttatcagatgaccaaagcttgtccatttctgtttccttttgaaacaagaagacaacacttctactccacagcttttgggttatctagggcattgaatcgtcttcagcaacaacagggtgataataatagctcagcgactgaaagagaagtccggattggtagattgcaacgccagaaag

SEQ ID NO: 440577 - DNA, 432 bp, Triticum aestivum
ttgttctcaacaactggctatcttggagctgggtatcaagaagctatggaatcgtcattctcacccattactccaagtgaaacacaaagtccagctcatggaaatcggcaacaaccatatatggaatctccagttgccttgagaccacattttccagctgataggaaatgggctcttgggcttcagtctcgagcacatccaagagaagttatgactgaagtgctgaaggctctgcaagaactgaatgtatactggaaaaaaattggacactataacatgaaatgtagatggagtccttctggctttcccggtcaggagaatatgaatcataccaattataacttcagtgcagagcctattgaaaccgacgacctgggtgacatgttaaatttaattaagttcgaacttcagctttacaaaacaagagatgag

SEQ ID NO: 440578 - DNA, 395 bp, Triticum aestivum
ttgttcaggtgctgtgatagctctgctagttggtcgactttggaaatggccaccaactcgaggtcgaactccagggcgaccttctccagcgagatccacgacatcggcacggtgcagaactccgccacgcccagcatggtgtactacaccgagcggtccatcgccgactacttccctccccacctcctcaagaaggtggtgtcggaggtggtgtccacgttcctgctggtgttcgtgacgtgcggggcggcggcgatcagcgcccacgacgtcacgcgcatatcgcagctcggccagtcggtcgccggcgggctcatcgtcgtcgtcatgatctacgccgtcggccacatctccggcgcgcacatgaaccccgccgtcaccctcgccttcgccat

SEQ ID NO: 440579 - DNA, 395 bp, Triticum aestivum
ttcgttacgcgtgggcggacgcgtgggcggacgcgtggggtttttcgatctgatctttcccctatcttcgccgcccaacttccccccatctcgcgcactccgtcgaacatggcggcgcgcgggcaggggcaggtgcaagatttcgacttcttcgtggtggtcgacttcgaggcgacgtgcgtgaaagacgggaggatcttcccgcaggaaatcatcaagttccccgccgtgctcgtcgacggcgccaccggccgcatcgagtcggcgtttcgcaggtacgttcgtccaaaacatcaccctgtgctgactcaattttgcagggaactcaccggcatttcggcaggaggacgtcgacagcggcgtggatctcggcgaggcgctttggctgcacgagg

SEQ ID NO: 440580 - DNA, 399 bp, Triticum aestivum
ttggtcggctcgtgcgcaacgacgccgacgccggcgcgcgcatggcgttccgcacggcggacgtggccgacgtgaccaccgagctggcggggtacgacgtggtgttcctcgcggcgctggtgggcatggcggccgaggagaaggcgcgcctggtggagcacctcgggaggcacatggcccccggcgcggcgctcgtggtgcggagcgcgcacggcgcgcgcgggttcctgtacccggtggtggaccccgaggagatccggcgaggcggattcgaggtgctcaccgtgcaccacccggaggacgaggtgatcaacttcgtcatcatcgcgcgcaaggcggcggcgccaccagccgttgccgtcgacggcgacgtgccggtgaacaacggcagcatgcccg

SEQ ID NO: 440581 - DNA, 375 bp, Triticum aestivum
tgtcgcccacgcgtccgcccacgcgtccgtctcagttccccgcagccgcttcgctcgcttgccttctctcgccgtctccgcctcctcctccagtcctccgtcccacccctcgacgattcctcggcgatgggcggcgcggcggcggcgacgggcgccgccaggtggatccagcggctgagcgcggccaggatctcgacggaggcgctggagcggggccagagccgcgtcatcgacgcctccctcaccctcatccgcgagcgcgccaagctcaagggcgagctgctgcgtgctatgggcggtgtcaaagcttctgcaacactcttaggagtaccccttgggcacaactcgtctttcttgcaggggcctgcgtttgct

SEQ ID NO: 440582 - DNA, 370 bp, Triticum aestivum
ttttcgcccacgcgtccgcggacgcgtggcggagctgcgggcgccggagatcacgctctgcgccaacagctgcggcttccccggcagttgaccgcgctccggcgacggaggcgaagccggcgaggacgtcggtgaaccggtgctccagctgccggaagcgggtggggctgacggggttccggtgccggtgcggcgacatgttctgcggtgagcatcggtactcggaccggcacgggtgcagctacgactacaaggccgccgcccgggacgccatcgccagggacaaccccgtggtgcgcgccgccaagatcgtcaggttcagaagaggaaaggaaaaagaatccagaacccctgccgaggcatagcaaag

SEQ ID NO: 440583 - DNA, 467 bp, Triticum aestivum
tcgatttatcagaattgtgcaaaagcgagaatggccttgttgccatacctgttcatggtaatgcatatggcaagggtttgccctatgctcctgaaaattggccgtctcctggagatcagtggcaatggaaagtggggaacagaattgctgcaggtgggcattgggtggacagatatcttgccccaccctcgcgttttcgtgatgctactggtaaaaagacgacattcacaagtagactgaaagttggagagtttatcaagagcaactttccagatgttgatcctagcacatttttctctatgttcatatggaagatccctgctgcagaaggcgggattcaaagaggaactcttcaagtggaacgtgttgaacctgaagatggcctggcggatcctgatggaccatgcaaggctcggaataaggcatgcaatcttgggaaagaagggtttattgaatcatcaccagca

SEQ ID NO: 440584 - DNA, 486 bp, Triticum aestivum
ttgtctacgcgtccggtggccaggagacagtatgaggcattggctttgttgcaatggccggagcggtgacgacgacagacatgaggtggaacattccaaagctcaggggaataagatagacggcaagctaaaatcttcgaaacctgctgaccaacctcagccagatatttcccctcctacaattgatgtcccagaactgtcatttgaggacttgaaagaaaagactgacaattttggatcgagttccctgattggtgaaggttcatacggacgagtatatcatgctaccatggatgatggcaggcaagcggctattaagaaatttgatgcatctgaaaatgagcccaatgatgaattcttgaaacaggtctcacttgtatcaaggctaaaacatgaaaatcttgtggagatgctgggctactatgtggagggcaactatcgtatactggcatatgaatttgcaacaatgggttctcttcacgatgt

SEQ ID NO: 440585 - DNA, 396 bp, Triticum aestivum
ttgtgacgcgtgggaacggaacgaacaaaaaatccccaacctatctcgtcgcccatcaaccctaggctcgtcgaatcctcctcccccaccgcctcaagatgcagatctttgtgaagacattgacaggcaagaccatcacccttgaggtcgagtcgtctgacacaatcgacaacgtcaaggccaagatccaggacaaggagggcatccctccggaccagcagcgtctcatcttcgctggcaagcagcttgaggatggcaggacccttgctgactacaacatccagaaggagtccacccttcaccttgtcctccgccttcgcggaggcatgcagatcttcgtcaagacgttgactggcaagaccatcacccttgaggtggagtcgtctgacaccatcg

SEQ ID NO: 440586 - DNA, 412 bp, Triticum aestivum
ttgttttcagaagtggcgttaactagctatcttgcatctctgactatagaagagagtggtatttcagaaggattagctgcaattaaagcagagcgagcagtagagagcatatctcagagaagtgcccaacttcatgggggcacagaagatgaactctcactgaaagactctctggcggccgtgagaaatgcagctcaagcagcggctcggattcagaatgccttccgtgccttttctttcaggaggagacaacacaaggacgctcgacttaaggatgaatatgggatgacacaagaagatatagatgaacttgcagctgcatcaaggttatactaccaacatcatgtttcgaaacggcagttttgtgataaagcagctgtttcaattcagaagaaatacagaggttggaaag

SEQ ID NO: 440587 - DNA, 182 bp, Triticum aestivum
gtcgtggtcgagcaaggtctgatcagtgatcctgttttcttattctggttgaaccgacatgctgatgatgaaggagagggtggtgaaattatttttggaggaatggatcctaaacactacgtgggtgaacacacatatgtcccggacacccagaagggatatttggcagttttgacatgggt

SEQ ID NO: 440588 - DNA, 297 bp, Triticum aestivum
tgtttgcgaccttcacggtgatcaacaagtgccagtacactgtgtgggcggcggcggtgccggccggcgggggcaggaagctggacgcggggcagacgtggagcatagacgtgccggcgggcacgacgagcgggcgggtgtgggcgcgcacggggtgcagcttcgacggcgccggcaacgggcggtgccagacgggggactgcggcgggaagctgcagtgcacgcagtacgggcaggcgcccaacacgctggcggagttcgggctgaacaagtacatgggccaggacttctttgaca

SEQ ID NO: 440589 - DNA, 330 bp, Triticum aestivum
tttttcacgcgtccgggcgcctcgtcaccaacttcctctacttccgcaagatggatttggatttcctgttccacatgttttttcttgcgcgctactgcaaacttctcgaggagaactcattcaggggaagaacagctgactttttctacatgctcttgtttggtgctactgtcctgactagcatcgttctgattggtgggacaataccttacatttctgagacattcgccaggattcttttcctcaacaattcattgacgtttatgatggtttatgtctggagcaagcacaatcccttcattcacatgagcttcttgggtctgttcacct

SEQ ID NO: 440590 - DNA, 422 bp, Triticum aestivum
ttgctcacgcgtccgattttctgcaatactaagagaaaggtggattggcttactgaaaggatgcgcaccaacaactttaccgtatcagctatgcatggtgacatgcctcaaaaggaaagggatgcgattatgagtgagttcaggagtggcacgaccggtgttctgatcacaacagatgtttgggctcgagggctggatgttcagcaggtctctcttgtcattaattatgatctcccaaataatcgtgagctttacatccatcgcatcggtcgctctgggcggtttgggcgcaagggtgtggcgatcaactttgtgcgcaaggatgacatccgtatcctgagggacattgagcagtactacagcacgcagattgacgagatgccgatgaacgtggccgatctgatctgagcactggaccggag

SEQ ID NO: 440591 - DNA, 394 bp, Triticum aestivum
tttctcgatcctacatttcgggaagagcttcttaattttacacaaagggggaggattctgcagctctcgaacttcaaggatgactccagtccaattgcctgggactgttctgcgtgggttcgcacatatggtcagtttttggaggaaagattggaatgcttcaggatcctgaaatatgatgttgaggctgaacgtttatccaaacaaggccaaggtcctgaaaagggacacagtagaaccagagacctagattcccaggatctgttagagcagttgccagctttgcagcagttactgtatcggcttgttggatgtcggccagaaggagctgcaaataacaactacttggtgcaatatgctctagctttggtgctaaaagagagtttcaaaattt

SEQ ID NO: 440592 - DNA, 416 bp, Triticum aestivum
tgctttcgcaccgtctcgccgccgccaccaccgccgcagcttgataagaagaaaaaaagagagagaagaactcgtcgggagggctcgagatctgtgtcgggagagagggaattcttgagatcggaatcggaacaagcgggcgcgctcgggatcggggttaccatacaatttttcccaggaacctttagtgaatgtgctaatggagtcaaagggtggcaaaaagtctagcagtagtagttccctgatgtacgaagcacccctcggctacagcattgaagacgttcgacctgctggaggcgccaagaagttctctgctgcatactcgaactgcgcgaagaagccatcctgatatcgtttttggcatccccttctcgtagtttaggatttttatgcaattttattctgactcttttctc

SEQ ID NO: 440593 - DNA, 372 bp, Triticum aestivum
ttgttcacgcgtccgcccacgcgtccgagatacatcatcaacacacaaagacctcatcacatctttccagttcaccggccgttatggagatgaagcccgccgcgcagccggtcaccggcgtccccgtcggcgcggcgccggccgcctggtcctccggcctcttcgactgcttcgacgactgcggcctctgctgcgtgacctactggtgcccgtgcatcaccttcggcaaggtggcggagatcgtggacagggctccacgtcgtgcggcaccagcggcgtgctgtacgcgctcctgtgctcgctcacgggctgccagtggatctactcgtgcacctaccgctccaagatgcgcgcccagtacgcgctcccgga

SEQ ID NO: 440594 - DNA, 401 bp, Triticum aestivum
ttgtgatagctggagcccaaaaccgagcaaaatcgatttcaagcggaccaaaatccggcaccgcatgggtttccccaggcactgatccggcgggtggacgctaatgcggcgccgctgaagggatctgctgcgcccgcggggttcacatggcggcacagaacggcagcggcggcgcggcggtggtcctcaacgtgtacgacctgacgcccataaacgactacctctactggttcggcctcggcatcttccactccgggatcgaagttcatggtctggaatatgcttttggagcccatgatctctcaaccagtggggtttttgaggttgaaccaaaacgttgccctggctatgtctatagaaggtctgtatggatgggtacaactgagatgtctagggcagag

SEQ ID NO: 440595 - DNA, 360 bp, Triticum aestivum
ttgttgctcatccacaacggcaagcccgtctgcgagtcccaggtcatcctgcagtacatcgacgaggccttcgccggcgtcggcccgtccctcctccccgccgacccctacgagcgcgccgtcgcgcgcttctgggccgcctacgtcgaagacaagctgctggcgccgtgggggaaggtgttcagggtgacgaccgacgaggagagggcggagtggacgaggcagacggtggcggccgtgggtcatctggaggaaggcctgagggagtgctccaaggggaagggcttcttcggcggcgactgtgtcgggtacgtcgacgtcctgctcggtagcatggtgccgtgggtgcgcgccaccgag

SEQ ID NO: 440596 - DNA, 305 bp, Triticum aestivum
tgttctcgcacgcaccgtcacaagcagctcaatctctttctccttttcttttctctgccccctcccttatccccacgcccaggaaacgcgtctccggaggaggaagggaagatttcatcttttttgcccccaagatgtcctccccaagcaagcgccgcgagatggacctcatgaagctgatgatgagcgactataaggtggagatggtgaacgatgggatgcaagaattcttcgtggaattccgagggcctactgaaagtatttatcaaggtggtgtctggaaggttagagtagaactgcctgat

SEQ ID NO: 440597 - DNA, 413 bp, Triticum aestivum
tttttggtcgtccccttctccgccctgcgcaccgactaccgcccctacgagtcgcgccgccgcttcgccgcctcctacgacctcttcctcgccgaccgcgccctgctccccatgctgccccgcctcctcggcaaatccttctactccaccaagaaggcccccatcgccgtcgacttcacccgggctggctggccggagcaggtccgcaaggtcctcagctccactttcctgtacctgcggaccgggacctgctcggggatcaaggtgggcaggctggacatggaggaggaggagatcgttgacaatgtgatggcggcagtggaggctgccgtggagaaggtgcccaagaagtgggaaaacgtgagggctctgcatttgaaggctgtggattcggttgcactgccaatttacca

SEQ ID NO: 440598 - DNA, 379 bp, Triticum aestivum
gcgatccttccatcctcggcttgcacatcgcatcacgttaccggagccagctacgggcgcgtgggacagcatggaggggggcggcgaggggaagggccgggcggcgccggcggcggggggagggttcggcgggtacgagtcggccggggaccgcaagtggtggccctggctcgtgcccaccgtcatcgtcgcctgcgtcgccgtctttgtagtagagatgtgggtgaacgactgccccaggcacggaagtgcgctcggcggcggctgcgtcgcgggctttctccgccgcttttccttccagccgctccgcgagaacccgcttctcgggccctccttcaccacttttgggaaaatgggagcttttgactggaacaaagtt

SEQ ID NO: 440599 - DNA, 249 bp, Triticum aestivum
ttgctacgcgtccgtgagctcgccacactccccccagcttatcggagctacctcactcaagagaggaaggatggatccctgcaagttccggccgtcgagcagcttcgacaccaagacgacgacgaccaacgccggccagccggtgtggaacgacaacgaggcgctcaccgtcggcccgcgcggcccgatcttgctggaggactaccacctgctggagaagaacgcccacttcgcgcgcgagcgcatccc

SEQ ID NO: 440600 - DNA, 400 bp, Triticum aestivum
tggtcgccgcctcctccttccgcaggagctccctcctcgtatgcgcgatggtgtacatcaagaaccagaagacaagggcgtactccaagcgtttccaagtcaagttcaagagaaggcgccaggggaagaccgactacagggccaggctgaggctcacaaaccaggacaagaacaaatacaatacccccaagtaccgttttgttgtgcgatttaccaacaaggatgtcactgcacaaattgtgtatgctaccattgctggtgatattgtgatggccgctgcctactcccatgagttgccttgctatggtcttgaagttggcctcaccaactatgcttgagcctactgcactggtctgcttttggctcgtcgtgtgctcaagaaccgtgatcttgatgagga

SEQ ID NO: 440601 - DNA, 432 bp, Triticum aestivum
tgttaaattcagacttgggatgagggtctcgtcaggattttgtgaaggaattcgtatcaaagaggcgaagacagaggcttttactgtgaaagatcacagaggagaattatacaagaaacattaccctcctgcacttaaggatgatgtttggagattggaaaagattggaaaggacggtgcattccacgggaaactaaactcaaacggaatctatacagttgaacattttcttcaacttcttgttaaagatcaacagaagttaagaagtatccttggcactggtatgtcaaataagatgtgggaaagtcttgttgaacatgcgaaaacttgcgttctgagtggcaagcattatatatattactccaaggatacagcaagtgttggtgcaatattcaataacatattatgagttcactggtttgattgctgatg

SEQ ID NO: 440602 - DNA, 414 bp, Triticum aestivum
tctgttgggaggagactaaggacgtgccaaagccggtgacgtactcctactcattcttccacctcatcttctccctggcgagcatgtactcagcgatgctcctgactggctggtcgacctcggttggcgagagcggtaagcttgtcgatgtcgggtggccgtctgtctgggtcaggatcgcgacccagtgggcaacggcaggtctgttcatctggtccctcgttgctcccctcctgttcccagacagggagttctagatcgacctggttacctgctaagagtgcatcatccgtttggagcacctacttatcgtatcgaacgtgtttcggctgtgatgatagctaagctgactatctgtatctggtctgtaatattgtgtgagcaaacccatggcaaggagctggtgtttgtgtg

SEQ ID NO: 440603 - DNA, 278 bp, Triticum aestivum
tctttcgctcggctactgcgacgaacgagaggagggcgttttggtgttcgagtacgcccccaacggcgacctgcacgagaggctccaccggagcggccagaagcgggcggcgctgccgtgggcgcggcggatggccgccgcgttccaggtggcgatggcgctggagtacctccacgagagccaggaccccgcggtcatccacggcgacgtcaaggcgtccaacgtcctgctcgacgccaacatggacgtcaagctctgcgacttcggcttcgcgcacg

SEQ ID NO: 440604 - DNA, 300 bp, Triticum aestivum
tgatttgaaccgcggggcatatgttcaggagccggattttgtgaatgatgggatgcaggggggccaggtccagctgcggcgtgatcccagcagggcgaacggtggcggccagccgcagtcgcgttcgttcacctatcagagctccacggtgactttatggtgggattaatggagcctattataccgcttccaagacccggaggagtggcagcgatgggattactgtcgaagaaagcaaggaagcagacactacgactaaagaggccactcataggatctccaggggaattcatgataagg

SEQ ID NO: 440605 - DNA, 408 bp, Triticum aestivum
ttgtctgttgctcgccgccgtccccctccgcctccgcgcacccaggaaagatggcgtcccacattgtcggatacccgcgcatgggccccaagagggagctcaagtttgccctggagtctttctgggatggcaagagcagcgccgaggatttggagaaggttgccaccgacctcagggccagcatctggaagcagatggctgatgctgggatcaagtacatccccagcaacaccttctcctactatgatcaggttcttgacaccaccgccatgctcggtgccgtcccagaccgttactcatggaccggtggggagatcaatttgagcacctacttctcgatggctaggggcaacgccaccgtccctgctatggagatgaccaagtggttcgacaccaactaccacttta

SEQ ID NO: 440606 - DNA, 236 bp, Triticum aestivum
tttttgaccacatcctccccccaatctcgctccctccctccctaccacgctggtccctgcgaggcggcgcggcgagcgcgagcagtcgggtccggtcaaagccaggcggcgatggcgtcgtcggcgccgggcggcggcagcgggaagatcgagcggctgtcgtcgatcgacgcgcagctgcgcctgctcgtcccggccaaggtgtccgaggacgacaagctcattgagtacgacgc

SEQ ID NO: 440607 - DNA, 273 bp, Triticum aestivum
cccacgcgtccgcccacgcgtccgtttcaactgttctatgtgatgggagatagtatcttaacaaggtctgatctggaagctgtattggcgttcattcatgaaaccatatttgcagataataaggaagccaaggaaggttcaaacaagagtacatttgaagcatttcacaactctgcggtattttcaaaggatgctgaaggggtctctgagaagtctatgtcattatcagactttagaaactggtgtattgtcatgccatcactgaggaaattc

SEQ ID NO: 440608 - DNA, 367 bp, Triticum aestivum
tcccacgcgtccgaattaaaattgatcactgatctgataggatcaccagatgattctagcctaggatttcttcggagtgataatgcacgaagatacatgaagcaattaccacagtacccaaggcaggacttccgactgcgcttgcgcaacatgtctgatggtgcagttgatctattagagagaatgctggtgtttgacccaagcagacgcatcactgctgatgaggctctgcatcacccatacttggcttctcttcatgacatcaacgaagaacccacttgtccggcacctttcagctttgattttgagcaaccatcttttacagaagaacatatgaaagagctcatctggagggaaactttagcat

SEQ ID NO: 440609 - DNA, 325 bp, Triticum aestivum
tcccacgcgtccgaattaaaattgatcactgagttgataggatcaccagatgattcgagcctaggatttattcggagtgataatgcacgaagatacatgaagcaattaccacagtacccaaggcaggacttccgcctgcgcttccgcaacatgtctgatggtgcagctgatctattagagagaatgctggtgtttgacccaagcagacgcatcactgttgatgaggctctgcatcacccatacttggcttgtgttcatgacatcaacgaagaacccacttgcccggtacctttcagctttgattttgagcaaccatcttttacag

SEQ ID NO: 440610 - DNA, 350 bp, Triticum aestivum
  unsure (1)..(350): unsure at all n locations
ttgagtcncaagtttccaacttccaacagaacggagatggcgagcagacagttgccggcaatgctgctgctcaccgcggtgacaatggccggactggccgccggagcgcgcgcgggcggcatcgcgatctactggggccagaacggcaacgagggcacgctggcgcaggcgtgcgcgacgggaaactacaagttcgtcaacgtggccttcctcttcaccttcggcaagggccagaagccgctgctgaacctggccgggcactgcgacccggcgaccagcggctcgtgcaccttcgtgggcgccgacgtcaagtcctgccagagccgcggcatcaaggtcctgctctccat

SEQ ID NO: 440611 - DNA, 391 bp, Triticum aestivum
tccaacaactggctatcttggagctgggtatcaagaatctatggaatcgtcattctcacccattactccaagtgaaacacaaagtccagctcatggaaatcggcaacaaccatatatggaatctccagttgccttgagaccacattttccagctgataggaaatgggctcttgggcttcagtctcgagcacatccaagagaagttatgactgaagtgctgaaggctctgcaagaactgaatgtatactggaaaaaaattggacactataacatgaaatgtagatggagtcctcctggctttcccggtcaggagaatatgaatcataccaattataacttcagtgcagagcctattgaaaccgacgacctgggtgacaagttaaatttaatt

SEQ ID NO: 440612 - DNA, 229 bp, Triticum aestivum
ttcgttgtagacgcgtgggcggacgcgtgggggcgactgcttcacctccaacacggcggcgttccgcaaggcggtggagcacctgtcgcagtactctggcgagggcggcggcggcggcatgctctacgtgcccgccggccggtggctcaccgtgccattcaacctcaccagccacttcacgctttttctacacgccgacgccgtcatcctcggcacgcaggacgtgacc

SEQ ID NO: 440613 - DNA, 261 bp, Triticum aestivum
ctcgcctacgcgtccggtgtggtgaaggtacactgatgtgcttgaggagttgaagaagaacccatagagccatggaggacctcctgattgcatagcttcgtgagctaatccttagagaattggggcttcatgacatcttcaagaaggctaaggacgaggagaacgctcaggctctgtcactgtttgagggagttgttcagcggaatgatgaaatagaagatggtgagaaacgagcagagaacttgatccgtggaatcttag

SEQ ID NO: 440614 - DNA, 324 bp, Triticum aestivum
tcgatgacacgagccgatccatccatcctgaaaaaaaaagagtgccggtcgaaaatgccggtgagcaggatcgccatcggcgccccgggggagctgtcccacccggacaccttccgcgccggcgtcgccgagttcatctccatgctcatcttcgtcttcgccggctcaggctccggcatggccttcggcaagctgactgacggcggcgcgacgactccggccgggctgatcgcggcggcgctggcgcacgcgttcgcgctcttcgtggccgtctccgtgggcgccaacatctcgggcgggcacgtgaacccggccgtcacattc

SEQ ID NO: 440615 - DNA, 394 bp, Triticum aestivum
tttcgctcgataagccctcttttgagtgtgtagtacagacaataattttccagggtagcaagaaagagtgaaagcacaatggtgaagctcgcattcgggagctgtggtgactccttcagcgccacgtccatcagggcgtatgtggcggagttcatcgccaccctcctctttgtgttcgccggcgttgggtccgccattgcctatgggaaaatcaccgatgatggcgctctcgacccagttggccttgtggcgatcgcgatcgcccacgccttcgccctcttcgtcggtgtcgcgatcgccgccaacatcttcggcggccaccttaaccccgctgtgaccttcggccttgccgtcggcggccacatcaccatcctcaccgggatcttctactggg

SEQ ID NO: 440616 - DNA, 365 bp, Triticum aestivum
ctctgctatggggtaatctggaaaggggacgagctgattcaatgggtccccgagacgctggagtcgctgcgaaaattgggcaagaaattagtttttgtaacaaacaattctaggaagtcgagaaggcagtattcaaagaaattcaaaacacttggccttgaagttcccgaggaagagatcttcacgtcatcatttgcagcagccatgttcttgaagttaaataatttttctccagaaaagaaggtttatgttgttggtgaggatggcattttggacgagctcaagttagctggctttgaatgttttggtggtccggaggatggcaagaaaaacatactgttggaggcaaacttctactttgacca

SEQ ID NO: 440617 - DNA, 342 bp, Triticum aestivum
tgcctccatacgtggcgttaactagctatcttgcagttctttctatagaagagagcggtatttcagaaggattagctgcaattaaagcagaccgagcagcagagagcatatctcacagaagtgcccaacttcatgggggcacagaagatgaactctcactgaaagactctttggcggccgtgagaaatgcacctcaagcagcggctcggattcagaatgccttccgtgccttttctttgaggaggagacaacacatggacgctcgacttaaggatgaatatgggatgacacacgacgatatagatgaacttgcagctgcatcaaggttatactaccaacatc

SEQ ID NO: 440618 - DNA, 349 bp, Triticum aestivum
tcggtcgctgccgagccgaaggaggagctgatctggttcgtgccgctggtgggcggcgacgagcgctcggacacggtgctcctcaagttcctccgcgcgcgcgagttcaaggtcaaggaggccatggcgatgctcaaggcggccgtgctgtggcgcaagagcttcggcatcgacgcgctcctcggcgccgacctcggagtgccggagctggagaacgtggtgttctaccgcggcgccgaccgcgagggccaccccgtctgctacaacgtctacagcgagttccaggacaaggacctctatgagaaggccttcggcgacgacaagaagcgggagcgcttcctcaagtggc

SEQ ID NO: 440619 - DNA, 329 bp, Triticum aestivum
atctcctagagcagtttgctgagggtgtgtttaagaccatagctgtcactcctgaggagaatgaagctatacttcgtcttgaaggaatgggctttgaccgggcgcttgttctggaggtgtacttcgcctgcaacaaggacgagaccctggccgcaaactacctgttagaccacatgaacgagtttgacgacggagcgccgcagtaagacaaagcaggttgtttctgaatacatgcacaagcccatgggaacaagggtgtggggagactgatactcctgcactcgcagggcaggccttagagatctttttgagattttgtctcgtccttt

SEQ ID NO: 440620 - DNA, 289 bp, Triticum aestivum
ttcgttcgcccacgcgtgcgaagtgcatcatctatcgtttgttttccctcaatctctaagccgatagaaaggtgagagttgaggggtaggtcagccgaccggagggctgtggaccatgtctggcgtgtgggtgttcaagaacggtgtggcgcgcctggtggagaacccggggagcgagcggacgtctacagtgcgacagaaggcgctgctgcacacgcctagcgggcaggtggtgtcgtcgtacgcgacgctggaggcgaagctgacggcgctggggtgggagcgctac

SEQ ID NO: 440621 - DNA, 342 bp, Triticum aestivum
tcggagatgaccaagctctctggtatctctgacatcatccctgagacggaggtctgtgacttcgacttcgagccctgcggctactccatgaacgccatcaacggatctgccttctccaccatccatgtgacccccgaggacggcttcagttacgcgagctacgaggtcatgggcatggacgctccggccctggcctatggcgacatcgtccagagggtcctccggtgctttggcccttcagagttctcagtggcggtcaccatcttcggtggccgcggtcatgccggcacctggggcaagaagctcgacgccgaggcatacgactgcaacaacgttgtggag

SEQ ID NO: 440622 - DNA, 268 bp, Triticum aestivum
ttcgtcgccacgcgttcggtcagccactacccggcgtgcccgtgcccggaccttattaccgggctccgtgcgcacaccgacgccggcggcgtcatcctgctgttccaggacgacaaggtaggcggcctcgaggtactcaaggacggcgagtggctcgacgtgcagccgctccccgacgccatcgtcgtcaacaccggcgaccaagtggaggtgctcagcaacggccgctaccgtagcgcgtggcaccgcgtcctgcccatgcgcaacg

SEQ ID NO: 440623 - DNA, 310 bp, Triticum aestivum
tcagtcgttgccgagccgaaggaggagctgatctggtgcgttccgctggtgggcggcgacgcgcgctcgcccacggtgctcctcaagttcctccgcgcgcgcgagttcaaggtcaaggaggccatggcgatgctcaaggcggccgtgctgtggcgcaagagcttcggcatcgacgcgctcctcggcgccgacctcggagtgccggagctggagaacgtggtgttctaccgcggcgccgaccgcgagggccaccccgtctgctacaacgtctacagcgagttccaggacaaggacctctatgagaaggcct

SEQ ID NO: 440624 - DNA, 230 bp, Triticum aestivum
tctttttcgtccgaagcctttctccaatagcggaagtttcgcgccatgtgaagaaaagctagaggaagcccaggaaaatctgggtatccgaccacatgattatgttccagtaacttatgttgctgaagtaaattggttccaagaagagatgagatttgccccaacagcgttccttgttggactactatattttatggggaaaaggatgcagagtggatttaatattggag

SEQ ID NO: 440625 - DNA, 325 bp, Triticum aestivum
atgactgtctacttcccgtacgctgagattgcaagaggctcaccgccttccactctgaaattgaggagctcctgtacagcgatgttgagaacgatgaacacatgtttgtgttgaaggacaggaacaagccaatcatcttttcaatggctcgtcttgaccgtgtgaagaacatgactggcttggttgagatgtacggcaagaatgcacatctgaaggatttggcaaaccttgtgatcgttgctggtgaccatggcaaggagtccaaggatagggtggagcaggccgagttcaagaggatgtccagtctcattgaggagtacaagct

SEQ ID NO: 440626 - DNA, 349 bp, Triticum aestivum
ttgttcagcgtccgcccacgcgtccgtccatgtttgctagatctgccgtgcttctccccttgctgcccgtaccgactcccggttcttttctccggttcctcggcgatggtcgtctgcaaatgccgcaaggcgacgagggtttattgcttcgtccaccaggttccggtctgcggcgagtgcatctgcttcccagaacatcaattatgcgtggtgaaaaactatgctgaatgggttgttaattctgattatgactggccacaacactgctctttgtgtaatttagttctagaagctgcaagcgaagaaactacacgattgggttgcctccatgtgatgcacacaaaatgct

SEQ ID NO: 440627 - DNA, 374 bp, Triticum aestivum
tcgggtacctcgccgggaagatcaccgtcttcgaccgacgaggacacgttgcaaagctgtgcgccgtcatcctgcctctcctcgtggccgcgctcatcgccatctcgcgggtagatgactactggcaccattggcaggacgtcttcgcgggcggcatccttggtcagaagctcgcgcctattctttgttatctctgaactctttttttttttactattcctgtttttgcgggaaatctccaaactctctttgttgctgacgaggtttgtcatgtccgtgaaggaatggtggttgcgtctgtttgctacctgcagttctttccaccaccctctgatgacaaaggcttctggcctcatgcccacttcagggacatc

SEQ ID NO: 440628 - DNA, 363 bp, Triticum aestivum
caagcaagcattggccaattcaccatggctgggcttcagctctccgtcctagcggctgcgccgcctcttgtgctcgcgcccctccatcgccgggaccccgacatgctccaggacgtctgcgtcgccgacctggcatccccgatcaagatcaacggcttcccgagcaaggccaacatcacggcggacgacttcttcttcgccggtctgaagaaggccggcaacaccaagaacccggctggttctgtcgtcacggcggcgaacgtgcagtcattccccggggtgaacacgctcggcgtgtccatggcgcgcatcgactacgcggttggaggacagaacccgtcgtacacccacccgcgcgccacc

SEQ ID NO: 440629 - DNA, 279 bp, Triticum aestivum
gcccgtaccgactcccggttcttttctccggatcctcggcgatggtcgtctgcaaatgccgcaaggcgacgagggtttattgcttcgtccaccaggttccggtctgcggcgagtgcatctgcttcccagaacatcaattatgcgtggtgaaaaactatgctgaatgggctgttaattctgattatgactggccacaacactgctttttgtgtaaattagttctagaagctgcaagcgaagaaactacacgattgggttgcctccatgtgatgcacacaa

SEQ ID NO: 440630 - DNA, 228 bp, Triticum aestivum
tcgctacgcgtgcgcccacgcgtccgccggagtgggttcctgcctgccgctgcggggcaccatcaccgactccggcgaccttgtgccactgtgctacatcgccgggctcatcaccggacgccccaacgcgcaggccaccactgttgatggcaagaaggtggacgccgccgaggcattcaaggcgccctggcatcgagggcggcttcttcaagctcaaccccaaggagg

SEQ ID NO: 440631 - DNA, 399 bp, Triticum aestivum
cttgggtcttgctctcttcgccttcctccccggccgggtttttctaaccctaggcgccgtcggccaggaagcccatttaccagccatgtttggacgcatgccaaggaagaccagcaacaacaccaagtactacgaggtgcttggtgtatccaagacagcaaccccggatgagttgaagaaagcttaccggaaagctgctataaaaaaccatcctgataagggcggagaccctgagaagtttaaagaattggcacaagcttatgatgttctcaatgaccctgaaaagagggagatttatgaccaatatggagaagatgcaatcaaagaagggatgggaggcagcggcggcgctgatatgcatagcccctttgacatattcgaacagctatttgggggtgg

SEQ ID NO: 440632 - DNA, 319 bp, Triticum aestivum
acccccgcagccaatcccaccggacgcttgcctgccagccaaccccaatctcgactcctccgacgtcgaatccggttccgagtccatatttgaggtgccaccatgttcaacaggttatttgggaagcccaaggagcaggccaacgccggcgcgttggccactttggataagttaaacgagactcttgatatgctggagaagaaagagaaagtgttagagaaaaaagcaggtgctgagcttgagagggccaaggagttctcaaaagcaaagaataaaagagcggctatccaatcattgaagaggaaaaaactttatgagc

SEQ ID NO: 440633 - DNA, 396 bp, Triticum aestivum
tttctatgcgtccgcgcgacctcctgtttccgcccaccttctccggctccggcgccggcgaaccaatcgcggatcgagcgattcctccgatcaggagaggcgagccgggaggaagagcacctacgcgggaggagacgagatggggctcacgttcaccaagctgttcagccgcctgttcgccaagaaggagatgcggatcctgatggtgggtctcgacgccgccggaaagaccaccatcctctacaagctcaagctcggggagatcgtcaccaccatccccaccatcgggttcaatgttgaaactgtggagtacaagaacatcagcttcactgtctgggatgtcgggggtcaggacaagatcaggccactgtggaggcattacttccagaacacaca

SEQ ID NO: 440634 - DNA, 394 bp, Triticum aestivum
  unsure (1)..(394): unsure at all n locations
ttggttctctcccactactactagnagncgtgtttgttccttttacgcttgcacatcagcgctaatccaatccatccatcccctaatcaccaccgccgccggcctaatcccctttcctctgctacgcgcgcgatggcggcggcgacggctccggtggaggtgcccgtggcggcgccggtgaggactgtgaaggtcacaaatgtttccctgagtgcaactgagcaagacattaaggagttcttttctttttcaggagacattgaacatgtggatatgaaaagtggtgacgagtggtctcaagttgcatatgttacttttaaagatgcccaaggagcagagactgcgctccttttttcgggcgcaacaatagttgacctttctgttatcattgcac

SEQ ID NO: 440635 - DNA, 357 bp, Triticum aestivum
actttcaacaactgcaaactgttgagaccgttcatgccagcaaagacttgtcactacagctgaagaaaatgaataagctgcagaatgttaggattgatgacatcaatgcatctcattgtgacgacctttgccaagccctctcagatatgcccctgctttccagcttatttctctctgcatgtgatgacaaggagacactttgtttccaagcactcaagccagtttccaaaaggctccacacactaatcatcagaggcagctggggtgatgaggcactcaagtgcccaatatttcagggtcatgggaagaatctcaagtacctggctctagtttggtgcaatcttgggaatgaagacc

SEQ ID NO: 440636 - DNA, 413 bp, Triticum aestivum
ttcgttcggcaaggtggggataattttgcccagagagctcctgggccatgaggccgatgcatctcttgggggtcacttgcctatggatcctctcatgcgccttgctgctcggcggcgcttgctccgatgggttgctgaggatcaacctgagcaagaagaggctgaacaaggaaaccctaacagccgcgaaatcggcgaggcaggagaccaacctgctgaggcccggcgatggatctcgccactctctcggcctgtcagacgatgacatagttcctctggacaacttccttgacaccgagtacttcggagagatcggcgtcggcacgccgccgcagaacttcacggtcatatttgacaccgggagctcaaacttgtgggttccgtcgtcgaaatgctacttttcgatagcatgc

SEQ ID NO: 440637 - DNA, 235 bp, Triticum aestivum
gcaggcgagcgatggcgagcgggagtgttccttcggtgctcacgcccccacgcgatgacgccgtcgatctccacaaggccttcaaaggtttcggctgcgacagcacgacggtgaccaacatacttgctcaccgcgactcggcgcagcgcgcgctcatcctgcacgagtacaaagccatgtaccatcaggatctttaccatcgcctagcaaccgagctgagtggaaaccacaagaa

SEQ ID NO: 440638 - DNA, 292 bp, Triticum aestivum
gtgctcacgcccccgcgcgatgactccgtcgttctccacaaggccttcaaagggttcggctgcgacagcacgacggtgaccaacatacttgcttaccgtgactcggcgcagcgcgcgctcatcctgcacgagtacaaagccatgtaccatcaggatctttaccatcgcctagcaaccgagctgagtggaaaccacatgaatgctatgctgctttgggtcctcgaccctgctgggcgtgatgcgaccatactgaaccaagctctaaacgggcgacatcaccgacctgagagcc

SEQ ID NO: 440639 - DNA, 165 bp, Triticum aestivum
tctggactctgctgttctatccggtatgttgcttttatcggccatgaacaagctcaaaaagatggctctcagggtgattgcggagaacctgtccgaggacgagaccgccggcctcaaggagatgttcaagatgatcgactcggacaacagcgggcagatcacgta

SEQ ID NO: 440640 - DNA, 277 bp, Triticum aestivum
tttttggtttgggcaggccaacatgcggatcctggtgaccggcggagctggcttcatcggctcgcacctcgtcgacaagctcatggagaacgagaagaacgaggtcattgttgctgacaactttttcactgggtcaaatgacaacctgaagaagtggatcggacacccaagatttgaactcatccgtcacgatgtcaccgaaccactgctcgtggaggttgaccaaatctaccaccttgcttgccctgcctcaccaatcttctacaagcacaaccct

SEQ ID NO: 440641 - DNA, 371 bp, Triticum aestivum
tttgtgccctctcttcttcttgctctagcactcttcactaagtctccacggtggatggagggcgtcgtccaggagatcgttatcgtcggcgccgggctcgccggcctcgccacggccctggggttgcacaggaaaggggtgaggtgcgtggtgctggagtcgtcggccacgctgcgggcgtcggggttcgccttcaccacatggaccaacgccttgcgcgcgctggacgccctcggcgtcggggacaagatcagggagcaccatctcctctacgaaaggctggtggctttctctgcatccacaggcgaggctgctgcaaaagtgagcctaaagatgcagggtaaaagcgggcctcacgagatccggtgcgt

SEQ ID NO: 440642 - DNA, 423 bp, Triticum aestivum
tgttttcgcgtgggcgccgccattctcccccttcccccttttctcaccgccgcaggagaagaagcagacgcgcggaggagagcttccaggcggcgaccatggtgaacgttccgaaaaccaagaagacctactgcaagaacaaggagtgcaagaagcacaccctccacaaggtcacacaatataagaagggaaaggacagtctttctgctcaggggaagcgtcgttatgaccgcaagcagtcaggatatggtggccagacaaagcctgttttccacaagaaggccaagacaacaaagaagattgtgctgaagctgcagtgccagagctgcaagcattactcacagcgcgctatcaagaggtgcaagcactttgaaatcggtggagacaagaagggcaagggaacctctcttttctagctgatga

SEQ ID NO: 440643 - DNA, 307 bp, Triticum aestivum
ttctcgcgattcccaatccccgcacgcctgctctccctcctcctccggccccgtcgccgccgccgcctcgccacaggctcacggttattcaagatggaacacaaggaggcgggttgccagcagccggagggcccaatcctatgcgttaataactgtggcttctttggcagtgcggcgaccatgaacatgtgctccaagtgccacaaggagatggtcatgaagcaggaacaggccaagctggctgcctcctccttcgatagcatcgtcaacggtggcgacggtgggaaagcacctgttgttgcggctg

SEQ ID NO: 440644 - DNA, 208 bp, Triticum aestivum
gtccggccagctactagctggccatggcatcttccaagagtagtcttgcaatgtttgcactggccatagtcatggccggggtggctgacgtgtcggcgcacaacaccccggaggacttcgtcaagctgcacaaccgcgcccgcgccgtggacggcgtcggtcccgtggcatgggacaacaacgtggacaggtttgcgcaggactgggc

SEQ ID NO: 440645 - DNA, 292 bp, Triticum aestivum
cttcgtcaaggagggtgacatgcaaacattgtcacctttgttggaatgtgctctgaagtttcggctcttgtgtacgagtggttacctaagggaaaccttgaagaccgcattctgtgtgccgatgacactccacctgtatcatggcacatccgtacacagatcatccgtgagggttgctgtgcactactcttccttcattcacacaagcctaatgcctcggtccacggcgatctccggccttgcaacattctcatcggtgctgactacagaagcaagctctacaactttggta

SEQ ID NO: 440646 - DNA, 433 bp, Triticum aestivum
tctttacgcgtccgatgactacatgatgcagaacaccatgggcgcgtcccgcgacacccagctccggatgctcagcatcttcaaggccatactggccaacctgcacggcaaggaggacatcttcgccttcgggcacgacgtcatgagagccaaatggcgcaagctcagcgccgtcgtgtcgcgctcccgccggatctcgctgcagaacatccctccgcagtactgcacctacttcgacaagatcagggagccatccccagcttatgcgtgggtcaagtgtgagagggaggaagacagtgactgctccgacgtgctgctcaaggccaagataatcacacggtccggcgtctggaacgacgccagcagccggtacacgaggataagcctcatcaagtcccaggacgacttcgacctgctcctcgagaggatcaca

SEQ ID NO: 440647 - DNA, 387 bp, Triticum aestivum
ttatacccaccgctagcttctctaaggagtgaggagcagagtaatggatcttgaactgttgtggagtggtccacctgcactctcggtactgccatggatctgcggcggcctcgtggcctcggtgctgctctggcaagccgcccggctgctcgaccagctgtggtggcggccgaggcggctggagcgggcgctccgctcccagggcctccgcggcacgcggtaccgcttcctcctcggcgacgtcaacgactacgcccggcagaccaaggaggcgtcgtcgggggccgccgatgccgctgcgctgccacgacgttggcccccgcgccatgccgttcctctacagcaccatcaaggagcacggcacgccgtgcatcttctggttcgggc

SEQ ID NO: 440648 - DNA, 339 bp, Triticum aestivum
tttcttcaccatatgagtacattgtgtgtagacaggggattcctggtttggatggtggtgatgcaccaaagaggaagagtatgctagtcgtgtcagaattcataggttgctcgccatcattgagtggagcaatccgggtgaacccttggaacattgatacaacagcagaggcaatgaacgagtccattgctttgtcagagaatgaaaaccaattgcgccatgagaagcattatcgatatgtcagcacacatgatgttgcctattggtctaagagctatattcatgatctggagagaagctgcagggaccattttaggaggaggtgctggggtattggac

SEQ ID NO: 440649 - DNA, 424 bp, Triticum aestivum
ttctgctccacgcgtccgcggacgcgtgggcgccggcaacgccgctgctgcgctcatggccaaccttgcgcccaagacaaaggtgcttagggatggtcgatggggcgagcaggaggcatcaatcttggttcctggtgacattgtcagcatcaagctcggtgacatcgtgcctgctgatgctcgtctcctcgagggtgatcctttgaagattgatcagtctggacttacaggagagtctctcccggtgaccaagaaccctggggatgaggtcttttctggatcaacgtgcaagcagggtgagattgaggctgtggtcattgccactggagtacacactttctttggcaaggctgctcatctcgttgacagcaccaaccaagtcgggcactttcagcaggtcctcactgcaatcggaaacttctgc

SEQ ID NO: 440650 - DNA, 373 bp, Triticum aestivum
tttctttcacgcgtccggccagctactagctagccatggcatcttccaagagtagtcttgcaatgtttgcactggccatagtcatggccgtggtggctgacgtctcggcgcagaacaccccgcaggacttcgtcaacctgcacaaccgcgcccgcgccgtggacggcgtcggccccgtggcatgggacaacaacgtggccaggtttgcgcaggactgggcggcgcagcgcgccggcgattgccggctgcagcactccggcgggccgttcggcgagaacatcttctggggttccgggcagtcgtggacggccgccgacgcggtgaagctgtgggtggacgagaagcagaactaccatcttgacagcaacacctg

SEQ ID NO: 440651 - DNA, 313 bp, Triticum aestivum
cgccccgctcaacatgctagatttcgaaagagctctgtacaccatggacattgggcagaacgacatcacttccattctctacctgccctacgacgaggtgctcgcaaagcttccccactttgttgctgaaatcaggaaagccatcgagattctgcataagaacggggcgaggaagttctggatacacgggacaggcgcgctgggatgcctgccggcgaagcttgcgatgccgagggccagcgacggcgacctcgatgagcacgggtgcatcgcaaagttcaacaatgctgccaagaagtcaacacattgctga

SEQ ID NO: 440652 - DNA, 369 bp, Triticum aestivum
tgattttgaattcattgctgatctctgcaaggaaaatgatgtgttgctctttgccgatgaggtctatgacaagttggcgtttgaggcagatcatatatcaatggcttcaattcctggcatgtatgagaggaccgtcaccatgaactctctggggaagacgttctccttaaccggatggaagatcggctgggcgatagcaccaccgcacctgacatggggcgtgaggcaggcacactccttcctcacattcgccacctccacaccaatgcaatcagcagcggcggcagctctgagagcaccagacagctacttcgaggagctgaagagggactacggcgcaaagaaagcactgctggtcgacgggcttaa

SEQ ID NO: 440653 - DNA, 356 bp, Triticum aestivum
tttgtacatgcgcttcagcacccagatcaaggacgaggaaggtaaccccgccttcgccatcgtcaacaaggccactggtctcgccgtcaagcactccctcggccagtcccacccggtgaagctcgtgccattcaacccggagtacctcgacgagtccgtgatgtggacggagagcggcgacgtcggcaagggcttccgctgcattcgcatggtgaacaacattcgactaaactttgacgccctcaacggcgacaaggaccactgcggcgtgcacgacggcaccaccgacgttctctgggagtgggccaagggcgacaaccagagctggaagatcctcccctggggcgaagaggcct

SEQ ID NO: 440654 - DNA, 382 bp, Triticum aestivum
tcctattcctgctaccacctcggcaccaccagcccaagcagagccatggcgcccaacggagacaacaccgtggccaacgtccacagcggcatcgacagcaccaacaagacgctgctcaagagcgacgccctctacacctacatcctcgacaccaccgtcttcccccgtgagcacgagtgcatgcgcgacctgcgcctcatcaccgacaagcacccatggggctacatgcagtcgtcgtcggacgaggcacagctgctggggatgctgatcaagatggcgggcgccaagaagacgatcgaggtgggcgtgttcacgggctactcgctgctggccaccgcgctggcgctcccggaggacggcaaggtggtggccatcgacaccg

SEQ ID NO: 440655 - DNA, 309 bp, Triticum aestivum
tctttgggctccgctctcctctctctccttcatcctcctccggtttctgatcgcgaccatgggaacccgcggactcgccgtgctgctcctagcggcggtgctgctgcaggccctcctcccggcgtcggaggcggagggcctggtgcggatcgcgctgaagaagcgccacatcgaccggaacagccgcgtcgccgcgagcctctccgaccgcgaggaggggcagcaccacctactcggcggcgccaacaccctccgctccgaggaggagggcgacatcgtgtgcctcaagaactacatgaacgcccagta

SEQ ID NO: 440656 - DNA, 396 bp, Triticum aestivum
ttctttagccagctacctgctccttaattctctcttcttgccctactcccatcccgtggctagaagccaagaatttgtctgccatggcgtcggagccggtgatcgggaagctcagcgtccgcgttgtccgaggccacaacctcgtcatcgccgacccgctcacccacaccagcgacccctatgtcgtcctctgctacggctcccagaaggtgaagactagcgttcagaagaaaaatgccaatcccttatggaatgacgtactggtgctccctgtcacaaatcctacaaagccagtgaaacttgaggtttttgatgaggacaaattcacagcggatgacagcatgggagtggctgagttcaacgtaactgatacctatgacgctgcaaagctggatc

SEQ ID NO: 440657 - DNA, 408 bp, Triticum aestivum
ttgtttattcctcctaccacctcggcaccaccagcccaagctgagccatggcgcccaacggagacaacaccgtggccaacgtccacagcggcatcgacagcaccaacaagacgctgctcaagagcgacgccctctacacctacatcctcgacaccaccgtcttcccccgtgagcacgagtgcatgcgcgacctgcgcctcatcaccgacaagcacccatggggctacatgcagtcgtcgtcggacgaggcacagctgctggggatgctgatcaagatggcgggcgccaagaagacgatcgaggtgggcgtgttcacgggctactcgctgctggccaccgcgctggcgctcccggaggacggcaaggtggtggccatcgacaccgaccgcgagtgctacgaggtgggcc

SEQ ID NO: 440658 - DNA, 386 bp, Triticum aestivum
actggacgcgtgggcggacgcgtgggcgagctcctccgattccgcccgcctccgttcctccgcatcttcccggccgccgccaagatgaagctcgtcaggttcttgatgaagctgaacaacgagacggtcaccatcgagctcaagaacggcactaccgtccacggcaccatcaccggtgttgacataagcatgaatactcatctgaggaccgtaaagctcacaatgaaagggaagaatcctgtaacccttgatcacatcagtgtgagaggaaacaacattcggtactacatgctacctgatagcttaaacctggaaacgttgctggttgaggatacccccagggtcaagtctaagaagccaactacagggaagcctatgggtcgggg

SEQ ID NO: 440659 - DNA, 219 bp, Triticum aestivum
tttttctattgatgatatatggtccatatcggaatggaacattatcaagtgtgctttgctagagaataactgttctagcagagttataactactacacgcattattgaagttgcacggtcatgttgtatgggtcaagatgaccgcatgtatgaaatgcaaccctagagtgattttaattgtaaaagattgttcttgagaacaatttttgggtccaagga

SEQ ID NO: 440660 - DNA, 373 bp, Triticum aestivum
tttaccgactgctcgcacccctcgcatgaagacagactgggacgagtcggtgatccagcctccgtggcatggttcaaacagcccttgcgtggtgaactccaccccgccaagccccgggcgtcaaatggttcctgacccggcatggctggccggcatccagatctcgtcaacgagcccttcatcgcccacattcagtctcatgtcctccaacccattcagcgtcttcaaagaagccatccctggcggcggttcatcaaggatgtgcacgccggggcagagcggcacgtgctcgccggtgatccctggcatggcgcggcacccggacgttcacatgatggacgtggtctccgacgagttcgcgtttggaagcagc

SEQ ID NO: 440661 - DNA, 345 bp, Triticum aestivum
tttgtattctaccactagaccgaccgcaccaggtgaagtgggagctttgcgctaagggctcattagcaaccatgaagagcaccaagctcgcggcgatcctgatcctccaggccgtcctggtcatggggatcctctcacacgtgaacgccgactatttccccaagtgctgcaacagttgcaggtccttctcgggggtcgacgtctgcgacgacgcccacccccagtgccccaagggctgctcggcctgccgcgtggtgacgcccagccctcacaagacgttccggtgcgccgacatgaagagcaccgtcgacggcacctgcggcgggccatgcaaaaagcactgat

SEQ ID NO: 440662 - DNA, 414 bp, Triticum aestivum
tttgtatgagcagatgctggtgtacgagtacatgccaaatggtactctacgtgatcatctttcagctaaagctagagagtctccaagttttcccatgaggctacgaatcgcactgggatcatcacggggcatcctgtatctgcacacggaagccgaccctccgatattccatcgcgacatcaaggccagcaacatcttactggactccaagtttgtagccaaggttgctgatttcggcctgtcgcggctggctccgctgccagacacagaggggagcgcccctggccacgtgtccaccgtcgtcaagggcactccaggttatcttgacccggagtatttcctgacgcacaagctgacggacaagagcgacgtgtacagcctgggcgtggtgttcctggagttgcttacagggat

SEQ ID NO: 440663 - DNA, 272 bp, Triticum aestivum
tgttcggtacgacagccatcatcctccgtgcggttccaagctccaactcccacgcccgtcttcccctagatcaggaggagcacgccgcaccggagcgccgagacctcgaagccttcgtctccacctcggagcagagatggggctcacgttcaccaagctgttcagccgcctcttcgccaagaaggagatgaggattctcatggttggtctcgatgcccctggtaagaccaccatcctgtacaagctcaagctcggagagatcgtcaccacca

SEQ ID NO: 440664 - DNA, 255 bp, Triticum aestivum
  unsure (1)..(255): unsure at all n locations
nctggacgcgtggcaaaaactgtgatacagataaggagccatgcacagaagtactttttgaaggttcagaagaacggtacaggcgaacatttaccttcgtctcggccgaagcgtaaggtagcccatccatatccgcagaaggcctctaaaactgcccctgtagcatcccaagctgttttaccacaacaacctgctcctgctgcccctcctacgagggatcaagatggtgttaatgtgtctatggaggcatctatg

SEQ ID NO: 440665 - DNA, 321 bp, Triticum aestivum
ttcgtttgcgtccgggggagtgctgggggatctccacagtgccgtctagctgaaggcctgtttgcagaagacctgctaggccaggtacctggattagatgctgaggatccatgggtggtgcccgaggttccctccccaccaacagcctcgggtctatgctggcaagggaacttgcattaccctgtgtatgacggcgccatgttcgtccctgaagcaccctccctgcagagctcccaggaccacttcactgcatctgctggtttcaagcgttcaaggagagagttttgaatacccgaaagaatatagcgttggacatatctg

SEQ ID NO: 440666 - DNA, 411 bp, Triticum aestivum
  unsure (1)..(411): unsure at all n locations
ttggtanggaagtacgcaaatgataatggattagaaataattacaataaacccaacaatggtcatcggtcccctgttgcagcctacactgaatactagcacagaagcaatattgaagtttataaatggattatcttctacatacgccaatttctgctttggatggataaacgttaaagatgttgccctggcacatatccttgcatatgaagttccttcagcaaacggaagatattgtatggttgaaagagtcattcaccactcggaccttgtcaagatcattcacgagatgtatcctgaatttccagtgccagacaagtgtgcagatgatgcgccgtttgccccaatctaccaggtatcaaaggacaagataagaagtctgggcatggagctgacacccctggagacgagc

SEQ ID NO: 440667 - DNA, 460 bp, Triticum aestivum
tttgtccacgacgtcgccggccgcttcgccggcaagctggacatcctcgtacgtgaagcaccccatatcttctccccagtcccggacgcgtccgccccgacgaccgaccgacgaacagcgcaaaagtaggagggagaggatgagcaccatggcgatgtcggcgctgaacccggacgcgcccatgttcatcccggcggcgttcaagaaggtggaggactactcgcccgagtggtgggagctcgtcaagaccaccgcctggttccgcgaccactggttccgccagcaccaactctacgaggacctcgccgacaacgtggacgtggacgacgtcgccgccctcctccccgacgactccgtcgacctgctcgacgccgacgacctcttttactccccgccgtcgccccagccccagcccgacttctaccactacaaaccagcagggttcggcggtgacatggac

SEQ ID NO: 440668 - DNA, 430 bp, Triticum aestivum
tgttctgaaggttcagggcggtatacctggtcagatggtactatttatgatggcgagtggaggacggggatgaggcatgggcaaggaaagacgctgtggccttccggagccagctatgagggcgagtatgccggtgggtacatatatggtgaaggcacgtacactggacaggataacatcgtctacaagggacggtggaagctgaaccgtaagcatggtctcggatgccagacatatcctaatggggacatgttccaaggttcttggattcagggagaaatacaaggtcacgggaaatacacatgggaaaatggaaacacgtacaccggcaatatgaaaaatggcaagatgtccggaaagggaacatttacttggaaaaatggtgattcgtacgaaggcaactggttagatggcatgatgcatgggtatg

SEQ ID NO: 440669 - DNA, 321 bp, Triticum aestivum
ttctgatgttacaaccactgggcaggctgtcaccgccctcatgatgctcagggtgaacaaggtccagtcagacctggcgatcagcgatgtctacatgccggacatggatggtttcaagctcctggagcttgtgagtctggatatggacctaccagtcattactaaggctaacctgcttaatcctctgctgctctttgtaaacgatgctctaaaaggtatcactgccggggaatgattgtcgagtgaatctactcgtttcatgtcatgtcattaggtgctacagaactttggagatgaattatgtctgctaacctacaaaca

SEQ ID NO: 440670 - DNA, 365 bp, Triticum aestivum
tttgttctaagggaatgaaagaattgtcataaccgagtttgtgtcaaatggcactcttagggaacatttggatggacaacatgggctaatattgggcttcagtcagcggcttgaaatagccatagatgttgcccatggattgacttatctgcatctatatgcagagaagcccattatacaccgggatgtgaagtcatcaaacattctactaactgaaggcttcagggcaaaagtagccgacttcggatttgcaagaattggttcaacagatccaggccagtcagagattcaaactgatgtgaaaggaacagctggctatgtggatccagagtatctgcggacaaactatctgacagtcaagagtg

SEQ ID NO: 440671 - DNA, 336 bp, Triticum aestivum
acgagtgaagtgagagcttcgcacgaaatgttcatcagcgaccatgaagggcaccaagctcgcggcgatcctcatcctacaggccgctctggtcatgggagtcctctcacacgtgaacgccgactatttgcccaagtgctgaaacaactgcaggtccttctccggggtcgacgtgtgcgacgacgcccaccccaagtgccccacgggctgctcggcgtgccgagtggtgtcaacgagccctgaaatgtggcgctgcgcggatatgaaatccaccggcgacggcacctgcggtgggccctgcaagaagtactgatcggctcatgccagcatgatatg

SEQ ID NO: 440672 - DNA, 424 bp, Triticum aestivum
tttctgctgaacgttcaaagatgctgcacaagagtgcagaatgatattggatatcgtggaagcagcagtacctgaaggcttaccagcaggctttggaaaaggttgtaaattgaacgaaataatatgcaaggccgtagagtttctccctgagttatggaaattagcagggttttcgcttgaagccatttctgaatataggaggtctcttctcaataactggaatcttgatggagagaccatagctaaaatacaaaaggaatttgctgtttttcttctgtacagtggctgtgaagcccgccctccaaatctccattctcagttggatggttcatttgtaccacgcaacaatatggaagaggctacactccttttaatgattctattgagaaagtttaatctgaggagggttgagcgggatcccact

SEQ ID NO: 440673 - DNA, 397 bp, Triticum aestivum
tttctgatgttacaaccactgggcaggcagccaccgccctcaggatgctcagggagaacaaggaccagtttgacctcgtgatcagcgatgtccacatgccggacatggatggtttcaagctcctcgagcttgtcggtctggagatggacctcccagtcattagtaaggctaacctgcttaatcctctgctgctctttgtaaacgatgctctaaaaggtatcactgccggggaatgattgtcgagtgaatctacttgtttcatttcatgtcatttggtgctccagaactttggagatgaattatgtctgctaacctacaaacatcgcaaatagttcctcgatgtgctactgctagttttgttagggaagatggaaaatctttgttcatttgtgtggtt

SEQ ID NO: 440674 - DNA, 401 bp, Triticum aestivum
gctccacgcgtccgccacgcgtccggtttcctgcgccatggagatgaccaagctctctggtatctccgacatcattcccgagatggaggtctgtgacttcgacttcgagccctgcggctactccatgaacgccatcaacggatctgccgtctccaccatccatgtgacccccgaggacggcttcagctatgcgagctacgaggtcatgggcatggacgcctccgccctggcctacggcgacatcgtcaagagggtcctccggtgctttggcccttcagagttctctgcggcggtcaccatctttggtggccgcggccacgccgccacctggggcaagaagctcgacgccgaggcatacgactgcaacaacgttgtggagcaggagctcccctgtggaggcg

SEQ ID NO: 440675 - DNA, 165 bp, Triticum aestivum
  unsure (1)..(165): unsure at all n locations
gttctttcacgacgttngcgacgctggagtgggggatgacggagctggtgcgccacccgcgcatcctgcaaaaggcgcaggaggaggtacggtgggtggtgggcggcaagggccgggtggaggagtcggacctggcggagctccactacatgcgcgccatcatca

SEQ ID NO: 440676 - DNA, 312 bp, Triticum aestivum
  unsure (1)..(312): unsure at all n locations
atangtccacgaccaatgtgttacaaggcttatggaagcggaaaagaagatactcctgctctgtgatgttcctgggtttgaaaacactaggatgaagctgctgagacatgtttcctttgttgattgcccgggctcacgacattctcatggctacaatgcttaatggagcagctatcatggatggagccttgcttttgatagcagcaaatgaaagctgcccacaaccccagacatctgagcatcttgcagctgctgagatcatgcgtctccaacatctcataattttacagaataagattgatcttatccagg

SEQ ID NO: 440677 - DNA, 510 bp, Triticum aestivum
tactcgtggaaaggcaatccacggtggaaacttccagggcacgcccatcggtgtgtccatggacaacacgaggcttgccattgctgcgattggcaagctcatgtttgcccagttctcggagctagtaaacgacttctacaacaatggcttgccctccaacctctctggtggccgcaatccaagtcttgactatggcttcaagggtgccgagatcgcaatggcgtcatactgctcggagctccaattcttgggcaaccctgtgaccaaccatgtccagagtgcggaacagcacaaccaagatgttaactccctcggattaatctcagcccgtaagactgccgaggccatcgacattctgaagctcatgtcctctacatttttggttgcgctgtgccaagccatcgacctgcgccacctcgaagaaaatgtcaagaatgccgtcaagaattgtgtcacaagagtggctaggaagaccctgttcacacatgacatgggtggccttcacaacgc

SEQ ID NO: 440678 - DNA, 405 bp, Triticum aestivum
gcgtcctctcgtccgccacgcgtccgccacttgagatggacttaattcttccagtttccgagtgccgagatagtttggagcaactactggagagcatcccgagcatgtttgaaaacaatagggttgctgattcagcgtttggagcagctatgaaggcaggtttcctagcaatgaagcccactggtggaaagttgcttgtgtttcagtcggtgctgccatcagttgggactggttcattatctgcaagggaaactgaaggtagatcaaatatttcgagtggagataaggaagcacataagctcctgcagcctgttgataagacactcaaaacaatggcactagaatttgctgagtatcaagtttgtgtagatgtgttccttaccacacagtcatacacagatgttg

SEQ ID NO: 440679 - DNA, 371 bp, Triticum aestivum
tctccgctccattcgattcgatctcggcttcctctccaagccacgcgacgcgagaccagagctccggccatggcggcgacgatccagtccgtgaaggcccgccagatcttcgacagccgcggcaaccccaccgtcgaggttgatgtgtgctgctcagatggaacctttgccagggccgccgttcccagcggtgcatcgactggtgtctatgaagctttggagctgagggacggtggatctgactacttgggcaagggtgtttccaaggctgttaacaatgtgaactccattattgcacccgctttggtcggcaaggaccctaccgctcaaactgagctcgacaactttatggttcagcagcttgatggaac

SEQ ID NO: 440680 - DNA, 345 bp, Triticum aestivum
tgtcacttctcccgtcccgtcccgtccccagccaaccttccatctccgtctcgcgtcgcggcggcagttccactccctcgccatgggcaagattaagatcggaatcaacggttccggacggatcgggaggctcgtcgccagggtagccctccagagcgacgatgtctagctcgtggccgtcaacgaccccttcatcaccaccgagtacatgacctacatgttcaagtacgacaccgttcacggccactggaagcacagtgacatcaagctcaaggacgacaagactctgctctttggcgagaagccagttaccgtcttcagcgtcaggaaccctgaggagatccc

SEQ ID NO: 440681 - DNA, 195 bp, Triticum aestivum
attacatgcaacctctaccatggtttggctcggatcttgaccaagactttcacatctgagttccctcatgttgagaggtcactctctggaccatggttaaccagcctaacttcaagagggtcattggtgatttcaagcaggcagaggttgaccctcctgttcagaagaaggctgctcctgctaaaccaaaggagg

SEQ ID NO: 440682 - DNA, 328 bp, Triticum aestivum
tttgacttctccgggacggcgcgtatgtggctccaaccccttcgccaaatccatcgcccaatccgagccccaagccctcgccgtcgggaggcgggaagtggtgcgtcgccaaggacggcgccaacgggacggacctgcagaacaacatcaactatgcctgcggcttcgtagactgcaagcccatacagagcggcggcgcgtgcttcagccccaacagcttgcagtctcatgcctcgcacgtgatgaacgcctactaccaggccaacggccacaccgacttggcgtgcgactctaagggcaccggcgtcgtcacctccagcgaccccag

SEQ ID NO: 440683 - DNA, 234 bp, Triticum aestivum
ttgctcacgcgtacggagagctccagccatggggcacgtcaacttctaccgcaactatggtaagacattcaagaaaccaaggcgtccttatgagaaggagcgtcttgatgcagaactgaagctggttggtgagtatggattgaggtgcaagcgtgagctctggagggttcagtatgcatagagcaggatccgtaatgctgcaagacacttgctcacactggatgagaagaatcc

SEQ ID NO: 440684 - DNA, 287 bp, Triticum aestivum
tctcacgcgtccgctggaattgctctgaagatcttccttatactactcccaagcatattaatgtttatgtcaaaggttgaaggattgacatcagtgtcttcattggaaagaagatctgcatcgaagcactatatcttcttattctttaatgtattcctggcaagcatcattgctggatctgctttggagcagctacaaacctatcttcaccagtcagcaaatcaaataccaaggacaattggtgtagcaattgcaatgaaggcaacctttttcataacgtatgtaat

SEQ ID NO: 440685 - DNA, 279 bp, Triticum aestivum
tttctgtatgcactcacagtggtcggaccaagccaaacctcccttggcattaaagctgccaatggtgtacttatcgccacccagaagaaactgccttctatttagtggacgaaacatctgtgcaaaagattcagtcgttaactccaaatataggagtctgatacagtgggatgggtaccagattttcaaggtcttgtcaaaaaaagtcagaagcaggcacatcagtattatcggttgtgcaaggaaaccatacctgttacccagcttgtccgagagact

SEQ ID NO: 440686 - DNA, 411 bp, Triticum aestivum
ttgggacgtcttcgcgttcgagtacacattcgaagtcgtggtgttcatcctgatgtcgtgcgggatcgcggtgagcgtcaacttcagcaccttcctggtgatcggcacgacgtcgccagtgacgtaccaggtgttgggccacctcaagacgtgcctcatcctctccttcggctacgttctcctcaaagaccccttcacgctccgcaacctcaccggcatactgatcgccatcttcggcatgggcctctactgcttcttctccgtctccgagagcaggaagaagaccgagggcgccacgttgcccgtcaacacccagatgagcgagaaggattcggcaccgctccttggcacgaaaacctcgccgtggcaggagagcaacggggtggagaactttgacgacgtgccacggac

SEQ ID NO: 440687 - DNA, 426 bp, Triticum aestivum
tctttaattcctcgcgattcctctcccctcgcctgctcgtcctccccctcctaggggatcgccggagaggaatcgcgacgagggcttcctcctatcaggttcgtggctcggcgaccctctgttcccgttaaatcaaagccatggagcacaaggagaccggctgccagtctcgggagggccccatcctttgcgtcaataattgtggcttcttcggcagcgcggcgaccatgaacatgtgctccaagtgccacacggagatggcgacgaagcaggagcaggcaaagctggccgcctcctctttcgacagcatcgtcaacggtggcgatgccgcgaaagaacatcttgctgctggcagcacggcggcggcagttgctcacgttgaggcgaagacgcttattaccgcacagcctgctgatatcgctggtc

SEQ ID NO: 440688 - DNA, 341 bp, Triticum aestivum
ctaccccaccccccgttccagagcgcgatcacacaacagagcggtagcagttcctgggccgttcccgccccggccggcgccatggacttcgtcttcgtggagaagctcctcgtgggcctcctggcggccgtggtgggcgccatcgtggtgtccaagatccggggccgcaagctgaggctgccgccgggccccttcccggtccccatcttcggcaactggctgcaggtcggcgacgacctgaaccaccgcaacctggcggcgatggcgcgcaagttcggcgaggtcttcctcctccgcatgggccagcgcaactggtggtggtctcctcgccgccgctggcg

SEQ ID NO: 440689 - DNA, 435 bp, Triticum aestivum
ttttggcgagggggagacgtcgcgtccgccatggggtgctccttctccgggctcaacgcgctgtacgccgccgcggtctccgacggcaccgccggagcgggacccggcgccgcggggctcgccaagaagaagggcgtcgacccgtcacacatctcagctgatgggacttatgctttgaagaaagtttttattcagagcgaccaacacttggagctagtacggcaggagatccgagtgtcctctcaattcagccatccaaatttacttccacttcttgaaaatgccattattgcagtcaagggtgtgcaagatgggtcgcagaaccatgaggcttacttgttgttcccagttcacttagatggaaccttgcaggatgtaactaaatccatgcaagaaaagaaggaatacctttcaacaatcaccattctccagata

SEQ ID NO: 440690 - DNA, 346 bp, Triticum aestivum
tcgcggacgcgtgggttgattagctgattcagtctgcgcgacggagcccctccatctccatggacgcagcagaagagacgagattactgctccaagaggatggggatcaggatgcaagtctttacacaggtgatgggtccgttgacatcaaaggccgtcccgcaacaaggcgcgacacaggcaattggcgagcatgcgtcttcatcctaggaaatgagtgttgtgagcgtctggcctactatggaattgcaaaaaacctagtcacttatctcaaaataaagcttcatcaaggcaatcttgaagctgcaagaaatgttaccacttggcaagggacatgctatctgtc

SEQ ID NO: 440691 - DNA, 394 bp, Triticum aestivum
ttttctagaggcagaacaagccgctggccagtggccatggagtgcggccagtgcagcgcgcgcttggctgtcacgcggggcgcgagctccgttcagtgcgcgcactgccgcagggcgacgcgcgtcgaacggcacggcgccgtcgtgcacggggccgtcggcttcgtcaggagcgtgttcacgaacattggccgggcgaggccgcacccggggtacccgccggtgcacggcaacaagcgcgctctcttggtcggcatcaactacaccggaacggcggccgagctgcccggccccatcaacgatgtcaagtgcatgagcttcctgctcaccctcaagtacggctttccaggcgattgcatccttgtccttaccgatgaagagcgcgacccctaca

SEQ ID NO: 440692 - DNA, 444 bp, Triticum aestivum
tttttcatgcactcacagcggtcggatcaggccaaacctcccttggcatcaaagctgccaatggtgtagttatcgccaccgagaagaaactgccttctattttagtggacgaaacatctgtgcaaaagattcagtcgttaactccaaatattggagttgtctacagtgggatgggtccagattttcgtgttcttgtcagaaaaagtcggaagcaggcacagcagtattatcggttgtacaaggaaaccatccctgttacccagcttgtccgagagactgctgctgttatgcaggagttcactcaatctggtggcgtaagaccatttggtgtatcactgttgattgctggctatgatgacaatggcccgcagttgtatcaggttgacccatcagggtcttacttctcctggaaagcatcagctatgggaaaaaatgtgtcaaatg

SEQ ID NO: 440693 - DNA, 411 bp, Triticum aestivum
ttggtcatgtcgactctggcaagtcgacaaccactggccatctgatctacaagcttggaggtattgacaagcgtgtgatcgagaggtttgagaaggaagccgctgagatgaacaagaggtctttcaagtacgcctgggtgcttgacaagctgaaggccgagcgtgagaggggtatcaccattgatattgccctgtggaagttcgagaccaccaagtactactgcaccgtcattgatgcccctggtcaccgtgacttcatcaagaacatgattactggtacctcccaggctgactgtgctgtgctcatcattgactccaccactggtggttctgaggctggtatctccaaggatggccagacccgtgagcacgccctccttgctttcacccttggagtgaagcagatgatct

SEQ ID NO: 440694 - DNA, 454 bp, Triticum aestivum
ccgaaatcctaaagcccgaccagtcgaccaccagccagctcctccgtcctctccccccacgcctggcgtcccaccgccgccgcccccgccccgccgtcgccgtccggcgcatcccgcctccccccctcgagcgagcagtcggtcacttggtggaagatccgtcccccgccggcaaccgaatcgggaagaggaggagggggccgatcgaagctccgggcgagagtcgccggccatggttaaggagacgggctactacgacgtgctcggcgtgatccccacagccagcgagtgcgagatcaagaaggcctattacatcaaggcgaggcaggtccacccagacaagaaccctaatgacccccaggccgcagggaagttccaggaactgggggaggcataccaagtgcttagtgaccccgctcagcgcccagcttatgatgcacatgggaaatctggc

SEQ ID NO: 440695 - DNA, 453 bp, Triticum aestivum
tttaaggatgtattgccaagaattggccaatggaatatgaggcataagaaaatggtcaatggtggtagagttaaggagtggatatgtattaactttgctcggaatgtccaagatagtgctgccaggagtttctgtcgtcagctggctgacatgtgcgaaatatctggaatggacttctcaaaggatcctctgcttcctcctttatgtacgagagctgagcatgtagaaagagcactcagggcacactatcgagatgctatgaatattctgaaaccactgggcagggagcttgacctgctcattgcaattttgcctgacaataatggtcctctttatggtaatctcaaaagaatatgcgagacagatcttggattggtctctcaatgctgtctcacgaaacatgtttttaagacgacacagcagtatcttgcaaacgtcgcccttaaaatcaat

SEQ ID NO: 440696 - DNA, 397 bp, Triticum aestivum
ttttgctgacagtgatttctctgagcagtctttggagcttaaggaaccggttcttcggcagattactctcgaagcggataatctgttatggttaaccgagattttggctggcaggaatgctgcagaagaatttgcaggcttgtggtctaaccaacgtgagctggctgggcttcattccaagctaccgaccaagtcgcgccaccttgtgagctgcgtcactgccaggctctttgtggcgattgggaaaggcgaaatgctcccgtccaaggacaccaggcagctcctcctggatgtctggctgcagcctctcatggatgactacaactggctgcagcacggttgcaggtcgttcgaccggaccgtcgtcgaggaagggatcgggtcgaccatcctgacg

SEQ ID NO: 440697 - DNA, 390 bp, Triticum aestivum
tttttacgcgtccgcacggaaccaacaaatccccacccaatctcgtctccgatcgactccacgctcgtcgaatactcctcccctaccgcctcaagatgcagatctctgcgaagaccctgactggcacgaccatcaccgtagaggttgagcgctcccacaccatagacaacgtgaaggccaagatccaggacaaggagggcattcccccggaccagcagcgtctcatgttcgctggcaagcagctggaggatggccgcacccttgctgactacaacatccagaaggagtccaccctccaccttgtcctgcgtctgcgtggtggcatgcagatcttcgtgaagaccctcaccggcaagaccatcactcttgaggtggagagctccgacacca

SEQ ID NO: 440698 - DNA, 417 bp, Triticum aestivum
tttgtgcagcagctggtggagcgcggcatcgatctcgtgtacggcggcggcagcgtggggctgatgggcctggtgtcccgcgccgtgcacggcggcggcgggcgcgtcacgggcgtcgtgccccggtcagtgctcccgcgcgagctcatcggcgagacgcccggcggcgaggaggtgaaggccgtgtccggcatgcaccagcgcaaggccgagatggcccgccgcgccgacgccttcgtggcgctccccggcggctacggcacgctggaggagctgctggaggtcatcacctgggcgcagctcggcatccacgagaagcccgtgggcctgctgaacgtggaggggtactacgactcgctgctggacttcatcgacgggcggtggacgaggggttcgtgtcgccggcggcaaggcgca

SEQ ID NO: 440699 - DNA, 376 bp, Triticum aestivum
cccacgcgtccgcccacgcgtccgtaagtatggaagtgaaccaaagtctactacctaaggttcagttcaatcttgagttgtcagaaaaggagcgcagtgacagggcaaatgttgttcttcctttcgaacatcaaggaaagggcgagccaatccgtatatacgatggacggcgatctctcccggaggctcatcaagatcccaatttaactacggcagctctcctggatgaaacagaagctcttaaatctgcaaacccgaagggtgaaattcattaccttcgtgattctgatgatgagcgacctgactcggatgaagaccccgatgatgatttggatatttagccacaatatgagctctgtttatcttagtgggcagc

SEQ ID NO: 440700 - DNA, 351 bp, Triticum aestivum
tgttggctgcaatttgtaagcaggtgttgaaaggactgatgtacttgcatcatgagaagcgcgttatacaccgagatctgaaaccatcgaatatattgataaatcataggggtgaagtaaagatatcagattttggtgttagtgccatcatttctagttcttctgcacagcgagatacatttactggcacatttaactacatggcgcctgaaagaatcagtgggcagaaacatggtcatctgagtgatatctggagcttgggcctagttatgctggaatgtgccactggcaatttcccatatcctcctcgtgaaagcttttatgaacttcttgaagctgttgtcgaccaac

SEQ ID NO: 440701 - DNA, 310 bp, Triticum aestivum
tgttacttcatgtgccagggcggcgacttcaccaggggcaacggcaccggaggcgagtccatctacggcgagaagttcgccgacgagaagttcgtccacaagcacaccaagcccgggatcctctccatggccaacgccgggcccaacaccaacggctcccagttcttcatctgcaccgtcccctgcaattggctcgacggcaagcacgtggtcttcggcgaggtcgccgagggcatggacgtcgtcaagaacatcgagaaggtgggctcccgcagcggcacctgctccaagcaggtcgtcatcgccgact

SEQ ID NO: 440702 - DNA, 379 bp, Triticum aestivum
gcgcctcacgcgtccgggtatacctacacttgtagcctcagttatcttgccagtgccagctgagctagctatatagctccgtcgcttgcttccgagttccgacagctcgctccgatgacggtggcggcggcgggcgcgggcaggcgttacgcgctgttgctggcggtgaacgactcggactacgccaggaaggcgcacggcgggtaccggaacgtgttcttccgcgccctccgctccggcgaacccgacgaggcgtgggactgctaccgcgtaatcgacggcgagttcccggcagcagaggatctgggcctgtacgacggcttcgtggtgagcggcagcccgcacgatgcccacggcgacggcgccccgtgctgggtcc

SEQ ID NO: 440703 - DNA, 415 bp, Triticum aestivum
tttctccaccctcgccgtctcgccgccgtcaccaccgcagctagataagagaaaaaaagagagagaagaactcgtcgggagggctcgagatctgtgttcggagaggggaattcttgaggtcggaatcggaacaagcgggcgcgctcgggatcggggttaccatacaatttttcccaggaacctttagtgaatgtgctaatggagtcaaagggtggcaaaaagtctagcagtagtagttccctgatgtacgaagctcccctcggctacagcattgaagacgttcgacctgctggaggcgccaagaagttctctgctgcatactcgaactgcgcgaagaagccatcctgatatcgtttttggcatccccttcccgtagtttaggatttttatgcaattttattctgactcttttctc

SEQ ID NO: 440704 - DNA, 236 bp, Triticum aestivum
tttcttcgggatgcatacataaatgctatccggcgggcaaaggacttcatctacattgagaaccagtacttccttggaagttcctactgctggaagcccgaaggcatcaagcctgaagaaattggcgctctgcatgtgattcctaaggagctttcgttgaagattgtcagtaagattgaagctggcgaacggtttactgtttatgttgtggtgccaatgtggcctgagggtgttcc

SEQ ID NO: 440705 - DNA, 396 bp, Triticum aestivum
tttttagagcaccaagctcgcggcgatcctgatcctccaggccgtcctggtcatggggatcctctcacacgtgaacgccgactatttccccaagtgctgcaacaactgcaggtccttctcgggggtcgacgtctgcgacgacgcccacccccagtgccccaagggctgctcggcctgccgcgtggtgacgccgagccctcacaagacgttccggtgcgccgacatgaatagcaccgtcgatggcacctgcggcgggccatgcaagaagcactgatccgttcagggcttcaggctcagacgaggtgtgccgcctaaaataaagctcagatgagatgagcagtcatggtgcctatgcttgtgtgtgggtcgtgctatacggccaacaatatgtatact

SEQ ID NO: 440706 - DNA, 396 bp, Triticum aestivum
tttgcaacaccggacccattaacattgggaacccaggtgaattcaccatgctggaacttgccgagaatgtgaaggagttgatcaacccagaagtgacagtgacgatgactgagaacactcctgatgaccctcgccagaggaagcctgacatcaccaaggccaaggaggttctcgactgggagcccaaggtcgtcctgcgcgacggcttggtgctcatggaggacgatttcagggagcgtttggcagtgcccaagaagaccaaggcctaattgccctccctacgtttggcgtacaacatgaccaattagccagagcatactcatagttgggtgggttcgtcaatattcgttgctgcgtttcgttacggaatttgagttccaataaaccaattacacc

SEQ ID NO: 440707 - DNA, 367 bp, Triticum aestivum
ttcccggataacaaaaagtggaaggtgaagcagccatggcgaccatcacggcgcctccctgctccccctctccatcgtgtatgttcctcacccgcagctattgctgctcgaggtcggcgccaagagcggccatccgctcatctgctgtggcggcggcccggcagacgctctcctccggatgggacctgtccgggctgtcgggagcgcgaccggcagctggaaaagcccgtctcgaggagttggacaccagcaacatgcttctccgccagcgaatcatctttctcggctccccggtggatgatttgactgcggatcttatcaccagtcaactcttactgttggatgcaaaggaccacacaaaggatat

SEQ ID NO: 440708 - DNA, 415 bp, Triticum aestivum
tcttcacgcgtccggtcatgccagctttattcagagcacttgatgattatgctgtagataacagaggagatgtgggttcttgggtacgtgaagcagcaatggatgcgctagaaagatgcacgttcatcctctgcaagagagatgctgttgcagtgagagcagcgccagctgctgaggatgagtctgagccaagcgacatggatgcaaatgcaattagtaccacatgccaactatttgattctgctattgcacagggtctggtcgctggcattgcaaagcaggcagttgagaaaatagataagataagagaaatagcagtcaggactctgcagaggattctgtacaaccaagaacagtttgtcccgtctataccttacaggaagctgttggaagaaattattcctaataattctga

SEQ ID NO: 440709 - DNA, 315 bp, Triticum aestivum
ttccacgcgtccggctcaacctgagcttcaactggttccatggggagattccagcaagcctcggccgcctccgtcgcctacagaggctagacttgaacgacaactccttctccggcaagttccctgtaaacctgagctcctgcatcaggctgaacaaaatgggactacacaacaacaagattggcggccacatcccagctgagctcggcgaaaagttcatatccctggcagtgatctcgctgaggaacaatagtttcacaggtcccatcccggggtcaatggccaatctgtcctatctacgatatcttgatttct

SEQ ID NO: 440710 - DNA, 345 bp, Triticum aestivum
tttctgcgagcatcgaccatgtcggcctactgcggcaagtacaaggatgagctcatcaagaacgctgcctacattggcacccctggcaagggtatccttgctgctgatgagtccaccggcaccatcggcaagcgcttcgccagcatcaatgttgagaacgttgaggacaaccgtcgtgccctccgtgagctcctcttctgcacccctggtgccctccagtacctcagcggtgtgatcctgtttgaggagaccctgtaccagagcaccaagggtggcaagcccttcgtcgacatcctcaaggcgggcaatgtcctccccggcatcaaggtggacaagggcaccatc

SEQ ID NO: 440711 - DNA, 243 bp, Triticum aestivum
ttctggccatcagccctctttgagtgtgtggtacagacagtaattttccagggtagcaagagagagtgaaagcagaatggtgaagctcgcattcgggagctgcggtgactccttgagcgccacgtccgtcagggcgtatgtggcggagttcatcgacaccctcctcttcgtgtttgccggcgttgggtccgccattgcctatgggaaactcaccgatgatggcgcgctcgacccggctggcct

SEQ ID NO: 440712 - DNA, 342 bp, Triticum aestivum
cctacgcgttcgcccacgcgtccgttcatgggcaggacttgttcaattacaagccgggttaggaaaggagcttctgaagtatagagaatcggcgcaggtggctgctgttgaagccatgcaggaagcttcagctgcagaaagcttgctgagatgtttgagctcgtacgccgaggtgagctcgacggctgaggagcagaacccgcagccgaccgttgagcagttcctcgccctccacagctcgctctcccgcgccacggtgatcactgacaccctcaccaagtcagcagccccgccggaatgctcagcggccagcgacgccgggacggtggcctctgctaccga

SEQ ID NO: 440713 - DNA, 361 bp, Triticum aestivum
gttcatatttcaagagatactcatgggtatgttggggctggtctaactgcacttgggaccgaggctgctctccaatgcattcgtgagaagatggatattattgatcttgaggacgagacaatagatgctgagatactcaactctatggctgtgacaaatgaccatttcaagaccgccctgacgacaagcaacccgtctgctctccgtgaaactgttgttgaagttcccaatgtttcttgggaagatattggtgggcttgagaatgtcaaaagggagttgcaggagactgttcaataccctgtggagcatccggagaaatttgagaagtttggcatgtctccttcaagggtgttttgttcta

SEQ ID NO: 440714 - DNA, 343 bp, Triticum aestivum
gttcatattttaagagatactcatggatatgttggggctggtcaaacttcaattgggaccgaggctgctctccaatgcattcgtgagaagatggatattattgatcttgaggacgagacaatagatgctgagatactcaactctatggctgtgacaaatgaccatttcaagaccgccctgacgacaagcaacccgtctgctctccgtgaaactgttgttgaagttcccaatgtttcttgggaagatattggtgggcttgagaatgtcaaaagggagttgcaggagactgttcaataccctgtggagcatccggagaaatctgagaagtttggcatgtctcctt

SEQ ID NO: 440715 - DNA, 295 bp, Triticum aestivum
tcgttttacctctcatcctcccacttcctttggtcgggcttaacttagcacaccgtgccgggctccatcgccttcggtcgcttcgatgactccttcagcttggcctctttcagggcctacatcgccgagttcatctccaccctcatcttcgtcttcgccggcgtcggctctgtcatcgcctacaccaaggtgagcggcggcgcgccgcttgacccatccgggctgatcgccgtggcgatttgccacgggtttgggctgttcgtcgcggtcgccatcggcgccaacatctccggcg

SEQ ID NO: 440716 - DNA, 354 bp, Triticum aestivum
ttcagcacctgcctcaccctatacaatgagacggggctatttgacaagctgggcgggttcccggcgccgctgctgatgaacactgtgcacttcgcgctgcaggccgcgctctccaagatcatcctgctcttccaggccaaggggatcgacaccgccgtcgagatgagctggaaggattacttcatgagagtcgtcccaaccgctctgggaaccgcgctcgacataaacctgagcaacgcgtctctggtgttcatcacggtcacgttcgccactatgtgtaaatcggcgtcgccaatattccttttgctattcgcttttgcattccggttggagagccccagcatcaagcttcta

SEQ ID NO: 440717 - DNA, 411 bp, Triticum aestivum
ttctatacctgtttatgatactccactgggaaaggtaaattcaacatgggctgggagaacagaatgccacttatcaggacagcgatgtatgccaaaggtgttcaaatatactgtgctcccactgcggatgcgctgccaagttggcaggcttccatgacacacattgcgcttgaagggggatgctttgttctgacagcaaaccagttctgccgcagaaaagactttcctcccccgcctgagtatacctttggtggccatgaggaggagccatccccagaaaccgctgtttgtcctggagggagcgccatcatctcgccatctgggacagtgttggcaggtcccaactatgaaggcgaggccctcctcacagctgacctggaccttggagaaattgttcgagccaagtttgat

SEQ ID NO: 440718 - DNA, 349 bp, Triticum aestivum
aaatggtagaccggttcaagcttggagcaggagcaatgcctgcaagtttcaaggtggaccgtaatgtgaacaggaacactgaaacattagttgcagattttggtgagagcgcaattggcagggtggcaccagtggactctggattttggtggattattctcctccgggcgtatacaaaatatactggagatgctagtttatcagaatcacctgattgtcagaagtgcatgcggcttatactgaatctttgcttatctgagggattcgatactttcccaactctgctctgcactgatggttgctcaatgattgatcgtcgaatgggtatatacggttatcctattgagat

SEQ ID NO: 440719 - DNA, 281 bp, Triticum aestivum
  unsure (1)..(281): unsure at all n locations
acttaagcttatcttcttctccttgaaatctttgggggtcgtcaaatttagagggtggcttggaactgcggatcangctgcagctgcggctcagactgcaagtgcgggaagatgtaccctgatctgacggagcagggcagcgccgccgccgaggtcgccgccgtggtcgtcctcggcgtggcgcctgagaacaaggcgggacagttcgaggtggccgccgggcagtccggcgagggctgcagctgcggcgacaactgcaagtgcaacccctgcaactgtta

SEQ ID NO: 440720 - DNA, 224 bp, Triticum aestivum
cgcaattggttctaacggttctggcagcaagtcatgctgcccgctgtcggactaccgcattccagattacatactaaagccggactctgaaccagtcatccttgacaatgcaccatcttgtcccgtggtagtcttcatcaactctagaagcggtggccaacttggaagtggtttgatcaaatcataccgtgaagttctcaatgaagcacaggtctttgatctgt

SEQ ID NO: 440721 - DNA, 453 bp, Triticum aestivum
cctccccgcgccggcgcgcccccggagagcggaggtggatcctggcctgggcatggatccggagtatgactatctctttaagcttctgcttatcggagactcaggtgttggcaagtcatgccttctcttaagatttgccgatgactcatacctggagagttatatcagtactattggtgttgatttcaaaatacgtaccgtggagcaagatggaaagactatgaagctgcaaatctgggacactgctgggcaagaacgcttcagaactattactagcagctactatcgaggggctcacgggatcattattgtctatgacgtgacagaccaggacagcttcaacaatgtgaagcagtggttgaacgagattgatcgctatgctagtgagaatgttaacaagcttcttgtagggaacaaatctgatctcactgacaaaagagttgtatcatatga

SEQ ID NO: 440722 - DNA, 416 bp, Triticum aestivum
gtttccggcctcagagggtatgtaaatggggccgagttccttttgaaaatcacaggtggggacaacgaggacctgaggaccgaggctttggagggctgcctcgtgtcctacgccaaggccaccctccccgggctgtcgaggtccatgaggtggcgccgcgcgtccgcgccggtgtcgtcggaggtggagcagagagacctcctggaggcggtggtcgccagcctcccggcggacaagggctcggggagcgtggtgaccgcgaagttcctgttcgcgctgctgcggacggcgcacatcctgcgcgcttcggacgcggcgcgcgccgcgatcgagcggaaggccgcgacgcagctggaacaggcaacggtggaggacgtgctcatcccgagctactccggcgccgcggagacgctcta

SEQ ID NO: 440723 - DNA, 241 bp, Triticum aestivum
ctggtcgaaccagacctggcggaagaccttgacgatgcaatcgtagtgctcgtcggcgttgaaggcgaggtaacacgccagcagccgctccagctcctccggccgggcgtcggtccccccgctgctcgcgatcatctcggacatcgactccctgaacgcccgctgcgggtcccgcgtccgccgcaccactgagaggctctccagctccggcgccgaccgccgcggcgaccgcaccttcacc

SEQ ID NO: 440724 - DNA, 466 bp, Triticum aestivum
ggttccactcccctccccattcctacccacccagcatctgggcagtaactctcctccctcccacgcggcgcgcccgctcgccgcgcgcgcgaatctcggtcgcaactggtgtactgttgaaggaaggaaaaatcatcctatttgtcatggcgggaactgactcctcggcgtcatcgagacaaagcagtttcaactcattagcaaaggacctagaacttcctttggagcaagggtgcctcaccatcgttgtacttggggcttctggagatcttgccaagaagaaaacgttcccggcactctaccacctttttgagcaggggttcttacaatctggtgaagtgcatatagtggggtatgcgagaacaaatctttctgatgatgggttgagagggcgcatccgtgcataccttaaaggagcctcagaggaacatgtttcagaattcttgcaattgataaaatatgtcag

SEQ ID NO: 440725 - DNA, 381 bp, Triticum aestivum
acttcttgtttgaggtatccgttcgaacatatttcccaggtgccgtcttaaccattttgctggagcacaaagataccaggatgtaaagaaagttctcgcagacacattctttggtcctcctgaagttggtgtatatagcccatcagtgcagaatacattatacctcatggctagggaagttcttaccaggttcccagacatagcgtcagttcagcttaggatgccaaacctccactttctcccggtgaacctatcagggaaagaaaatccaggattggtgaagtttgctgatgatgtgtacatgccaactgatgaaccacatggaaccattgaagcaacactgagccgcgccaactcaaagctgtaatattttatttttct

SEQ ID NO: 440726 - DNA, 416 bp, Triticum aestivum
gttatttgtttccagtgaagaacgcgaatggctcagcctgggacaccttcaatagcgccaaagtgatgctgctccgactccacagcagatgggtagtcgctgctggcggcttcctgacccattctgtgcccttgtacatgacaggcgtcgaggtttctccgctcagctcctacgccggagaaaacctggaggcgatctgccgcggacggacattccacgcgcccagcgagatctcgttctaggcgcatcagttcacgacagtggcagcaaatggaggaagcagtattgcacagggattgcaaggtcgaacgaatgctcgcagttgacattggttgtattgagctgagctctttgagctattggcattagggttttcaggtactgggcagactgttgtatcttttgtgagtaaattg

SEQ ID NO: 440727 - DNA, 413 bp, Triticum aestivum
tcggtttgtacgaggcacacctctgggacaggaccagccaggttgaggggcgcaagcgcaagggcaagcatgtgtacttgggaagctatgttactgaagagaatgctgcaagggcacatgaccttgcagccctgaaatattggggcataactcaacccaccaaactaaacttcaatatttctgattatgcaaaagaaattgagatcatgaagagcatgaatcaagatgaatttgtggcctacataaggaggcagagtagttgtttctcaagaggaacatcgtcatacaggggtgtaacaagacgaaaggatggtaaatggcaagcacgtattggtaggattggtgagagtagagacactaaagacatctatcttgggacctttgaaactgaagtggaggcagctgaagcgtat

SEQ ID NO: 440728 - DNA, 454 bp, Triticum aestivum
gttgcaaggtgcagctgaagcggatagagaacagggtaaattggcaggtgaccttgtgcaagcgccgcaacgggctcctgaagaaggcgcacgagatctccgtcctctgtgacgcggaggtcgccgtcatcgtcttctcccccaaaggcaagctctatgagtacgccaccgactccagcatggacaaaattcttgaacgttatgagcgctactcttatgctgaaaaggctcttatttcagctgaatctgaaagtgagggaaattggtgccacgaatacaggaaacttaaggcgaagattgagaccatacaaaaatgtcacaagcacctcatgggagaggatctggattctctgaatctcaaagaactccaacagctggagcagcagctggagagttcattgaagcacatccgatcgagaaagagccatcttatgatggagtccatttctgagct

SEQ ID NO: 440729 - DNA, 400 bp, Triticum aestivum
tttcgcttttcctccccttccggttcgggttggggttcggttcaagttcggttggggagagaggccgagtagctagcctagtctagggtttcggtagagaggaagtgagatccatggcggagacggagtaccgctgcttcgtgggcggcctcgcctgggccaccgacgacaacaacctccagcaggccttcagccagtacggcgagatcctcgacgccaagatcatcaacgaccgcgagacggggaggtcccgtgggttcggcttcgtcacgttcggcagcgaggagtcgatgcgccaggccatcgaggagatgaacggcaaggagctcgacgggcgcaacatcaccgtcaacgaggcccagtcccgccgctccggcggtgggggcggcggcggcggcta

SEQ ID NO: 440730 - DNA, 478 bp, Triticum aestivum
cttagccagcagaggagaaagcttggctcacctgtgcacttttagagccatggggggcaagcacctgtgcctggtgaggttcaaggagggcgtggtggtggaggacatcattgaggagctcaccaagctcgccgcggagctcgacaccgtcaaattcttcgggtggggaaaggacgtgctgaaccaggaggcgctgacgcagggcttcacccacgtcttctccatgagcttcgccagcgccgaggacctggcggcgtacatgggccacgagaagcactctgcgttcgccgccaccttcatggccgtgctcgacaaggtggttgtcctggacttccccttcgtcgtcgccaagccggtgccatcgcctgaggccgcttgaatgatacaccccaccccagtatctatctgttactacttcctccgtctaaaaaagcttgaatgatatatacaccccaccccactgtctatctgttactac

SEQ ID NO: 440731 - DNA, 477 bp, Triticum aestivum
  unsure (1)..(477): unsure at all n locations
ctttacgcgtccggcgcaaatggggtcgggatctgttcacattgaaactcggcagggggctanacaatctcgccgggcccatagtttcactcgcttatcctctgtatgcgtctgttcgagcaatagaaacaaaatctcctattgatgatcagcaatggctcacttactgggtgctgtactcgtttatcactctgtttgagctcacttttgctgcagtaattgaatggctccctttctggtcttatggaaagctgtttttcaattgctggttggtcttgccctactttaacggtgctgcgcatgtttatgagcattttgtgcggccaatgattgtgaaccagcaggttgtaaacatctggtatcttccaaaaaaggaaggttcagacaaacctgacgatgtaatttcagctgcacagaaatacattgaacaaaatggatcaaaagcatttgagactctcgttaacaagtttaagacta

SEQ ID NO: 440732 - DNA, 384 bp, Triticum aestivum
cctacgcgttcgtatcttccttgattagttttgtaagctgggcatcattgatggagtactcggcgaagctagtggtgctgctcgtagctctcatgtcggccatggcggtcacggcccaaaactcggagcaggacttcgtggacgcccacaacgcggcgcgcgccgacgtgggccttggggaggtgacatgggacgctacggtggcagccttcgcgcaggactacgcggatcagcgccgcggcgactgccagctgatccatactcctgatggccggccgtacggggagaacctctacggaggcggcgggaccgagtggacggcgacggacgccgtgaattcgtgggtgtcggagaagcagtactacgaccacgacagcaacacct

SEQ ID NO: 440733 - DNA, 450 bp, Triticum aestivum
cttgcccataatcgcgaggcagcacgaaaaagtcgtctgaggaaaatggcgtatgtacaacaacttgagagcagtaagctaaaacttgcaagcctggaacaagaactccagaaagctcgacagcaaggaatcttcatttctagctctggggatcaaactcatgctatgagtggaaatggagcgatgacatttgatttagaatatactcgatggctagaggagcaaaataagcagataaatgagctgaggactgcagtaaatgctcatgcaagtgatagtgacctccgtcttattgtagatggaataatggcacattatgacgaaatattcaagctgaagggcgctgctgcaaaggctgatgtgtttcatatactttcaggcatgtggaaaacacctgctgaaaggtgttttttgtggcttgggggtttcgttcgtctgagcttttaaagc

SEQ ID NO: 440734 - DNA, 443 bp, Triticum aestivum
atttaggtttgttccaaggttccaagagttgactaccggggggcttttgaaggctggatggggcacagagaagtcatttggaacaacaaaagatcggatgctatacatcgagaagtgtgccaattccaaagctgtaactattttcatccgtggtggcaacaaaatgatgattgaggagaccaagcgaactattcatgatgctctatgtgatgcaaggaatctgatcatcaacaactcaattgtgtatggtggtggctcaccagaaatatcttgctcaattgctgttgatgctgcagcagatcggcatcctgaagttgagcagtatgcaatcagggcatttgctgatgctttggatgccattccactagctttagctgaaaacagtggtttgccgtctattgatactctcactgtcgtaaaatcccaacatgtcaaggagaaca

SEQ ID NO: 440735 - DNA, 422 bp, Triticum aestivum
tcgctttcctccactctcgatcgccggctcgtccaggggccgccttcaaagagaagccgggaatgctgctctcaccgtcgccgtagccggggaagaaatcgacgaggccgtagccggggaagaaatcgacgaggccgcctctcgggctcaggctgacatgtcggagatcatgtcgtcgctcccacggtgcccggtgtaccttactcaccactaccgcggcttctggatccgcgagttcgtcctcaagggcatggccgccgctcaggcatccttcgagccaaggccaaccgacgtcttcctcgccagctgccccaagtccggcaccacctggctcaaggcgctcgcctttgcgacgctcaaccgcgccacgcacttgccgtgcgactccaaccacccgctatgccaccgcaacccgcacgact

SEQ ID NO: 440736 - DNA, 496 bp, Triticum aestivum
  unsure (1)..(496): unsure at all n locations
tttcgattgcccccttccattcctcccctccttgtccccaccctctctctctctctctccgtccgtctgtccgtccgcgcgcgctctgcgttctttgggaggggggaaatggcggcgaagcgcgagctggtggtcagcttcggggagatgctgatagacttcgtgccgacggtggccggggtgtcgctggcggaggcgccggccttcgtcaaggcgcccgggggcgcccctgccaacgtcgccatcgccgtcgcgcgcctcggcggcgccgccgccttcgtcggcaagctcggcgacgacgagttcggccgcatgctcgccaacatcctccgcgacaacggcgtcgacgccggcggcgtcgtcttcgactcgggcgcgcgcaccgcgctcgccttcgtcacgctgcgcgccgacggngagcgcgagttcatgttctaccgcaaccccagcgccgacatgctcctcaccgccgacgagctcaaggtcgacgtcatca

SEQ ID NO: 440737 - DNA, 475 bp, Triticum aestivum
cttacgcgtccggcgcaaatggggtccggatctgtcctcattgaaactcgtcaggggcctggacattctcgccgggcccatagtttcactcgcttatcctctgtatgcgtctgttcgagcaatagaaacaaaatctcctattgatgatcagcaatggctcacttactgggtgctgtactcgtttatcactctgtttgagctcacttttgctgcagtaattgaatggctccctttctggtcttatggaaagctgtttttcaattgctggttggtcttgccctactttaacggtgctgcgcatgtttatgagcattttgtgcggccaatgattgtgaaccagcaggttgtaaacatctggtatcttccaaaaaaggaaggttcagacaaacctgacgatgtaatttcagctgcacagaaatacattgaacaaaatggatcaaaagcatttgagactctcgttaacaagtttaagact

SEQ ID NO: 440738 - DNA, 332 bp, Triticum aestivum
  unsure (1)..(332): unsure at all n locations
ctttgcgttcggtcttcttggaccctgcttctntggcgtcctcaacgctgcgagcggctatcgacaatcttttctccgttcaagatgaccatcatcatcgagcagcctcagtttgatgcggcggcggagaggaaggtcgccggcgaccagggggagctcgtgctcgacggcggcttcaccgtgccggactccaacgccttcggccacaccttcagggactacgacgcggagtcggagcggaagaagacggtggaggagttctaccgcgtgaaccacatcaaccagacgtacgagtttgtgcagcggatgcgggatgcatatgggcggctgga

SEQ ID NO: 440739 - DNA, 473 bp, Triticum aestivum
tgttagcattgatatagctttcaattggacaggagcacagggtgtctttacacctcctttggggtgcagtgataaatccacattacgcttttctatctgggggttttcgaactatgccacccgtcacgtatttgacacccaacttccgttattggaggggatcaatcgtatacaaattccgattcatcaaaacggcctttcataaaggtcgtgttttgatttctcacgatcccaacggagatattactggtacatcagataccgagaccacaactttttcgcgagtagtgcatttggagcaggaaactgaactagaatttgcagtcccctacaaggcaacatcgcctatgttggagattgttgattttgcctcttttccccttaccaattccacctcagcagcacctgcttacgtgtacaattcacgttggtataatggtactattaccatgcgcattcagaccaatctcaca

SEQ ID NO: 440740 - DNA, 297 bp, Triticum aestivum
cttgttttttcattgcttgtgcaccatgcacctagatgaggggcctcttaggggttttgtgggagagactgacaaaaacagtgaaaacaagcactatctttacacgcacaaaatcattattgtaaagtacaacgataacaggataattcatgttaatctcacccaagagtctcctaagctccttgacgctggtaagaacttggacatgacatattcaacgaagtgggtaccaacagatgtttcatttgcacgccgttttgaagtttacctggactatactttctttgaacaccagat

SEQ ID NO: 440741 - DNA, 509 bp, Triticum aestivum
tcgcctcgcgtccgctcaacttacatccacgagcccgggtactttaaggacatgaccatgtccccgcctggcccacacgcggtgaagaacgcctactgcttgctcaactttggagacagcattaccacggatcatatttcacccgcaggcagcatccacagggacagtcctgctgccaagtatttgcttgagcgtggcgtggaccggaaagacttcaactcgtatggtagccggcgcggtaacgatgaggtgatggcaagaggaacatttgcaaacatcaggattgtgaacaagtttttgggtggagaggttgggcccaagactattcatgtgcccacaggggagaagctctctgttttcgatgcagccacgaaatacaagtctgaaggtcatgatacgatcattcttgctggcgccgagtatgggagtggcagctctcgtgattgggccgccaagggaccaatgcttctcggtgtgaaagcggtgatttccaagagctttgagcggat

SEQ ID NO: 440742 - DNA, 418 bp, Triticum aestivum
tttcgatttgagtgctcgctgctccctcctcggggtccgggaagattctacttcggcccctgccgatctccaaggcgacgtcgccgtcgccgtcgccacgcgccagatctcctccacgcgctcgcggtgcgccttcgccgcctgcgcgatctgcccggctaagatggcgacctatgagcccaagaacatcctcataactggtgctgcgggtttcattgcatcccatgtggcgaaccgtctaattaggagctatcctcactacaagattgtggtactcgacaagattgactactgctccaacctgaaaaatctcaacccctcccggccatcgacaaatttcaagtttgtcaagggcgacatcgcaagtgctgacctggtgaactatcttctcatcactgagtcgatcgacaccatcatg

SEQ ID NO: 440743 - DNA, 464 bp, Triticum aestivum
tcgctcacgcgtccggtcaacttcctcgtcgccaccacacgaccgcacctctcccatggcgtcctcctcgccgccgcacgtcgtggaggacgtgcccccgttcctgcagctcctcagcgacggcacggtgatccgcttcacggacggctacccgctcccgatcccgtcgccgccgcccggccagcccgtcgtcgactggaaggacgtcgtgtacgacgccagccacggcctcaagctccgcatctacaggccggcggcggcctcctcctccgggaacaagctcccggtgatcgtctacttccacggcggcgggtacagcatcggcagcttcgacatgcccaacttccacgcgtgctgcgtccgcctcgccggcgagctcccggctgtggtgctctctgcagactaccgcctcgcccccgagcaccggttccccgcgggcctcgacgacgcggcgaacgtcgtgt

SEQ ID NO: 440744 - DNA, 472 bp, Triticum aestivum
tttcgcttacgcgtccgcggacgcgtgggtcacaattagaacacttgaattctttacggttttctttcatatcaatcatattcatgtctaacatttgcttgtgagctctgatacatgctctcttacttcaacaataactctacagaaaaataatgtgtccaatcaaagagaacatctcatactcttgattggcagcatacatataaggcagatctccaaacatgaacaacacccaaagttagatgaccatgtgttggatacaacaatgaacaagctattcaagaactacaagagatggtgcaagcaccttggccgcaaaactagcttatggttgccggcaattcaacaagaagtacaacagcggaagcttctctatatgggcctttatctgctcatatggggcgaggcggctaacttgtggtttatgccggagtgtctttgctacctctatcatcatatggcttttgaattg

SEQ ID NO: 440745 - DNA, 319 bp, Triticum aestivum
cctacgcgtccgcccacgcgtccgcggcacgctggccccctgtgacgccgccggcggaacggcgtcgccttctgcggcacgctcgccggccagctcttcttcggctggctcggcgataagatgggccgcaagagcgtctacggcatgacgctgattctcatggtcatctgctccatcggctccggcctctccttcgcgcacacccccaagagcgtcatggccacgctctgcttcttccgcttctggctcggcttcggcatcggcggcgactacccgctctccgccaccatcatgtccgagtacgccaacaagaagaccc

SEQ ID NO: 440746 - DNA, 344 bp, Triticum aestivum
cttacgcctcaaacagaaataggaagacgagagaacagaagagccaaagacactaaaacgaaatggcatcctcctcttcctttctcctccttgctgcacttcttgcgttagtctcatggcaggccactgcttctgatcctagcccactccaggacttttgtgtcgccgacatgaattcaccagtccgtgtcaatgggtttgtttgcaagaacccgatggaggtcaatgcagatgacttcttcaaggcggccaacctcgacaagcctagggtgcccaacaaggttggatccaacgtcactttgatcaacgtcatgcagattgctggactgaacaccctcggcata

SEQ ID NO: 440747 - DNA, 378 bp, Triticum aestivum
cttacgcgttcgcggacgcgtgggcgacgccgcccgggagggcgcctttgacgaggacatgggcaaggtcggggagtcgctctttgggccctatgagtgggagagattcgatctgctggtgctgccgcccagtttcccctacggcggcatggagaaccccaggatggtgttcctcacgcccacggtgatcaaaggggacgctgcggcgcacgtggtggcccatgagctcgcacatagctggactggaaacctcatcaccaacaaaaccaacgaggacttctggctaaatgagggtttcacaacatatgctgagaggaggattgtcaaggtggttcaaggtgaggagcgggcggccttaaacagcggaattggatggag

SEQ ID NO: 440748 - DNA, 469 bp, Triticum aestivum
cctcgcgttcgcccacgcgtccgctgggatccatgatgactgcaagctgaggtttgtggagctcaagtccaagaggatgcaccgcttcataacctacaggctggagaaccagaaggaggtcattgtggaccaaactggggagcgcgaggccacctatgaggagttcaccaagaccctccctgagaatgactgccgattcgcggtgttcgacttcgacttcaccaccccggaggatgtgccaaagagcaggatcttctatatcttctggtccccggacaccgcaaaggtgaggagcaagatgacgtacgcgagcaccaacgagaagttcaagaggaccctggacggcatccaaatcgagatgcaggccactgaccccagcgaaatcagcctggacgtgatcaaggagcgcgcgcactaaggcaaatcatcccaatgcctcgcaatatggatttatgtcaaatatagattt

SEQ ID NO: 440749 - DNA, 478 bp, Triticum aestivum
  unsure (1)..(478): unsure at all n locations
ctttagatttcacgaaggttaatgccgctgaggcatttaggatcgccggcattcagcatggcttcttcgagctgcagccaaaggaaggcctagccatggtgaatggcacggcagtgggctcggggcttgcatccatggtgctttttgaggctaacatccttggcctccttgccgaggtcctgtcagccgtcttttgcgaggtgatgaacggcaagccagagtacaccgaccacttgacccacaaattgaagcaccaccccggacagattgaggctgctgctatcatggagcatatcctggaaggcagctcctacatgatgctcgcgaagaagctcggtgagcttgacccattgatgaagccaaagcaagataggtatgcactccgcacatcgccacagtggcttggcccttagattgaggttatccgtgctgccaccaagtcgatcgagcgggaaatcaactncgtcaacgacaaccc

SEQ ID NO: 440750 - DNA, 411 bp, Triticum aestivum
gttagcctttgtcaaatcgagctccagctactgagtgagagtgaagtttctagccggaggagagagatagaagtatgggtatggggtggaaagttctgagcgatgtgaagccatacctggcgatggtgctgctgcaggtggggttcgccgggatgtacatcatcgccggggcgtccctcaaggcctggatgagccacttggtcctcgtcgtctaccgtaacctgatcgccaccgccgtcatggcgcccttcgccctctacttcgagaggggacggaggccaaagatgacaaccaccatcttcctcaagatcatggggctcgcaatcctggagcccatgatcgaccagaacctctacttattgggagcgaagctgacctcggcgggattcgcaacggcgctactcaacaccc

SEQ ID NO: 440751 - DNA, 396 bp, Triticum aestivum
gttcccgctgtacgagcggctgctggaggggcaggtcaacttacagcgcggggccgcccccgtcgaccagctgccccgcatcgacgcgcagatcgccgcgcgcgccccgccgcccatgccccccgccgccgcgcccgcgggcggcgaggagctcgacctcttcatgacacactatgtgctgctcctctgttccttcaaggagcagctccagcagcatgtgcgcgtccacgccatggaggcggagatggcctgctgggagctcgagcagactttgcagagtcttacaggggcatctcctggcgaaggcaccggggcgactatgtctgatgatgaagacaacccggtcgacagcgagagcaacatgtttgacggaaacgatgtgtcagatggcatggg

SEQ ID NO: 440752 - DNA, 402 bp, Triticum aestivum
cctacgcgtccgcctgctactgctagtacgttccaggatcaccggagccccgggagaagagcaaagcgtagcggaggagggagagggggagagagatgaggtggacggcgttcgcgtgggagagcgcgtcccgggccttcaacaaccgccccaccttcaccggcctcgtcgtcgtcctcgccgcaagtagtggaggaggcctcgtcgcatatgcggactctcagccggaccagccccaaggatttaaaaagaagaaagtagtggttcttggaactggctgggctggcaccacattcctgaggaatcttgatagcaaactgtacgatgtccaggtcatttcacctcggaactactttgcattcacacccttgctcccaagtgttacctgtggaacagttgaac

SEQ ID NO: 440753 - DNA, 429 bp, Triticum aestivum
tgttcggttctgccagccagcgagcgagcgcaatgcctagcgccgaggcccattcccccgtcgtccttccccgcccattccacgatccctcggccgcggtcgggtcgccatgggaatggggccgctcgagaacgccgccgccgtcgtcgagggcggcgtcgccgccccggtggtgccggtggtgaccgcggcggcggcgggaggggggtcgtacgcgctgctgcagtgcggggaggactcggcgtacgtgcgggacgcgtacgggggctacttcgaggtgttccgcgcgctgctggccgaggacggcgagcgctggcaggtgtaccgcgccggcgccggcgagctgccgtcggaggaggacgcggcggggctcgacgggttcgtcatctccggcagctgcagcgacgcccacggcgacgagccctggat

SEQ ID NO: 440754 - DNA, 318 bp, Triticum aestivum
cttcagtcttttgcaggatatcatgggctgtgggggtatgggcataatctacggcggctacggggatcggtggcgccagatgcgcaagatctgtatcgtggagcttctcagttccaagcaggtgaggcgtatggagggcatcaaggccaacgaggtaggtaacctcctccattccatggccgccgccggtgctaccgtaaatgtgagcgcgaagatggcaacactcagcagcaatgtcgtgacgcgagcagttttcggcggcaagttcacacggcaggatgagtacctccatgagctaagcaaggtgaacgagcttat

SEQ ID NO: 440755 - DNA, 312 bp, Triticum aestivum
cttaactgttccggcagaatagtactgcctttggggactggtcgaagttcaccgaggagtttgtgaccttctacttgcaccttaaacctgcaactatactacgctaatggagaagatgcgggcagcatgggaggcgccgcctacgcaacaactgcctccggggttccggttccaccccaccgacatggagctgctgctgcagtacctccgccgcatggccctggaccgcccgctgcccgccgccgtcatccccgtcgtccacgccgccgacatgcccgacccctgggacctccccggcgcgagcgaggggga

SEQ ID NO: 440756 - DNA, 246 bp, Triticum aestivum
  unsure (1)..(246): unsure at all n locations
gataaagataacagagagaggggaagagcacacgggcccgggaaatatgaacacgggcgggagaaaacaaaacgcgacnggcgagtttttccggcgccgtgactagtggaggaggcaccccacgggggggaaccagctgcgccacgccactccggggctaggcatcgccatcgtcgcctttggtatctaccttgtccgcgaggcctcctacaaccgcctctaccgccccgccggccacaaccacca

SEQ ID NO: 440757 - DNA, 396 bp, Triticum aestivum
cctacgcgtccggccgggagagaagatggggcaggggacactggaagtgctgctggtgagaaccaaggccctcgagaacaccgactacctctgcaacatggacccgtacgcggttctaaaatgcacctcgcaggagcagaagagcaccgtcgcctcaggaaagggaagtgatcctgagtggaacgaaacctttgtgttcaccgtctctgagaatgcaaccgagctcgtcatcaagcttctggacagtgatggtggcacggacgacgacagcgttggtgaagcaacgatcccattggatggagtgtacactgaaggaagcatcccaccaactgtttacaatgttgtcaaagacgaagagtaccgtggagaaatcaaaatcggtctgacgttcactcc

SEQ ID NO: 440758 - DNA, 255 bp, Triticum aestivum
gccaggcccaatcgccaaaaaccctagcgccgatccgatccgatcgagctctgcctcccctcccatggcggcccccccgagccaggcgagcctcctgctccagaagcagctccgagatctagcgaagaaccccgtggacgggttctcggcggggctggtggacgacggcaacgtgtttgagtggcaggtcaccatcatcggcccgcccgaaacattatatgatggaggctacttcaatgcagtaatgaccttttc

SEQ ID NO: 440759 - DNA, 238 bp, Triticum aestivum
catatttgaggtgccaccatgttcaacaggttatttgggaagcccaaggagcaggccaacgccggcgcgttggccactttggataagttaaacgagactcttgatatgctggagaagaaagagaaagcgctagagaaaaaagcaggcgctgagcttgagagggccaatgaattctcaaaagcaaagaatataagagcggctatccaatcattgaagaggaaaaaactctatgagcagc

SEQ ID NO: 440760 - DNA, 229 bp, Triticum aestivum
cccgacgctgagttcccgtcggctcgtccgggaagagcagttcgccgccgttgaagcgccctccccggtcgctcgccgccatgaagaaggttgtgctcaagctggatgtgcacgacgacaggcacaaggccaaggcgctaaaggccgtctccggcctccacggcatcgaccagctgggcgtggacatcaaggaccagaagatgaccatcgtgggcaccgtcgaccccgt

SEQ ID NO: 440761 - DNA, 273 bp, Triticum aestivum
aacactcattttggcattgaacaaagtcgaagagatgacttggaatctcttggatatgtacttatgtacttcctacggggaagccttccttggcaaggtctgaaagcaggaacaaagaagcaaaagtatgagaagatcagtgagaaaaaagttgcaacatcaattgaggctctgtgtcgtgggtattctactgagttcacatcatatttccattattgccgctcgcttcggtttgatgacaagcctgattattcctaccttaagcgactgttc

SEQ ID NO: 440762 - DNA, 136 bp, Triticum aestivum
tgagatggtccccgtcgttgagcgcctcaagaccggcttctagaagttcaagaccgaggtctacgaccagaagccggatctgttcgagcccctcaaggcccaccagtcacccaagtacatggtgttcgcgtgcgct

SEQ ID NO: 440763 - DNA, 192 bp, Triticum aestivum
gggtgataacagggatggctaccggtagtgatgctggaaagtccgctgaggcagtgttggagtggcctaagcaggacaaaaagaggatgctgcatgctgtttaccgtgtgggagatctcgaccgcacaattaagtgtttcacagaatgctttgggatgaagctgctgaggaaaagagatgtcccctaagaga

SEQ ID NO: 440764 - DNA, 449 bp, Triticum aestivum
cattttcgccccttcctccctccctcctcctcctcgcgcgtcctgatccatcatccagcccaggtgattaaggtcgccatgtcggactccgaggaccaccacttcgagtccaaggccgatgccggggcgtccaagacctaccctatgcaggccggcgccatccggaagggcggcttcctcgtcatcaagaaccgcccctgcaaggtggtggaggtttctacctcgaagacaggaaagcacggtcatgctaaatgccactttgttgccttagatatattcaatggtaaaaagcttgaggacattgttccttcatcccacaactgtgatgtgccacatgtggaccgtactgagtatcagctgattgacatatcagaggatggatttgtgagccttcttactgataatggtagcactaaggatgatcttaaactcccaactgatgatgctat

SEQ ID NO: 440765 - DNA, 413 bp, Triticum aestivum
gtgttcgcatcgcaccgcacaccaaccaaacactcgcctgccttccttccttccttgttcgttcctcgacgcacgcacgcagatctcatccatccaagccaaggcaggtcaggtcaggtacgagatggctctcaccagaattggtctcgctggcctcgcggtcatgggccagaaccttgccctcaacattgccgagaaaggcttccccatctctgtctacaacaggacaacgtccaaggtcgatgagactgttcagcgtgccaagctagaaggaaaccttcctctctatggtttccatgaccctgcatcctttgtcaactccattcagaagccacgtgtcgtcatcatgcttgtcaaggctggtgctccggtcgaccagaccatcgcaacgctcgcagcacacctggagcaag

SEQ ID NO: 440766 - DNA, 333 bp, Triticum aestivum
tctaggagaaagagagtttgttagggacaatggatcccttggtagcttcaggcttgatggaattcctcctgctccgcgtggtgttccccaaattgaagtcaagtttgatattgatgccaatggcattctgtctgttgctgcggtggataagggcactgggaagaagcaggacattacgatcactggagccagcacactgccaaaggatgaggtagagaagatggtggaagaagctgaaaaattcgcggcggaggacaaggagaagagggacgcaattgacaccaagaaccaggcagagtctgtgatctaccagactgagaaacaactgaagga

SEQ ID NO: 440767 - DNA, 283 bp, Triticum aestivum
tttcacgcgtccgcggacgcgtggcggacgcgtgggcaagaatgtagccgtggaagttgccgacaagctctgtgaatcaggcgcagccagcctcctaggcaagaagcttggatcgttcacacggatatcctgttctgttcaggcagctatggaagaggctttggttcgcattttgaccccaaggcgagctattgacgtactgacagatgctcatgctgccaacgaccgtggtacgccgtatgtcataccctttgttggggttaatggggtaggcaaatccact

SEQ ID NO: 440768 - DNA, 293 bp, Triticum aestivum
tttacgcgtccggaccctcgagaggcggccgaaccgagcagacgccatggaccgcgagtggggctccaagcccggcagcggcggcgccgccaccgaccagaatgaggccattgaccggcgggagcgcctgcgccggctcgcgctcgagaccatcgacctcgccaaggacccgtacttcatgcgaaaccatttgggcagctatgagtgcaagctctgcctgacgctccacaacaacgaggggaactaccttgcgcacacgcaggggaagcggcaccagaccaacctcgccaagc

SEQ ID NO: 440769 - DNA, 345 bp, Triticum aestivum
attttgggatggagcctatgaaggtgtacggctgggcggtgtcgccatggatggcgcgggtcctcgtctccctggaggaggccggcgccgagtacgagctcgtgcccatgagccgcaacggcggcgaccaccggcggccggagcacctcgccagaaaccccttcggtgagatcccggtgctcgaagacggcggtctgacgctttaccaatcccgcgccattgcaaggcatattctccgcaaacacaagcccgggcttctaggagcaggcagcctctaggagtcggcgatggtggatgtatgggtcgacgtggatgcccaccagctggagcccgtactcaagccca

SEQ ID NO: 440770 - DNA, 392 bp, Triticum aestivum
ggttttcttgttggcgctatgctcccgtactggttctctgcgatgaccatgaagagtgttggaagtgcggttctcaagatggtggaggaagtgcggaggcagttcaacaccatccctgggctcatggagggcaccgccaagcccgactatgcgacatgtgtgaagatctccactgatgcgtccatcaaggagatgatccccccgggtgctcttgttatgctgacacctcttattgtcgggaccttcttcggtgttgagaccctctctggtgtccttgccggtgctctggtttctggtgttcagattgccatttcagcatcgaacaccggtggtgcctgggacaacgcaaagaagtacattgaggccggcgcgtctgagcatgcaaagagcct

SEQ ID NO: 440771 - DNA, 413 bp, Triticum aestivum
ctttttccttaagcgcatggttgaattccatgcggactcggagacaacagacatctatgtcattaagaaggttgacaacagggtaaagagctctgtagcagattccagcactcctgcagattctgctataatagggactactccagatggatctaagcggcaaaagatatgtgcaagttgggagaacacaatcactggagttggccaagtatttgagggtccaaaggaatttcgtgatgcattgcacaagtatgccattgcacataggtttcattacagatttgtcaagaatgactcttctcgtgtcactgtggaatgtactgatgaaggatgtccctggcgcatacatgcttccaaatcttctgcaaatcaggagttcatgatcaagaaagtggttgggagccatacatgtg

SEQ ID NO: 440772 - DNA, 390 bp, Triticum aestivum
atttttagtactcctggagtcagtgcaatcctttttgatgcgctagcaaaggcaaacattaatgtacgagcaatagctcaaggctgcagggagtacaacactactgttgtattgaaacatgaagattgtgttagggctctaagagctgctcactcaaggttcttcctctcaaaaaccacacttgctattggggtcataggacctggtttgattggggcaacactgctcaaccagctcagggaccaggtagcaatcctgaaggaaaatatgaatattgatgtgcgtgtcatcggaataactggcgcaagcacgatgcttttgagtgaaacgggagtagacctaaccaggtggaaagaagaaatgcaaaaggaagcaaaaccagctgatctt

SEQ ID NO: 440773 - DNA, 412 bp, Triticum aestivum
cttacgcgtccgcccacgcgtccgcaagaagcagcagccatggcgacgcaggccgccttcgcagtgaggttcccgcagctggcgcggccgggcaggggccatggccagggacagccggcgacgcgggtcgcggtaaggggcggcagggccgcggcggcggcggcgcgcggggtgcggtgccgggccggcggcctgatcgagccggacgggggcaggctggtggagctggtggcgcccgaggagggcggccggcgggcggcgctgcgccgggaggcggcggcgctgccgcaccgctgcgcctgggccgcgtggacaccgagtggctgcacgtgctcagcgagggctgggccagcccgctgcgcggcttcatgcgcgagaccgagttcctccaagcacttcatttcaacgccgt

SEQ ID NO: 440774 - DNA, 304 bp, Triticum aestivum
ttttcgcgtgggtccctctgccatcccctctctccccaccactcgtcgccgccggcggcgacgttcaatcttcggcgagatcccctcccccgccggcaggcatggcctccaccttcagcggcgacgagaccgaccccttcttcggcttacttggcgccgccgccgccctggtcttctgctgcatgggggcggcgtacgggacgggcaagagcggggtgggggtggcgtagatgggggtgatgcggccggagctggtgatgaagtccatcgtgcccgtcgtcatggccggggtgcttgggatcta

SEQ ID NO: 440775 - DNA, 379 bp, Triticum aestivum
ggggcaaggacggcatcctggcgacgacgggggccaagaacagcatccgggcgatacggtacaagatcagcgcgagcgtggaggagagcgggccgcggcccgtgctgccgctggcccacggggacccgtccgtgttcccggccttccgcacggtcgttgaggccgaggacgccgtcgctgccgcgctgcgcaccgggcagttcagctgctacgccgccggcgtcggcctgcccgccgcacgaagcgctgtagcagagcacttgtcacagggcgtgccctacaagctatcggccgacgacatcttcctcaccgccggtggaacccaagcaatcgaagtcataatcccggtcctggcccaaactgccggcgccaacatact

SEQ ID NO: 440776 - DNA, 381 bp, Triticum aestivum
tgtggggcaacgccctctaccccgtcgtcccggggcatgagattgttggcgtcgtcaccgacgttggccccggcgtcaagaacttcaaggccggggacacggtgggcgtgggctacttcatcgactcatgccgatcctgcgtgagctgcggcagcgggcacgagaaccactgccccacgctcgtgctcacctccaacgccgtggactacgacggcgccaccacccagggcggcttctccgacgtcctcgtcgtcgaccagggctacgtcgtccgcgtcccggagggcctgcccctggacggggcggcgccgctgctctgcgccggcgtcacggtgtacagccccatgatggagttcggcctcaacgcgccggggaagcacc

SEQ ID NO: 440777 - DNA, 433 bp, Triticum aestivum
cctttccccaatctcccgtcgcagccctcgaatctccccccgagcatcgaccatgtcggcctactgcggcaagtacaaggatgagctcatcaagaacgctgcctacattggcacccctggcaagggtatccttgctgctgatgagtccaccggcaccatcggcaagcgcttcgccagcatcaatgttgagaacgttgaggacaaccgtcgtgccctccgtgagctcctcttctgcacccctggtgccctccagtacctcagcggtgtgatcctgtttgaggagaccctgtaccagagcaccaagggtggcaagcccttcgtcgacatcctcaaggcgggcaatgtcctccccggcatcaaggtggacaagggcaccatcgagcttgctggaaccaacggtgagaccaccacccagggctttgatgaccttggc

SEQ ID NO: 440778 - DNA, 397 bp, Triticum aestivum
cttattaagcgcattctcgatcccaatcctcacactaggataacaatcgcccaaattttggagatgaatggttcaaaaaggactataaaccaccacattctgagcacaatgaagatgtgagccttgaagatgtcgatgctgcattcgatagttcagaggaacaccttgtggcggagaggagagagaaaccagaatccatgaatgcatttgctcttatttcaaggtctgagggattcaacctcggaaatttgtttgagaaagagatgatggggatggtaaagcggtaaacattctttgcgtcgcaacgtacaccacaagagatcatgtctaaaatagaggaagcctgtggccctcttggttcaatgtgcggaaacaaaattataagatgaaactgaaa

SEQ ID NO: 440779 - DNA, 393 bp, Triticum aestivum
tgttttcctgtggccttcctcccccgccgagccctccaaaccctaggcgccgccgggcaggaagcccatttaccagccatgtttggacgcatgccaaggaagaccagcaacaacaccaagtactacgaggtgcttggtgtatccaagacagcaaccccggatgagttgaagaaagcttaccggaaagctgctataaaaaaccatcctgacaagggcggagaccctgagaagtttaaagaattggcacaagcttatgatgttctcaatgaccctgaaaagagggagatttatgaccaatatggagaagatgcaatcaaagaagggatgggaggcaccggcggcgctgatatgcatagcccctttgacataattcaacaggtatatgggggtggc

SEQ ID NO: 440780 - DNA, 415 bp, Triticum aestivum
ttatttgtctgtgctacctaatatgaaacacaatatcgtacacaatgtatgaaaggcaaaaagaaaattcactatacaccagtatatcagccacactacatgcgcagtcgcacacaaaacttgtctgtctgtcttcaaggggcagccagctccaggtctccggtttcgctccccacctgctgctgctgctgctgctgcagctcgctcttctgcgcctccagcttcttctgctggaccttctcgccgtacatgtaggaggcgaagccccagagggagagcaccagcgcgatgccctttggcccgtcgaacttctcgtggaggaacatgacggcgaggatctgggaaagcggcaggaggaccgcgatcatgatgccggcgaggagcgaggaggcgcaagtgatgagccccatgatgc

SEQ ID NO: 440781 - DNA, 393 bp, Triticum aestivum
ccttttcgtccgcggacgcgtgggcgacatcaggtcttgatgcaagagcagcagcaattgtcatgagaacagtgaggaacactgttgacactggacggacagtggtttgcacaatccaccagccaagcattgacatctttgaagcttttgatgagttactattactgaaaagaggaggccaggtaatatactctgggaaactgggtcgcaactcacagaaaatgactgaatacttcgaggcgattcctggagtgcctaaaatcaaagataagtacaaccctgcaacgtggatgcttgaggtcagttcagttgctgcagaagtacgcctgagtatggattttgctgactactacaggacttcagatctgtacaagcaaaacaaggtattggtga

SEQ ID NO: 440782 - DNA, 466 bp, Triticum aestivum
gttttcgccaacctcctccccctccggccccctcgcgccccagccgccgccgccgtcgccgccgccgactgcagccatgtcgctgatcgcgggtgaggagttccagcacatcctgcgtgtgctcaacaccaacgtcgacggtaagcagaagatcatgttcgcgctcacctccatcaagggtgtgggccgccgcttctccaacaccgtctgcaagaaggccgacgtcgacatgaacaagagggccggagagctttccgcggaggagatggaccgtctgatggcggtggtgcacaacccgcgccagttcaaggtgcccgactggttcctcaacaggaagaaggactacatggacggtaggttctcccaggtcgtttccaacgccgttgacatgaagctcagggatgaccttgagaggctcaagaagatcaggaaccatcgtggtctgcgtcactactggggcgtgcgt

SEQ ID NO: 440783 - DNA, 381 bp, Triticum aestivum
ttttatcgcgtccgcccacgcgtccgctcccaactgggaagacattttgtccttgggagaacagcagaggctaggcatggcccgtctgttctttcactctcctaagtttggtatcctcgacgagtgcaccaatgccacaagtgtcgacgtcgaggagcatttgtacaggctagcaactgacatgggtataactgtggtcacttcctcccaaaggccagctctgatacccttccattcgttggaactgaagctcatcgacggcgaagggaagtgggagctgtgcgcaatcaaccactagccgttgccgtcgccttaatttttgatgggctttagttactctcagctgtatactgacttacatacagtacaaatagtcacctt

SEQ ID NO: 440784 - DNA, 418 bp, Triticum aestivum
tgtctgtgctcatcaccaggaacaccaccatccccaccaagaaggagcaggtcttctccacctactccgacaaccagcctggtgtgctcatccaggtgtttgagggtgagaggacaaggaccagggacaacaacctgctcggcaagtttgagctctctggcatcccgcctgcgcccaggggtgttccccagatcactgtctgcttcgacattgatgccaacggtatcctgaatgtctctgctgaggacaagaccactggccagaagaacaagatcaccatcaccaacgacaagggcaggctgagcaaggacgacattgagaagatggtccaggacgcagagaagtacaagtctgaggacgaggagcacaagaagaaggttgacgccaagaactccctggagaactacgcctacaacat

SEQ ID NO: 440785 - DNA, 443 bp, Triticum aestivum
ttttctcacacctgttttctgcacggtgctctctatgttcacatgaggagaggagaaggacaatcccttctccggctctccataccaataaatatagtcagatactgctgcatcgtctccatctagtagtggaggaagaggagaaaggggtagcagtcagccatggcgacggccaagcccatcctgtacggcgcctggatcagctcttgctctcaccgtgtccggatcgctctcaatctcaaaggtgtggactacgagtataaggcagtcaatcctcggacagatccagactatgaaaaaataaacccgatcaaatacataccagcattggtagatggggactttggtctatctgattctctcgctatcatgttgtatctggaagataagtatcctcagcatcctctagtacctaaagatatcaaaacgaaaggtctcgatct

SEQ ID NO: 440786 - DNA, 307 bp, Triticum aestivum
gatatattggcttctggatgagggtgagaagtggttaaaacctgagtacagatcttgcgggagatcaatgctgcacaaaagtgcaaaagttgaattccaccctcttggggttattggtgcaattgtatcatggaactatcctttccataatgtcttcaatccgatgttggctgcagtattctctggtaatgcagcagttataaaggtttcagagcatgcgagttggtctggctgtttttattctcgtatcatacaagcagctctgttagctgttggtgccccagataatctggttcacatagtaact

SEQ ID NO: 440787 - DNA, 411 bp, Triticum aestivum
gttttcgtgctccaagaagagcctcaggtacgccatcacggtggccaccgagacgaccatcgaccgggccacgctgagcaaggtcttcgtgagcgccttcgcgcgctggtcggcggccaccacgctcaacttcacggagacggcgtcggcgtacgacgccgacatcaccatcgggttccactcgggcgaccacggcgacggctaggcgttcgacgggccgctcggcacgctggcgcacgccttttcgccgaccgacgggcggttccacctggacgcgtcggaggcgtgggtggccggcggcgacatgtcgcgcgcgtcgctggacgcagccgtcgacctggagtcggtggcggtgcacgagatcggacacctgctggggcttggccactcgtcggtggagggcgccatgat

SEQ ID NO: 440788 - DNA, 346 bp, Triticum aestivum
ccatgcgtccggaacctgttaaaacctcttcaagtaatactggcaggcgcagatctggcagcaagataagaaaggatgcggatcatgatagaagctcctcgaagtcaccatctaacacaaaaggcaatgaggatgagtttgatgactttgatcctcgtggatcttcttcaaatggtgcagctaatacaaagactgccgaggtggatcttcttggcccaaacttgatggatgatttccttgacgagcctgcagccactccatcagcaaaaagtgctgtagaacctcaggttgatctgttttgctgatgcatacttccaatcggcaatcccaggtgccgaaacaactg

SEQ ID NO: 440789 - DNA, 374 bp, Triticum aestivum
gtgttcccaacccaaaccctaccccgccgccgccgtcgtcgtcgtagcgcgcggaggcgacctcccaccgccgccaagatgcagatcttcgtgaagaccctgacgggcaagaccatcacgctggaggtggagtccttggacaccatcgacaacgtcaaggccaagatccaggacaaggagggcatcccgtcggaccagcagtgcctcatcttcgccggtaagcagctcgaggatgggcgcacccttgccgactacaacatccagaaggagtccaccctccacctggtgctccgcctccgcggaggtgccaagatgcgcaagaagaagacctacaccaagcccaagaagcataagcacaagcacaagaaggtgaa

SEQ ID NO: 440790 - DNA, 387 bp, Triticum aestivum
tgctcctacccaacccagtaaactactgccacccatccgtcggcgaaatggcccacgcccgcatcctcctcctggcgctcgccgtcctggccacggccgccgtcgccgtcgcctcctcctccttcgccgactccaacccgatccggcccgtcaccgagcgcgccgcctcgacgctcgagtccaccgtcctcgccgcgctcggccgcacccgccacgccctccgcttcgcgcgcttcgccgtcaggtacggcaagagctactagagcgcggcggaggtgcggaggcggttccggatcttctccgagagcctcgaggaggtgcgctccaccaaccggaagggccttccctaccgccttgggattaaccgcttctcggacatgagctggg

SEQ ID NO: 440791 - DNA, 412 bp, Triticum aestivum
acagcataccttctgagactcgagtcatcatcaacgcatgggctattggcagagaccccgggtactgggacaagccggacgacttcgtgccggagaggttcctcgagggtggcgccgcggcagcggtggacttgacgggcaaggactttcagttcgtgccattcggggctggccggagaatatgccccggtctcaacttcgggctggctactgtcgagatcatgctggcgaacctcgcatactgcttcgactgggagctgccggtcggcatggagagggacgataaaatcgatatgacggaggtgtttggtctgactgtccgtaggaaggagaagctcatgcttgtccccaacacccacgtggttgcttgatcggtacatagtgcgtccatatttgtataccgctgcatgcg

SEQ ID NO: 440792 - DNA, 427 bp, Triticum aestivum
gttttctggaggggaaggccggttaaccccaagaagcatggaggagtgagagcttccatcttcattcacgctctggtgctgctgagcaacgctgccaacatcgccaacatcatgaacctggtgacctaccttcgcggcaccatgcacatgggggtggcggaggcctcaacgacggccagcaacttcttcgcggcgctgcagatgttctccatcccggcggccttcctcgccgactcttacatcaagcgcttctacaccgtcctcatcttcggcccgatcgagattctgggctacatcctactagcagtgcaagcgcacgtcccgtctctgcacccgccgccctgcagtcccactggcgcgcaaacctgcgagacggtccgtggctccaacctgagcttgctcctcctgggcctctacctgatcccca

SEQ ID NO: 440793 - DNA, 389 bp, Triticum aestivum
tcttacgcgtgcgtcactccaatccaatccccacagaaatccccatctcaaaaccctagcccgtccgatcccggcgagatggccaacccgagggtgttcttcgacatgaccgtcggcggcgcgccggccgggcgcatcgtgatggagctgtacaaggacgcggtgccgcggacggtggagaacttccgcgcgctctgcaccggcgagaagggcgtcggcaagagcggcaagccactgcactacaagggcagctcgttccaccgcgtgatccccgacttcatgtgccagggcggcgacttcaccaagggcaacggcaccggcggtgagtccatctacggcgagaagttcgccgacgagaagttcgtccacaagcacaccaagcccgggat

SEQ ID NO: 440794 - DNA, 429 bp, Triticum aestivum
ttttacgcgtccgcccacgcgtccggggacgcgcccacagcaaagtacgtggagagatgcaagtttccccaagacggctcatcaccaaaatccttgagatacattggaagcatggttgccgatgttcatcgtaccctgctctacggaggcatatttctgtaccccgccgacaagaagagccccaacgggaagcttcgtgttctgtacgaggttttccccatgtcgttcctgatggagcaagccggaggccagtctttcaccggcaaacagcgtgcccttgaaatcgttcctgctgagatacaccagaggtctccgatattcctcgggagctacgatgatgtggaggagattaaatcactgtacgctttggagtcgagcaccgcctgatctgagtacccgaagacacatacacatgctctgcatcgtgtt

SEQ ID NO: 440795 - DNA, 369 bp, Triticum aestivum
tttgtaaattgccggaagcaaggatagcgtgggccaatactagtctcacattgctttcaccctccctgatctgtaccgggttgtccatgggattgacgtgtttgatcctaagttcaacatcgtctctcctggagcagacatgactgtctacttcccatacactgagactgacaagaggctcaccgccttccactctgaaattgaggagctcctgtacagcgatgttgagaacgatgaacacaaatttgtgttgaaggacaggaacaagccaatcatcttttcaatggctcgtcttgaccgtgtgaagaacatgactggcttggttgagatgtacggcaagaatgcacatctgaaggatttggcgaacct

SEQ ID NO: 440796 - DNA, 423 bp, Triticum aestivum
ttttacgcgtccgcccacgcgtccgggccgtcgcagcagaggagcagcagacacccgaccgcagccgtacgccgcagatccgccgccgcgctagggtttcgcgccgaggagaggggagatggacgtggtgaaggcggcgcagctgtcggggcggacgctggagaaggtggtggtccacccgctggtgctgctcagcatcgtcgaccactacaaccgcgtcgcccgcgacaccaggaagcgcgtcgtcggcgtgctcctcggcacctcctcccgcggcgtcgtcgacgtcaccaactcctacgccgtgccgtttgaggaggatgacaaggacccgaggatctggttcctcgaccataattaccacgagtctatgttctccatgttcaagaggatcaacgccaaggagcatgtcgttggctggta

SEQ ID NO: 440797 - DNA, 356 bp, Triticum aestivum
gcccgagtcgccgagatggcttgtgagcaaaggaagaatggccgaggccaagcgagtgttgcaaggactgcggggaagggaagatgtctcaggagaaatggcccttcttgttgaaggattgggtgttgggaaagacacacattttgaggaatacataattgggcctgatgatgagcttgctgatgacggtctggctccagatgaagagaagttgaagctgtacggagctgaagaaggggtatcttggatcgcccgtcctgttaggggcggtggccaaagtgcacttggaagcgccttgggtctcatgtcttgtcatgggagtatggttagtcagggtaaatctttcgtggacccac

SEQ ID NO: 440798 - DNA, 386 bp, Triticum aestivum
tttttcgtcgcacgctcctcaaggtcattatcctgggcgactgcggggtcgggaagacgtccttgatgaaccaatatgtgaacaagaagttcagtaaccagtacaaggccaccatcggcgcggattttctcacgaaggaggtgcaatacgaggacaggcttttcactctgcagatatgggatactgctggacaggaaaggtttcagagtcttggtgttgcattctaccgtggagcagactgttgcgttctagtttatgatgtcaattcaatgaaatcatttgataatctgaacaactggcgcgaagaatttctgatccaggctagtccgtctgatcctgataacttcccttttgttctgctgggaaacaaagttgatattgatggt

SEQ ID NO: 440799 - DNA, 323 bp, Triticum aestivum
gtttttaggacaagatcaggcccctgtggaggcactacttccagaacacccagggtctcatttttgtcgtggacagcaatgacagagagcgtgttgttgaggcaagagatgagcttcaccggatgctgaatgaggatgagctgcgtgatgctgtgctgctggtgtttgcaaacaagcaagatcttcctaatgccatgaacgctgctgaaatcactgacaagcttggcctgcattctctgcgccagcgacactggtacattcagagcacatgtgctacctttggagaggggttgtacgaggggcttgactggctgtccaacaac

SEQ ID NO: 440800 - DNA, 291 bp, Triticum aestivum
ttttgcgtccgccaccatctcctacggctcttgttccgttctactgctcctcctccgcgcagtgtgccggacaccaccaccacccaccgagaaaatggcaggcaacggagccatcgtcgagaaggacccggtcaactggggcgcggtggcggccgagctcaccggcagccacctcgacgaggtgaagcggatggtggcgcacctccgcgagcccgtggtgaagatcgagggcgccagcctccgcgtcggccaggtggcggtcgtggcccaggccaaggacgcgtcgggcgt

SEQ ID NO: 440801 - DNA, 370 bp, Triticum aestivum
tctcgcgtccgatcaagtctttcatcttcgacggccgagcttacagcatcacgaaggatgtcttgcagctgtggatcaagctgcggctgcggctcaaactgcaactgcggcaagatgtaccctgacttggagaagagcggcgccaccgtgcaggccaccgccgtcgtcctcggcgtcgggcctgcgaaggtgcagttcgaggaggccgccgagtccggtgaggccgcccacggctgtagctgtggcgccagctgcaagtgcgacccttgcaactgctaaggtgcaagcggttgatgcgcttctggtgattgtgccgtgtgtgatcgagtgcgaataatgaaaccgacgccggccgtctggttggtgctgt

SEQ ID NO: 440802 - DNA, 316 bp, Triticum aestivum
ttctatgccgcacgctcctcaaggtcatcatcctcggcgacagcggggtcgggaagacgtccttgatgaaccaatatgtgaacaagaagttcagtaaccagtacaaggccaccatcggcgcggatttcctcacgaaggaggtgcaatacgaggacaggctcttcactctgcagatatgggatactgctggacaggaaaggtttcagagtcttggtgttgcattctaccgtggagcagactgttgcgttctagtttatgatgtcaattcaatgaaatcatttgataatctgaacaactggcgcgaagaatttctgat

SEQ ID NO: 440803 - DNA, 422 bp, Triticum aestivum
ggagttgtccggacaacgccctcggcaagatgcaggtgcggtgctacatgaatgggcactcacgccccggtgagccgcatttccctttcagtgtcgacaggggatttgtccggtcgcaccggatgcagcgcaagcactaccgggggctctccaacccgcagtgcatccatgggatcgaggtggtgagctcgccgaatctcgtgggcatcaccgatgtcgaccggaggaggtgggcggagctcacagggagggagcttaatttctccatcccacaggaggccagtgattttgggacatggaggaccatgccaagctcagagcttgagctggagaggccacacacacacactgccatgaagagcaatactaataatgttcagcagcagccccccaagaagacgcttaatggatctggcttgaat

SEQ ID NO: 440804 - DNA, 347 bp, Triticum aestivum
ttgctacgcgtccgatcaagtctttcatcttcgggggccgttcttacagcatcacgggggatgtcttgcagctgtggatcaagctgcggctgcggcttaaactgcaactgcggcaagatgtaccctgacttggagaagagcggcgccaccgtgcaggccaccgccgtcgtcctcggcgtcgggcctgcgaaggtgcagttcgaggaggccgccgagtccggtgaggccgcccacggctgtagctgtggcgccagctgcaagtgcgacccttgcaactgctaaggtgcaagcggttgatgcgcttctggtgattgtgccgtgtgtgatcgaatgcgaataatgaaacc

SEQ ID NO: 440805 - DNA, 377 bp, Triticum aestivum
ttgaattcctcgcgattcctctcccctcgcctgcgcgtcctccccctcctaggggatcgccggagaggaatcgcgacgagggcttcctcctatcagttaaatcaaagccatggagcacaaggagaccggctgccagtctcgggagggtcccatcctttgcgtcaataactgcggattctttggcagtgcggcgaccatgaacatgtgctccaagtgccacaaggagatggcgatgaagcaggagcaggccaagctggctgcctcctctttcgacagcatcgtcaacggtggcgatgccgcgaaagaacaccttgctgctggcagcacggcggtggcagttgctcacgttgaggcgaagacgcttattaccgcacagc

SEQ ID NO: 440806 - DNA, 321 bp, Triticum aestivum
cgctctccaaggtcccaaggctccagatctccctctctcgcagctacctcggtggcctttggagcgcacgagatggcggaagaagccccagcaccagttgttgccccagcagaggcacctaccccggttcttggtgagccaatggacttgatgactgctctacagcttgtcatgaagaagtcaagtgctcatgatggccttgtgaaggggctccgtgaggctgccaagtccattgagaagcatgctgctcagctttgtgtgctggctgaggattgtgaccagcctgattacgtgaagctcgttaaggcactatgcgctgag

SEQ ID NO: 440807 - DNA, 392 bp, Triticum aestivum
tgctttttttggttctaagcttcagaagaagatgcgggactctaatatttttgttgtgggatctggtgctcttggatgtgaattcttgaagaactttgctttaatgggggtttcttgtggccgtaaagggaagctaactataacagatgatgatgtcattgagaaaagcaacttgagccggcaattcctgtttcgtgattggaacattggacaggcaaaatctacagtagccgctacagctgctagtgctatcaactccagcctccatattgatgctcttcagaatcgtgcctgtccagagactgaacatgttttcaatgatgcattctgggagggccttgatgctgtcatcaatgcacttgataatgtcaatgctaggatgtacatggaca

SEQ ID NO: 440808 - DNA, 432 bp, Triticum aestivum
tgctacgcgtccggtgcgagattgcctccaattgatgagcatgttattagcatgaaactggttactcctgccaaagggacgatagagttatcaagggagaaaaatcctgatttattttatcttgcccgctgtggacttggtggcctaggagtcgttgcagaagttactcttcagtgtgtagaaagacaccaacttgttgagcatactcttgtttctaatgcagatgaaatcaagaaaaaccaccagaattggctttctgaaaacaaacatatcaaatacttgtggattccatatactgatacagttgtcgttgtccaatgtaatcctccttcaagatggaaaactccaaagttggcatcaaaatatgtaaaggatgaagccctacagcatgttcgtgacctttaccgagagtcattgaagaaatatagaact

SEQ ID NO: 440809 - DNA, 279 bp, Triticum aestivum
tttgttctcgtccgggcagaatttaacagggattaccagggtttcatggttccaaacaaaagaacattcccctctggcatcaaggcgcttgcagattatgtgcacgccaaagggttgaagctcggtatctacagtgatgctgggacacaaacatgttgtaacaaaatgccaggatcgctcgatcacgaagagcaagacgtgaagacttttgcgccttggggagttgattatctgaagtacgacaactgcaatgatgctggcagaagtgtcaacgaaaga

SEQ ID NO: 440810 - DNA, 386 bp, Triticum aestivum
ttcttcagcaaaacgctgcagttcgagcacaagctcttctacttcgatctgaaggagaacccgcgggggaggtacctcaagatctccgagaagacctccaccacgcgctccaccatcatcgtgcccatcgccggcgtcgcctggttcctcgacctcttcgactattacatccgcaccgacgtgcgcgacgtcttcagcaaggagctacgcctcgacaccaaggtgttctacttcgatattggggagaacaagagaggccgctaccttaaggtttcggaggcatctgtcaatagaaaccgtagcacgataattgttccggctggtagctctggcgaagaaggttgggaagcatttaggaatgtactgttagaaatcaatgatgaagc

SEQ ID NO: 440811 - DNA, 210 bp, Triticum aestivum
tgtttctgcaagcattgagggtgatgtaaaaaatctctgggagggtaagacttccacagcgctagaagagatgcaaaatcaaattgagtaccagatgcgctctggaactgcaaaagtagatgtatactggctggccatcttaaaacgccttcatatatacaaagcaaaggcttgcctgctggaaatccatgctcctctcttacgtaagca

SEQ ID NO: 440812 - DNA, 348 bp, Triticum aestivum
tttctgtctgctctacccgcttctaacaaacgcgcgcacactccctctcgctctcgcggcgcaggtcggaggctaaaaccctagacacaggcgactatgacggcgccggcggacaaggggaagaaggccaagaccgacaccgacgtcggcgaggagaacgagcagatcgacggtgccctcgtcctctccatcgagaggctccaggagatccaggacgagctcgagaaggttaatgaagaagcaagtgataaggctttggaggttgagcagaagtacagtgagattcgcagacctgtctatcttcggaggtgtgacatcatcaaaacaattccagacttttggctgaca

SEQ ID NO: 440813 - DNA, 361 bp, Triticum aestivum
ttcaaaatggtgcaaagatatatttgtagcatttgtcgcgttattggacaaacatatagcaactggtacttttgatgaggaaattataccaattggccgtccagtgaaatctttgatggtggtcctgtcttggtcatgtctcctcctatatggtgctcatagattcttacagtggacccagctcttgtcgacgtggaaaggagtgatcctctttgcttctggattggcaatggtaacctgccgtatgcatgtattcatcatgttctcgcaggccgagcgctcaagctctgcgaaagcagcatgggaccgagtgaagaaggattgatagctcgtgtgaatttcagtctataggggaactgcc

SEQ ID NO: 440814 - DNA, 366 bp, Triticum aestivum
tgcgttcgtttcaaaatggtgcaaagatatatttgtagcatttgtcgcgttattggacaaacatatagcaactggtacttttgatgaggaaattataccaattggccgtccagtgaaatctttgatggtggtcctgtcttggtcatgtctcctcctatatggtgctcatagattcttacagtggacccagctcttgtcgacgtggaaaggagtgatcctctttgcttctggattggcaatggtaaccgccgttatgcatgtattcatcatgttctcgcaagccgagcgctcaagctctgccaaagcagcaagggaccgagtgaagaaggattgatagctcgtgtgaaattcagtctataggggaac

SEQ ID NO: 440815 - DNA, 367 bp, Triticum aestivum
tgtcttttgcccacgcgtccgcccacgcgtccggtgcgccattatctacagccacagctcaacacatcacttgcaccggtcgagtccttgatcatcacagcaatggccttcaccgacagttggacccacgagatcgaatcgccggtcgccgcgtcgcgcctcttccgtgccggcgtcatggactggcacacactggcccctaagctcgcaccgcacatcgtcgccagcgcccaccccgtcgagggcgaaggcggcatcggcagcgtcaggcagttcaacttcacctcagccatgcccttcagcctcatgaaggagaggctcgagttcatcgacgccgacaagtgcgagtgcaagtccaccctcatcg

SEQ ID NO: 440816 - DNA, 269 bp, Triticum aestivum
tttctatcccctcgcttcgtacggcgaagcagccagagcctgagcccaccttccagaatcaacccgcccgccatggcgagcttcgcgaggcaggagcaccagttcctcgccgagctcggcctcgcgccgcgcaacccgggctccttcgcctgcggcgcctggggcggctcgggccccgtcgtcaccaccaccaaccctagcaacaacgaggtcattgctgaggtcgttgaggcgtccatggacgactacgagaagggcatgagcgcctg

SEQ ID NO: 440817 - DNA, 174 bp, Triticum aestivum
tgtctttctgtgaacagggacctcagtattcctggccgtgagctatctggagttcatcctgccatggaattcctgcacgcaaattccaaaagtttgcttgatagcaacctggaggatggaagatgcatatctgcccagggtaagaaggcggtggtcattggtggtggagacaca

SEQ ID NO: 440818 - DNA, 408 bp, Triticum aestivum
ctgctcctcccccgcaacaaatcttggtcgcttcgccgccggcacaagcgatcggagcagcggcccgtcggcagcgatgggggaccacgaggcgcgcggtgacgacacggagaggaaggcggataagaagctctccggctgggggctcttcggctccaagtacgaggacgccgtcgtcctatacgataaggccgccaactttttcaagctttcgaagaactggaaccgagctgcatctgtgtatatcaagattgctaattgccatctgaagggtgatagtaagcatgaagctgcctcagcttatgtggaagctgcaaactgctacaaaaaattctcacctcaggaagctgcgcaagcgctagaccaggctgttaatctatttctggaaattggtagattgagcatggc

SEQ ID NO: 440819 - DNA, 317 bp, Triticum aestivum
ttgctgtcgcgtgggcggacgcgtgggggtgaccaaccatgtttcaaagcgccgtgcaacacaatcaagatgtcaactctctcggtctcatctcctccaggaagaccgccgaggccattgacatactcaagctcatgtcctccacattcatggtcgccttgtgccaagccatcgacctccgccatcttgaggagaatgtcaaggatgccgccaagagctgcgtgaagatgacggccaggaagacattgagcaccaccaacaatgggcacctccacaatgcgcgattctgcgagaaagacctgctgctcacgattgac

SEQ ID NO: 440820 - DNA, 407 bp, Triticum aestivum
ttggtctcttctcccgtcccgtcccgtccccagccaacctcctatctccgtctcgcgtcgcggcggcagttccactccctcgccatgggcaagattaagatcggaatcaacggtttcggaaggatcgggaggctcgtcgccagggtagccctccagagcgacgatgtcgagctcgtcgccgtcaacgaccccttcatcaccaccgagtacatgacctacatgttcaagtacgacaccgttcacggccactggaagcacattgacatcaagctcaaggacgacaagactctgctctttggcgagaagccagttaccgtcttcagcgtcaggaaccctgaggagatcccgtggggtgaggctggtgccgattacgttgtggagtccaccggtgtcttcactgacaagga

SEQ ID NO: 440821 - DNA, 291 bp, Triticum aestivum
tgtttcttcctccgcatcggcagcctcacctggctctcattgctctacttcgagatagagggccactccatgatggtcgtggaggccgacgggcactacgtgcggtcgttcgcggtgaggggcctcttcatctactccggcgagacgtactccgtgctggtcaaggccgaccaggacccgcggagaaactactgggctgcgtcccacgtcgtcggccgcaaccccagccagacaccgaccggcaaggccgtcgtgagctacgccttcaacggcaacaacccgtggatgcct

SEQ ID NO: 440822 - DNA, 391 bp, Triticum aestivum
tttctcgcggacgcgtgggcggacgcgtgggtcggacgcgtgggtccctccgttccaacttccaaccgacgccaacgacttcaacttcactccgttccgttcaaactttccggccgcggcaacgtgcgactgaccgaccgactggaagctccgcctcgcacgcctcttctcgttcacaggatggttctgcccatgtcgcgggcgacgaggctggtgccggagctgccgctgctgcggcgggggaggcgcccgctggtggcggacgctgggaacgaggaggagctggccgtgccggcgcacttccggtgcccgatctcgctggagctgatgaaggacccggtcacggcgcccacggggatcacctacgaccgggagagcgtggaggggtggc

SEQ ID NO: 440823 - DNA, 395 bp, Triticum aestivum
ttcttaggagatcaaggcgtactcgggcggatcagggatcggcgatggatttcgagctgcggagcgcgcgggagaagctggagagggagcagcgggagcggatgcagcgcgctaaggccaaagccgaccgcgagcgccgcgccaaggccgaggccgcgcgccgccgcgacgcgctcgaggcctcaaacagggagcgccgcctcgacgccgcccgggcgcaggaagaggctgaccagaaaatggaagaggtgatgcaactaggaaaggggatctctttttcacacatgtttgaagcactgcgatatgacggtccaggggataagattaagctgccaccatcttctttcaaggatttatccgatcaaggagcgcttgacaaaggtcccatgtacttc

SEQ ID NO: 440824 - DNA, 440 bp, Triticum aestivum
tgctcgatctctctcccgctctcttctccccaccaccacccgagtcgtcgtctccgtcgccggccgccatggctccgggcctctacaccgacatcggcaagaagaccagagatctgctctacagggactactgcacgcaccagaagttcaccctcaccacatgcacccccgagggcgtcgcaatcacagctgcaggaactaggaaaaacgagtcaatctttggcgagcttcagacccagcttaagaacaagaacttgacagttgatatcaaagcaaactcagagtcagatcttctgacaacattcacagttgatgagtttgcaactccagggctgaaatcaattctcagcttggttgttccagaccagaggtcagggaagcttgaactccagtatctccatgaattcgccggtgtcaatgcaagcgttgggctgaacccc

SEQ ID NO: 440825 - DNA, 374 bp, Triticum aestivum
tggtatgcaaaggttttcaaggagttggtagtatcaaccacatcaagggcacttgtccatgcattcttcgcccagcgttccaccactaaggtaccaggtgttactgatattcaactcaaacctaggaacataagaaaagttgctgttattggtggtggtcttatgggttctggaattgcaacagcccttcttgttggcaatatatctgttgtcctcaaggaagtaaaccctcaatttttgcaaaggggacaaaaaacaatagcaggaaatctggagggccttgtcaaaagaggctcattgaccaaggataaaatgagcaaggccatatcacttctcaagggtgcattggattattcagatttcaaggatgttga

SEQ ID NO: 440826 - DNA, 216 bp, Triticum aestivum
tattccaccatcaccagggccaggtttgaggagctcaacatggacctcttcatgaagtgcatggagccagtggagaagtgcctgagggatgccaagatggacaagagcaccatccatgatttcgtgcttgttggtggttccaccataatccccagagttcagcagctgttgccggacttcttcaacgggaaggagctctgcaagagcatcaaccct

SEQ ID NO: 440827 - DNA, 283 bp, Triticum aestivum
agattcactacgagacaactgggcctgaattcttgaaaggcacaggcggaaagatcgatggcctagtttctggcatctggacaggcggtaccattactggaactggtaagttcctcaaagagcaaaactctaacatcaagctctacggtgtggagcctacctagagtgctgtcttaaatggtggaaagcctggaccacacaagatccaaggaattggagctggttttattcctggtgtcttggatgttgacatcattgatgaaaccatacaggtttcaagtga

SEQ ID NO: 440828 - DNA, 267 bp, Triticum aestivum
cacagccacttcacgataaaaaggcccttttaaagaagccacctgctggtgctcccgcccctgcgcctgtttcggctgttgatgcttatcagaagatgctttcatctatcgctgagttctctgggtttggaaggctcttcaagttctcagaacctgtggagctgacagaggcagagactgaatatgcagctaatgtggctaagcatatctatgaaaaccatgttgtattgcagtacaactgtacaaacaccatacctgaacaactgc

SEQ ID NO: 440829 - DNA, 344 bp, Triticum aestivum
tttttgtggacgcgtgggcggacgcgtggcactccggtctttctgttcttctccctgcatccatcggctcaaccatccactgctccgaccgactctacaatctagtacatacgtgcatgatggcatcgcgcaccatgtgggtgaacggccccatcatcgtgggcgcggggccggcgggcatcgcggcggcggcctgcctgcacacgcgcggagtcccctccgtcgtcctcgaccgcgacgactgcctcgcctcgctctggcagcgccgcacctacgaccgcctgcgccttcaccttcccaagcacttttggcagctccccgggatgcccttccccgaccactac

SEQ ID NO: 440830 - DNA, 211 bp, Triticum aestivum
ggaccctatcttccactgcccataccacctttttgattgattcactcttttcgggagtcgatttctattccaccatcacctgggccaggtttgaggagctcaacatggacctcctcaggaagtgcatggagccagtggagaagtgcctgagggatgccaagatggtcaagatcaccatccatgatgtcttgcttgttggtggttccaccag

SEQ ID NO: 440831 - DNA, 408 bp, Triticum aestivum
ttgatatctttggcaattatgcaaatgccatcaagtggtccagtgcctggcccaacaacaaacttgaacataggaatggactactgggcaaatacagcaagctcctctcctgcattgcatggtaaagtgaccccaactgcaattccaggggctgtggccccaacagagccgtggatgcaggatgaacgtgaactgaaaaggcagaaaagaaagcagtcaaacagggattctgctcgcagatctaggctgcgcaagcaggctgaatgtgaggagttggctcagcgcgctgaagtattgaaacaggaaaatgcttcacttaaagatgaagtgagccggatcagaaaggagtacgatgaacttctgtcaaagaatagctcactgaaggataacgttggagacaaacaacac

SEQ ID NO: 440832 - DNA, 318 bp, Triticum aestivum
tcttctgaccggagatagcccgcgccgcatcgatctgcgtttacggcctgattcctcagatcttcgcgtacgccgtcaacttccccattcagaagttcctgcaggcccagagcatcgtcctgccgagtgcttacatctcaacggcaacactcgttctacatgtgatgctgagttgggtgctcatgtacaaggtcggccttgggctgctcggtgcctcactggtgctgagtgtgagctggtggattatcgtcggagcacaatttgtgtacattgtcgtgagcccgacgtgccggcacacgtggacgggattcagttggc

SEQ ID NO: 440833 - DNA, 201 bp, Triticum aestivum
taccttttcgcctacctgggcgggaactcttccccaagtgccggtgacgtcaagaacatccttgactcagtcggtgctgaggctgatgaagaaaagcttgagttccttcttgctgaactcaaaggcaaggacatcacagaagtgattgcatctggaagggagaagtttgccgctgcgccttcaggtgggggtgccattgct

SEQ ID NO: 440834 - DNA, 363 bp, Triticum aestivum
gtggttccggcggcgccacgcgcgaccagctcgctgccacgctcggtgccgcggagaaaggcggggccgagggcatacacgcgctcgccgagcaggtggtgcaggtcgtgctcgccgacgcgtcgggcgccggcggcccgcgcgtcgccttcgccaacggcgtcttcgtcgacgcgtcgatcaagctcaagccttccttcaaggatctcgccgagggcaagtacaaggccgagacacagtccgtggacttccaaactaaggctgctgaagttgctggtcaagtgaactcctgggtagagaaaatcacaacaggtctcatcaaagagatcctgcctcagggtctgttgacaacaccactagact

SEQ ID NO: 440835 - DNA, 286 bp, Triticum aestivum
cacttgagggcatatcccagatggggtggactattgaagttcatcttgcaccgcagtccaagatgtgatggagagagtgactggtaccggatcttgtccctgcccgcctttgcagatgaataggatgtgaagaagcagtacaggaagctagctctcctgctgcgccctgataagaacaagtcagtcggtgctgaggaggcctttaaactgatctctgaggcttggagtgtgttgtctgatactagttcggagacaatttatgatcagaagaggtcagatcattctg

SEQ ID NO: 440836 - DNA, 313 bp, Triticum aestivum
tccgcccacgcgtccgcatggaccaaccatgttatggcctgttccaggcacacttatgattgaacccactgagagtgaaagcaaggctgaactagacaggttctgtgatgcccttatctctatcagggaggaaattgcacaggtagaaaatggcaaagcagatgcgcacaacaatgtcctgaagggcgctcctcacccaccccaactcctgatgggtgacgcatggactaagccatactctagggagtatgctgcgttcccggctgcatggcttcggggtgccaagttctggccaacgacatgtcgtgtggac

SEQ ID NO: 440837 - DNA, 368 bp, Triticum aestivum
tttctgatccgcagcggctttacctaccgagaagaagagagaaaaaaggttcgagtgcgttgcagagtgagaagagatggctccggtgaagctgtacggcgcgaccctgtcgtggaacgtcaccaggtgcgtggcggcgctggaggaggccggcgtcgagtacgagctcgtccccatcaacttcggcaccggcgagcacaagagccccgaccacctcgccaggaacccctttggccaggtgccagctttgcaggatggtgacttgtacgtcttcgaatcacgtgctatttgcaagtatgcgtgccgcaagaacaagccagagctgttgaaggagggcgacatcaaggagtcagcaatggtggatgtgt

SEQ ID NO: 440838 - DNA, 347 bp, Triticum aestivum
ttctggtaactcttattgggtaattctaccacattatggcctcggttggtgcggtgcgtccttcctcgcgcttccagaatgacacgagtactagtggtgatgccgaccgacttccgaacgagatgggcagtatgagcataagggatgacagggacactgaagatatagtagtcaacggcaatgggacggaaccgggccatattatagtcacaagcattgagggaagaaatgggcaagcaaaacagaccattagctacatggctgagcgtgtggttggtaatgggtcatttggaactgttttccaggccaagtgtcttgaaactggcgagacagtggctataaagaag

SEQ ID NO: 440839 - DNA, 338 bp, Triticum aestivum
ccacgcgtccgatcaacggcaatggcaggccaggcagagaaggtgtttgtccccaccgacacggagctgctccaggcgcagtcggacctgtggcgccacaccctctgctacctcacgcctatggcgctccggtgcgccgtcgaccttggcgtccccactgccattcaccgcctcggcggcgccgcgtccccatccgaactcgtcgccgccctatccctccccacgtccaagctgcccttcctcgcccgcctgctgcgccaactcgccacggcgggcgtcttcagtgcaaccgacgccggaacgtaccgcctcaacccgctctcgtacctcctggtaga

SEQ ID NO: 440840 - DNA, 289 bp, Triticum aestivum
tgggtacccgccgctcttcctgtacatcaccggggccactgtcatggggtgcaagcaccaggcataccccggcggtcccaacgccgccaacgctgcctgcagcgccgtgggaattctcggcatcatctgggcgttcggcggcatgatcttcatgctcgcctactgcaccgacggtgtgtgcgggggacacatcaacccggcggtgaccttcgggctgttcctggcgcgcaaggggtccctggtgcgcgcgcatgctctacatcatcgcgcagtgcctgggcgccatctg

SEQ ID NO: 440841 - DNA, 400 bp, Triticum aestivum
tgttttcccacgcgtccgagcatcgtctctcgtctcgttgaggaatcaacaaccatgggcggcggcaacgcgcagaagtccaagatggcgagggagaggaacctcgagaagctgaagggcggcaaggggagccagctcgaggccaacaagaaggccatgaacatccagtgcaagatatgcatgcagactttcatctgcaccacctctgaagcaaagtgcaaggagcacgccgaggcgaagcatccgaagagcgacctcgtccagtgcttcccccacctcaagccgtgatatatgccaaatcggacggagagagagataaaagagagagagagaagctgtcgtaatccacctagtattatcatgttccgcaatgactggttgttgacctaagcatgggtct

SEQ ID NO: 440842 - DNA, 281 bp, Triticum aestivum
gtggtcgctcctccctctcgattccgatcggagtcgcatctagctccgccgcttgattagccggcagccccgtcccgatggcgtccaagcggatcctcaaggagctcaaggacctgcagagggatccccccacctcctgcagcgccggccctgtggcggcagatatgttccactggcaagcgacgatcatgggtacatcggaaagaccatatgctggtggtgtatctttggttactattcactttcccccagactacccattcaagccacccaaggttgca

SEQ ID NO: 440843 - DNA, 367 bp, Triticum aestivum
tttgtttgagtgagactacctagagcactcagcaccgtttttggctcgtcgccatccgttcagtgtctcagagtctcagcgtgcgtgtctgatctgatggcggcaccagcaggagattccttcggcggcgacaagtacaggtctcacctggccggcgagggcgagaagaacaccgtttggcggcacggtgcgccgcccacctacgacgccgtgaacagcctcttcgaggccgggaggactcaggagtgggcgaaggggtcgctggaggagacggtgcagaacgcgatcaatacgtgggagatggagctgtcgcacaaggcccgcatcggggacttcaagtcggtgagccctggccggttcaccctgt

SEQ ID NO: 440844 - DNA, 297 bp, Triticum aestivum
tggtcgcggcgtgcgcgacggcacctccctcgtgctgtggaagtggtgcgagggcgacaaccagcgctggaagatccttccctggtaaacgtgtcatgctgctgaagctgagttgatcgccaccgtgacccggagttggtagagatcggcctgtgatctgttgccgtgtcgttagaataaaagtcgtgtgcggttggtgatgtgtccgtgagtgtgtgtttagtttctgtcctgtcgttgtgtcctgctatggcgagctatccgatgtaataagcatttggcacttgtgcttgtttt

SEQ ID NO: 440845 - DNA, 285 bp, Triticum aestivum
ttgatttagctctcgcgtccgccatggcggtcacgggccatatctcggagcaggacttggtggacgcccacaacgcggcgcgcgccgacgtgggccttggggaggtgacatgggacgctacggtggcagcctttgcgcaggactacgcggatcagcgcccgggcgactgccagctgatccatactcctgatggccggccgtacggggagaacctctacggaggcggcggcggtgggaccgagtggacggcgacggacgccgtgaattcgggggtgtcggagaagc

SEQ ID NO: 440846 - DNA, 455 bp, Triticum aestivum
ttttcttctcgagctgcacacctcatctcatgtcattgccattccctccttgcgagtagcaccggcagcagcaatggccagcctcgccgacctcgtcaacctcgacctcagcgactgcaccgacaagatcatcgtcgagtacctctggattggaggatccggtatcgacatcaggagcaaagcaaggacggtgaacggccccatcacggacgcgagccagctgcccaagtggaactacgacggctccagcaccggccaggctcccggagaggacagcgaagtcatcctctacccccaggccattttcaaggacccgttcaggaggggcgacaacctccttgttatgtgtgactgctacacaccacaaggtgtgccaatccccaccaacatgaggcacaatgccgtcaagatcttcaacacccccaaggttgcagctgaggagacatggtatggaa

SEQ ID NO: 440847 - DNA, 472 bp, Triticum aestivum
tttgtcttctcgagctgcacacctcatctcatatcattgccattccctccttgcgagtagcaccggcagcagcaatggccagcctcgccgacctcgtcaacctcgacctcagcgactgcaccgacaagatcatcgtcgagtacctctggattggaggatccggtatcgacatcaggagcaaagcaaggacggtgaacggccccatcacggacgcgagccagctgcccaagtggaactacgacggctccagcaccggccaggctcccggagaggacagcgaagtcatcctctacccccaggccattttcaaggacccgttcaggaggggcgacaacctccttgttatgtgtgactgctacacaccacaaggtgtgccaatccccaccaacaagaggcacaatgccgccaagatcttcaacacccccaaggttgcagctgaggagacatggtatggaattgagcaggagtacac

SEQ ID NO: 440848 - DNA, 365 bp, Triticum aestivum
gtgctgtcgcgtgggcgccaccgccgtggaccccaagatgggcagcctgggcaccatcgcgcccatcgccatcggcttcatcgtgggcgccaacatcctggtcggcggcgccttctccggcgcgtccatgaaccccgccgtctccttcggccccgccctcgtcagctgggagtgggggtaccagtgggtgtactgggtcggccccctcattggcggcggccttgccggcgtcatctacgagctgctcttcatttcccgcacccacgagcaggtgcccaccaccgactactaagcagcgagcttaggatcggagtcgccgtccatccgtccgtgtgatgcttcagttccccctttcttcccgtcat

SEQ ID NO: 440849 - DNA, 416 bp, Triticum aestivum
gtggtagtcttgcaatgtttgcactggccatagtcgtgtccttggtggctgacgtcttggctcagaacaccccgcaggacttcgtcaacctgcacaaccgcgcccgcgccggggacggcgtgggtcccgtggcatgggacaacaacgtggccaggtttgcgcaggactgggcggcgcaacgcgccggcgattgccggctgcagcactccggcgggccgttcggcgagaacatcttctggggttccgggcagacgtggacggacgtcgacgcggtgaagctgtgggtggacgagaagcataactaccatcttgacagcaacacctgcgacgccggcaaggtgtgcgggcactacacgcaggtggtgtggcgcaagtcgacccgcatcggctgcgcgcgcgtggtctgcacggggaac

SEQ ID NO: 440850 - DNA, 404 bp, Triticum aestivum
cccacgcgtccgcctggaggcacctcagggagctaatcaggtggcacaagcctaggccagtaacttggcagtatgatatggtaagctgtctaaggtttagcgcatatcgggcaagagcccataggccagaatcatcgacagaatagcagcgcttcaagtcaagttctaccaggctcttacagccaatgacaacagaagaaattccgatgcctgtaatgcggaccaggcatctcagttcaaggtttgtgagctcctccagagcgcccaggtggctcaaaccactatcagttatcttgttgcagtaacaaaggttcagcagcttaattttcttgcagccgttggctaaggctgccagcccatcgtcggtgatagaactgcagcgatagaggtcaagttcaatgagc

SEQ ID NO: 440851 - DNA, 414 bp, Triticum aestivum
tgttcgtgccgcctcgtcatctgccgtagctgccatgagctttagccccggatgttcgccctcctctccaatctcttacggaagcccgccgtcccctccgggattctgttaccggcggcacccgacgaccaccggaatagcagctcaggtggcgtcgaccctcaccacgtcctgcgatggctcgacgaccagcctcccaagtctgtcatctacgtcgcgctggggaccgaggcgccactgacgctagagaacatccatgaactcgcgctcgggctggagctcgccgaggtgcgattcctctggctgctaggcaagcctgccggaagcaacaaagtcgccgggccattgccggccgggttcgaggagcggacgcgggcgcgcggtgtcgtctgcacagggtgggtgccacagatg

SEQ ID NO: 440852 - DNA, 402 bp, Triticum aestivum
ttgatactcttatggtactggcaagatccccgatagggatatcctcaagattgtgaaggagaactttgacttcaggcctgggatgatcggcatcaaccttgacttgaagaagggtggcaacaggttcatcaagacggctgcttatggccactttggccgtgaggatgctgacttcacctgggaggttgtgaagcccctcaagtttgacaaggcctctgcttgagaggtgggtatgaaggagtctatcattcctgctgctgccgctggtggttgtatcttggataattgaattccttctctttagaaggaagcagggtttcaacatcgccgtggacacactgaattggcgtcagtgattggtattttggtatggcatacacaattatgtgctgagttaatact

SEQ ID NO: 440853 - DNA, 460 bp, Triticum aestivum
tgctcaccgataggtgtgccctggacaacacaaggctcgccattgctgcgatcggcaagctcatgtttgcgcagttctcggagttggtgaacgacttctacaacaacggtctaccttccaacctttccggcgggcgcaacccgagtttggactatggtttcaagggtgctgagattgccatggcctcatattgctccgagctccagttcctaggcaacccagtgaccaaccatgtccaaagcgccgagcaacacaaccaagatgtcaactctctcggtctcatctcctcaaggaagaccgccgaggccattgacatactcaaactcatgtcctctacattcatggtcgccttgtgtcaggccattgacctccgtcacctcgaggagaatatcaaggatgccgtcaagagctgtgtgaagatggcagccaggaagacactgagcacaaacaacaatggaca

SEQ ID NO: 440854 - DNA, 420 bp, Triticum aestivum
tctttgccacgcgtccgggcaggctagccgtgctgcctcccatctcttctcttctcttgtcttctcttctctcccccaaggaggtcaaagacacagcgcatctgcatccggcctcctccgcgcgcgcgaattctggagggagaggggcggtaatggggagggctccgtgctgcgagaagatgggcctcaagaggggcccctggacgccggaggaggacaagatcctggtcgcccacatccacagccacggccacggcaactggcgcgcgctgcccaagcaagccggcctgctgcggtgcggcaagagctgccggctccggtggatcaactacctgcggccggacatcaagcgcggcaacttcaccgacgaggaggagcagtcaatcatccagctgcaccagctgctcggcaacagatggt

SEQ ID NO: 440855 - DNA, 225 bp, Triticum aestivum
gtccacgcgtccgcccacgcgtgcgggcgcgcgtcctttccacgcgtccgcaattgcgcgcatcgactatgctcccttgggtcaaaaccgaccacagacgcaccctggcgccattgagaccctcaccgtgctggaggggacactgtacgttggctttgtcacatccaaccagcccggcccaaacagaaacagggtcctctcgaaggtgctcaacaaaggtgatgt

SEQ ID NO: 440856 - DNA, 485 bp, Triticum aestivum
tttctttccacgcgtccgcccacgcgtccggagagtcttcacacgcgcgacgtgagtggaacgtgccacgcccacgcggtcgtcggctggagacgccccactgattacgcgagccccgacccaccccaccagcacagcgccctcgccgcccgccgctcacctgccccgcgcccctccggccgtataaatacaaggcgcccgtggcggagatgggtaccgctttttcctcctcctcttccaccccagagtccagagctatggcgctcgccaaggccaaggagatcgtcgcctccgcttccgtcgtcgtcttcagcaagtcttactgccctttctgtgttcaagtgaagaagttgctcacgcagcttggagcaagtttcaaggccgttgagatggacactgaaagcgatggaactgagattcagtcagctcttgctgaatggactgggcagaggactgttcccaatgtcttcatcaatggaaaacac

SEQ ID NO: 440857 - DNA, 306 bp, Triticum aestivum
tctaattcccacgcgtccgggagaaggatttttgagctgtttactgagcaaattgggcgattcatggcagcggatagcaagatcatgattcctggttacatgtactttcctaccaaaaataaccgatggatgcatcaaattaacaacgagattgagtccatcttgcggggcataattgcaaaaaggatgcaagctatgcaagaaggggaaagcacaaaagatgactaactcggcttattactcgagtcaaacatgtcagacacggatgaaaactgtcaatccaccctaggaatgtcagcacatgaa

SEQ ID NO: 440858 - DNA, 224 bp, Triticum aestivum
tgcgtacggtccgaccagagcttcctcgacgacgaccagatcgtggcggggtgggtgctcacctgcgccgggtaccccacctcggacctcgtcatcgagacccacaaggaggaggagctcaccgcttgaattcactgatttgtttagttcgacccgtttccaccgtgcgcgtgtaccatgcacgacgtacgaactgtatcaggatattgaggagtagtacatgc

SEQ ID NO: 440859 - DNA, 313 bp, Triticum aestivum
gcgtccatcgcgtccggcgattccaaccgctccacggcctctgatcgcgagcagaccagccaagtccgcaggaagaggggaaagatcgcccagggcatcaaagaacacgtgactctggggccaaagctgtcggagacggtcaaggggaagctcacgctgggcgccaggatcctgcaggccggcggcgtcgagaaggtgttccggcagtgggtctccgtggacaagaacgagcggctggtgagggcgtcgcaatgctacctgtccaccacggcgggtcccatcgacgggatgctcttcgtctccacggagcgcg

SEQ ID NO: 440860 - DNA, 448 bp, Triticum aestivum
gtggtagccatgggggcgggggtctcgagctgttgcttcatcgcggcggcggaggctgctccgggtgctgcgggcctgggcgacctgccggagctctgcgccgcgcaggtgctgctgcggctcgacgcgccggagatctgccgcctggcgcgccttaaccacgccttccgcggcgccgtgggggccgacttcgtgtgggaggccaagctgccggagaactaccgtcacctcatcgggtacgtcgagggcgggggcgaggagggcaggcgccggctgccgcgggccgggaccaaggagatctacgccaggctctccaggcccgtctttttcgacgacggcaccaaggaattttggctagagaagagcaaaggttgggtttgtatggcgctatccttcaaagctctggtcataactggcatcgatgacaggagatattggacacacatgc

SEQ ID NO: 440861 - DNA, 371 bp, Triticum aestivum
tggtgtccatccccgccgccgcctccgctcggttccttcttcttcctccgagccatgggcaaggagaagactcacatcaacatcgtggtcattggccatgtcgactctggcaagtcgaccaccactggccatctgatctacaagcttggaggtattgacaagcgtgtgatcgagaggtttgagaaggaagccgctgagatgaacaagaggtctttcaagtacgcctgggtgcttgacaagctgaaggccgagcgtgagaggggtatcaccattgatattgccctgtggaagttcgagaccaccaagtactactgcaccgtcattgacgcccctggtcaccgtgacttcatcaagaacatgattactggtac

SEQ ID NO: 440862 - DNA, 373 bp, Triticum aestivum
gtgggagaaacccaacgacgacgagggagagatggaaaggatctcgtgcatctcggccatggcgaaccagggatccaagaagattgtggagaggaacaggaagcgcatggatctcctctgcgcataatcctcgtgtccaacgttatttacatagtagtgaggatggctgtaatgtactcttctttcacctggaagcattggatcggcctcgtggtgacatctgctgcatactctctttcatacaagcaactctctagtatgacaaagcccgaatgttctgacgcggacaatcgtgaacttctgagttcgggatatgacttggccactggtgggcattctgaatatatagaggatgtgatatacatcacagcat

SEQ ID NO: 440863 - DNA, 306 bp, Triticum aestivum
tcgtcgcgctccgcctcccgttcgcctgcacgccgcggtgctctcgtctgcgtccccgcctccgcccccggcgcccgtcaccatgatcatctccaagaagaaccgccgcgagatctgcaagtacctcttccaggagggagtcttgtacgccaagaaggactacaacctggccaagcacccccaggtcgatgcctcgaacctcgaggtcatcaagctcatgcagagcttcaagtccaaggagtacgtcagggagaccttctcgtggcagcactactactggtacctgaccaacgacggcattgagtt

SEQ ID NO: 440864 - DNA, 466 bp, Triticum aestivum
cgtctttcccgttctcctctccccctgtcgccggcatagcatcagcagctccagctcgagcaagaaagaactagtttgatctgtgaaaatgttggccatcttccagaagcaggtggcgcacgcgccgcaggagctcaacagcccgcgcggcagcaccgccaagcccaagaaccccgacgagatcctccgcgacttccacgccgcccacccctccgacgccttctccacctccttcggcggcggcgccgccctcgcctgcgtcgccgcgcagccccgcaacctcgccgccggcgggtaccagaggtaacgccaccatctctcatgacccaaatcgctcccagcaaccgcaacgatgtccggacgaataagaagaaccgatctctctgtgtgcgcaggatgttctgcgggctggacgacatctactgcgtcttcatggggacgctggacaacctgagcgcgctgatgc

SEQ ID NO: 440865 - DNA, 328 bp, Triticum aestivum
ctctcgcgtgcggtgcctatggctggcgccgggtgcgattctctctctgcgtgttgctcccgtggcggccacttcaaaccgtaggcgccgtcggacaggaggggcatttaccagacatgttttgggcgcatgccaaggaagaccagcatcaacaccaagcactatgaggtgcttggtgtattcaagacagcaaccacggatgagttgaagaaagcttaccggaaaggggttataaaaaaccatgctgataagggcggacaccctgagaagttgaaagaattggcacaagcttatgatgatctcaatgaccctgagaagagggagattt

SEQ ID NO: 440866 - DNA, 340 bp, Triticum aestivum
tttccagggtcgcaagaaagagtgaatgcttcaatggtgaagctcgcattcgggagctgtggtgactccttcagcgccacgtccatcagggcgtatgcggcggatttaatcgccaccctcctctttgtgttcgccggcgttgggtccgccattgcctatgggaaaatcaccgatgatggcgctctcgacccagttggccttgtggcgatcgtgatcgcccacgccttcgccctcttcgttggtgtcgcgatcgccgccaacattttcggcggccacctcaaccccgttgtgaccttcggtcttgccgtcggcggccacattaccatcctcaccgggatct

SEQ ID NO: 440867 - DNA, 338 bp, Triticum aestivum
ctatattggccctctcaaatccgccgtcgctagcagtaaactatttcctccttcttcttcttcttgtttccttttcctgcgtcaacaagtgataaataagaaccgtagcagcagcagcagcagtagccaggtagtagtgattccggtgcaaagatgtcgtcgtcgtcgctgtcgccgggaggtgggaggctgtcgggctcggacggcgactcgggggcgacgttctcggccggggacaaccggcgggagaagaggcggctgtcgaaccgggagtcggcgcggcggtcgcggctgcggaagcagcagcacctggacgagctggtgcaggaggtggcgcg

SEQ ID NO: 440868 - DNA, 422 bp, Triticum aestivum
cttttcgccttcagtggtgccgaggacgtggccctcatcgaatacgcgaaactgactggacgccccttcagggtgttcagccttgacactgggcgactgaacccagagacatacgaactcttcgacaaggtggagaagcactatggtatccacatcgagtacatgttccctgaggccagcgaggtgcaagaccttgtgaggagcaagggcctcttctctttctacgaggacggacaccaggagtgctgcagggtgaggaagggttcggcccttgaggagggccctcaagggcctcaaggcctggatcaccgggcagaggaaggatcagtcccctggcaccagagccagcatccctgttgttcaagttgatccgtcttttgaagggctggatggtggagccggtagcttgatcaagtggaacc

SEQ ID NO: 440869 - DNA, 294 bp, Triticum aestivum
attcttgataccaaagctcatcttcttctccttgaaatctttttgggttcacagatttggaggatgtcttgcaactgtggatccggttgcagctgcggctcagactgcaagtgccggaagatgtaccctgatctgacggagcagggcagcgccgccgcccaggtcgccgccgtggtcgtcctcggcgtggcgcctgagaacaaggcggggcagttcgaggtggccgccgggcagtccggcgagggctgcagctgcggcgacaactgcaagtgcaacccctgcaactgttaagct

SEQ ID NO: 440870 - DNA, 394 bp, Triticum aestivum
ccagttctcctatacccctgtcgccggcatagcagcagcagctccagctcgagcaagaaagaactagtttgatctgtgaaaatgttggccatcttccagaagcaggtggcgcacgcgccgcaggagctcaacagtccgcgcggcagcaccgccaagcccaagaaccccgacgagatcctccgcgacttccacgccgcccacccctccgacgccttctccacctccttcggcggcggcgccgccctcgcctgcgtcgccgcgcagccccgcaacctcgccgccggcgggtaccagaggtaacgccaccatctctcatgacccaaatcgctcccagcaaccgcaacgatgtccggacgaataagaagaaccgatctctctgtgtgcgcaggatgtt

SEQ ID NO: 440871 - DNA, 392 bp, Triticum aestivum
ttctacctctcatcctcccacttccttttctgggccattctaagccaccatgccgggctccatcgccttcggtcgcttcgatgactccttcagcttggcctctttcagggcctacatcgccgagttcatctccaccctcatcttcgtcttcgccggcgtcggctctgtcatcgcctacaccaaggtgagcggcggcgcgccgcttgacccatccgggctgatcgccgtggcgatttgccacgggtttgggctgttcgtcgcggtcgccatcggcgccaacatctccggcggccatgtgaaccctgccgtcaccttcggcctcgccctcggcggccagatcaccatcctcaccggcatcttctactgggttgcccagctcctcggcgccatcg

SEQ ID NO: 440872 - DNA, 457 bp, Triticum aestivum
ttatccaatcccctaaacccggccccaaaccgtagcgccgccgccatgctgcgccgactcgcctccgccgccgccccgcgggccttcttctcgacctccccggctgcgggccacgcccccgcgccgcgagtacgggctggtccccatggtgatcgagcacacctcccgcggggagcgcgcctacgacatcttctcgcgtctcctcaaggagcgcatcgtctgcatccacgggcccatcgccgacgacacggcctcgctcgtcgtcgcgcagctgcttttactcgagtccgagaaccccgccaagccgatccacctctacatcaactcccccggcggggtcgtcaccgcgggcctcgcgatctacgacacgatgcagtacattcgctccccggtcaccacgctctgcatcggccaggccgcctccatgggctcgctgctgatcgccgcgggcgcgccc

SEQ ID NO: 440873 - DNA, 425 bp, Triticum aestivum
tttttgcgaaaggcttgatcttgaccggccggcgtccatggcggcggggcggcagcagcgggtggtggtgatgcggcacggggaccggctggaccacgcggagcccatgtggccggccaacaagccgcggccgtgggacccgccgctgaccgacgccggcgtcctccgggcctggaccgtcggcaagcgcatccgggcgcaggccgccgccgacggctacgcgctccaccgcgtcctcgtctcccccttccaccgctgcctccagaccgccgtccaggccgtcgccgcgctctgcgccgtccccgacgacgccgcgctcgccgccgtcctcgacttcagcgccaatgtgcccctcgacacctcccgcgtcaaggtgtcgatcgagtatggactgtctgagatgatgaatgttgaagcgatgggcg

SEQ ID NO: 440874 - DNA, 412 bp, Triticum aestivum
ttgtttacggcaggctcacgccgctcgccatcgagctgagcgagcccgtcatcctgggcggcctcaccaccgccaagagcaaggtgtacacgccggtgccgagcggcagcgtcgaaggctgggtgtgggagttcgccaaggcctacgtcgccgtcaacgactccggctggcaccagctcgtcagccactggctgaacacccacgcggtgatggagccgtttgtgatctcgacgaaccggcacctcagcgtgacgcacccggtgcacaagctgttgagcccgcactaccgcgacaccatgaccatcaacgcgctggcgcggcagacgctcatcaacgccggcggcatcttcgagatgacggtgttcccgggcaagtttgcgctggggatgtcgtcggtggtgtacaaggactg

SEQ ID NO: 440875 - DNA, 342 bp, Triticum aestivum
agtatacaggacaagccaattgctttgctcgagaagtgtttaagcaacgatgaagagtagcacgctcgtggcgatcctgattctccaggccgtcctggtcatgggaatcctctcacaggcgaacgccgagttgccaaaatgctgcgacaactgcaggttcttctcgggggccgtggtctgcgacgacgccggccctaagtgccgcgacggctgcgtgaactgccgtgtcgtggagacgagccccaagatgacgtttcggtgcgccgatgcgcgcggcgacgacggcacgccctgcccgccctgcaagaagtactgatcgcgcatgctcggaacataagatgt

SEQ ID NO: 440876 - DNA, 494 bp, Triticum aestivum
cgtccggtctactacaatgaggcctcctgtggtcgctttgtgccccgtgctgtccttatggatcttgagccgggcaccatggacagtgttcgtactggaccgtacgggcagatcttccgccctgacaactttgtgtttgggcagtctggtgctggtaacaactgggccaagggtcactacactgagggtgcagagcttattgattctgttcttgatgttgtcaggaaggaggctgagaactgtgactgccttcaaggtttccaagtatgccactctcttggtggtggtactggatcaggcatggggacccttttgatatcaaagatcagggaggagtaccctgaccgcatgatgcttacgttctctgttttcccctcacccaaagtatctgataccgtggttgagccttacaatgccactcttttggtccatcagttggttgagaatgcagatgagtgcatggttcttgacaaccaggccctttatgacatctg

SEQ ID NO: 440877 - DNA, 423 bp, Triticum aestivum
ttttcgcgtccgaaggtggcagaaaaggaggcagaaactcagaagaagatcgcactatctgaagcagaaaagaatgcactagtgagcaagatcctcatgcagcagatgcttacggagaaggacagttccaaaaggcagcagcagattgataatgaaatgtttcttgcccgagagagagcccttgcagatgcaaactattacaggattacgaaggaagcagaggctaacaaactaaaacttacacctgagtatcttgagctgaggttcattgaatcaattgccaataacacaaagattttctttggtgaaaagattccgaacatgatcatggatcaaaggttgattcgaaatcaccttgattctgctccgagcaaggaccagttagaaatatagtatcatctcttgtaaatttgaaggaacgat

SEQ ID NO: 440878 - DNA, 441 bp, Triticum aestivum
tttttcaccctcccccatccgccgccgcctccacctctacaggggaaggaagggaagatgtcgcaccgtaagttcgagcacccgaggcacggatccctcggtttcctccccaggaagcggtgctcgcgccaccgcggaaaggtgaaggccttccccagagatgaccaatccaagaaatgccacctcactgccttccttggctacaaatctgggatgactcacattgtgcgtgaggtcgagaagcctggttccaagctgcacaagaaggagacatgtgaggctgtcaccattgttgagacacccccgattgttattgttggacttgttgcctatgtgaagactcctcgtggccttcgtactctcaacttagtctgggcacagcatctcagcgaagatgtcaggaggaggttctacaagaactggtgcaagagcaagaagaag

SEQ ID NO: 440879 - DNA, 446 bp, Triticum aestivum
  unsure (1)..(446): unsure at all n locations
tcgtgttcgcgtgggccggctccgacttcgaccagaggaagcaaggcaggcaggcaggggcggggccgatcgatcctaccccgaacctcacacacgcagcagaaacttccagaagccggtccattcccatccttttttgtggtcgaccagccggccagattctcctgatccatttatggagggagatgggccaggcctttcgcaagctcttcgnatgccttctttggcaacaaggagatgcgggtggtgatgcttgggttggatgcagccggtaaaaccaccatactctacaagctacacattggcgaagtactctccaccgtccccaccattggtttcaatgttgagaaggttcagtacaagaatgtagtgttcactgtgtgggatgtgggcggccagtagaaattgaggcccttgtggaggcactactttcacaacacggatgc

SEQ ID NO: 440880 - DNA, 317 bp, Triticum aestivum
gctcatctccggcgcgcacatgaaccccgccgggacgctctccttcgcctgcttccggcatttcccctggattcaggtgccgttctactgggcggcgcagtttaccggggcgatgtgcgcggcgttcgtgctgtgggcggtgctgcacccgatcacggtgctggggacgacgacccccacggggccgcactggcacgccctcgtcatcgagatcatcgtcaccttcaacatgatgttcatcacctgcgccgtcgccacggactcgagggcggtgggtgagttggcggggttagcaattggttccgtggtttgcatta

SEQ ID NO: 440881 - DNA, 417 bp, Triticum aestivum
aatctgcgaggatcgatggggcagaggttcaggttcttctgctgcggctgcggggccaatgcggccgacggcgacatggaggtggacgacgagtcggagtgcggcgggggcaaaggggggcgaggaggccggggcgcggcagctgtcgtgggcgcaggtggagaggatgacgggcgggttcacctccgccgtggtcggcgagggcggcttcagcaccgtctacctcgcgcgcctctccggcgcgctcgccgccgtcaaggtccaccgcagcagcgagcgcatccaccgcgtgtttcgtcaggagctcgagacgctcctccgcattcgccacccgcacatcgtccgcctcctcggtttctgcgagcagcaagatgagggcgtgctggtgctggagttcgcggcgaacgggaacctgta

SEQ ID NO: 440882 - DNA, 364 bp, Triticum aestivum
ctttcttgtgctttgggcgattccatccgaggcgagatgagtagaggagagcataggatgaggccacggaggagaagttcggtagggagatcgatggggctgtcgttcgggacgctgctcgggggtgctgttcgccaagaaggagatgcggatcctgatggtcggcctcgacgccgccgggaagaccaccatcctgtacaagctcaagctcggcgagatcgtcaccaccatccccaccatcgggttcaacgtggagacagtagagtataagaacatcagcttcactgtttgggatgttggtggccaggacaagataaggcctttgtggaggcactactttcagaacactcagggccttatcttt

SEQ ID NO: 440883 - DNA, 402 bp, Triticum aestivum
tatattcccaggttaagtcaatctgaattcatcgggccctactggaagttcaccaaaagctttagtcaaccattttctgttggatcgaggttcaaaatgagatatgaaagtgaggatgctgctgaaagaaggtacacagggataattactggaactggtgatgcagaccctatgtggcgtggttcaaagtggaaatgcctgctggtaaggtgggatgatgatggtgagtttcgtcgaccaaacagggtatctccttgggagattgagctgaccagttcagcttcaggatcccatctggccgcaccaacttcaaagcggatgaagccataccttccccatgctaatccggaattcacagttccacatggaggtggtcgccctgattttgctgagtctgcacaa

SEQ ID NO: 440884 - DNA, 385 bp, Triticum aestivum
tgtgacgcgtgggtgcccggggctggagcggtacagctggtgggtgtacatcgggctggtgctggtgtcggcggccgtgatgctgtccctcatcttctgggtgatctacgccagggagcggcgccaccgggcgtacaacaaggcgcaccggggcgacaagccggcgccgatgggcgggaatgcctgatcagcgacgaccgtttcgcgcgttcggtcgccacggatggcgtcagtgagtgtagagagtagaggaccgccgcgtggttgacttgattgctgcctgttgattgattctttcttcgtttttgtgaatctgatgcttgctagtatatttgtttgtgttcctgctcggttgatgtacagtttgtgatctactaggaatgaa

SEQ ID NO: 440885 - DNA, 436 bp, Triticum aestivum
ttttctcaggccaccaagatagctcctgcagctgctaaaaggaaggaggagtccagtgattcctcagacagtgatgagagtgatgaagagcctccccagaaaaagcagaaggatgctgcgaaggttgctcctaagtctgccaaaaaggacagcagcagtgatgatgacagttctgatgaaagctctgatgatgagcctaaaaaggaagttacaactgccacaaaatcacagaaggaagagcctaatactcctgctagcaacaaaggtcaggcaacagggtcgaagaccctttggatggggaacctttccttcaatattgagtatgatcaagtgaagcaattttttgcacaaattggagaggtcgttgatgttcgcctggctacccatgaagatggccatcccaagggatttggtcatgttgagtttgctacggctg

SEQ ID NO: 440886 - DNA, 301 bp, Triticum aestivum
tttctctagcggctttattacctaccgtgaagaagagagataaaaaggttcgagtgcgttctagagtgaggagtgtgaagagatggctccggtgaagctgttcggcgcgaccctgtcgtgtaacgtcaccaggtgcgtggcggcgctggaggaagccggcgtcgagtacgagctcgtccccatcaacttcggctccggcgagcacaagggccccgaccacctcgccaggaacccttttggccaggtgccagctttgcaggatggtgacttgtacgttttcgaatcacgtgctatttgcaag

SEQ ID NO: 440887 - DNA, 287 bp, Triticum aestivum
ggctgtctccccgtgggcgctcatcctcctcctggccgcggtcttcaccgcaggggccggcgcgacgaccttctccatcactaaccgctgctcctacccggtttggccggcggccattccgggtgggtggcggcagacggctcaacagtggcgacacctggaacctcgaggtccctggcggcaccagcgccgtcaggatctggggccgcacgggctgcaacttcaacggcgacagagggagctgcgccaccggcgactgcgctggcgctctatactgtggcttgtcc

SEQ ID NO: 440888 - DNA, 454 bp, Triticum aestivum
tttgtgcagcgactaatgtgaagatagcagcagttccttcaagtgttgtggttttgacggaggaaacctttgactcagttgtccttgatgaaaccaaagatgtccttgttgagttctatgccccatggtgtggtcactgcaagagtcttgctccgatatatgagaaggtggcttctgttttcaagcaagatgagggtgttgtgattgctaatcttgatgctgacaaatacacaagcctggctgagaagtatggagtttctggttttcccacattgaagttcttcccgaagggtagcaaggctggtgaagagtatgagggtggtcgggacttggatgactttgttaagttcattaatgagaaaagtggaactagccgtgattcgaagggtcagcttactttaaaggctgggcttgtggcaagtttggatgctcttgtcaaggattttcacagtgc

SEQ ID NO: 440889 - DNA, 412 bp, Triticum aestivum
cgttatcaactacgaggagagcgacgacgaggagggctttttcctcccctccggccaggcctccgcgccgcccccgtccgcggccggcgacaccctggaggcactcaaggggtttggtgcagagcgcgagcgtcgcggagcggaaccttctcgccgacgcttccaggatcgccgagcggtgcggccggacctgcaagggaaaggccgagtgccgtcgcgccgtcgccgacggcctccgggccctcggttacgacgccgccgtttgcaagtcgcgctgggagaagactaagtcctaccccgcaggggagcacgagtacatcgacgccgtggttggggacggagggcggctgatcgtggaggtgcacttcaggtccgagttcgaggtggcccggtcgaccaaggcgtaccgcgc

SEQ ID NO: 440890 - DNA, 431 bp, Triticum aestivum
tgttgccaatgtggcctgagggtgttcccgagagtgcatctgtgcaagcaattctggactggcaaaggagaacaatggagatgatgtacactgacatcacacaagctctcgaggcaaagggaattgaagcaaaccccaaggaatacctcactttcttctgcctaggtaaccgggaggtgaagcaggatggggaatatgaaccccaggagcaaccagaacctgatactgattacgttcgtgctcaagaggctaggaggttcatgatctacgttcataccaaaatgatgatagttgatgacgagtacatcatcattgggtctgcaaacatcaaccaaaggtcaatggacggtgcccgggactccgagattgccatgggcgcttaccagccataccatctagccaacagggagccagcccggggccagatccac

SEQ ID NO: 440891 - DNA, 317 bp, Triticum aestivum
tggcctgagggtgttcccgagagtgcatttgtgcaagcatttctggactggccacggataacaatggagaggatgtacactgacatcacacaagctcttgcggcaatgggaattgaatcaaaccccaaggaatacctcactttcttctgcctaggtaaccggcaggtgaagcaggatggggaatatgaaccccaggagcaaccagaacctgatactgattacatccgtgctcaagaggctaggaggtttatgatctacgttgataccaaaatgatgatagttgatgacgagcacatcatcattgggtctgcaaacat

SEQ ID NO: 440892 - DNA, 281 bp, Triticum aestivum
tgttctcagacacttctcccgtcccgtccccaggcgaccttctatccccgtctcgcgtcgtatcggcagttccactccctcgccatgggcaagattaagatcggaatcaacggttttctgatgggatcgtgaggctctgtcgccagggtcgccctccagagcgacgatgtctagctcgtcgccgtcaacgacccctttatcaccaccgagtacatgacctacatgttcaagtacgacaccgttcacggccactggaagcacagtgacatcaagctcaagga

SEQ ID NO: 440893 - DNA, 216 bp, Triticum aestivum
tgcaggtggcggagcggatcccgtacgtgggcgtggacttggagttcccgggcgtgatccactgccccagcaagcaccacgcgacgctgaccccgtcggagcggtacgcggcgctcaaggcgaacgtggacgcgctccacctcatccaggtgggcctggcgttcgcggcgtcccccgacgcggcgccggcggtggcgttcgagatcaacctgcgcg

SEQ ID NO: 440894 - DNA, 284 bp, Triticum aestivum
ttctgcccacgcgtccgcggacgcgtgggaccgttgacgctttaccgcacgcgctgcacgggcacccaacacaagcccttctccgatcgtgctcgctcgccgccggtactagtctagtagagcagcggggaggagctccgagatgagggcgccgcggaggccgatggcggtggtgctgagctgggtgcggaggcagccgcccaaggtcaaggccttcctcgccgtcgtcgcgggcatgaccgcgctcgtcttcattcgcttcatcgtccacgaccacgacaacc

SEQ ID NO: 440895 - DNA, 251 bp, Triticum aestivum
tcgcaactacagagggctccggggagagatgtgggattttctgaatggtatcctctttccgagaaagaaatcggtgttcgcccagcagtagcacccgagtctcgccggattaatggaagtgcaggatcatctttcgaggacttccagattctccatggagatatgcaaggattaaccgatactatggctttcctgacaagtttatctgggcttgttggaaacgatccgaggatccctgagaagcaatcccg

SEQ ID NO: 440896 - DNA, 161 bp, Triticum aestivum
ccacccagcgccctggctgctcgccaccggcgagctggtgccgcgactccaccatgaagctgaacatcgcgaaccccaccacggggtgccagaagaaggtcgagatcgatgacgaccagaagctgcggaacctttatgacaagagaatctcccaggaggta

SEQ ID NO: 440897 - DNA, 306 bp, Triticum aestivum
atcggcaaggctgatgttgttgtcagaggctatggtgggtacaactcaagatgggccctgttcctgatccagcgcattttccccctggttgggttaccacctgttgcgacgactattttctttggcgctaatgatgcagcgcttccaggacgaacaagtcagcggcaacatgttccggttgaggagtatagacagaatctcaaaacaattgttaatcatctgaaggattgttccaagtccatggtaattctgcttatcactccacctcctattgatgaagatggaagagaaagatatgcacgatcg

SEQ ID NO: 440898 - DNA, 394 bp, Triticum aestivum
ttctgcccacgcgtccgctcgaattcttatcgatactggatctcagagcataggagggaaagtcgatttatggatggaatcaaatacgcagtatttacagaaaaaagtcttcgtttattgggaaagaatcaatatacttttaatgtcgaatcgggattcactaagacagaaataaagcattgggtcgaactcttctttggtgttaaggtggtagctgtgaatagccatcgactacctggaaaaggtagaagaataggacctattctgggccatacaatgcattacagacgtatgatcattacccttcaaccgggttattctattccacttctagatagagaaaaaaactaaaggagaatacttaataatacggcgaaacatttatacaaaacac

SEQ ID NO: 440899 - DNA, 285 bp, Triticum aestivum
ttcacgcgtccggaacaagatcaccatcaccaacgtcttgggcaggctgagcaaggactacattgagaagatggtccaggacgcagagaagtacaagtctgaggacgaggagcacaagaagaaggttgacgccaagaactccctggagaactacgcctacaacatgaggaacaccatccaggacgagaagatcgcctccaagctgcccgctgacgacaagaagaagatcgaggacgctgtcgacgctgcgatccagtggcttgacgccaaccagcttggtgaggt

SEQ ID NO: 440900 - DNA, 325 bp, Triticum aestivum
tccacgcgtccgcggacgcgtgggtggtcccagtgttctgttcgctagtgattcatggatcagcactgatgacatgagggctcagtatctgcgaagtaagggaatattagtctggaagatggacaaccggggatctgcacggcgaggtttgcattttgagggacagcttaagtacaacattggtcatgtcgatgctgaggatcaactagctggtactgagtggctaataaagcaaggccttgcgaagcctggacatattggtctgtatggctggagttatggtggttttctctcggcaatgtgcctatcaaggttttccgacaca

SEQ ID NO: 440901 - DNA, 305 bp, Triticum aestivum
tgccatgcgcgccgaagagaagccccatgccgtgtgcttttcgaacccggcgcaggtgcacgccaccccgatgatgaagctggccaaggtcctccactccaggggcttccacgttaccttcgtctacaccgagcacaaccaccggcgcctcgtccgttcccgcggcccaggtgctgtcgctggcctcccggactttcgcttcgccaccatccccgacggcctgccgtcgtacgaccccgatgccacccaggaccaggcgtccatttgccactccaccacgaccacctgccttccccacctgaaga

SEQ ID NO: 440902 - DNA, 292 bp, Triticum aestivum
ggagagaagagtgtcatcaaagaaggtcacaaaagcttcccaagtggacactcatcatggccttttgccggcctaggctttcttacgtggtacttgactgggaaaatcgcagtttttgaccgtaaaggtcatattgcaaagctttgtattattgttctgcctctacttactgctgcacttgttgctgtttctcgagtggatgactactggcatcactggcaagatgtggttgcaggagctgttttaggtctcacagaggcttcattttgctacctgcaatttttcccatacc

SEQ ID NO: 440903 - DNA, 357 bp, Triticum aestivum
tcgaaccccgaccccatctcaccaatcccgcgtactgtaaaccctgccagctgggcggcgggatgggcaacccggagaagctgatggcgcagatcttcgacctcaagtcacgtccaagtcgctgcagcggcaggcgcgcaagtgcgagaaggaggagaaggagcagaagctcaaggtgaagaaggccatcgagaagggcaacgtggacggcgcccggatctacgccgagaacgccatccgcaagcgcaccgagcacatgaactaccttcgtctcgtcttccgcctcgacgccgtcggcgcgcgcctcgacacgcaggccaagatgcaggccatcggcaagtccatgggcagcatcgt

SEQ ID NO: 440904 - DNA, 378 bp, Triticum aestivum
  unsure (1)..(378): unsure at all n locations
tcccacgcgtncgcggacgcgtggcggacgcgtgggcgcctacaagcgccgctccgactgcatctacatcatcaatctgggcaagacgtgggagaagctccagctcgcggcgagggtcatcgtcgccatcgagaacccccaggacatcatcgtccagtccgcccgcccctacggccagcgcgccgtcctcaagttcgcgcagcacaccggcgccaacgccatcgccgggaggcacacccctggtaccttcaccaaccagatgcagacctccttcagcgagccccggctgctcatcctcaccgacccaaggaccgaccaccagcccatcaaggagtctgctctggggaacatccctaccattgccttctgtgacaccga

SEQ ID NO: 440905 - DNA, 371 bp, Triticum aestivum
tagcagccgccgccagcagctgcgcaaaggctccacatatcctaaccctagctccaagcttagcttccatcttctcgatctagctagagccatggcgccgaccaagggcgaggggccggccatcggcatcgacctcggcaccacctactcgtgcgtcggcgtgtggcagcacgaccgggtcgagatcatcgccaacgaccagggcaaccgcaccacgccctcgtacgtcgccttcaccgactcggagcgcctcatcggcgatgccgccaagaaccaggtcgccatgaaccccatcaacaccgtcttcgatgcgaagcgtcttatcggcagaaggtttgctgatgctcctgtccagagtgatattaagatgt

SEQ ID NO: 440906 - DNA, 317 bp, Triticum aestivum
tgcctcccctcccctccattccatctccaacccattaaacaaccggagccgtcctcctcctcctcctccccccaccagatctcagatccgcggagctccgccgcgcctcccatggcggtcaaggtctacgtcgtgtactactccatgtatggtcatgttgctaagctagctgatgagatcaagaaaggtgcttcatctgtcgaaggcgtggaggttaaagtgtggcaggtccctgagatcctgaacgaggaagtccttggcaagatgggcgccccgcccaagaccgacgtgccggtgatctccccgcaggagctggc

SEQ ID NO: 440907 - DNA, 362 bp, Triticum aestivum
ttccgacccgaccatgtccctcaagatcaagcgcggtctgcgcgagagaatcgtggagtccgtctccgaggccatggcccagctcgagatcgaggactcctccgccgaggacctcaagaagaaggagctcgccctcaagagactcatcaccaaggccatgtcctcccgataaatgtatcgcttccttcccttttttgctggctctggcgtctttttttgagattcctttgtttttcggaaaagcaagaaaatatcttccgggggaaaaaaaaggggccttctgtttctccagcccagatctcggtaccatgatctggcacatgacttgatgcccttttttgatacacacttacgatagacac

SEQ ID NO: 440908 - DNA, 220 bp, Triticum aestivum
gccggcgccgacccggtcctggccgcctcgtgcaccatcatcagcctgcagagcctggtgtcccgggaggccgacccgctggactcgcaggtggagccggtggccatggtcaactgtagcggcggcgacccggcggatccgttggtgctgggcggcacgttccgggccttctcgaacgcgagcttctacacgctgcggcggcggatcgaggaggtgatga

SEQ ID NO: 440909 - DNA, 327 bp, Triticum aestivum
cacgcgtccgcccacgcgtccgacagagtgctgtcattgatccggcggcagtgctgggatattttgtaccatcaacgtatcagaaatggagcctctcagagatcatggcgcgagctgcttgccgatgatgatcatggcgctgctgtgcctgggcggcgcggcttgtggccagctgagcgacgacttctacgacgacagctgcccgaagctggagagcatcgttcaggcgcgcgtggccgccgcgatgaaggccgagctacggatgggcgcctccctgctccggctccactttcacgactgctttgtcaacgggtgtgacgggtcgat

SEQ ID NO: 440910 - DNA, 229 bp, Triticum aestivum
acacgacgcaaaaacttctgaaactgagcttttgtaggcacatagagcttcttaagatgagcgtggagatcctggacgggaggacggtgcagagcttcttagaggacgagggcgccttcaacgactccgtcgacggccgattcgctgcgctcgacgccgaccacgacggcctcctctcctaccccgagatggcccgggagatcatgagcctccgggtcctcgagaagca

SEQ ID NO: 440911 - DNA, 281 bp, Triticum aestivum
tcaccgacccgaccatgtccctcaagatcaagcgcggtctgcgcgagagaatcgaggagtccgtctccgaggccatggcccagctcgagatcgaggactcctccgccgcggacctcaagaagaaggagctcgccctcaagagactcatcaccaaggccatgtcctcccgataaatgtatcgcttccttcccttttttgctggctctggcgtctttctttgagattcctttgtttttcggaaaagcaagaaaatatcttccgggggaaaaaaaaggggcctt

SEQ ID NO: 440912 - DNA, 282 bp, Triticum aestivum
tgatcggcggcggcggcggcggcagcgggagagagatttttggagagagctccagccatggtgcacgtcaacttctacctgaactatggtaagacattcaagaaaccaaggctgttcttatgagaaggagcgttttgatgcagaactaaagctggatggtgagtatggactgaggtgcaagcgtgagctctggagggttcagtatgcattgagcaggatccgtaatgcggcaagacacttgcttacactggatgagaagaatccccgccgtatctttgaggg

SEQ ID NO: 440913 - DNA, 284 bp, Triticum aestivum
tgctgcggcggcggcggcggcagcggaagaaagaggtttttgctccagtcttggtgcacgtcaacttctaccgcaactatggttagacattcaagaaaccaaggcgtccttatgagaaggagcgtcttgatgcagaactaaagctggtcggtgaatatggactgaggtgcaagcgtgagctctggagggttcagtatgcactgagcaggattcgtaatgctgcaagacacttgctcacactggatgagaaaaatccccgccgtatctttgagggcgcggccctt

SEQ ID NO: 440914 - DNA, 241 bp, Triticum aestivum
acgaatgagctccatatgctccccttgggcatgtttgtcctcctgatatcgatgaccatagccgattgcttcaacaaaggtgtgtatgaccagatcgtggtgatgaaaggcttgccattcatggaggctcatgctgaacctgacatgaggcactaggtagctagtgatgttgtgtctgggccactcatctccttttcgggtgttgagaaggtgggcaacatcgttcatgcgttaaggatca

SEQ ID NO: 440915 - DNA, 358 bp, Triticum aestivum
tcattctgctattggagatgtcatctttgctttggccctttagaatgcttatgtgccctacagaaacagcaaactgactcaagttcttcagagctctttaggtgggcaagcaaagacgctaatgtttgttcagataaaccctgatgtggaatcatgttcagaaaccataagtactttgaaatttgctgaaagagtttctggggttgagttaggtgctgcaaggagcaacaaagagggcaaggatataaaagatctgctagaacaggttgcgtttttgaaagacacaatatcgcgaaaggatatggaaatggaacagcttcaagtcaaccaaagtcaaatctcccagttcattaacaga

SEQ ID NO: 440916 - DNA, 242 bp, Triticum aestivum
cccccccttgcaaccatcactttcattcaacatgcatcacgaaatggctacgcacgcacgcaaactgtacactttgcaagtacaacattctcaaaggcagtgaaaactgaaaactcaccgaggacttacactgacgtaacttccatactcaaggcctgtatgcatgaacatcctggagcaagcagcaagtgagaagccttgtgattcccgtctgtttgtaaactgatgatatcaatgagagt

SEQ ID NO: 440917 - DNA, 330 bp, Triticum aestivum
tgtcgtcacgcgtccggtcagaattctggttgacggggatgtgaagagcaaagcacacttcctgtccgctgatgattttgagccagcacttattccatcaaagactattcctgaccctgacgacaagaagccagaggactgggacgagagagctaaaatccctgacccagctgcagtgaagcccgatgactgggatgaggatgccccaacagaaattctggatgaggaggccaccaagccagaaggatggttggatgatgagcctgaggaagttgatgacccagaggctgataagcccgaagactgggatgatgaggaggatggcgaatg

SEQ ID NO: 440918 - DNA, 300 bp, Triticum aestivum
aactgctcgggcggcggcaacgagcttttcaagctcaaggtgatttccggcaggacgtacatgctgaggctcatcaacgcggcgctcaacgacgagctcttcttcgcggtggccaaccacacgctcaccgtcgtgcaggcggacgccagctacgtcaagccgttcgccgtcaccacgctcgtcatcttgccgggccagaccatggacgtgctcctcaccgaggccaccaaccccgtctccacggtcttcgccattgccgtcgcgccctacaccaacaccgtgggcaccttcgacaacacc

SEQ ID NO: 440919 - DNA, 208 bp, Triticum aestivum
ctcgatcttccggaagcattgcagaccattttgctacccggatgagcattacataccgacctatcttcatcttttccacgggtcgctcaacgccaacaggaccatcacatgggttgattggtcaagaggaggcccacatccagcaagatatggtgctggaaacatcaatgtggatttcatcaaggccatcaggaacaacggtacgcag

SEQ ID NO: 440920 - DNA, 435 bp, Triticum aestivum
tcgtcggaagaccttatatccaatgtacacttattccaaattttttacggaagtggaagaaaataccatttatagttcagagaaacttcagaacctagggtggaccttcaggcctttagagaagaccctgggggacagcgtggaatcctacaaagcatctggcgtcctgaactgagcatccaaccagggaaagtttggctgttaatgcttgcaaactccttgtggttcatgtaagcagtgaaacaaaataagttggtgacacaatcgtcacgagagtctgtgtgaacatgaacaaagcatgaatcgtatgcgcgcctttcttttggtgtgtcttgacttgaggtgtatgcagcaccttcttttggtgtgtcttgacttgaggtgtttcgaggcatagtggaatgtcctggtggttctatgagtgggtgcttgcac

SEQ ID NO: 440921 - DNA, 379 bp, Triticum aestivum
ttactcatcatctctgctttcctgctagcgaatgtaatgggccgcttccagtggtttacatgcccaagaaaggacctgtcaacagggtggcttcagtgtgatcctggccctatgtttaagccagagcattattatctgggagattgggtaccacattggtttccatggaaagatgtgttcctaatgcccgtgcagtggcatgctttatcccttggtttatttgcatcgataatcgcaccatttggtggatttttcgcaagtggcttcaagagggctttcaaaataaaggattttggggacagcatacctgggcatggcggaatcactgaccgaatggactgtcaaatggttatggcagtttttgcatacatataccacc

SEQ ID NO: 440922 - DNA, 412 bp, Triticum aestivum
tcgtttccctccctcggttcatcggcctcccgatcgagcagtagaagcagcgcaagagcaccgctagcactaaagaaatggcggccgagacgttcctcttcacgtccgagtctgtgaacgagggccatcccgacaagctctgtgaccaggtctccgacgccgtcttggatgcctgcttggcccaggatgccgacagcaaggtcgcctgcgagaccgtcaccaagaccaacatggtcatggtcttgggcgagatcaccaccaaggccaccgtcgactatgagaagatcgtgcgcgacacctgccgcaacatcggtttcatctctgatgacgttggtctcgacgccgaccgttgcaaggtgctcgtcaacatcgagcagcagtcccctgacattgcccagggtgttcacggaca

SEQ ID NO: 440923 - DNA, 343 bp, Triticum aestivum
ttttccattcagctcgagcagggcgagtaaaggagcgtgcgcagagaaaggagtgaagagaggcaggccccaggccataattctcactctcagcagccaaatcaaggacaggcaggcgcagagcagaggaccaagctcgcaatgggcatgggcatggcttctcccttgctttcctgcgccatcatggcactcctagccgccgtgctttccccgccatccgtcgccggcgaccccgacttgctccaggacatctgcgtcgccgacctcacttccgccgtgaaggtgaatgggttcgcttgcaaggccactgtgaccgatgacgacttctacttcaaggggctgg

SEQ ID NO: 440924 - DNA, 295 bp, Triticum aestivum
tctttcgtcttcgtactcgcctctctccgcgcaaccgagccttccgcccacctcctccccatttcgccagcggcgcacccaccaaccacccccacccgccgccatgagggagtgcatctcgatccacatcggccaggccggcatgcaggtcgggaacgcgtgctgggagctgtactgcctcgagcatggcattcagcctgatggccagatgcccggtgacaagaccgttgggggaggtgatgatgctttcaacacctttttcagcgagactggggctgggaagcacgtcccccgt

SEQ ID NO: 440925 - DNA, 432 bp, Triticum aestivum
tttgtgctatacaagatgttttttatgttttctcccagcataaggtgctggctactctttttttggagtacattttatctatacttcacaaagaacctgttgcaacaaatgattcagaaaaaggggaaattaactcagagtcatcagctgatgactgtattctacaagcaactatgttcgctctcaatgcgttcctgagaggtggtgggaaggtcgggaaacaagcagttgagcaaagctacccttctgtcctttctgcacttatactgaagctgggaggtcttcacggtcttgctgaattaggccgcaatgagcttctacgatcgttgttaattgcattccagtcattctgtgattgtgttggcgatgtcgagatgggaaagatattagctcgagatggcgaacgaactgagaaggagaagtggattgatc

SEQ ID NO: 440926 - DNA, 395 bp, Triticum aestivum
ttttcgcgtcctaagccatggtgcacaaggagaccggctgccagtctcgggagggtcccatcctttgcgtcaataactgcggattctttggcagtgcggcgaccatgaacatgtgctccaagtgccacaaggagatggcgatgaagcaggagcaggccaagctggctgcctcctctttcgacagcatcgtcaacggtggcgatgccgcgaaagaacaccttgctgctggcagcacggcggtggcagctgctcacgttgaggcgaagacgcttattaccgcacagcctgctgatatcgccggtcccagcgaggcggcgatggagaaccccaaaggcccaagccggtgcagcacctgcagaaagagggttgggctgaccggattcaactgccggtgc

SEQ ID NO: 440927 - DNA, 310 bp, Triticum aestivum
tgttctagatccacaagccagctgaaaggaagaagatgatgagcaacaaggccctcacactcggcgcggtcgtcgtcctcgccttcgccatggcgggcgcgcacgccgagcagtgcggccacgcggccgacggcatggagtgccccaacaacctctgctgcagcgcgtgggggtactgcggcatggacgccaactactgcggcgatggctgccagagcggcgcctgctacgagcccaaacgctgcggcgcccaggccggggcgaacgcggtgacgtgccccaacaaccactgctgcagcggcgacgggtt

SEQ ID NO: 440928 - DNA, 424 bp, Triticum aestivum
tcttttccctccctcggttcatcggcctcccgatcgagcagtagaagcagcgcaagagcaccgctagcactaaagaaatggcggccgagacgttcctcttcacgtccgagtctgtgaacgagggccatcccgacaagctctgtgaccaggtctccgacgccgtcttggatgcctgcttggcccaggatgccgacagcaaggtcgcctgcgagaccgtcaccaagaccaacatggtcatggtcttgggcgagatcaccaccaaggccaccgtcgactatgagaagatcgtgcgcgacacctgccgcaacatcggtttcatctctgatgacgttggtctcgacgccgaccgttgcaaggtgctcgtcaacatcgagcagcagtcccctgacattgcccagggtgttcacggacacttcaccaagcg

SEQ ID NO: 440929 - DNA, 407 bp, Triticum aestivum
tcgtttccctccctcggttcatcggcctcccgatcgagcagtataagcagcgcaagagcaccgctagcactaaagaaatggcggccgagacgttcctcttcacgtccgagtctgtgaacgagggccatcccgacaagctctgtgaccaggtctccgacgccgtcttggatgcctgcttggcccaggatgccgacagcaaggtcgcctgcgagaccgtcaccaagaccaacatggtcatggtcttgggcgagatcaccaccatggccaccgtcgactatgagaagatcgtgcgcgacacctgccgcaacatcggtttcatccctgatgacgttggtctcgacgcccaccgttgcaaggtgctcgtcaacatcgagcagcagtcccctgacattgcccagggtgttcac

SEQ ID NO: 440930 - DNA, 350 bp, Triticum aestivum
ttcacgcgtccggggttttgctgcctccctcccccaccgccgacgtcgccgcccgcgtccaccatggcgctgccgaaccagatcaccgtcgattaccccagcttcaagctcgtcatcgtcggcgatggcgggactggcaaaaccacatttgtgaagaggcatctcactggagagtttgagaagaaatacgaacccaccattggtgttgaagctcacccgttggatttcaccactaactgtggaaagatccgtttctactgctgggacactgctgggcaagagaagtttggtggccttagggatggatactatatccatggtcagtgtgcgatcatcatgtttgatgtcac

SEQ ID NO: 440931 - DNA, 353 bp, Triticum aestivum
ttcacgcgtccggctggttcctggaagggaagaatgagtgcaatagtacagatgcgaggatcgatccctctcttttggtcacaagaggctggccgacttagtcctaagcctgatatttttgtgcagaggtatgatcctacttatgaagcaaccaagttacattttgatgatctcgctcagcgatatggacagcctatcataatacttaatttaataaagactgttgaaaaaaggccaagggagatgatgctcaggcgtgaattctttaatgcagttggatatcttaatcagaatgtcccagaagagaggaaactgagattcatacactgggattttcataaatttgcgaaaag

SEQ ID NO: 440932 - DNA, 376 bp, Triticum aestivum
tctttcacgcgtccgggaatctcttgatgagacggatgcacgtcggctggtcatacacaaaatgaagaaggatatttatcagtcagtatcgggtgtacaccgtctccgctctgttatcgcattggacatcaatattccatcatccactctactgcctctaatagcaaagaagtccagatatatgtcggtgctggagttaagtggcctacccattgggaaggttccagatggtattggagatcttttcaatctccgctatctgggtctgcgtggttcaaaagtgaagctccttcccaggtctcttgagaaactctcaagtttgttgacactggacctttcagggtctggcatgaaggagctgcctagaggcattggt

SEQ ID NO: 440933 - DNA, 472 bp, Triticum aestivum
ctctcttggggggcctggaggtggccgacatggtcgtcgacatcttcttcgccgtcgacatcgtcctcaccttcttcgtcgcctacatcgactccaggacgcagctcctcgtccgcgacaggaggaggataaccttcaggtatctgtcgacgttcttcatcatggacgtggcgtcgacgattccgtaccagggcatagcctacctcgtcaacggcgaggtcagggaaggcatggtgtacagcctgctcggcctgctccggctctggcgtctcaggaaggtcaagcagttcttcacaaggctggagaaggacatcaggttcagctacttctgggtacgctgcgcgcggctcatcgcggtgacgctgttcctggtgcactgcgccgggtgcctgtactacctgctggcggaccggtacccggaccgggacaagacctggatcggcgccgtgatccccaacttccggcaggagag

SEQ ID NO: 440934 - DNA, 356 bp, Triticum aestivum
ttcctttcgtccgtgttggtgcatccggagctttatttgggctgcttggatctatgctttctgagctacttatgaactggactatttactccaacaaggttgcagccataataactcttctcttcataatcgcgatcaacgtggcaatcgggatactaccgcatgctgataactttgctcatattggtggattcttgaccgggttccttttggggtttgttctgctggcaaggccgcaattcggttggttggaacgcatcgagctgccccacactaatcagccttctaagtacaaaccataccaatatgtcctgtgggttgtggcactcgtcttgctgctcgtcgggttcacgctt

SEQ ID NO: 440935 - DNA, 423 bp, Triticum aestivum
tccacgcgtccggagcacacgagtcgacgcggcgcgacagctcagctctttcgtctcgtctcgcctcgcctcgccccgccccgcccccttccagtccctccggcgcgcgcgagcgagatcgatcgccccgggccctagatcccgatggcctcgcgccgccgcaccctcctcaaggtcatcatcctcggcgacagcggggttgggaagacttccttgatgaaccaatatgtgaacaagaagttcagcaaccagtacaaggctacgattggcgccgatttcctcaccaaggaggtgcagttcgaggacaggctcttcaccctacaaatatgggatactgccggtcaggagaggtttcaaagtcttggtgttgcattctaccgcggagcagattgttgtgttctagtttacgatgttaactcgatg

SEQ ID NO: 440936 - DNA, 429 bp, Triticum aestivum
tttgtcaagtatgacattggagcgggctttggacattttgccatcgcaaatgaggatgtgtacaagctgtctgagacaattaaatcatctgattgttgtaagatcactcgtgaacctggtcctgtcaagggagggtccactgtgattgcctttgcacaagacccagatggttacatgtttgagcttatccagaggggtccgacgcctgagcctctctgtcaagttatgcttcgtgttggtgaccttgatcgggctatcatgttctacgagaaggcccttgggatgaagcttctgaggaagaaggatgtgcctcagtataagtacactattgccatgatgggctatgctgaggaggacaagaccactgttctggagttgacatacaactatggtgtcacggaatataacaagggcaatgcatatgctcag

SEQ ID NO: 440937 - DNA, 153 bp, Triticum aestivum
ttttgtcatgtatgacattggagcggtctttggacattttgccatcgcacatgaggatgtgcccaagctgtctgagacacttaaatgatatgaccgttgtaagatcactcgcgatcctggtcctgtcaagggagggtccactgtgattgcctt

SEQ ID NO: 440938 - DNA, 344 bp, Triticum aestivum
ttaagaaggtataatttcaggccctcgagctgggctctggaaggaagcagacgcattccatagccttcttttctcggatacatgtaaaagcttacttcatgtattcttatctcagcgtgcaacatcaaaggttcctggtgctacagacttgggtttgatgcctaggaaaataactaaagtcgccattctaggtggtgggcttatgggttgtggaatcgctactgcaatgatactgagtaactatcctgtgctactgaaagatgtatacgagaaattcctgaatgctggaattgacaggatcaaagccaatttgcagagccgtgtgaggaaaggaaaaatgacag

SEQ ID NO: 440939 - DNA, 376 bp, Triticum aestivum
ttcgatgtgtttggcaccaaacgatgtacatgagatccagatccaatttgctcttgaaagggggatccctgcttatcttgctgttttgggaacaaaaaggctttcataccccaatagatcgtctgaattagcccactgttctagttgcaggattgattggcttcagagagatggaattgttatgcttgaactggacagattactcaggcctggaggttattctgcttattcatctactgaggcatacgcacaggatgaggaggatcgcaaaatctggaaagaaacgagttccctcgcagaaaggatgtgctggaaaattgcagagaaaaaaaaccagacagctatttggatcaagcctatgaacaatgattgctac

SEQ ID NO: 440940 - DNA, 306 bp, Triticum aestivum
tttctttaagatggcgccacagctgtggacgacgaaaaggaacaggataatgagatgactcttgatgaatttgagaaagtaatggaggagaagaggcaagcactcgctgcttcgaagaagtctgaagagaggaaggtcgaaattgataaggatctgcaggctatgcaactactttccaccaagaaaggaaatgatgaagttttcatcaaactggttgctgataaggaggctttgaagaagaaagagaatgctgaacgtgaagagcgtgctaagaagtctgtgagcatcaatgagttcctgaagcct

SEQ ID NO: 440941 - DNA, 240 bp, Triticum aestivum
tctttcagatggcgccacagctgtggaagacgaaaaggaagaggataatgagatgactcttgatgaacttgacaaggcaatggcggagacgaggaaagcacttgctggtttgaagaagtctgaaaagaggaaggttgatattgatatggatctgcaggctatgcaactactttccaccaagaaaggaaaggatgaagttttcatcaaactgggtgctgataaggaggctttgaaaacaaa

SEQ ID NO: 440942 - DNA, 225 bp, Triticum aestivum
gatcaagctcccctctggtgccaagaagattgtcccaagcagctgccgtgccatgattggtccggttgctggtggtggcaggactgataagccaatgctcaaggctggtaacgcctaccacaagtaccgggtgaagaggaactcctggcctaaggtgcgtggtgtggccatgaaccctgtggagcatccccactgaggaggtaaccaccagcatattggtcacgc

SEQ ID NO: 440943 - DNA, 367 bp, Triticum aestivum
cagacaaagtcttccaaatttatagcgatccaagaatagtaatagggatacaaaccacatacaaataatattacaagcaaaaaagtagaagaacgttaataagcaggaatagccagtaccagtctaaatacttttattaactgtacacttctgtttctggttttattttttccaataccttctcagcatcaataaagccccctaaggggcccaacggtgtatattttacttgcctccaactgggtataaatggcagtgccaggcagtgaagatggaggtgatcaatactattaaatggtggctgatgaaaaccaaatctatgttcctcagatttgggagcatctcgactgagtaaatcttttcccac

SEQ ID NO: 440944 - DNA, 419 bp, Triticum aestivum
tctgtacgaatgagctccatatgctccccttggtcatgctcgtcctcctgatatcgaagaccatagccgattgcttcaacaaaggtgtgtatgaccagatcgtggtgatgaaaggcttgccattcatggaggctcatgctgaaccgtacatgaggcacttggtagctagtgatgttgtgtctgggccactcatctccttttcgggtgttgagaaggtgggcaacatcgttcatgcgttaaggatcaccggccacaacgggtttccggtggtcgatgagccgcctgtatcagaagctccggagctggttgggctggtgcttaggtcacatgtgttggttcttctgagtggaaggaacttcatgaaggagaaggtgaaaacaagtggtagctctgtgctcagaaagtttggtgcatttgac

SEQ ID NO: 440945 - DNA, 418 bp, Triticum aestivum
ttttggttcggcaccgaaatggcattccacgacgaggcgccgctgctgctcaggatcaacaccgccagaggcggccacatgggcggaggcgagtgcgacgaggcggagaaccagcggtggccgccgtggctcaagccgctgctggcgaccagcttcttcgggcaatgcaagatgcacgccgacgcccacaagtgcgagtgcaacatgtactgcctcgactgcgtcaacggcgcgctctgctcccagtgcctcgcctaccaccacggccaccacgccatccagataaggaggtcctcgtaccacgacgtgatccgcgtgtcggagatccagaaggtgctggacatcaccggcgtgcagacctacatcatcaacagcgcgcgcgtggtgttcctcaacgagcgcccgcagcccaggcccg

SEQ ID NO: 440946 - DNA, 393 bp, Triticum aestivum; identical to SEQ ID NO: 436466

SEQ ID NO: 440947 - DNA, 372 bp, Triticum aestivum
cagggagtactacctgccgtcgcccaccgacgtcgtcggtcaccacggcgatgccgccgacaacatcgtcatccataaggcgcacttctccaaggacttcatcgccggtctccgagtcaaggcgtcagaagggcgcggccggccgttcagccggttcgagaccatcctcgcccacctgtggcgcaccatgactcgcgcgcgcgacctgagccccgaggagaccaccaagatccggctgtccgtggacgggcgacaccggctcggccagccggcggagtacttcggcaacatggtgctttgggcattcccgcgctccaccgtgggtgacctcctgaaccggccgttgaagcacgcggctcatgtgatccatga

SEQ ID NO: 440948 - DNA, 311 bp, Triticum aestivum
tcgtcagctgctgacccccacaggggctcgggagtggacattggcgaaaggagtcatgaggaactgtcgcccttgcatgaatacatacgtactgtgaacaccggccttgccgacaaagcgagttgaggttgtgtgaaagaaggggtccggtgcagatctgatgaggagcaagacaaggaagatgatgggcgctgtctagtctgcctggaggagtacaaagacaatgatctcctagggatactgaagtgcaagcacgacttccacaccgactgcatcaagaagtggttgcaagtgatgaacgcatgcccggt

SEQ ID NO: 440949 - DNA, 345 bp, Triticum aestivum
ttcttcacgcgtccggatgctgttcaaactcttgacgatgcacttcatctgttttccacccctgaatctttggaaggatacagaacaactgctggaaaggccggagtggtgacagctaggaaatcattcaagatacacgaactttcaaagataatgatactgcacttgaagaggttcagttatggaaatcgtgggtgtactaaactgtacaagccactccacttccctcttgaactggtcctcaatcgggatctgctgagctcaccatcatcagagggtagaagatacgagcttgttgcaaccatcactcatcacgggagcggcccgttcaggggccattacact

SEQ ID NO: 440950 - DNA, 388 bp, Triticum aestivum
ttctcttcgtccgcccacgcgtccgcccacgcgtccgcccacgcgtccgcaggcgagcagcgaccaccttccggcgagggtagcagcgatggagggcaaggaggaggacgtgcggctcggagcgaacaagtactcggagcggcagcccatcggcacggcggcgcaggggtccgaggacaaggactacaaggagcccccgccggcgccgctgttcgagcccggcgagctcaagtcctggtccttctaccgcgccggcatcgccgagttcatggccaccttcctcttcctctacgtcaccatcctcaccgtgatgggctacagcggcgccacctccaagtgcgccaccgtcggcatccagggcatcgcctggtccttcggcggcatgatc

SEQ ID NO: 440951 - DNA, 381 bp, Triticum aestivum
tccttttctaaccgatcagaccgtccctctcgccgctgccgtccccgtctctctctctcttctctctctccggccaaatcaatccacccgccggcggcgagcacagagacagaggggtaggagccgacagccaaggcagtccaccaccgcgccatggcgccgcccccgaccactagcgcccccgacggcggcctggatcccagggacgtgtgcgtcgtcggcgtcgcccgcacgcccatcggcgccctgctcggctccctctcctccctccccgccaccaggctcggctccgtcgccatccagggcgctctccggcgagccagcgtcgacccggcgctggtgcaggaggtgttcatgggcaacgtcctcagcgccaacctc

SEQ ID NO: 440952 - DNA, 371 bp, Triticum aestivum
tgtctttaccattcaggagcagcttttgcttgaaagagatccccatggcaatgttcaggttgcgaaaattgaaactgagaaaatgcttattgccatggttgaaactgaattggagaagagaagagcggcggggaagtactctgcacatttcagaggccagtctcacttcttcggatatgaaggaaggtgcggcctccctaccaattttgattccagctattgctatgcattaggctatggtgctggtgctcttctccaatttggcaagacaggacttatttcgtcggttggtaacctggctgctcctgtggaagaatggactgttggaggaactgcactgactgcgttgatggatgttgagaggaggcatg

SEQ ID NO: 440953 - DNA, 206 bp, Triticum aestivum
cacgcgtgcgtttccatatggactttgatctcatcttatagtccgttgacaaggccaaaatcttgtttgaagagggtggtgattgggtgaggaagaacagattgaaagtgtacgaaggcttgtactgtatggccgcttgaaatttcaagaaggctactagcttatttttggattccggttcaactttcacaacttatgagttgttc

SEQ ID NO: 440954 - DNA, 371 bp, Triticum aestivum
gaccttatatccaatgtacacttatcccaaaaactttacggaagtggaagaaaataccatttatagttcagagaaacttcagaacctatggtggaccttcaggcctttagagaagaccctgggggacagcgtggaatcctacaaagcatctggcgtgctgaactgagcattcaaccagggaaagtttggctgttaatgcttgcaaactccttgcggttcatgtaagcagtgaaacaaaataagttggtgacacaatcgtaacgagagtctgtgtgaacatgaacaaagcatgaatcgtatgcgcgcctttcttttggtgtgtcttgacttgaggtgtatgcgcacctttcttttggtgtgtcttgacttga

SEQ ID NO: 440955 - DNA, 396 bp, Triticum aestivum
tttttgagctccctcatgttgagaggtacttctgggccatggttaaccagcctaacttcaagaaggtcattggcgatttcaagcaggcagaggttgtacctcctgttcagaagaaggctgctcctgctaaaccaaaggaggccaagaaagaggctcccaaggcggccccaaagccagcagaggttgaggcaccagaggaagaggcaccaaagccaaagcccaaaaatccccttgatctactgccaccaagcaagatggtacttgatgactggaagaggctatactcaaacactaagagcaacttccatgatgttgctgttaaaggtttctgggagatgtatgacccagagggctactctctctggttctgtgactacaagtaccaggaagagaaca

SEQ ID NO: 440956 - DNA, 268 bp, Triticum aestivum
gggggccacgggatcgtcggcgcccatgtgcccctcggctgcggcctctccttcgcgcaaaagtacaggaaggaggacaccgtctccttctcgctctacggcgatggcgccgactaccagggacagttctttgaggcgctcaacatctcgagcctctggaagctgcccgccataccgggctgagagaacaaccattatgggatgggaacggcggagtggagggcggtcaagagccccttctactacaagcgtggcgactatgtgcctg

SEQ ID NO: 440957 - DNA, 244 bp, Triticum aestivum
ccccctccacctcctacccagcgtgggctcccgttcggaaccccaagctcccccgccgccggctaaatggccccgaatcgaggcggcaaggccccggtgccggcgaagaagaaggcggcggacaaggtggtgaacccgctgttcgagaagaggccgaagcagttcggcatcggcggggcgctgccgcccaagaaggacctccaccggttcgtcaagtggcccaaggtcgtccgcattcagcgcc

SEQ ID NO: 440958 - DNA, 385 bp, Triticum aestivum
tttttagctcacccacatactccgggtgcgggggagaactgtaagtggaatggggggcacgcggatctctagtcatgaagtgtgggcgcacctgacgactcccactgcagatgcaactcacgagatttccacagagctccaggccaatcctcacctgatcatatgaaactacagcaacggaaaccttgttgcatgcccgcttgcacacatgacgggaggaacacattgtaccattgctcacgcgcttgaaaaaaccaagtaccccaactctgacctctactggaagaagtctgaggaccactaccacttgtcatgccagttcactaccgatctgattgcgacgaaccatgctgacttcatcatcacatgcaccttccaagagatt

SEQ ID NO: 440959 - DNA, 229 bp, Triticum aestivum
atccccgaccagtccgctattaccaaggataacgtggtcatccagatcgacggcgtcctctacctcaagattgttgatccttaccgtgcttcatatggcgtggagaatcccatttttgcagtcattcaacttgcgcatacaactatgacaagtgagcttggaaagataaccttggacaagacttttgaagagagagacacattgaatgagaagattgtgaggtccataa

SEQ ID NO: 440960 - DNA, 375 bp, Triticum aestivum
ttattcatccctctcctgacgccgtacaaggggggccatttcgatctcgccggcagggtggtgatggcgccgttgacaaggcagcgctcctacgggaacgtgccacagccgcacgccgccgtgtactacggtcagcgcgccaccgtcgccggcctgctcatcgccgaggccacaggggtctcggacacggcacagggctacactgacaccccggggatatggaccgcagagcacgtcgaggcgtggaagcccatagttgccgtcgtgcacgccaagggcgcgctcttcttctgccagatctggcatgttggacgtgtgtgcaccttcgagctgcagcccggtggcgcctccccgctgtcgagcacggagaagggg

SEQ ID NO: 440961 - DNA, 402 bp, Triticum aestivum
cttcgacgggccggcctccgacgacggcgggtgcctcgcgttcgacgaggccctgctgcccgcggagccgctcgccgccgacgagcaggtcgaccccgacgacgtggtggccctcccctactcgtccggcaccacggggctgcccaagggcgtcatgctcacccaccgcagcctcgtcaccagcgtcgcgcagcaggtggacggggagaacccgaacttgtatttcggcccgaatgacgtgctgctgtgcgtgctgccgctgttccacatctactcgctcaactcggtgctgctggcggggctgcgcgccgggtgcgcgatcgtgatcatgcgcaagttcgaccacggcgcgctggtgcgcctggtgcgcgcgcacgcggtcaccgtggcgcccttcgtgcc

SEQ ID NO: 440962 - DNA, 356 bp, Triticum aestivum
ttgtcattgtcaaggtcagcgaggtcgagcttgagtttttgactggcatcaactcggtggaggatgatgttgccatgaagctgtggcgccctacctttaagctcatgcttgtcactcttggagatcaaggatgcaagtactataccaaggatttccgtggaactgtcccatcctacaaggtacagcaagttgatacgacaggtgctggtgatgcatttattggttctctgctccgaaaaattgtccaagatccatcggcattgcaagataaaacaaagcttgagggggcgatcaaatttgccaatgcatgtggagcaatcacccgcacgaagaaaggggcaatcccttcattgccc

SEQ ID NO: 440963 - DNA, 405 bp, Triticum aestivum
ctttctcgtgggcggcggctatgcccgcgccgggggcgctagccctcgcggggggcctgctgctcgccgccgcgtccatctgcgcggaggccgtgtggctcgacatgccgcagaccgggaccaagagcgtgtcggaggagatccaggccaacgtggtggtgctcgccgactacgccctcatgtacgagtgccacccctccgcccaccccaccatcgccgtcaagggtacttcaccatatgggtacaccttacatgaaagtggaaacattacagttggtcaatttgcattcacaacctcggaagctggaaacttccttgcctgcttctggatagatagtgcacagaaaggatcaggcgtatctgtaaatcttgattggaagactggaattgcaacaaaggattggg

SEQ ID NO: 440964 - DNA, 370 bp, Triticum aestivum
ttttctctcctgctgcccgttgctcgccgccgtccggcttcgtcttcgcgcacccaggatagatggcgtcccacattgtttgatacccgcgcatgggccccaagagggagctcaagtttgccctggagtctttctgggatggcacgagcagcgccgaggatttggagaaggttgccaccgacctcagggccagcatctggaagcagatggctgatgctgggatcaagtacatacccagcaacaccttcttctactatgatcaggatcttgacaccaccgccatgctctgtgccgtcccagaccgttactcatggaccggcggggtgatcaatttgagcacctacttctcgatggctaggggcaacgccac

SEQ ID NO: 440965 - DNA, 359 bp, Triticum aestivum
gttttcctgctttacttgattgggaagtcacggaggagatattgaaactaaaggcagagcttgcagaagcttcaagtaatccggaagctttccttttggatgctcttcattccagtggctattctggtgccttggcaaacccattgattgcctcagaggcttcagttagcagattaaatacagatgttctggaagaatttcttgctttgaactacacttgcacgcgaattgttctagctgcgtctggtgtggaccatgatgaacttgtatcaattgctgaaccactcctgtctgacattcccactgcatctggaacaggaaagccaaaatccgtctatgttggtggagaatatagacgg

SEQ ID NO: 440966 - DNA, 343 bp, Triticum aestivum
gtgttgaaggcgccgcggacgatgactcgagggggatgtattccggcgcctggtcgcctctcctgctcggcctcgtgctgctctcgctcttctcagtgggcacagtgtcggcgcagcaaaagttcggcatcaactacgggcagatcgccaacaacctgccggaccccacgcaggtggcgagcctgctccggtccatgaacgtgaaccgggtgaagctctacgacgcggaccccaaggtgctgacggcgttcgccaacacgggcgtggagttcatcatctcggtgggcaacgagaacctgcagaccatggcgaccagccccggcgcggcgcggcagtgggtggc

SEQ ID NO: 440967 - DNA, 446 bp, Triticum aestivum
gaagattgtgcgtgacttctgccgcaacattggcttcatctctgatgatgttggccttgatgctgaccggtgcaaggtgcttgtcaacatagagcagcagtctcctgacattgcccagggtgtgcacggacatttcaccaagcgccctgaggatattggtgctggtgaccagggtatcatgtttggctatgccaccgatgagacccctgagctcatgcccctcagccatgtgcttgccaccaagctgggtgcccgcctcactgaagtccgcaagaatggcacttgtgcctggctaaggcctgatggcaaaacccaggtcacggttgaatacctcaacgagggaggtgccatggttcctgtacgtgtgcacactgttctgatctccacccagcatgatgagactgtcaccaatgatgagattgctgcggacctcaggagcatgtcat

SEQ ID NO: 440968 - DNA, 434 bp, Triticum aestivum
ttttcaagaccggaaggagcggagccgccgagccgggaagagccaccatcccatcgcctccgtttccgaagggtcagagatggcggaccgtgctaaccacccgtctgtcatgcagaagtttggtggacagttccaccttgcctccagcttctctgagggtgttcgtgctcgcaacatctgcccttctgtgccatcctatgagaggcgcttcaccacaagcagctacatgactcagaaccttggcatcagtgtcccaatgatgtcatcttctccattgtttgccaatgcaccccctgagaagaaaggtgtcaagaactttgcgattgacttcctcatgggaggagtgtcagctgcagtttccaagactgctgcagctcctattgagcgtgttaagctgcttatccagaaccaggatgagatgatcaaggctggca

SEQ ID NO: 440969 - DNA, 490 bp, Triticum aestivum
tttcacgcgtccgccacccggcccacacgcggtgaagaacgcctactgcctgctcaactttggagacagcattaccacggatcatatttcacccgcaggcagcattcacagagacagtcctgctgccaagtatttgctcgagcgtggcgtggaccggaaagacttcaactcatatggtagccggcgcggtaacgacgaggtgatggcaagaggaacatttgcaaacatcaggattgtgaacaagtttctgggtggagaggtcgggcccaagactattcatgtgcccacaggggagaagctctctgttttcgatgcggccacgaaatacaaatctgaaggtcatgatacgatcattcttgctggcgccgagtatgggagtggcagctctcgtgattgggctgccaaggggccgatgcttcttggtgtgaaagcggtgattgccaagagctttgagcggatccaccgaagcaacttggtcgggatggggatc

SEQ ID NO: 440970 - DNA, 363 bp, Triticum aestivum
tttgttcgtgggttcagaggaaagtgcccttatggggctttttagctttatttacaggggaaagttgacgacaaatgagccaacccttctgcttgatatcttgatgatatctgataaatttgaagttgcttcttgcatgagacactgcagtcaattgctaaggagctttcctatgaccacagaatctgcacttctctatctagatctgccttccagcatttcaatggctgcagctgttaaaccactgactgatgctgccaaggaattcctcgctaacaaatacaaggatctgaccaagtttcaggatgaagtgatgaacattccccttgctgggattgaagccatcctatgtagcaatgacct

SEQ ID NO: 440971 - DNA, 352 bp, Triticum aestivum
tcgtcaccggggccaccgtggacgccgacatcacgcgcatgtctccggtggggccccaaggagtgggcccgccccatcgtccgcatcgcggtcgatggcgccgtcgacctggtggaccacgccgttgcacgcgccttcgggcaatgccactcgttcaattacctgcgcattcaggcgaagcgggagagcatgccgccgtgcgggccggacggggagtacgacccgacgcaggcgaacgtgcaggcgctgctcgcggcggcggacgaggcgatgaagcagcgcaacgtggagtcggtgctcttcgaggggaggcggatcggggagcagaccaacgcggagaagctggagtggt

SEQ ID NO: 440972 - DNA, 411 bp, Triticum aestivum
tttcacgcgtccgcccacgcgtccgcccacgcgtgcgcccacgcgtgcgcccacgcgtccggtctttttcttccacgacacgttgaggccagggtccatgatcactccgaccatcccgccgaccacctacatgccggcgcttctctccggcaacgtcgccgactccatcccattcaccaccgagcacctctccgacatcatcacgatgttcgcgccggcgtcactcacgatgaccagagagatacggtggacgctggacacctgcgagcacccacggacgctccccggccagaaagcaggctgcgccaccttcctcgagtccctcgccgagctgccggtgtccctgcttgggaggcgaaacgtgcgcgcgttctccgccgtggatctgcccatggatgccgcggggacacc

SEQ ID NO: 440973 - DNA, 409 bp, Triticum aestivum
gtgagagggagagcctgccttgcctggccgagattcctctcggagtcgggctcgggggatctcgccggccgctacgcgatggagggggaggacggcggcggcggggtggactgggacagcctggccgaggcggcgtcgggggccgtcggcgcgctcgtcagcaccaccgtgctctacccgctcgacacctgcaagaccaagttccaggccgacgtccagacggaccagggcgcgcacaagtacaggaacctttcagatgtcttttgggaagcaattaagaaaaagcaatttttgtccctatatcagggccttaagacgaagaatatccagtcgttcatttcgcagttcgtttacttttatggctatagctatttcaaaagactctacctggagaagagtggagctaagt

SEQ ID NO: 440974 - DNA, 432 bp, Triticum aestivum
ttttacgcgtccgcaagaattcctcccaccccggccgtctctccgccgccaccgcggccgcagctagataagaagaaaaaaagagagagaagaactcgtcgggagggctcgagatctgtgtcgggagagagggaattcttgagatcggaatcggaacaagcgggcgcgctcgggatcggggttaccatacaatttttcccaggaacctttagtgaatgtgctaatggagtcaaagggtggcaaaaagtctagcagtagtagttccctgatgtacgaagcacccctcggctacagcattgaagacgttcgacctgctggaggcgccaagaagttctctgctgcatactcgaactgcgcgaagaagccatcctgatatcgtttttggcatccccttctcgtagtttaggatttttatgcaattttattctgact

SEQ ID NO: 440975 - DNA, 415 bp, Triticum aestivum
tttttcatcacccaccccccgccccctcaccactccaccagcaagcacaagcacaagcagggcaccaccgcaggcacaagagaggagagggagcaagagctcatacatactcttcaaccaaggcaaggcaagaggatgaacgaggaggcggaggggaggggggcgaggcccggcgtgcttaaggtggtggtggcgcaggggaccaacctcgccatcagggacttcacctccagcgacccctacgtcgtcgtccgcctcgcagacaagagtgcaaagacaaaagtcatcaacagttgcctcaatccagtttggaacgaagagatggtcttctctatcagggaacctctagggatcatcaaatttgaggtgttcgaccgggaccggttcaagtacgacgacaagatgggacacgcct

SEQ ID NO: 440976 - DNA, 462 bp, Triticum aestivum
ttttatgacaagatcatagctgtctgtgctgatgatcctgagtaccgtcacttcagagacatcagtgaacttcccccgcatcgcctacaggaaatccgtcgcttctttgaagactacaagaagaatgaaaacaaggaggttgcagtgaatgatttcctcccagcagaagatgccatcaacgcaatcaagtactcgatggacctctacggttcgtacatcatggagggcttaaggaagtgatctccagttggcggactgcggatgctacgcgatccgccctacggcttatcaatagtacgacaaacatctatgttaacatgatgatcgaaaaccatcagtctgttggggatctatatataccttctgtccatgctgagtcaagcatgggtacattttccttccgtatatgccatgtcaggtccaagtatgtgacctcttgctggaaccttttttgtcaaaccg

SEQ ID NO: 440977 - DNA, 422 bp, Triticum aestivum
ctcattcgtccgaacagagagcattctaccaccgcaccgctcgagtgaagtgagagctttgcacgaaaagttcatcagcgaccatgaagggcaccaagctcgcggcgatcctcatcctccaggccgtcctggtcatgggagtcctctcacacgtgaacgccgactatttccccaagtgctgcaacaactgcaggtccttctccggggtcgacgtctgcgacgacgcccaccccaagtgccccaagggctgctcggcgtgccgcgtggtgtcgacgagccccgaaatgtggcgctgcgcggatatgaaatccaccgtcgacggcacctgcggtgggccctgcaagaagtactgatcggctcatgccagcatgatatgttccgcctaaaatgaaataaaagctcagacgagatgagcagcgtca

SEQ ID NO: 440978 - DNA, 403 bp, Triticum aestivum
tttttacgcgtccggtccttccttccttccttgtcggtaaggttctgtggccatgtctgacagcgagaaagaggtgccagtgccagtgcaagcggacgaatgcgccgcccggggggccgactgggaggtggtcacactcaccgggtccacctacgccgtcgtgcccagcgggccagaaggagcatcagagggcacgaggctcggcgactgcaacgacagccggggctcgtccaccacgctgctcatgtcggaccactttgtgttcccccccagcgagcacgagaacctgtccatagagaccgtcctgctcgacccgtctcaggaaagtaccagccttgaagatgccggcttcaagaatgtcggtgggagctacgatgatgggtccgagactgtcaagtactat

SEQ ID NO: 440979 - DNA, 417 bp, Triticum aestivum
ttcttcccaagatatggtttcttgcggtcatctactttattcttggttgcccaggtgcctactatctgtggtaccgaccactttaccgcgccatgagagggattttcccatcgatcagcttgataggaaagagcgtcgcagtaggggtgttctactttcttggctttgcaatgttttgcatcgagtcatcactaagcatgtgggtcattcagcgcgtgtatcactattttcgaggaagtgggaaagaagcacagatgaggcatcaggcagcacgtgccacaactagggcagcattttgatattgaaaagcaatgcatacattgatatggtttttactctcgcaacttttaaattgtagagacttgtaagttaactggcatgtaggactttgtttgtcctatgcaaaagtttatgccc

SEQ ID NO: 440980 - DNA, 302 bp, Triticum aestivum
ttttcatcatccccgataccaaagctcatcttcttctccttgaaatctttttgggttcacagatttggaggatgtcttgcaactgtggatccggttgcagctgcggctcagactgcaagtgcgggaagatgtaccctgatctgacggagcagggcagcgccgccgcccaggtcgccgccgtggtcgtcctcggcgtggcgcctgagaacaaggcggggcagttcgaggtggccgccgggcagtccggcgagggctgcagctgcggcgacaactgcaagtgcaacccctgcaactgttaagct

SEQ ID NO: 440981 - DNA, 455 bp, Triticum aestivum
ggtctcccacgcgttcttgtcgaccccacgttccaagttcatggtccgggatttgattgatctccgttctaacaactgggttcctcgccgtgctgagattaaggcgaagacaatcagcgagatccacacagaggctgaaaagaaccttggattacgtccaggggccacagcgaacatgaggaatggccgtaatgcaccaggtgggcctctttcgcctggaggtttttcagtgaaccggccaggaacaggaggtatgatgcctgggatgcctggatctagaaaaatgcctgggatgcctggtttagataatgataactgggaagttcagcgttctagatcaatgccaagaggcgatccgcttcgcaaccagggttcgttgattaataaggtttcatctattaacaagccatcacccatcaaccccaggcttcttcctcaaggcactggagcactga

SEQ ID NO: 440982 - DNA, 230 bp, Triticum aestivum
acccacctctcaaccatggcggagcataccgagaagtctttcctcaagcagccaaaggttttcctcatcaccaaaaaggccgacaaggcaaagaggcccggcaaggctggcaaccgcttctggaagagtgttggccttggtttcaagaccccaagggaggcgattgatggtacctacattgacaagaagtgcccattcactggaactgttgccatcaggggcagaatcat

SEQ ID NO: 440983 - DNA, 415 bp, Triticum aestivum
gttcttcagaactaccttcttctgggctacaggtggccttatttcaaggctgggggcactcaaggacgcatcatcttccacaagtggaaggagggcaagtgggccatcctcttctcgcaccctggcgattacacgcccgtgtgcaccacctagctgggcatgaccgccaagctgcagcccgagttctccaagaagaacacgctcgtcatcggcctcagcgtggacaacgtcgatgaccaccactggtgggtcaaggacatctagtcgacccagaactgcacggtgaactaccccatcgtggccgacccggacaggacggtggccgagacctactgcatgatccaccccaactcgcccctcaccatggccggcaagctcaccgtccgcaccgtctggatcatctaccccaacaaca

SEQ ID NO: 440984 - DNA, 385 bp, Triticum aestivum
tttgttaaaggtaatcccaatccccacagaagtgggggtttattaaccctaggggggattcccgatcccggcgagcgagatggccaacccgagggtgttcttcgacatgaccgtcggcggcgcgccggccgggcgcatcgtgatggagctgtacaaggacgcggtgccgcggacggtggagaacttccgcgcgctgtgcaccggcgagaagggcgtcggcaagagcggcaagccgctgcactacaagggcagcgccttccaccgcgtgatccccgacttcatgtgccagggcggcgacttcacccggtgcaacggcaccggcggcgagtccatctacggcgagaagttcgccgacgagaagttcgtccacaagcacaccaagccc

SEQ ID NO: 440985 - DNA, 364 bp, Triticum aestivum
ttatcgcgtccgcccctcacgcacccagccgcgactcggccgcaatggcggagcccgtggccaacgcggcggcgcccgcccccgcccccggccgcctccgcaacgccttcggcggcgtgctctgcgcctttaccctcatcctcatcggcgtcctcgccttctcgatccgcctcttctccgtgatcaagtacgagagcgtgatccacgagttcgacccctacttcaacttccgcgtcactcagtttctgtcgaagaatggaatctacgagttctggaactggtttgatgataggacatggtatccccttggtcgtgtgattggtggcactgtgtatcctgggttgactttgacagctggaagcat

SEQ ID NO: 440986 - DNA, 374 bp, Triticum aestivum
tcggtttgttactgttagcttcaaagagggtcttggccaaaagtttaggcaaccttctgggacgggaattgacttctcagcgtttgaggactctgagttgttgaaacaggggggaatggaaatatatccacttgcagttaaagctgaaacaacactgtctgctgatcaaccatcggagggggaagaccagaagccaaaaactccaaactcgcatatcacacaggctgtgtttgaaaagaaagaaagtggcgactatcaagtacgagttgttagtcagatcctttgggtgaatggcaccaggtatgaattgcaggaaatatatgggataggaaactctgtggaaggggacactgatgcaaatgatcctgggaaag

SEQ ID NO: 440987 - DNA, 388 bp, Triticum aestivum
tttgtttccatgggtgtgtactctgatggttcatatggtgtgcctgctggtcttatctactccttcccagtaacgtgcagtggtggtgaatggacaattgttcaaggtctcccgatcgatgagttctcgaggaagaagatggatgcgaccgcccaggagctgtcggaggagaaggcgctggcctactcatgcctcgcgtaaatccacattggaagggcagctgctcctctggatgttttgaataaatgaaaccttccgctccttagaaactctcgtctccacccagaacagccgcacatcgcgatgcatgctccttttcgctggttttcccagtgtgtatgaaggcttgtagctccccttttgcctgatgatttacaggacagtacat

SEQ ID NO: 440988 - DNA, 321 bp, Triticum aestivum
tttttataatgattgccttgcatgacggggaagttgccacatgttcacccttcaccaattgacttggttgaaaagatgctgactttcgatcctagacagagaataacagttgaaggcgcacttgcgcatccttacctggcatcgctgcatgatataagtgatgagccagtctgcacgatgcccttcagctttgacttcgagcagcatgcgttgtcggaagaacaaatgaaggatctaatccaccaggagggcatcacgttcaaccctgattaccagtagctggagttcctttgatcggcttcattcatatggaaagttttc

SEQ ID NO: 440989 - DNA, 424 bp, Triticum aestivum
tttatagagctctcctctccatacctctcccttcgctccaccaggagtctagggttagagagagagagagagagcgagacgagcaaaaacaatctctcgccccactgttataccaagttcgcatccatctcactgttatacatccttgtatcacaatgggtggcctatccatggagcacccttgggcattcgccttcggcctactaggcaacgtgatctctttctcgagcctcctggccccgataccaacattctaccggatcttcaagagcaaatccacgaaggggttccagtcggtgccctacgtcgtggccctgttcagcgcgatgctgtggatcttctacgcactggtcaagaccggtgagggcctcctcatcagcatcaacgctgtcggctgcgtcatcgagaccgtctacatcgtcat

SEQ ID NO: 440990 - DNA, 338 bp, Triticum aestivum
tttattcgtccgaaccaactcatttctcctaccacctggggaccaccagcccaagcagagccatggcgcccaacggagacaacaccgtggccaacgtccacagcgggatcgacagcaccaacaagacgctgctcaagagcgacgccctctacacctacatactagacaccaccgtctttccccgtgagcacgagtgcatgcgcgacctgcgcctcatcaccgacaagcacccatggggctacatgcagtctgcgtcggacgaggcacagctgctggggatgctgatcaagatggcgggcgccaagaagacgatcgaggtggggcgtgttcacgggcta

SEQ ID NO: 440991 - DNA, 390 bp, Triticum aestivum
tcgtttgcattaacagttctccttcaacgatcattcaaaactactaggaccacactctcaaccccgcaaaggcgaagattttcgtctgagaggacatttcatacaagtcaaacttcaaatgctgggcttgcttatctcggcgggcaatcagttgttggagctaccggattaccccaagttgaagcaaaatatccagctttgctctttaaacagcagcttgtggatctaattgagaaggtttacggtatgataagtgacagcgtgaagaaggaactaaaccctttacttgaattgtgcatccaggatccacgaacttctcactcaaatctggcaaaaagcaatacaaatggcttgggacaacagaaccaattagcacattggttaagcatc

SEQ ID NO: 440992 - DNA, 381 bp, Triticum aestivum
tcgtctacgcgtccgcgaaaccctagccgccgccgccgacgaccgcgagcaggctcagatgggaggcaagtgcccgcaccgcaaggtcaaaaagcgccgtctcaactgcaagcaggtgcgccgtggcaagttcctcgtcaaagccgacgacgccgtctacgacgagctcgtcaagctggccgaccagggcaaggattccgagggcaaggcgcttcccgtcgacgaggacctccccggcatgggccagttctactgcctccactgcgatcggtacttcgcggatgagaccgtgaaggaggatcactaccgctcaaagcgccacaagaaaagggtcaagcagttgtctggaccagccccacacacgcaaatagatgcccgatc

SEQ ID NO: 440993 - DNA, 437 bp, Triticum aestivum
gtacacatttggtcttgcagccggtggaccacttcaggttcctccactccaacctgggtcctcagccaggacgctcctagctatggttttctcccagaatgtctctcctggagcaccgaactcgctactgcaggttgcagtgaagaataatcagcaacctgtgtggtatttcagtgacaaaggttcgctgcatgtcttctttggtgaagatggcaaaatggagcgaacgagttttcttgaggcctggaaatctttacctgatgacaatgaattttcaaaagaataccccaattctgtcatcagcagcatagatgccaccattgaacaccttgcagcatcaaatgtgttctttattgccaagcggaaaaatgcaaacatggatgtgctgtatctgtctgcgaagatcccccgtgggattccatttctgatagagctta

SEQ ID NO: 440994 - DNA, 365 bp, Triticum aestivum
ttgatttctagtgacgacggtcattcagcccatagcaaatatatgccgaagctcatctgttagtgatcatgtatacacaatggcaactcttaccgaccaagactcaagaatattgttcttcaaggaagctttccaagacgatgaaccactgcagcatgtggatgacctcggctctgcagcgctcaagaaatgtgacggtcttccccttgctcttgttaccaccgccaggttcttgcaaagcgcaggtaatccaacacccatgatatgggcaaaattatgcgccgacctgggtacacatctgaagagtgatgatctatttgcaagaatgaggcgtgtgcttgtccagagctacaccagccttgata

SEQ ID NO: 440995 - DNA, 385 bp, Triticum aestivum
tttatttctagtgacgacggtcattcagcccatagcaaatatatgccgaagctcatctgttagtgatcatgtatacacaatggcaactcttaccgaccaagactcaagaatattgttcttcaaggaagctttccaagacgatgaaccactgcagcatgtggatgacctcggctctgcagcgctcaagaaatgtgacggtcttccccttgctcttgttaccaccgccaggttcttgcaaagcgcaggtaatccaacacccatgatatgggcaaaattatgcgccgacctgggtacacatctgaagagtgatgatctatttgcaagaatgggcgtgtgcttgtccagagctacaccagccttgatagccaggttgccaggacattct

SEQ ID NO: 440996 - DNA, 347 bp, Triticum aestivum
cccacgcgtccgagcagctgcaattgcctatggtcttgacaagaaggctaccagtgtcggtgagaagaatgtgcttatctttgaccttggtggtggcacttttgatgtctccctccttaccattgaggagggtatttttgaggtgaaggccacggctggtgacactcatcttggtggggaggactttgacaaccgtatggtgaaccactttgtccaagagttcaagaggaagcacaagaaggatatcagtggaaaccccaggtctttgagaaggctcaggacttcttgtgagagggcgaagaggaccctttcttccactgcccaaaccaccattgagatcgattcac

SEQ ID NO: 440997 - DNA, 156 bp, Triticum aestivum
tcgttctcgcgtccgagcagctgcattggcctatggtcttgacaggaaggcttccagtgcaggtgagaagattgtgctaatatgtgaccttgggggtggcactcttgatgtctatctgcttaccatagaggtgggtctgttggaggtgaaggccac

SEQ ID NO: 440998 - DNA, 362 bp, Triticum aestivum
tcgttttcgtggaaaccatggattgctaggggcaacgactttagcttaacccaattttggatcactggaggttcctacaatggcaacagcctcaataccattgaagtgggatggcaggtttatccaaatctatatagcgatagcaatacgagactcttcatctactggactggagatgcatatcaaacaacaggatgttacaacctactatgctcaggcttcatccaaacaagcaatcagatcacaattggcggcagtatctccccaatgtccacctatggtggcacacaatatgacatcgatattttagtttggaaggaccgagcggggggcaattggtggctgcaagtgggaggtgatta

SEQ ID NO: 440999 - DNA, 376 bp, Triticum aestivum
gttgtttggaagagaaggtgcagcggttgctcaagacatgggagatggagatgttccacacggtgcggcccgaggaccagaagagcgtgcactcccagggattcaccagcagcaccaacgggatgaagcctctgacccgaaaggagtggacggctattggcggctacaacgcgttcctggcaaccaagctgccgctggagcaccgcatctacgacccggacacggagacgttcgactccggcatggagacgttcctcacggcattcccccggggcttcgccatcgaggtgctcgacgtgtactgcagcggcccgcctagggtggccttcaagttccggcactgggggtacatggaggggccgttcaagggccaccc

SEQ ID NO: 441000 - DNA, 344 bp, Triticum aestivum
tgattaatatactctgagtaattcaaggtttgccttgagcatagaaccaggaaatgaagaacttcaggaatacgctgcaagtacagctgatctgcgcaataagaatacaccaacggtgccaacaacaattgcgagagagaagcagtgcaatcctttcttgaggacctcaagtccagagataaagaaaaggctgtccattccagatcatttcgatgatgcacgtgttcttgaagttatccgacgggcgaaggataatttttgactaaccacaaaggaaattcttataaaacgatgacccaaccatcttttcgaaagaagtagagtggacaaagaaccccgcaaga

SEQ ID NO: 441001 - DNA, 434 bp, Triticum aestivum
ttactcgtccgctagctagtcatggcatcttccaagagcagtcttgcaatgttcgcactggccatagtcatggccgtggtggctgacgtctcggcgcagaacaccccgcaggacttcgtcaacctgcacaaccgcgcccgcgccgtggacggtgtcggcccggtggcgtgggacaacaacgtggccaggtttgcgcaggactgggcggcgcagcgcgccggcgattgccggctccagcactccggcgggccgttcggcgagaacatcttctggggttccgggcagtcgtggacggccgtcgacgcggtgaagctgtgggtggacgagaagcagaactaccatcttgacagcaacacctgcgacgccggcaaggtgtgcggtcactacacgcaggtggtgtggcgcaagtcgacccgcatcggctgcgcgcgcgt

SEQ ID NO: 441002 - DNA, 350 bp, Triticum aestivum
ttctttcgtccgttcttccccgtcccgatcgacagaaacccaagaaagtctgaacaaagcaccgatcaaagaacgatccctcccaaatcaatcgctcacccttccgcttcctaacaccagctaaatcgtccattccttcgaccagcagctcgaatccccaccgacaatgtcgctgatccgtcgcagcaacgtgttcgaccacttctccctcgacctctgggaccccttcgacggcttccccttcggctccgacggcagcggcagcctcgtcccgcgcaccttctttgacacggtggccttcgtcggcgcgcggatcgactggaaggagacgcccgtggcgcacgtgttca

SEQ ID NO: 441003 - DNA, 330 bp, Triticum aestivum
tggtcaatccagccccccctccgatctcgccgagaaatcttctccgatcgaagcgaagccaaggctctctcgtcctcctccccaagatgcagatcttcgagaagacccttaccggcatgaccatcacccttgaggtcgagtcctctgacaccatcgacaacgtcaaggcaaagatccaggacaaggagggcatccccccggaccagcagcagctcatctttgctggcaagcagctcgaggatggccgaacccttgcggactacaacatccagaaggagtccaccctccacctggtgctcaggctccgcggtggcatgcagatcttcgtca

SEQ ID NO: 441004 - DNA, 398 bp, Triticum aestivum
caagttcaataatgtctatgtttagaacctagctgagactaccactgaagatgacttgaaggaaatctttgggaagtttggagcaataacaagtgttgttgtaatgcgggatggggatggaagatccaagtgttttggatttgtgaattttgaaagtccagatgaagctgctctggctgttcaagatttgaatggcaagaaatttagtgacaaggaatggtatgttggaagagcgcagaaaaagtcagaaagggagattgaattgaaagagaagtttgaaaagaaccttcaagaggcagcggataagtatcagaacaccaacttgtatctgaagaacttggatgatactgttgacgatgaaaagttgcgtgaactttttgctgagttcggaactatta

SEQ ID NO: 441005 - DNA, 404 bp, Triticum aestivum
gtattatcatcaacatgtactccattggaggctcaatcggctatgcaggctccgcaatttatgctaccacaaaaggtgcaatgaactaacttacaaggagtttggccaccgagtgggcctctgacaagattcgtgtgaatggcatcgccccaggatttgtcacaaccgacatgcttaaagatatagatacagagtacgtgaaggaagagcactcgaagaccccattgggacagagcggcaagccggtggagatagcctctgcagtgtcatttttgtgtatgccggcagcttctttcatcaccggccagatcatttgcatcgatggtggtcgaaccattagtgcttagccatcaccaccgttccataagttattgaatatttggcgaataccaccgtgggagagt

SEQ ID NO: 441006 - DNA, 417 bp, Triticum aestivum; identical to SEQ ID NO: 436423

SEQ ID NO: 441007 - DNA, 329 bp, Triticum aestivum
taacccaaagaagccctttgctgccattgttggcaacacctaggactcatctaagattgttgtgatcgagtctctgctggccaaggttgatatccttatccttggtggcggtatgatcttcacattctacaaggcccagggattagctgttggaaagtctcttgtggaggaagacaaacttgaactggcaacttcactgatcgaaacggcaaagttcaagggtgttaagctcttgcttccgactgatgtcgttgtggctgacaagtttgcagcagatgccgaaagcaagattgttcctgccactgctatccctgatggttggatgggtc

SEQ ID NO: 441008 - DNA, 448 bp, Triticum aestivum
tttttacacaacacaacacagagacacacaagagcagctagcagcaagagacgagcgcagcagataaggtagcgacctcccacctgtaaacaggttcgtgccttctgtaaagaaaatctttggttcaccagctctcctggctgcacgtacctagctcaagctcgagggcaccggccatgtcgcccgtgcacgtcccggagctcagcagcggcgggtcggggtcggggtcggggtcgctcaccctgaaccccgtgcagcgcgcgctcacccggctgtcgtcgtcgtcggccctcacgcccaggtcgcccccgccgtcctacgggagcatcgtcaccgtgctcagcatcgacggcggcggcgtccgcggcatcatccccggaaccatcctcgccttcctcgaagagaagctccaggagctcgatgggccggacgtgaggatcgcggatta

SEQ ID NO: 441009 - DNA, 450 bp, Triticum aestivum
tttattcgtgggcaaggagggcattcccccggaccagcagcgtcttatcttcgccggcaagcagcttgaggatggccgcacccttgcggattacaacatccagaaggaatccaccctccaccttgtcctccgccttcgtggtggcatgcaaatctttgtcaagaccctcaccggcaaaaccatcaccctggaggttgagtcctcagacaccattgacaatgtgaaggccaagatccaggacaaggagggcatccccccggaccagcagcgcctgatctttgccggcaagcagctcgaggatggccgcacccttgcggattacaacatccagaaggagtccaccctccacttggtgctcaggctccgtggtggcatgcagatatttgtgaagaccctcactggcaagaccatcaccctggaggtggagtcgtctgacaccattgacaacgt

SEQ ID NO: 441010 - DNA, 431 bp, Triticum aestivum
  unsure (1)..(431): unsure at all n locations
gtatttggctcccagaagtctgcaaacctgacaggatcgcagccgggcacgcctttgtcaggggggactatggctggtggaagtggaagtcaaggagcagaaggaactaaccaacttctcgggaagagaaaaatacaagatttggttgcacaggtggatccccttggcaaacttgatccagaagtggaagatttggttttagagattgctgatgacttcattgaatcggtgactgcatttgcatgtaccctggcaaagcacaggaagtcatccgttctggaagccaaggatgtgttgctgcacttgcagagaaattggcatctgacggttcctggtttttcgaaggaagacangaatccacagagaaattatgtaaaggcaagtagtggatcctcaacagccagagtgtgatgctgctggagttagaagcg

SEQ ID NO: 441011 - DNA, 444 bp, Triticum aestivum
ctctcccccgatccccaaccattctccggcgaacccgccccatccgccgtgcttgggtagatagatggagggcctggcggaggcggggagcggcggccatctcgcgcctctcctcgacggcgtcggcggcggcctggacgcggccctcctccgccgcctctacgccggccacttcctcgcccgatggggcgcgcgcatgtgggagttctcggtggggctgtacatgatccgcgtgtggccgggctcgctgctcttcgccgccgtctacggcgtcgttgagtccgcctccgtcgccgccttcgggcccatggtcggcaccctcgtcgatagcctcacctaccttcaggttttgggcctgtggctactagttcaaagctcatccttcatcgttgccggagtctccgtaaccgcgctgctggtatacgatgacctgaaagtgacgag

SEQ ID NO: 441012 - DNA, 337 bp, Triticum aestivum
tcgctacccaaagaagccctttgctgccattgttggcagctccaaggactcatctaagattgttgtgatcgagtatctgctggccaaggttgatatcctcatacttggtggtggtatgatcttcacattgtacaaggcccacggattagctgttggaaagtctcttgtggaggaagacaaacttgaactggcaacttgactgatcgaaacggcaaagtccaagggtgttaagctcttgctttcgactgatgttcgtgtggctgacaagtttgcagcagatgccgaaagcaagattgttcctgccactgctatccctgatggttggatgggtctggat

SEQ ID NO: 441013 - DNA, 415 bp, Triticum aestivum
aatggaagcaatacatattatgtacagaattattcaggagttttttagccacatccaaatagcgtgtggcagacatgcatggcgtagcaaatttagcaaatgcacaagttatacagcaagcattctgttgcggcttcgcatcttcgctgctgataccacaacgacgatggagcctagccgactactaggtattaaagtttctttctagcgatacaccgaaaccaagatcgactccaggagggctgccgatcacatcagaacagagcctactcctccttcgaggcgtgcgtggcggacaccgtggagaccatggagtcgacgccgcacttgtttcgcacgttggagcccctgcagatcttgtagtaacccttgtccccccagttctcgccccatgagttcttgatgatccagtagg

SEQ ID NO: 441014 - DNA, 409 bp, Triticum aestivum; identical to SEQ ID NO: 436636

SEQ ID NO: 441015 - DNA, 409 bp, Triticum aestivum; identical to SEQ ID NO: 436636

SEQ ID NO: 441016 - DNA, 390 bp, Triticum aestivum
cccattcgtccgcgactaccgccatatggacggcttcggcgtcaacacctacaccttcgtctcccgcgccggcaaggcccactacgtcaaggtccactggcgccccacctgcggcgtcagctgcctcatggacgacgaggccaccctcgtcggcggcaagaaccacagccacgccacccaggacctctacgactccatcgacgccggcaacttccccgagtggaagctcttcgtgcaggtcatcgaccccgacgacgaggaccgcttcgacttcgacccgctcgacgacaccaagacttggcccgaggacctcgtccccctccagcccgtgggacgcctcgtgctcgaccgcaacgtcaacaacttcttcaacgagaacgagcagctcgc

SEQ ID NO: 441017 - DNA, 386 bp, Triticum aestivum
ttcacgcgtccgcgactaccgccatatggacggcttcggcgtcaacacctacaccttcgtctcccgcgccggcaaggcccactacgtcaagttccactggcgccccacctgcggcgtcagctgcctcatggacgacgaggccaccctcgtcggcggcaagaaccacagccacgccacccaggacctctacgactccatcgacgccggcaacttccccgagtggaagctcttcgtgcaggtcatcgaccccgacgacgaggaccgcttcgacttcgacccgctcgacgacaccaagacttggcccgaggacctcgtccccctccagcccgtgggacgcctcgtgctcgaccgcaacgtcgacaacttcttcaacgagaacgagcagc

SEQ ID NO: 441018 - DNA, 422 bp, Triticum aestivum
tttgttcccggggactacttctccggcatgccggtggtcgacctctccagccctggcgcgccgcgggccatcgccgacgcgtgcgagcgcttcgggttcttcaagctcgtcaaccacggggtgcccgcggacactatggacaggctcgagtcggaggccgtcaggttcttctcgctgccgcaggccgacaaggaccgctccggcccggcctacccgttcggctacggcagcaagcgcatcgggctcaatggcgacatggggtggctcgagtacctgctcctggccgtcgactccgcgtcgctctccggcgcctgcgccgtcccgtcctgcgcgctcttccgggcggcgctgaacgagtacatcgcggcggtgccgaaggtggcggtgcggctgatggaggcgatggcggaggggctgggcat

SEQ ID NO: 441019 - DNA, 413 bp, Triticum aestivum
caaagagtagctataaatggcgatggctaggacaccgacgctcctcctcatcgtcgccgcggctctcctcgcggcctcatgcagcgcatgggaggccaacatccggatgccgacgtccgtggacgaggcggtggtggcgccgctgatccacgcgctccggccgctgctgggctccggcaagcacgccggagtggagtgcgacagctgggtgctgggcgtggaggcgcacaacgtgcgggactggaagacggtgcccgccagctgtgagggctacgtcggccactacatgctcggtaagcacttccgccgtgactccaagatcgtcatcgaccaggccgtcgcctacgtcgacagcctcaagctcgccggcaacggcaggaggtggtgggtcttcgacatcgacgagaccaccc

SEQ ID NO: 441020 - DNA, 423 bp, Triticum aestivum
tgttatcaatccccaccaagaaggagcaggtcttctccacctactctgacaaccagcccggcgtgctcatccaggtgtatgagggcgagagggcgaggaccaaggacaacaacctgctcggcaagttcgagctctccgggatcccaccggcgcccaggggtgtcccccagatcaccgtgtgctttgacattgatgccaacggtatcctgaatgtctcggcggaggacaagaccaccggacagaagaacaagatcacaattaccaacgacaaggggcggctgagcaaggaggacatcgagaagatggtgcaggaggccgagaagtacaaggctgaggacgaggagcacaagaagaaggtggactccaagaacgccctggagaactacgcttacaacatgcgtaacaccatcaaggatgacaaga

SEQ ID NO: 441021 - DNA, 424 bp, Triticum aestivum
tcgttatcaatccccaccaagaaggagcaggtcttctccacctactctgacaaccagcccggcgtgctcatccaggtgtatgagggcgagagggcgaggaccaaggacaacaacctgctcggcaagttcgagctctccgggatcccaccggcgcccaggggtgtcccccagatcaccgtgtgctttgacattgatgccaacggtatcctgaatgtctcggcggaggacaagaccaccggacagaagaacaagatcacaattaccaacgacaaggggcggctgagcaaggaggacatcgagaagatggtgcaggaggccgagaagtacaaggctgaggacgaggagcacaagaagaaggtggactccaagaacgccctggagaactacgcttacaacatgcgtaacaccatcaaggatgacaaga

SEQ ID NO: 441022 - DNA, 405 bp, Triticum aestivum
ttatcgcgtccgctccggcgtgggcgaccttcctcggctatcgtccccgcgtcgccctccacatccaccttttcttctgttccgacgcagccatgaattacatcatcggcgccttcaagccgccctgcgacatcttcgtgaccttttccgatgagaggagccggaagcaggttgcagtcaagaaggataatgggaagacaaccatggtgccggcgttccagagcctggagaccatagccggagaggtatcaatagcgcctgttcctggtaaaaggattgagcacatgggtgttaagattgagctgcttggacagatagagttgtatttcgacagaggcaacttctatgacttcacttcactggggcgtgagttagatgttcctggtgaaatatatgaaagaaaga

SEQ ID NO: 441023 - DNA, 319 bp, Triticum aestivum
gtagaacacatgaaaggagttaccatcggatacgtggcctgcaacaaggaattgattggggtattcagcctctcggattcttgccgaactgggtcagccgaggccatcaaggagttgagatcactgggcatcaagtcagtgatgcttactggcgatagtactgccgctgccacacatgcacagaaccagctggggaacatactagctgaggttcatgctgaacttctgccagaagacaaagtgagaattgttgatgaactgaaggcaagagatggccctacactgatgattggcgacggtatgaatgatgccccggcac

SEQ ID NO: 441024 - DNA, 417 bp, Triticum aestivum
ttgccttacccacacccatacaagaggcaggcaaggggcaccctcctcaagcctcaagcaaccaacgcagttcttccaccgatatttccttccctcgccggcaccgccgacgatctgcagccatggcaatggcttacaagatggcgacggaggggatgaacatcaaggaggagtgcaagcggtggttcacggagatgaagtggaagaaggtgcaccgcttcgtggtctacaagatcgacgagcggacgcgcgccgtgctggtggacaaggtgggcggccccggggaggggtacgacgagctcgtcgccgcgctgcccggcgacgactgccgctacgccgtcttcgacttcgacttcgtctccgtcgacaactgccagaagagcaagatcttcttcatcgcatggtcgccggcggcgt

SEQ ID NO: 441025 - DNA, 298 bp, Triticum aestivum
caatccccaccaagaaggagcaggtcttctccacctactctgacaaccagcccggcgtgctcatccaggtgtatgagggcgagagggcgaggaccaaggacaacaacctgctcggcaagttcgagctctccgggatcccaccggcgcccaggggtgtcccccagatcaccgtgtgctttgacattgatgccaacggtatcctgaatgtctcggcggaggacaagaccaccggacagaagaacaagatcacaattaccaacgacaaggggcggctgagcaaggaggacatcgagaagat

SEQ ID NO: 441026 - DNA, 279 bp, Triticum aestivum
ttgatcccacccaccaccccgccggccaagatgttcggccgcgcccccaagaagagcgacaacaccaagtactacgaggtgctcggggtgcccaagaacgccgcccaggacgacctcaagaaggcctaccgcaaggccgccatcaagaaccaccccgacaagggcggagaccccgagaagttcaaggagctggcacaagcctatgaggttttgagtgaccctgagaagcgtgagatctatgatcagtatggcgaagatgctctcaaggagggaatgggt

SEQ ID NO: 441027 - DNA, 365 bp, Triticum aestivum
ttcgttacgcgtccgcccacgcgtccgcggacgcgtgggtggatcgcaagaacagggagaaagagatggcatccgttctcctatcctcattaagcatggagctattctccagtgaagacatcgtcaagggattcataatgcttcttgaatctgcagaagatactgcactggacatattggatgcctcagatgagctgggactgttcctagcgagggcagtgatcgatgatgtgcttgcgcctctgaacttagatgagattggcagcatccttccaccaagctgcagtggggctgaaacattgaacatggcgcgctcgcttgcctccgcccgccactcaggagagaggctactgagatgctggggc

SEQ ID NO: 441028 - DNA, 366 bp, Triticum aestivum
ttgttattttccccacctctgtccgaggcatgtgcatagccatctgcgcgctaacctgctggatcggcgacatcatcgtgacatacactcgtcccgggatgctgaatgccattggtctcgctggagtcttcggcatatatgccatcgcttgtgtactagcctttgtattcgtatacatgaaggtccctgagacaaagggcatgcccctggaggtcatcaccgagttcttctctgtcggggcaaagcaaggcaaggaagccacggactagttgctctgatccggtgatccgcgtcgctgggggtaattttgtggtgtcataactactactacactggttaacctgcgatgttttggtgaagaaactt

SEQ ID NO: 441029 - DNA, 401 bp, Triticum aestivum
ttcctatccagcccccctccgatctcgccgagaaggctccgattgaagcgaagcgaagccaaggctctctcctcctcctgctaagatgcagatcttggagaagacccttaccggcaagaccatcacccttgaggtcgagtcctctgacaccatcgacaacgtcaaggcaaagatccaggacaaggagggcatccccccggaccagcagcgtctcatctttgctggcaagcagctcgaggatggccgcacccttgcggactacaacatccagaaggagtccaccctgcacctggttctcaggctccgtggtgggatgcagatatttgtaaagaccctgactggcaaaaccatcaccctggaggatgagtcctcagacaccattgataatgtgaaggccaaga

SEQ ID NO: 441030 - DNA, 347 bp, Triticum aestivum
tgcattgttcgcactggccatagtcatggccgtggtggctgacgtctcggcgcagaacaccccgcaggacttcgtcaacctgcacaaccgcgcccgcgccgtggacggtgtcggcccggtggcgtgggacaacaacgtggccaggtttgcgcaggactgggcggcgcagcgcgccggcgattgccggctccagcactccggcgggccgttcggcgagaacatcttctggggttccgggcagtcgtggacggccgccgacgcggtgaagctgtgggtggacgagaagcagaactaccatcttgacagcagcacctgcgacgccggcaaggtgtgcgggcactacacgc

SEQ ID NO: 441031 - DNA, 353 bp, Triticum aestivum
tttttactccccatccgccccacgagaggagagacgattactaagcgtgcccaactccatctgcttccttttcctcttccccccgtccccgacgacccccggccgaaaccctagcgaggcgcgatgttcgggtaccggaaggcgccggacctcgacctcgaggcgggcggctcggcggcgctctacccggggatgacggaggacgtggagctgcgctgggccttcatccgcaagatctacgtcatcctctcggtccagctcgccatgaccgccgccgtcgcggggttcgtcgtcaaggtccccgccgtctccgagttcttcgtctcctccaacgctggcctgggcctctacat

SEQ ID NO: 441032 - DNA, 452 bp, Triticum aestivum
ctgacgcgtgggtcgctcaatgcaagaaggccataccttcccgagaaatgggaggaaaagtgatcatcatagacatagtgcttggatcttctctagagacaataactgaaaccgaactgctgatggacatgctgatgttcatatgtaccagaggacggcaacgggatgaaaaggagtggagcacgatctttacgaaagcagggtttagcaactataagattgtcaagaaacttggccatcgaggtgtcatcgaggtctatccataaggttggtgcagatgcccatctggtgtgtgttctatatgaatagtagtgtgaaataagaaataaataagtacagtgccttactcgtcaatggaaaatgcaacaaattcttaagtagacgaagtggtaaggggccggtcgcttgagaactgtatgcacgtaaccactcatatgtatgtatgtatgtat

SEQ ID NO: 441033 - DNA, 420 bp, Triticum aestivum
tccacgcgtccgcccacgcgtccgctaagtctgttgacacaaaatcacaagaaaagcatcaagaaagaggcctgctggactgtttcaaatatcactgctggtaacaaagatcagatacaggctgtgattactgctgggattattggacctctggtgcatctgctgcaaacggctgaattcgatatcaagaaggaggctgcttgggccatctcgaatgctacctccggtggttcccatgaccaaatcaagtatttggttagcgagggctgcatcaagccactgtgtgacctcctgctttgcccagatccaaggattgttactgtttgcttggagggtcttgagaacattctcaaagttggagaaactgataagaatttgggtgcttctggggaggggaatgtctatgcgcagatgattgat

SEQ ID NO: 441034 - DNA, 289 bp, Triticum aestivum
ttttaaatgcacgagcaactcggcctgctccgggaagcctgtgaccgtggtcatcaccgacctgagccccggcaacctctaccccggcgagccgtgccacttggacatgagcggcaccgccctgggcgccatggcgaagcccggcatggccgacaagctccgcgccggcggtgtcatcaggatgcagtacaagagggtgccatgcaagtaccccggcgtcaacattgccttcagggtggaccagggcgccaaccccttctacttcaagaccctgatcgagttcgaggac

SEQ ID NO: 441035 - DNA, 298 bp, Triticum aestivum
gtcacggcatcctgcagaagctgacgccatgggcggacgggccgagcatggtgacgcagtgcccgatccagcccaacggctgctacacgtaccggttcaacgtgacggtgcacgagggcacactgtggtggcacgcgcactcctccttcctgcgcgccaccgtgtacggggccctgatcatccgcccccgaaacggcaccgcctaccccttgccggcgccggaccaagaggtccccgtcgtacttggcgagtggtggagccagaatgtcgtcgacgtcgagaaggacgccgtcatggc

SEQ ID NO: 441036 - DNA, 419 bp, Triticum aestivum
tgggcagggccctcaaactcgtgacctttacgaggggggacgtgacgggcgcggggaggccgccgtctccggtgggctgcggcggaggagcagaggacaggaagagaggggaggtggcggtggagatggagagcgaggaggccgcggagaggtgggggcacgccatcagagatcgcttcgcctcgcttggttgttaatggtctgctccaaagagatgattgggacaaagcaataaaagtgccactagggatcattccagcaggtactggaaatggaatggtgcaaggtctattgcattctgctggtgaacccttctcaatgtcaaatgctgtgtttgcaatcatcagaggtcacagacgtgccctcgatgtcacttctgttgtgcagggaaagacaaggtttttcagtgtcatgatgct

SEQ ID NO: 441037 - DNA, 440 bp, Triticum aestivum
tgggaaagggactatctcaagacaatactccatcgaatatatggtaaattcatggtgcatcgcccattcatcaggaaagcaatcaacaacatcttctacagatttatatttgaaacggaaaagcataacggtattgcagagctgctggagatcttgggcagtataattaatggttttgccctgccacttaaagaagagcacaaattgttccttctccgtgcactgatcccacttcacaagccaaagtgtgtagcaatgtaccatcagcagctatcgtattgcatcacacagtttgttgagaaggactgcaaacttgctgacactgttattaggggcttgctcaagtattggcctataaccaacagttcaaggaggtgatgttcttgggtgagcagaagaggttttagaggcaacacagcttgcagagttccaaagatgca

SEQ ID NO: 441038 - DNA, 435 bp, Triticum aestivum
tcgttacgctcctggacccggagatggatcagctgatccacgacgccgtcgctgctcacgaccacatggggatcggccccgtgctccggcagtgccgtgagctcttcgaggggcttgagtctctcactgactgcggcggcggtgatgggacgacggccaggtccatcgtcgaggcctacccgcacatcaagtgcactgtgctggaccttccaaaggtcatggacaaagttcttcttcccgctgaagaaggagcggttaagtatgtttctggtgacctgttccacgtcgtcccacctgcccaagccgtgttgctcaagcttgttctgcacttctggagcgacgaggattgcatcaagatcctcgcacaatgcaagaaggccgttcctccccgagaagcaggaggaaaagtcatcgtcatagacattgtgcttggat

SEQ ID NO: 441039 - DNA, 377 bp, Triticum aestivum
ttttctccttctgtcccgcaaacccccgagagatcacaccatgttcggcttcggtcaccacggccaccatggccagaaccccccggcccacgctccggccgccgccggcggcaaccagcccaccttcaagatcttctgcaaggctgacgagggctactgcctctccgtccgcgacggcaacgtcgtcctcgccccctccaacccccgcgacgagcaccagcactggttcaaggacatgcgcttcagcagccagatcaaggacgaggagggcaaccccgcctttgccatcgtcaacaaggccactggcctcgccgtcaagcactcgctcggccagtcccaccctgtgaagctcgtgccattcaacccggagtacctcg

SEQ ID NO: 441040 - DNA, 393 bp, Triticum aestivum
ggacttggggttgggcttgagtactggcgcgtcttcgacttcctctcccaccaccccgagagcctccacaccttcttcttcctcttcgacgacgtcggcatccccaccgactaccgccatatggacggcttcggcgtcaacacctacaccttcgtctcccgcgccggcaaggcccactacgtcaagttccactggcgccccacctgcggcgtcagctgcctcatggacgacgaggccaccctcgtcggcggcaagaaccacagccacgccacccaggacctgtacgactccatcgacgccggcaacttccccgagtggaagctcttcgtgcaggtcatcgaccccgacgacgaggaccgtttcgacttcgacccgctcgacgacaccaagact

SEQ ID NO: 441041 - DNA, 397 bp, Triticum aestivum
tgctatgccaccgatgagacccctgagctcatgcccctcagccatgtgcttgccaccaagctgggtgcccgcctcactgaagtccgcaagaatggcacttgtgcctggctaaggcctgatggcaaaacccaggtcacggttgaatacctcaacgagggaggtgccatggttcctgtacgtgtgcacactgttctgatctccacccagcatgatgagactgtcaccaatgatgagattgctgcggacctcaaggagcatgtcatcaagccggtgatccctgagaagtacctggacgagaagaccatattccacttgaatccatcaggccgctttgtcattggtggccctcatggtgatgctggtcttactggtcgcaagatcatcatcgacacctatg

SEQ ID NO: 441042 - DNA, 393 bp, Triticum aestivum
gctaacgcctgctgcccccaaactcccaactacccgcttactcctgagttctgagcccggtcgatccccgccgcagccaccgacgccgactccgtgaactcgcacggggaacctcgccatggccgccgcgtcgtgcgccacctccgtccacgacttcaccgtcaaggatgcaagcggcaaggacgtcgacctcagcgtctacaaggggaaggttcttctcattgttaacgtcgcatcccagtgtggcttgaccaactgcaactacaccgagctgagccagctgtacccgaagtacaaggaccaaggctttgagatcttggctttcccatgcaatcagtttggtgggcaggagcctggcaccaatgatgagatcgttcagtttgcctgcacccg

SEQ ID NO: 441043 - DNA, 291 bp, Triticum aestivum
cggacgcgtgggcgaggccatggcgcggctgaccacggaccagctcagcgagcccgggtcgccggagaacatgctgtactaccacatgatcccggagtaccagacggaggagagcatgtacaacgccgtccgccggttcggcaaggtgcggtacgacacgctgcggctgccgcacaaggtggtggcgcgggaggcggacggctccgtcaagttcgggcagggcgagggctccgactacctcttggacccggacatctacacggacggcaggatctcggtgcagggcatcga

SEQ ID NO: 441044 - DNA, 361 bp, Triticum aestivum
gcgtccacgcgtgcgcccacgcgtccgcccacgcgtgcgggttgcactaggatccccgttcacctttgctaccactctagaacaggagtacaagagtgatatctttggggagcgaggaattttgctgggtgctgttcatggcatcgtggaggctctgtttaggagatacacagagcaaggaatggacgaggagctggcatacaaaagcactgtggagggcatcactggaattatctccaagaccatctcaaagaaggggatgcttgaagtatacaactccttgagcgaggaaggcaaaaaggagttcaacaaggcatacagtgcatcattttacccttgcatggacatactctacgaatgc

SEQ ID NO: 441045 - DNA, 372 bp, Triticum aestivum
tcttcgccaaggacgtcaccgaggagaaggccgtcatccccgcgcccgcgccggccgccgaggaggagaagccgcccgccgatgactccaaggccctcgtcgtcgtcgagaaggttgcagatgaacctgttgctgagaaacccacagatgagaaggctgcacacggcggctcaaatgacagagacctcgctcttgcaagggtggaaagtgagaagaggaactctttaattaaagcatgggaggagaatgagaagacgaaggctgagaacaaggctactaaaaaggtgtccgctattctctcatgggagaacaccaagaaagcaaacatagaagctcaactgaagaagattgaggagcaattggaaaagaaga

SEQ ID NO: 441046 - DNA, 427 bp, Triticum aestivum
gccgcacacctcatctcatctcatctcatcatcgtcttccccccattgccattccctccttgcgagtagtagcagcagcaatggccagcctcgccgacctcgtcaacctcgacctcagcgactgcaccgacaagatcatcgtcgagtacctctgggttggaggatccggtatcgacatcaggagcaaagcaaggacggtgaacggccccatcaccgacgcgagccagctgcccaagtggaactacgacggctccagcaccggccaggctcccggagaggacagcgaagtcatcctctacccccaggccattttcaaggacccgttcagaggggtgacaacctccttgttatgtgcgactgctacacacccaaggtgttgcaatccccactaacaagaggcacaatgctgccaagatcttcaacaccc

SEQ ID NO: 441047 - DNA, 371 bp, Triticum aestivum
tcgtcttcaaggtcaaggggctgtggctcttccgtgggcaggacatccctgagtttgtcatgaacgaggtctacgacatggagctctacgagtggaccaaggttgacctctctgacgaggcccagaagaagcgtgtcgaagccatgatcgaggaccttgagccgtttgaggggcaggccttgctggacgccaagtgcttcaagtaagcggatcagtgctttggatcgtgatggcggtgacaaaagaacctatctaggactcaaattcagtgtcgaaacagttgtcttttttggaagagtttgcttgttacttaatggctatttgacctggtgaacttgttaatttttgtgccatgctaagagtttttgggt

SEQ ID NO: 441048 - DNA, 473 bp, Triticum aestivum
tgcagaaagcactagatcgtcttctgccttaccagaggtccgactttgaaggcattttccgtgccatggatgggctcccggtgactatccggctgttggaccctccacttcatgagttccttccagaagggcatgtggaggatattgtgcgtgagctatgtgctgaaagtggagccgctgaggatgatgtccttgcaagaatggagaaactttcagaagtaaatccaatgcttggtttccgtggttgcaggcttggtatttcgtatcctgaattaacagaaatgcaagcccgggccatctttgaagctgctatatccatgaccaaccagggtattcaagtatttccagagataatggttcctcttgttggaacacctcaggaattgggacatcaggtggctcttatccgccaaattgctaacaatgttttcaccaatatggggaaaaccattgattacaaagctgggactatg

SEQ ID NO: 441049 - DNA, 412 bp, Triticum aestivum
ttcttaaagcctacgcatccagagctccaaaccctaagcgaggcgaggcgaggagggagaggccatggatcccgattcggtctcgaaggcgttcgtgcagcactactaccacacgttcgactccaaccgcgccgagctggtggggctgtaccaggacggttccatgctcaccttcaagggcgagaagttcggcggccccgccgccatcgccggcaagctcggatctctccccttccagcagtgccagcacaagatcgacaccgtcgactgccagccctcggggccccatggcggcgtcctcgtgttcgtctccggcaccatcaccaccggccccggcgagcaccccctcaagttctcacagatgttccatttgctgccagctggagggagcttctacgtgcagaacgacatg

SEQ ID NO: 441050 - DNA, 346 bp, Triticum aestivum
gcgtcctctcgtcctgcaaatctacaatggcaatcggcaagaataagcgtttgacgaagggaaagaaaggtggaaagaagaaggcttctgacccatttttgagaaaggaaatgaccactattagatctccctctatgttttctgttagaaatgctggtaaaactattgtgaccaatactactggaacaaagattgcttctgagtctttgaagggtcgtgtcttcgagcactctttggctgatttgaacggcggagatgagtctcagggttatggcaagatccggttacttagtgaggatgtttagggaactaatttaattaccaacttccatggtatggacattac

SEQ ID NO: 441051 - DNA, 367 bp, Triticum aestivum
tcctcgtccgggaaggaaggcagcgagagcagggcgcgggagactgcgagaggctgtcgccatggagaacgagttccaggatggcaaggatgaggtcatacaagcatggtacatggatgacagtgaagaggatcagaggcttcctcaccaccgtgaccccaaagagttcattcctgttgccaaactttcagaattaggtgttgtaagctggaacctaaatgctgataactgggagaaagactagaatctcaagaaaatccgcgaggccaggggatactcctatgcggacatgtgcgacgtatgtcctgagaaattgccaaactatgaggccaagctgaagaatttctttgaagagcacttgcatact

SEQ ID NO: 441052 - DNA, 370 bp, Triticum aestivum
tccacgcgtccgcgcgctgctcatcgtgcacgggcacttcctctacctcaccaagaagtggcaaaagaagtcgacgtggatgtacctggcggtgccgatggtgatgtacgcgtgcgagcggctgacgcgggcgctgcggtcgagcgtgcggccggtgaagatactcaaggtggcggtgtaccccggcaacgtgctgtcgctgcacttgtccaagccgcaggggttccggtacaagagcgggcagtacatcttcgtcaactgcgccgccgtctggccgttccaatggcacccgttctccatcacgtcggcgccgcaggacgactacgtgagcgtgcacatcaggacgctgggggactggacccgggagctc

SEQ ID NO: 441053 - DNA, 356 bp, Triticum aestivum
gcgtccacgcgtccgccacgcgtccggagactttcgagaaagacactgtgaagtatacacagtatcaaagagcaattgctaaggctttggttgataaggtctcagaggatgaagtttccacaactaggacggtcttgatggttgttggagcaggccgagggcctctcgtaagagcatcattgcaagctgcagaagaaactggtcggaagctaaaagtatatgcagtggagaaaaatcctaacgcagttattactcttcatagtttgatcaaattggaagggtgggaaagcatggttactattatttctagtgacatgcggtgctgggatgctcctgaaaaagctgatattttggtc

SEQ ID NO: 441054 - DNA, 375 bp, Triticum aestivum
tcgcacgcgtgcgccacgcgtccgcggacgcgtgggctcccccgcccgccgccgccgtcgccgcagagccgcagggagagaaggcaaggaggaaggaaggggaagatgccggcggggcacgggctgcggtcgcggacgcgcgacctgttcgcgcggccgttccgcaagaaggggtacatcccgctcaccacctacctgcgcacctacaaggtcggcgagcacgtcgacgtcaaggtgaacggcgccgtccacaagggcatgccgcacaagttctaccacggccgcaccggccgcgtctgcaacgtcaccaagcgcgccatcggcgtcgagatcaacaagcaggtcggcaacaggatcatcaagaagaggatccat

SEQ ID NO: 441055 - DNA, 258 bp, Triticum aestivum
gtccttgtggacccctgccccgttccccggcgacgaccccgactccgccgtcgtcgccgtgcactccaagcccgcctgggacaagcactgggaggaacaccggagcgcctccaagctgatggtcatagatttctccgtctccaggggcgggccctgccgcttaatcgagcccgacttcaaggagatggcctcccgcttcaccgacacgctcttcgtgaagatcgacgtcgacgagctcgcggaggttgcaaagacatt

SEQ ID NO: 441056 - DNA, 253 bp, Triticum aestivum
gcgttcatttcgtctccacccagataaccacgagagatatgttcgtccgccccgacgaccgacgaacggcagagaaaagtgaggtgatcatgagcaccatggcgatgtcggcgctgaacccggacgcgcccatgttcatcccggcggcgttcaagaaggtggaggactactcgcccgagtggtgggagctggtcaagaccaccgcctggttccgcgaccactggttccgccagcaccagctctacgaggacct

SEQ ID NO: 441057 - DNA, 415 bp, Triticum aestivum
agaatctgttaaaagaactcgttgttcagggcctgcttcggttgaaagagccagctgtactgctccgctgccgcaaagaagatcaccataatgtggaatctgtactgcattcagcaaagaatgagtatgcatcaaaagcagatgtccatgagcccgagatactagttgaccacagtgtctacctgccaccttctccgagccatggcgatgagcacggccagatttgccatggaggtgttgtgctggcttctcgagatggaaagattgtgtttgagaatacagttgatgcaaggcttgaagttgttttccgcaagaaattgccagagatccggaagcttcttgttgcggcataatgcgcacttgtattttggtgatggtacagctgtttctatgtaaaatggctgctggtttgacc

SEQ ID NO: 441058 - DNA, 427 bp, Triticum aestivum
ttacgcgtccgcccacgcgtccgtgccatcttcataccaagcatttgggatgcattccagtttactggtgccacagctgccgttttgattggttttatctttcctgccatggtcatattaagggatccttatggaatcgcaaccaagcgtgacaagatattggctgtaaccatgatcgtgcttgctgttgtctcaaactctgttgccctatacagtgatgcgatgaacatcttccgtaggaaagaggtagcctgaaattcaggcttcaaagttcaaaggaagggtgtcactgatgcaggaagcgcagtttcatattacaaaattcagtggctttgaaggaagatggtttgctgggatgctgtgaagaaagatgatttctttggtcagcaactcagcattgagacctgacacatggaagaattggatg

SEQ ID NO: 441059 - DNA, 295 bp, Triticum aestivum
tcgacttgccagttccgatcgctgaacaccaaccactttcctaagtagaggggcgccgcggaaatgtcggcgacgtgcgcggcggacctggcgccgctgctgggcgcggcggcgatgaacgccacggactacctgtgcaacaggttcgccgacaccacgtcggcggtggactcgacctacctgctcttctcggcctacctcgtcttcgccatgcagctcggcttcgccatgctctgcgccggctccgtccgggccaagaacaccatgaacatcatgctcacaaacgtgctcgacg

SEQ ID NO: 441060 - DNA, 402 bp, Triticum aestivum
ggaggagagcggcggcgaagatggcgccgcctcctccgtcctcgcagacgggaggaacgccgcgctcgccaccctcgccaacctgggccggaactccaccctgcccgccgcatacgcccaccacaccaacgccgccgcctcctcccacggctacgcatggatcgccgccatccccgccgccgtgtacatgctccaggatcaggaggtgcatgccgccgagatggaacgcaccttcatcgccatcaagcctgacggcgtccagagaggcctcatttctgagatagtgtcccgattcgagagaaaagggtacaagcttgttgccatcaagctggtggttccatccaagcagtttgccgagaagcactaccatgatctcaaggaaagacctttcttcagtggact

SEQ ID NO: 441061 - DNA, 443 bp, Triticum aestivum
tcgtccgcccgccgccgtcgccgcacagccgcaggtagagaaggcaaggaggaagggaagatgccggcggggcacgggctgcggtcgcggacgcgcgacctgttcgcgcggcccttccgcaagaaggggtacatcccgctcaccacctacctgcgcacctacaaggtcggcgagcatgtcgacgtcaaggtgaacggcgccgtccacaagggtatgccgcacaagttctaccacggccgcaccggtcgcgtctggaacgtcaccaagcgcgccatcggcgtcgagatcaacaagcaggttggcaacaggatcatcaagaagaggatccatgtgcgtgtggagcacgtgcagccatccaggtgcaacgaggagttcctccagaggaagctcaacaacgacaagctgaaggcggaggccaaggcgcgtggtgaggtcatcagcac

SEQ ID NO: 441062 - DNA, 296 bp, Triticum aestivum
tcacgcgtccgctactagctagccatggcatcttccaagagtagtcttgcaatgtttgcactggccatagtcatggccgtggtggctgacgtctcggcgcagaacaccccgcaggacttcgtcaacctgcacaaccgcgcccgcgccgtggacggcgtcggccccgtggcatgggacaacaacgtggccaggtttgcgcaggactgggcggcgcagcgcgccggcgattgccggctgcagcactccggcgggccgttcggcgagaacatcttctggggttccgggcagtcgtggac

SEQ ID NO: 441063 - DNA, 352 bp, Triticum aestivum
tcacgcgtccgggcgcgtggtcctggtacagggtgtccaccgccctggaggccgccggccaccgcgtcaccgcgccggacatggccgggtgcggcgaggaggtggcgtccttcgaggagtacagccggccgctgctggacgcggtggcggcgctgccggagggcgagcaggcggtcctcgtcgcccacagcttcggcgggcagagcctcgcgctggccatggagaggcacccggaaaaggtctccgtggccgtgttcgtcacggccaccatgcccgccgccgggaagcccatgacctacgccttcaaccagctatcgcaagggaaagggccggatttcttatggattgcgcg

SEQ ID NO: 441064 - DNA, 396 bp, Triticum aestivum
cttgccaacccggtgaccaaccatgtccagagtgctgagcagcacaaccaggacgtgaactctctgggccttgtctcggccaggaagaccgccgaggccgtggacatcctcaagctcatgtcctccacatacatggtggcgctgtgccaggccatcgacctgcgccacctggaggagaacatcaagacctccgtgaagaactgcgtgacgcaggtgtcgaagaaggtgctgaccatgaaccccaccggcgacctctccagcgcgcgctgtagcgagaagagcctcatcaccgccatcgaccgcgaggccgtgttcagctacaccgacgacgcctgcagcgccaactacccactgatgcagaagctgcgcgccgtgctggtcgaccacgccctgacc

SEQ ID NO: 441065 - DNA, 298 bp, Triticum aestivum
gggccacggcgccgtcgtggaggagatacacgggctcatccgcgtgtacaaggacgggcacgtggagcgcctcccggcgatccccgacgtgccctgcacgtggggctcgacggccgccgggagcggcgtcctcgcgcgcgacgtggcggtcgaccgcgccacgggggtgtgggcgcgcctgtacgcgccggccgccgcggcggggaaggtccccgtggtggtctacttccacggcggcgggttcagcgtcggctccgcggcgtggagctgctaccacgagttcgtcgcccagctcccc

SEQ ID NO: 441066 - DNA, 368 bp, Triticum aestivum
ttcacgcgtccgcccacgcgtccgaacggccttgagacctaccctggtgtcaagcgcatcaccatcaagccccagactgaccgctgggtcttcccccgagaccaagactggcatcattgttcttgctgagggtcgtctgatgaaccttggatgtgccactggccaccccagcttcgtcatgtcctgctcattcaccaaccaggttattgctcagcttgagttgtggaacgagaaggccactggcaagtacgagaagaaggtgtacgttctccccaagcacctcgacgagaaggtcgcggccctccacttgggcaagctcggcgccaggctgaccaagctcaccaagtgccagtctgactacattagca

SEQ ID NO: 441067 - DNA, 375 bp, Triticum aestivum
tcgtcggccggtttgttgttgtatgcggagatggggaatacataatctatactgcactggcttggaggaacagatcatttggatccgcgttagagttcgcttggtcatcagaaggagagtacgcaatcagagaaagtacatccagaataaagattttcaataaatcattccaggagaagaaaactatgcgtcctacattctctgcagagcgtatctttggtggggtacttttggcaatgtgttccggtgactttatttgcttttatgactgggctgattgtagactaattcgcagaattgatgtgactgtcaagaatgtctactgggctgatagtggtgacctagttgcaatcgcaagtgatacatcattctaca

SEQ ID NO: 441068 - DNA, 420 bp, Triticum aestivum
tggacgcgtgggcgcgcacttctagacgtgggtgtcatggcagccatggcgggtccggcggagaggaagatgaaggtgtgggagctggtgctgcggtgcctcgtcggcggcttcggcgcggtggcggcggcgctggtggtcaccgacagccagacccggaccttcttctccctcgagcggagggccaagtacaccgacatgaaggcgctggtgctcctggtggccgccaacggcgctgccgtcgggtacagtctgctgcaggcggcgcgctgcgccgtggcgatggcgaggggaggcggcgcgctggtcatgagcagcagggcgctcgcctggtcggtcttctccggcgaccagctgctggcgtacgcgatgctggccgcgacggcggcggcgctgcagtcgtcgctcctcgggaagctc

SEQ ID NO: 441069 - DNA, 318 bp, Triticum aestivum
tccacgcgtccggccacgcgtgcgcgcagaagaaggccggcggctccgccaagaggggagccaagtccagcgccggtgcctcgtcctcgtcggcgtcttcagcggccgataaggccgccaatggcgtcacggcccttaacttatccgatcggacatgtaccggggtcctggcttcgcatccgctctcccatgatatccacattgagtccctttcattaacatttcatggacatgaccttattgcggattcagaattggagcttaactacgggaggcggtctggattgctcaggcttaaatggttgtgggaaatctacc

SEQ ID NO: 441070 - DNA, 330 bp, Triticum aestivum
cccagacatgttcaagggcacatatgaggcaatcaccaaaggaaatcctatgtggaatgagctgccagtatcagcaagcactctctacccatgggatccaaaatcaacatacatgcacgagcctccttatttcaaggatatgacaatgacccctcctggcgcacggcctgtgaaggatgcgtattgtcttcttaacttcggtgacagtatcacaactgatcacatatccccagctggaagcatgcacccagacagcccagctgccaaatatctaaaggagcgcaatgttgaaaggaaggacttcaactcatatggcagtcgacgagggaa

SEQ ID NO: 441071 - DNA, 345 bp, Triticum aestivum
taccgcgccattctcgaaccttccaagctcctgccggcctcccctcgcttccaccgagtccctccgatggcccgcaccaagcagacggcgcgcaagtccaccggcgggaaggcgccgcggaagcagctggcgacgaaggcagcgcgcaagtcggcgccggccaccggcggcgtgaagaagccgcacaggttccgcccgggaaccgtcgccctgcgcgagatccgcaagtaccagaagagcacggagctgctgatcaggaagctgccgttccagcggctggtgcgggagatcgcgcaggacttcaagacggacctccggttccagtcgtctgctgtgtccgcgctg

SEQ ID NO: 441072 - DNA, 193 bp, Triticum aestivum
tctttaaaatcgcgagagatatttcgtcccggacgcgtccgtcccgacgacagacgaacagcagagaaaagtgaggtgatcatgagcaccatggcgatgtcggcgctgaacccggacgcgcccatgttcatcccggcggcgttcaagaaggtggaggactactcgcccgagtggtgggagctggtcaaaacca

SEQ ID NO: 441073 - DNA, 277 bp, Triticum aestivum
gattttccccacctctgtccggggcggctgtattgtcatctgcgcgctatacctactggatcggcgacattatcgtgacatacactcttcccgtgatgctcaatgccattggtctcgctggagtcttcggcatatatgccatcgtttgtgtactagcctttgtattcgtctacatgaaggtccctgagacaaagggcatgcccctggaggtcatcaccgagttcttctctgtcggggcaaagcagggcaaggtagcctcggactagttgctctgatc

SEQ ID NO: 441074 - DNA, 357 bp, Triticum aestivum
tctttccaatccagcccccctccgatctcggcgagaagtctccgattgaagcgaatcgaatccaaggctctctcctcctcctcctaagatgcagatcttcgtgaagacccttaccggcaagaccatcacccttgaggtcgagtcctctgacaccatcgacaacgtcaaggcaaagatccaggacaaggagggcatccccccggaccagcagcgtctcatctttgctggcaagcagttcgaggatggtcgcacccttgcggactacaacatccagaaggagtccaccctccacctggttctcaggctccgtggtggtatgcagatatttgtcaagacccttactggcaaaaccatcac

SEQ ID NO: 441075 - DNA, 165 bp, Triticum aestivum
  unsure (1)..(165): unsure at all n locations
actgntcaatgttcgcactggccatagtcatgggcgtggttgctgacgtttcggtgcataacaccccgcaggacttcgttaacctgcacaaccgcgcccgcgccgtggacggtgtcggcccggtggcgtgggacaacaacgtggccaggtttgcgcaggactggg

SEQ ID NO: 441076 - DNA, 224 bp, Triticum aestivum
tttgtccgcggacgcttgggtcgctcaatgcaggagggccattccttccttagaaatgggaggaaaagtgatcatcatagacatagtgcttggatcttctttagagacaataactgataccgaactgctgatggacatgctgatgttcatatgtaccagaggacggcaacgggatgaaaaggagtggagcacgatctttactaaagcagggtttagcaactata

SEQ ID NO: 441077 - DNA, 229 bp, Triticum aestivum
ttcttactccacgcgtccgcccacgcgtccgctgagtctgttgacacaaaatcacatgaaaagcatcaagaaagaggcctgctggactgtttcaaatatcactgctggtaacaaagatcagatacaggctgtgattactgctgggattattggacctctggtgcatctgctgcaaacggctgaattcgatatcaagaaggaggctgcttgggccatcttgaatgctacc

SEQ ID NO: 441078 - DNA, 367 bp, Triticum aestivum
ttcgttcgcccacgcgtccgggaaaacttgccggaagaagatactgcctacagtacatggatggcaaaacgcccttctgctctggctggctccaggcagatcgtagccagagcacaaggcaagaagattgcggccttcttggactacgatggcaccctgtctgctatcgtcgactaccctgaaaaagccggcatgtcccctgtgatgagagctgccgtgagaaacgtcgccaagcacttacctgctgccatcgtaagcggaaggtcctggaagaagggtcttgaattcgcaaaactgaaggaactctgctatgctggcagtcatgggatggacataatgacatcttctttagcacatttatgaacgc

SEQ ID NO: 441079 - DNA, 145 bp, Triticum aestivum
gctcggtcacggcatcctgcagaagctgacgccatgggcggtcgggccgtgcatggtgactcagtgcccgatccagcccaacggctcctacacgtaccggttcaacgtgacggggcacgagggcacactgtggtggcacgcgcac

SEQ ID NO: 441080 - DNA, 392 bp, Triticum aestivum
tcttcgagggaaagggactatctcaagacaatactccatttaatatatggtaaattcatggtgcatcgcccattcatcaggaaagcaatcaacaacatcttctacagatttatatttgaaacggaaaagcataacggtattgcagagctgctggagatcttgggcagtataattaatggttttgccctgccacttaaagaagagcacaaattgttccttctccgtgcactgatcccacttcacaagccaaagtgtgtagcaatgtaccatcagcagctatcgcattgcattacacagtttgttgagaaggactgcaaacttgctgacactgttattaggggcttgctcaagttttggcctataaccaacagttcaaaggaggtgatgttctt

SEQ ID NO: 441081 - DNA, 155 bp, Triticum aestivum
cctggtacttggggttgggcttgagtactggcgcgttttctacttcctctcccaccaccccgagagcctccacaccttcttcttcctcttcgacgacgtcggcatccccaccgactaccgacatatggacggcttcggcgtcaacacctacacct

SEQ ID NO: 441082 - DNA, 292 bp, Triticum aestivum
tttttccggctatgccaccgatgagacccctgagcgcatgcccctcagccatgtgcttgccaccaagctgggtgcccgcctcactgaagtccgcaagaatggcacttgtgcctggctaaggcctgatggcaaaacccaggtcacggttgaatacctcaacgagggaggtgccatggttcctgtacgtgtgcacactgttctgatctccacccagcatgatgagactgtcaccaatgattgagattgctgcggacctcaaggagcatgtcatcaagccggtgatccctgagaa

SEQ ID NO: 441083 - DNA, 352 bp, Triticum aestivum
tcggctaacgcctcctccccccaaactcccaactacccgcttactcctgagttctgagcccggtcgatccccgccgcagccaccgacgccgcctccgtcaactcgcacggggaacctcgccatggccgccgcgtcgtccgccacctccgtccacgacttcaccgtcaaggatgcaagcggcaaggacgtcgacctcagcgtctacaaggggaaggttcttctcattgttaacgtcgcatcccagtgtggcttgaccaacttcaactacaccgagctgagccagctgtacccgaagtacaaggaccaaggctttgagatcttggctttcccatgcaatcagcttggtgggcag

SEQ ID NO: 441084 - DNA, 359 bp, Triticum aestivum
tttcacgcgtccgcccacgcgtccgcccacgcgttcgggttgcactaggatcctcgttcacctttgctaccactctagaacaggagtacaagagtgatatctttggggagcgaggaattttgctgggtgctgttcatggcatcgcggaggctctgtttaggagatacacagagcaaggaatggacgaggagctggcatacaaaagcactgtggagggcatcactggaattatctccaagaccatctcaaagaaggggatgcttgaagtatacaactccttgagcgaggaaggcaaaaaggagttcaacaaggcatacagtgcatcattttacccttgcatggacatactctacgaatgc

SEQ ID NO: 441085 - DNA, 249 bp, Triticum aestivum
tgccgcccgccaaggacgtcaccgaggagaaggccgttttccccgcgcccgcgcttgccgccgaggaggagaagccgtccgccgatgactccaaggccctcgttgtcgctgagaaggttgcagatgaacctgttgctgagaaacccacagatgagaaggctgcacacggcggctcaaatgacagagacctcgttcttgcaagggtggaaagtgagaagaggaactctttaattaaagcatgggaggaga

SEQ ID NO: 441086 - DNA, 361 bp, Triticum aestivum
tctttcggccgcacacctcatctcatctcatctgatcattgtcttccccccattgccattccctccttgcgagtagtagcagcagcaatggccagcctcgccgacctcgtcaacctcgacctcagcgactgcaccgacaagatcatcgtcgagtacctctgggttggaggatccggtatcgacatcaggagcaaagcaaggacggtgaacggccccatcaccgacgcgagccagctgtccaagtggaactacgacggttccagcaccggccaggctcccggagaggacagcgaagtcatcctctacccccaggccattttcaaggacccgttcaggaggggtgacaacctccttgttatgt

SEQ ID NO: 441087 - DNA, 376 bp, Triticum aestivum
ttcttttgccttcaaggtcaaggggctgtggctcttccgtgggcaggacatccctgtgtttgtcatgaacgaggtctacgacatggagctctacgagtggaccaaggttgacctctctgacgaggcccagaagaagcgtgtcgaagccatgatcgaggaccttgagccgtttgaggggcaggccttgctggacgccaagtgcttcaagtaagcggatcagtgctttggatcgtgatggcggtgacaaatgaacctatctaggactcaaattcagtgtcgaaacagttgtcttttttggaagagtttgcttgttacttaatggctatttgacctggtgaacttgttaatttttgtgccatgcttagagttcttgggt

SEQ ID NO: 441088 - DNA, 178 bp, Triticum aestivum
tcccgggcagaaagcactagatcgtcttctggcttacctgaggtccgactttgatggcattttccgtgccatggatgggctcccggtgactatccggctgttggaccctccacttcatgagttccttccagaagggcatgtggaggatattgtgcgtgagctatgtgctgaaagtgga

SEQ ID NO: 441089 - DNA, 249 bp, Triticum aestivum
gctgctcacgcgtccgcgcgctgctcatcgggcgcggttcattacctctacctgaccaatgaagaggcaaaagaagtcgacgtggatgtacctggcggtgccgatggtgatgtacgcgtgcgagcggctgacgcgggcgctgtgggcgagcgtgcggacggtgaagatactcaaggtggcggtgtgccccggcaacatgctgtagctgcacttttacaagccggaagggttccggagcaagagcgggca

SEQ ID NO: 441090 - DNA, 395 bp, Triticum aestivum
  unsure (1)..(395): unsure at all n locations
tgnctccccacgcgtccgccacgcgtccggagactgtcgtgaaagacactgtgaagtatacacagtatcaaagagcaattgctaaggctttggttgataaggtctcacaggatgaagtttccacaactaggacggtcttgatggttgttggagcaggccgagggcctcttgtaagagcatcattgcaagctgcagaagaaactggtcggaagctaaaagtatatgcagtggagaaaaatcctaacgcagttattactcttcatagtttgatcaaattggaagggtgggaaagcatggttactattatttctagtgacatgcggtgctgggatgctcctgaaaaagctgatattttggtcagcgagttgcttgggtcctttggtgataatgagtta

SEQ ID NO: 441091 - DNA, 321 bp, Triticum aestivum; identical to SEQ ID NO: 436662

SEQ ID NO: 441092 - DNA, 213 bp, Triticum aestivum
tcttcacgcgtccgctactagctagccatggcggggttttatgagtagtcttgcaatgtttgcactggccatagtcatggccgcggtggctgacgtctcgtcgcagaacaccccgcaggatcttgtcaacctgcacaaccgcgcccgcgccgtggacggagtctgccccgtggcatgggacaacatcgtggccaggtttgcgcaggactgggc

SEQ ID NO: 441093 - DNA, 287 bp, Triticum aestivum
cttgccaacccgtttgttcaaccatgtccagagtgctgagcagcacaacctgtacgtgaactctctgggccttgtctcggccaggaagaccgccgaggccgtggacatcctcaagctcatgtcctccacatacatggtggcgctgtgccaggccatcgaccttcgccacctggaggagaacatcaagacctccgtgaagaactgcgtgacgcaggtgtcgaagaaggtgctgaccatgaaccccaccggcgaccttttcagcgcgcgctttagcgagaagagcctca

SEQ ID NO: 441094 - DNA, 330 bp, Triticum aestivum
cccacgcgtccgcccacgcgtccgaacggtcttgtgacctaccctggtgtcaagcgcatcaccatcaagccccagactgaccgttgggtcttccccgagaccaagactggcatcattgttcttgctgagggtcgtctgatgaaccttggatgtgccactggccaccccagcttcgtcatgtcctgctcattcaccaaccaggttattgctcagcttgagttgtggaacgagaaggccactggccagtacgagaagaaggtgtacgttttccccaagcacctcgacgagaaggtcgcggccctccacttgggcaagctcggcgccaggctg

SEQ ID NO: 441095 - DNA, 304 bp, Triticum aestivum
acggccggtttgttgttgtatgcggagatggttaatacataatctatactgcactggcttggaggaacagatcatttggatccgtgttagagttcgcttggtcatcagaaggagagtacgcaatcagagaaagtacatccagaataaagattttcaataaatcatcccaggagaagaaaactatccgtcctacattctctgcagagcgtatctttggtggggtacttttggcaatgtgttccggtgactttatttgcttttatgactgggctgattgtagactacatcgcagaattgatgtgac

SEQ ID NO: 441096 - DNA, 321 bp, Triticum aestivum
tcctagacacgctcaatggcacatatgaggcaatcaccaaaggaaaggctatgtttaatgagctgccagtatcatcaagcactctctacccatgggatccagaatcaacatacatgcacgagcctccttatttcaaggatatgacaatgacccctcctggcgcacggcctgtgaaggatgcgtattgtcttcttaacttcggtgacagtatcacaactgatcacatatccccagctggaagcatccacccagacagcccagctgccaaatatctaaaggagcgcaatgttgaaaggaaggacttcaactcatatggcagtc

SEQ ID NO: 441097 - DNA, 258 bp, Triticum aestivum
tgcaccgcgccattctcgaaccttccaaggggcgttcggtctcccctcgcttccaccgagtccctccgatggcccgcaccaagcagacggcgcgcaagtccaccggcgggaaggcgccgcggaagcagctggcgacgaaggcagcgcgcaagtcggcgccggccaccggcggcgtgaagaagccgcacaggttccgtccgggaaccgtcgccctgcgcgagatccgcatgttccagaagagcacggagctgctgatca

SEQ ID NO: 441098 - DNA, 248 bp, Triticum aestivum
tttgttctggaaaatcgcgagagatatttcgggggggactctttcgtcctgtcgacttataacagcagagaaaagtgaggtgatcatgagcaccatggcgatgtcggcgctgaacccggacgcgcccatgttcatcccggcggcgttcaagaaggtggaggactactcgcccgagtggtgggagctggtcaaaaccaccgcctggttccgcgaccactggttccgccagcaccagctctacgaggacc

SEQ ID NO: 441099 - DNA, 259 bp, Triticum aestivum
actgatataattcaacactagctagctgcacaggacactagccgatccatccatccagaaaaaaaagagtgcccgtcgaaaatgccggtgagcaggatcgccatcggcgccccgggggagctgtcccacccggacaccttccgcgccggcgtcgccgagttcatctccatgctcatcttcgtcttcgccggctcaggctccggcatggccttcggcaagctgactgacggcggcgcgacgactccggcggggctgatcg

SEQ ID NO: 441100 - DNA, 314 bp, Triticum aestivum
gcttcctcgctgccgggaggttggttgccaaagatggctttcttaaggcaatatggccttacagcggccactacctcccaacagaggagaacttcagggagttcatcagtttcttggaggagaacaatgtggatctagctaacgtcaagaggtgttccgtggacgacgacgagtacccatcgttcaagaagacctcagacgagcctactgaaatggaagaacatgacgagaagcccaccgaggcgcaacatgatgggaccctcaacagctcgcaaattgaactgcctgagatggacatcatcaaggaaatggtt

SEQ ID NO: 441101 - DNA, 450 bp, Triticum aestivum
cctgcctctagccatgggccaacagacctgagatctcgctctcgcctccttgcgcagtccccaccgagagcagcacgaaaatggcggcgagcaacctcgagggtgtgctcctggggatgggcaaccccctgctcgacatctacgcctgcggcgacgaggccttgctcgctcagtatgatgtgaagcccaacaatgccattcttgccgaggacaagcacttgcccatgtacgatgagttgtccagcaaggacaatgctgaatatatcgctggaggagccacgcagaactctatcagggatgcccaatggatgctgcaaactgctggtgcaacaagttacatgggctgcattggaaaggacaagtatgtcgaggagacgaagagcgccgctaaagctgcaggagttactgctcattactatgaggatgaggctgctcctacaggcacatgtg

SEQ ID NO: 441102 - DNA, 224 bp, Triticum aestivum
acgcccacgcgaccgaccacgcgagcgacacgcgacaacccacgcgaccgggacgccagcagagaggggcccagacggcaaaaccaacgaagccgaagcggcccagggcacagaaacccgccacgaccgggaacaccagaaaggaggcgaaaccagcacaaacagcaggagccacaagacggggagaggacaagaggacgcgcacacagggcaaagcgagacga

SEQ ID NO: 441103 - DNA, 374 bp, Triticum aestivum
tgttcgtgcctccccggagatcacgagaggcggcgcccccatcctcgcgatggacgcctactaccgccgctcaggtgcgggcggtggcggcggctcagccccccgcaccgacgaggacatctgcaaggactaccgcgcccgccgcaacgccatccaccgcgccctcacccacgacgtcgaggagtgctacgcgcagtgcgatccagagaaggagaacctgtgcctgtacgggtacgctaacgaggcgtgggaggtggcgctgcccgcggaggaggtgcccaccgagctgccggagccagcgctcgggatcaactatgcgcgcgacgggatgaagcgcagcgactggctcgcgctcgtcgacgtgcactccgatt

SEQ ID NO: 441104 - DNA, 450 bp, Triticum aestivum
  unsure (1)..(450): unsure at all n locations
cctcagtccgtcctcgcaagagggcctcctcttctcggactgcctcaaggacttgaggaatctgcggtcgcagctatactcagcggcagaatattttgaagtattctacacaaacaactcgcacagatctacggtggtaacgagtttaaaagactacgcagttgaggcactcgttagtactgttgaccatctgggttttgtgtcgtacaaggtggataatctcgtcaatgaaaaggctgacgaggttaatgaaacagaatttcgagtatcgtcggttgaacagagggtaaagatttgccagcaggcaattgaccaggagggaagatctcaacagtctcttcttatcagggcgccgcagtaccacaggcgttacatattaccaggcgcagatatagtggaatctgctatccatccngtttcagagcccacacggtacagcaggcaacatac

SEQ ID NO: 441105 - DNA, 483 bp, Triticum aestivum
actgaccacgcggacgcccacgcgtccgcccacgcgttttgtcatatgccagtgcggtaaagcagattgatgagctttgctcattttatgcttggtgtaaggacaccggggtagcgagatcatcggagtacccagaggtgcagcgggtcactgataagttactggagacattggaggagtttatgagggaccgggcaaagcgccccaagagtccaccacgggagcctgagcctgagccggtcaaggaggaagagccagagccggacatgaacagcatcaaggcacttactgcaccagaggactacaaggagcctgaacctgagaaggtggaggaagaggtgaagccagagcccccgccgcagccccagggtgatctggtggatcttagagaagacactgtgagtgcagatgagcaaggcaataggcttgctctggccctgttccaagggccacctgctgctggtggtagcaatgggtcatggg

SEQ ID NO: 441106 - DNA, 397 bp, Triticum aestivum
ccctcggcttccagatgcctagccacatgaccctgcgttcttgcaccgacgaaacaccagagacggagacatggggctgaaggggttcgtcgagggcggcgccgcctccgtcgtcgccggctgctcgacgcacccgctcgacctcatcaaggtccgcatgcagctacagggcgaggcggcccgggcccctgccccagccatgcgcttcgcgctcgtgttcccccccggcgtgcagcatcaccaccacaacgaccacctgctgcagccgccgcgcaggcccgggcccatcgccatcggcgcgcagatcttgcgggcggagggccccgcagggctgctctccggggtgtcggccaccgtgctgcggcaggcggtctactcctcgacgtccatggggctc

SEQ ID NO: 441107 - DNA, 396 bp, Triticum aestivum
tgcagaaaccacacaaggggacgcaacggacttcaagcggggagaaggcggctactggccagactacaagggtaagcttgaggatggacaggaaatagccgttaagacactttcgcaggcatcgacacagggtcccgatgagttcaagaatgaggttatgctgatagcgaaactccagcatcggaatcttgttcgactgatcggctgctgcatctgtggacaagaaaaaatactcatatatgaatacatggcaaacaagagcctggacttcttcctgttcgacaaatccaagattatgcttctggactggcaaacccggtaccgcataatcgaggggatcgcccgaggattactgtatcttcaccaggactcgagatacagaatcgttcacagaga

SEQ ID NO: 441108 - DNA, 476 bp, Triticum aestivum
taccgcggaaggcgacgagacccatgtctcgacacttgtcatgggcacccatggctacgccgcaccagagtacatgctaactggtcacctcacagcgaaaagcgatgtttacagctttggtgtcgttcttctggagatcctcactggaagacgagccgtggacaagacccggcctagtagggagcaccatctagtccagcacatgcggtcgtggctcaaagaccctgaaaagctaggaaaaatcatggaccctgcgttggagggtaagtatgccaccacggcagctcataaggcagccctagtggcataccagtgcctgagtggcagcccaaagagcaggccggacatgtcgaaggtcgtggaagacctagaactgctactcaacctcgtggatgatgttcccggtgagccggtgatgcatgtagcttcacaagatgacactaggaaggaaagaacaagaagaagaaatggagaga

SEQ ID NO: 441109 - DNA, 286 bp, Triticum aestivum
cctgaacacaacgacccaaccgcaaccgggccagagcgtttacacacaacagagcggcagcagagcccgggccgaacccgccccggccggcgccatggactgcgactgcggggagaagctcctcgtgggcctcctcgcggccgtggtgggcgccatcgtcgtgtccaagatccggggccgcaagctgcggctgccgccgggccccttcccggtgcccatcttcggcaactggctgcaggtcggcgacgacctgaaccaccgcaacctggcggcgatggcgcgcaag

SEQ ID NO: 441110 - DNA, 452 bp, Triticum aestivum
ttctcttccaaaatctgacctcatgaagaaaaagaacaaacctaagcttagcatgaaagagagtatgaaagttctgatctcttcaaaatacgtgagggaccttgctaccttagtcgttgcatatggcattagtatcaatcttgtggaagtgacatggaaatcgaagctcaaggcacagttccccagtccaaacgagtactcatctttcatgggtgatttctctaccgcaactggaattgcaactttcacgatgatgctgttaggccggattatattccaaagatttggctggggggtggctgccatgatcacccccacagttttgttggtgactggcgttggtttcttctctctgattttgtttgggcaaccactgactcccctgcttgccacgtggggtatgacccctcttcttgcggctgtttatgtgggtgcgttgcagaacatattta

SEQ ID NO: 441111 - DNA, 321 bp, Triticum aestivum
ttttcgcggggatgagggagagcatcgacggggactttgttggcggcgcgaggggcatctacatgacggaggcagtggccgcggcgtccaacaacggcggtggtgatgttttgcacgtgatgaaggagagctccgatgatgaccgacacgactactacgcgctgggaaggtatgacgcggcgatgaacacatggacgccgctggactccgatgccgatgtcggcattgggctgaggtacgattggggaaagttctacgcgtccaagacattctacgatccatcaaagaagcgacgcgtgctgtgggggtgggtcggtgaga

SEQ ID NO: 441112 - DNA, 162 bp, Triticum aestivum
  unsure (1)..(162): unsure at all n locations
agacagcaagagcgggaagangaacccagaacagacggagcagggcagcgccgccgcccaggacgccgccgaggacgaccacggcgaggcgccagagaacaaggcggggcagaacgaggaggccgccgggcagaccggcgagggcagcagcagcggcgacaa

SEQ ID NO: 441113 - DNA, 414 bp, Triticum aestivum
actgaacctctccacctacaaagcaggagctcagtctttggtgctgggatcgctctgctcgttcgacgactttggaaatggccaccaactcgaggtcgaactccagggccaccttctccagcgagatccacgacatcggcacggtgcagaactccaccacgcccagcatggtgtactacaccgagcggtccatcgccgactacttccctcctcacctcctcaagaaggtggtgtcggaggtggtgtcgacgttcctgctggtgttcgtgacgtgcggggcggcggcgatcagcgcccacgacgtcacgcgcatatcgcagctcggccagtcggtcgccggcgggctcatcgtcgtcgtcatgatctatgccgtcgggcacatctgcagcgcgcacatgaaccccgccgtcaccc

SEQ ID NO: 441114 - DNA, 467 bp, Triticum aestivum
  unsure (1)..(467): unsure at all n locations
cctggcacctatggcgtatgccgcatggtatggacactgggctgagatgctcatccttgccgtgccctccttggctggccctgctctcgtcccatgccatgttaccacgctgtggatttggtttgctgcacgtttggttgagagcctcaacatacatagcggatttaagttgccattcaacgctgagaagtatataccgttctatggaggggcggagcaccatgactaccatcactacataggaggacagagcaagagcaacttcgctcctgttttcacctactgtgattatatntatggaacggacaagggctacagatatcacaaggcaactctggcaaagctgaaggagttggcaggcagcgacgttcagaaaggagtcgacaatggattcaacaatggaaagcaggactagagagaggttggcttcagaggactcatggtcatacaaatcctatcactaattc

SEQ ID NO: 441115 - DNA, 452 bp, Triticum aestivum
  unsure (1)..(452): unsure at all n locations
ctcgtagacgcgnggggcagcaaagcagaacccgggctcggtagagcccacggcctggccttcccctctgaagttcatcagcgagctcgacccggaagccaaggctctgctggaagcggccctgatggaggccaacagggagagggagaagaagatcttgaaggacgcaaagtgctcgccgcagtcccctttgcaatacgatgatgatcacatcgacgacgacatgttctcggaggtgagcgacacggagctgtgctgcatctgcttcgaccaggcgtgcaccatcgaggtgcaggactgcgggcaccagatgtgcgcgccctgcacgctggcgctgtgctgccacaacaagcccaacccggcgaccctgaccctgccctcgccggcgtgcccgttctgccgcggcagcatctcgcggctggtggtggctcagacccagacagcagacaacg

SEQ ID NO: 441116 - DNA, 391 bp, Triticum aestivum
cacgctggctactgggactgggttgtgcactccttcaggatcaccaactgcggggtgcaggacaccacccagatccacacccacatgtgctactccaacttcaacgacatcatccagtccatcatcaacatggacgctgatgtgatcaccattgagaactcgcggtctgacgagaagcttctctccgtcttccgcgagggtgtggtgtacggtgcaggcattggcccgggtgtgtacgacatgcactcccccaggatcccgtccagaggagattgccgaccgtgtcaacaagatgctcgcggtgctcgacaccaacatgctgtgggtgaaccctgactgcggtctgaagacccgcaagtacgccgaggtcaagcctgcgctcaccaacatg

SEQ ID NO: 441117 - DNA, 362 bp, Triticum aestivum
taccgcccacacgtgcgcccacgcgtccgacacaattcaacactagctagctgcacaggacacgagccgatccatccatccagaaaaaaagagtgcccgtcgaaaatgccggtgagcaggatcgccatcggcgccccgggggagctgtcccacccggacaccttccgcgccggcgtcgccgagttcatctccatgctcatcttcgtcttcgccggctcaggctccggcatggccttcggcaagctgactgacggcggcgcgacgacgccggcggggctgatcgcggaggcgctggcgcacgcgttcgcgctcttcgtggccgtgtgcgtgggcgccaacatctctggcgggcacgtgaaccc

SEQ ID NO: 441118 - DNA, 369 bp, Triticum aestivum
tcttcgaacgagtactacggcgagccggcggcgcgcttgtgcctgcggtacgtcgggtacaagatcctgccggaggagagctccctggcccgcgagtacccggccggccaccccgtgctgacggaccccgccggcgtagcgcagcgcggctgggacgtgaccaagaaggtgtacctggaccggcagaacgtgcggctcgacctggcgcggttccgggaggagctggtcgccgcccaccggtacctcgtcgccggcaagcggaagggccggccgaaaaccaaacctattgcgatgtgatcggtccatataatcgtctgccgtagcaaacatgccgtatagcagtataccatagatcaaaatttacagaca

SEQ ID NO: 441119 - DNA, 418 bp, Triticum aestivum
ctcgtctacctgaagggctacaatgctataagagaggtctatccagacattcagatgatctcaaagtgggatggagcatctggaccacttgaccatcctgctgatctatatgatctccatgtctataccggatccagggcactattttgcatgaagaatacattggacaatacctctcgtagtgggcccaaggcttctgttagcgagtatgctgttacaggaaacgatgccggcagaggaagacttcttgcttcattggcagaggccgctatccttactgggctggagaagaatagcgatgttgctcatatggcaagctatgcaccgctcttcataaatgataacgaccgcacgtggaacccagacgctatcgtattcaactgctggcagcaatatgggactcccagttactggatgc

SEQ ID NO: 441120 - DNA, 341 bp, Triticum aestivum
  unsure (1)..(341): unsure at all n locations
agaagaagaagnnngngagcgatggcgttttttacgccgagctgaacgagatgctgacccgggagcttgccgaggacggctactccggcgtggaggtacgcgtgacgccgatgcgcacggagatcatcatcagggccacgcggacgcagaacgtgcttggtgagaagggccgcaggatcagggagctcacctccgtcgtccagaagcgcttcaacttcccggagaacggcgttgaactttacgccgagaaggtcgtcaaccgtggcctctgcgccatcgcccaggccgagtcactccgctacaagctcctcggtggccttgccgtccgcagggcatgctat

SEQ ID NO: 441121 - DNA, 421 bp, Triticum aestivum
tcgtgagagcggcggcgaagatggagacgctgaagctgcttaagcgcctggcctctagcgtcctcaagtgcggcaagggcaaggtctggctcgaccccaatgaggtcaacgagatctccatggccaactcccggcagaacatccggaagctggtgaaggatggtttcatcatcaggaagcctcagaagatccactccaggtctcgtgcaaggagggcacatgaggccaagcagaagggccgtcactctggatatggtaagcgtaggggtaccagggaggctaggctccccaccaagatcctgtggatgcggaggatgcgcgtcctcaagcgccttctgcgcaagtaccgtgaggccaagaagatcgacaagcacatgtaccatgacatgtacctgaaggtcaagggtaacatgttcaagaa

SEQ ID NO: 441122 - DNA, 420 bp, Triticum aestivum
ctcgtatcttcctcccccgccattaattgatcaagaaatgcttcagctaccagcaatggagcccatccctctcctcacgccgtacaagatgggccagttcgatctcgcccacagggtggtgatggcgccgttgacaaggcagcgctcctacggcaacgtgccacagccgcacgccgccgtgtactacggtcagcgcgccaccgccgccggcctgctcatcgccgaggccacaggggtctcggacacggcacagggctacactgacaccccggggatatggaccgctcttcttctgccagatctggcatgttggacgtgtgtccaccttcgagctgcagcccggtggcgccgccccgctgtcgagcacggagaagggggtcggcccgcagatgagcttcgatggccggctagaggagttct

SEQ ID NO: 441123 - DNA, 274 bp, Triticum aestivum
cgatggatccgcagcagccggagcccgtcagctatctatgcggagattgcggagctgagaacacgctgaagacaggggatgtgatccagtgccgtgagtgtggctaccgcatcctctacaagaagcgcacccgcaggattgttcaatacgaagctcgctgaagacagaagaacaaacatcattcactgttggtaggtgcctcgattgatgtggagtgtgccctgagacaaagctacaatggagaaatgtattatatacagtacttttaggtctt

SEQ ID NO: 441124 - DNA, 384 bp, Triticum aestivum
accggccgcccaaactctattgcgacggctccggatggttcgaaggttaatgctgcggaggcatttaagatcgccggcatccagcacggcttcttcgagctacagcccaaggaaggccttgccatggtgaatggcacggcagtgggctcaggccttgcctccatggtgcttttcgaggcaaacgtccttagcctccttgctgaggtcttgtcggccgtcttctgtgaggtcatgaacggcaagccggagttcaccgaccacttgacccacaagttgaagcaccaccccgggcaaattgaggccgctgccatcatggagcacatccttgaaggcagctcctacatgatgctcgcaaagaagctcggtgagcttgacccactgatg

SEQ ID NO: 441125 - DNA, 346 bp, Triticum aestivum
ttctctcggcagcagccgccgacagcagccgcgcaaaggctttacaaaccctaaccctagtccatagctagcggagcggccttcctctcgatctagctagagccatggcgccgaccaagggcgaggggccggccatgggcatcgacctcggcaccacctactcgtgcgtcggcgtgtggcagcacgaccgcgtcgagatcatcgccaacgaccagggcaaccgcaccacgccctggtacgtcgcctgcaccgactcggagcgcctcatcggcgatgccgccaagaaccaggacgccatgaaccccatcaacaccgactgcgatgcgaagcgtcttattggcagaag

SEQ ID NO: 441126 - DNA, 378 bp, Triticum aestivum
acggcagcagccgccgccagcagctgcgcaaaggctctacaaaccctaaccctagtccatagctagcttagcttccttcctctcgatctagctagagccatggcgccgaccaagggcgaggggccggccatcggcatcgacctcggcaccacctactcgtgcgtcggcgtgtggcagcacgaccgcgtcgagatcatcgccaacgaccagggcaaccgcaccacgccctcgtacgtcgccttcaccgactcggagcgcctcatcggcgatgccgccaagaaccaggtcgccatgaaccccatcaacaccgtcttcgatgcgaagcgtcttattggcagaaggtttgctgatgcccctgtccagagtgatattaagatg

SEQ ID NO: 441127 - DNA, 303 bp, Triticum aestivum
gtttcgttacccagaagaaagtcccggacaagttgctggatgacaccagcgtcacgcacctcttctcgattaccaagtacaccggcttgcttgccaccggcctcacagctgatgcgaggtccttggtctcccaagcaagaaatgaagcagctgagttccgtaaaaaatggggatacgagatgcctgtggatgtattagcaaaatggatagcagacaaagcacaaatatacacgcagcatgcgtacatgagaccccttggtgtagttgccatggtcttgggttatgatgaagagaaaaatgctc

SEQ ID NO: 441128 - DNA, 313 bp, Triticum aestivum
ttatttcaatcccctctccgcgatctcaccgggaaattcctcgaccgattgaaagccaaggccctctcgtcctccttcaagatgcagatcttcgtgaagaccctcaccggcaagaccatcaccctcgaggtcgagtcgtctgacacgatcgataatgtcaaggccaagatccaggacaaggagggaatccctccggaccagcagcgcctcatctttgccggcaagcagctggaggatggccgcaccctggctgactacaacattcagaaggagtccaccctccacctggtgctcaggcttcgtggaggcatgc

SEQ ID NO: 441129 - DNA, 362 bp, Triticum aestivum
tcgctgatatacaggacaggagtatcaaggaggaagacgaggaaacgttgatggccggcggtgaagagctgaagctgctggggtggtgggcgcccggggtgagcccctacgtgctccgcgcacagatggcgctcgccgtaaaggggctgagctacgaatacctccccgaggaccgctggtgcaagagcgacctcctcatcgcgtccaaccccgtgtacaagaaggtgcccgtcctcatccacaacggcaagcccatctgcgagtcgctgctcatcgtggagtacctcgacgacgccctcggccttcccggcaacggcaagcccatcctccccgcagacccctacagccgcgccctcgctcgc

SEQ ID NO: 441130 - DNA, 367 bp, Triticum aestivum
cctcacgcgtccgcacaacaggaatacacaagagaaaagaagacccaacggagctgaaatcaaatggcatcctccccttctttccttctcctcgctgctcttcttgccttggtctcatggcaggccgttgcctccgatcctggcccgctccaggacttttgtgtcgccgacatgcaatcaccagtgcgtgtcaatggatttgtctgcaagaacccgatggaggtcaacgctgatgacttcttcaaggcagccgccctcgacaagcctagggtgaccaacaaggttggatccaacgtcaccttgatcaatgtcatgcagattgctggactcaacaccctcggcatctcaatcgcgcgcatcgactatg

SEQ ID NO: 441131 - DNA, 295 bp, Triticum aestivum
tttgttcctcccaagctgatgttgccgttttggtcattgcctctggtactggtgagttcgaagctggtattgcaaagaacggtcagacccgtgagcacgcctttttggctttcactttgggtgtcaagcaaatgatcgttgccgtcaacaagatggacgacaagtctgtcaactggtccgaggatcgtttcaacgaaatcaagaatgaaacttctggcttcttgaagaagatcggttacaaccccgagaagatccccttcatccccatctctgggttcaacggagacaacatgtt

SEQ ID NO: 441132 - DNA, 385 bp, Triticum aestivum
gttatttctgtggtgtgagcatcaattggcacgtctcatcagacttcaacaagggctggagtgctcgggttacattgttcaattggggtgatgtcgacatggccaactggtttgctgccatggtcatggacaaggcgtatgacggatttgagaaggcatactctttcaatgcaacagcagagggcaataacacaatatttatgcagggccttgaggggctcaattaccttgtgaagcagaccaacatgagcgggtcggattaccttgtgccaggaaagcagcaatcagtgctctcattcaccaagaagctgactcctgatattgatgttgtcgctggagatgggttcccaacaaaggtcttcttcaatggtgacgaatgtgctat

SEQ ID NO: 441133 - DNA, 157 bp, Triticum aestivum
tttcctatagaccttgctcatcgccactggctcctggaccataaagctcactgactttggcgttcaaggagcggaatcaaacaacatattgtatctaagggaaattgatgacaccgacaagttggtcgcagctatgcgagcgaagaaggatgggaag

SEQ ID NO: 441134 - DNA, 549 bp, Triticum aestivum
tcgtttacgcgtggcggacgcgtgggtgtgcagaagcctggagagtttgttataacattccctcgttcataccattcaggtttcagccacggtttcaattgtggagaggctgtcaattttgctattggcgactggtttcctctgggctctctggctagcaaacgctatgcacttctgaacagaacaccctttcttgcacacgaggagctactttgtcgttctgcaatgcttctgtctcacaaactgagtgatccagaaacaattaattctgaacatccatacactcaatattgtgtgaagtcttcctttgcgaggttgatgcgactgcagcggcgcacacgcagcttactcgctaaaatgggttctcagatatactacaagccaaaaatgtattcgaacctatcctgtagcatgtgccggcgtgattgctatgttacacatgtgtcatgcggatgcacctttgatcctatctgccttcatcatgaacaagaactgcggagctgctcttgtaaatctgaccggattgtctacgtcagagaggacatactg

SEQ ID NO: 441135 - DNA, 471 bp, Triticum aestivum
tcgttcattcaagcagcacctatgttggcaaactgaaaccaaacttccttggcacaaagttcacaatatttgatagccaacctccttgtgatgctgcggtgttgcctaacaacaagccaagcaaaaggcactcgaagcaagtatcaccaagactgccactaggtaattacaatgttgctaccgtctcatatgagctcactgtcctgcgcaaccgaggaccaaggagaatgcagtgcaccatgcactcaataccagccgtgtgcatccaggagggcgggaaggccccaacccctactggcatggtccactcactcgacgaacaagtgtccaccctatcaactagtagcaaaggaaaggaaccaaacatcgaattcttgtcaacaagcctcagcgctgatttatccggaccgatctcgaccagcgaagcgcctctgcttctgaagaataaagctccccgctggcacgagcagc

SEQ ID NO: 441136 - DNA, 353 bp, Triticum aestivum
ttgcttcgcgtccgcccacgcgtccgcacaaacatgatctccttcacctctcaaccaagccaaggccaagagcccagtgaagcagcggccatggagggcaaggaggaggacgtgcggctgggcgcgaaccgctactcggagcaccagcccatcggcacggcggcgcagggcggcggcgcggacgagaaggactacaaggagccgcccccggcccccttcttcgaggccggggagctcacctcctggtccttctaccgggcggggatcgccgagttcctggccaccttcctcttcctctacatctcggtgctcaccgtgatgggcgtggtgggcaacccgtccgggtccaagtg

SEQ ID NO: 441137 - DNA, 317 bp, Triticum aestivum
tcgtttccctccggcgccgcgctcgtcctggggctcttctgcatcgactccctggacgcccccgcccagaccggcgtcccggcgtacatctactacacctcctccgctggcgacctcgcggcgttcctccacctgccccaccacttcgccaccacggaggggagcttcagggacatgggcaaggcgcccctacgcttgcccggggacccgccgatcccggcgtccgacatgccgcacaccgtgatggaccgcgcggacccgatctgcaccatcaggatcgggcactacgggcgcatcccggaggccaggggcgtgct

SEQ ID NO: 441138 - DNA, 420 bp, Triticum aestivum
tcgttgcgcctcgggcgtcgtctacaaggcgcgggaccgccgcacgggcgccaccgtcgccgtcaagcgcctccgcggcggcggcttctgcgaccacgacggcagccggctctccgaggacctcctccgcgaggccgcgtgcctcgaggcctgccgcggccacccgtccgtcgtctagctgcgggccgcgcaccgtgacggcgcgggcggcgcgttcctcgtgatggagtacgtcgggcccagcgtggcgcaggtcatgcgggagcgcggccggcccttccccgaggccgacgcgcgccggctcatgcgccagctcctggacggcgccagggcgatgcacgacctcggggtcctgcaccgcgacctcaagccggacaacgtcctcgtcgacgcccacggcgacctcaagatctgcgactt

SEQ ID NO: 441139 - DNA, 416 bp, Triticum aestivum
ttcgttttcacatcttaagaagacttgataatccaaatgttattaagctcgaaggtttggcgacatcacgcatgtctagtagcttgtatctcgtgttcgaatacatggagcatgatcttgcgggacttgctgctacacctgacataaaattcacagaggctcaggtcaagtgttacatgcaccagctactgtctggacttggtcactgtcatagtcctggtgctttgcatcgggatataaagggtgctaatcttctgcttgacaataatggtgccctcaaaatagcagattttggtctagctacattctttaattcgaaccataagcagaatttgacaagtcgcgttgtaactttatggtaccgcaccccggaactttagctgggtgctactaactatggtgccactgtagatctc

SEQ ID NO: 441140 - DNA, 391 bp, Triticum aestivum
tcgtgtttttctcggtgaatacaagtggacagtttgttggtgttgctgaaatgactggtcctgttgattttgaaaaaactctagagtactggcaacaagacaagtggaatggttcattctctgtcaagtggcacattgtcaaggatgttcccaacaacattctcaagcacatcgtccttgagaacaacgagggcaagccagtcacaaacagccgtgacacacaggatatcaaccttgagcaaggtatccagatgcttaagatattcaaagagcatgtcagcaagacctctattctggaagactttgccttctatgagaaccgccagaagttgatgcaggagaagagaataaaacaacagcagatccaaaagcaggtgtgggacagcagggc

SEQ ID NO: 441141 - DNA, 519 bp, Triticum aestivum
ttggtatagggcaaagctgggtgggattccagttggtatcatagctgtggaaaccgagacagtgatgcaagtaatccctgctgaccctggtcagcttgattctgccgagcgtgtagtccctcaagcgggacaggtgtggttcccagattcggccgcaaaaacggcccaggcactgctggatttcaaccgtgaagagctcccgttgttcatacttgctaactggagaggcttttctggtgggcaaagggatctgtttgaaggaatccttcaggctggttctatgattgttgagaatctgaggacgtacaagcagcctgcttttgtgtacataccaaaggctggagagctgcgtggaggtgcatgggttgtggtggacagcaagatcaatccggagcacattgagatgtatgccgagaggactgcgagagggaatgtccttgaggcaccaggactcattgagatcaaattcaagccaaatgaattggaagagagtatgctaaggctggaccctgagttgat

SEQ ID NO: 441142 - DNA, 373 bp, Triticum aestivum
tgtggatcgcaaggctgccgaagcctgggccgccctgaaccgcctcccgctcgttccctcggtgacccgtgccgtcctccccacagctgcacagctctcagccaagtacaactctgccgtgctcgatggcgctaagcgtggcaactccgtcgccacctacctgccactcgtcccaacagagcgcattgcaagggtgttcgccaacccgtctgctgatactgcgcctgccacagctcctgagatgcagcccatcccgacgcagtaacaataagagctacccgttgttatgttacctaatagctgttaggagtcagtatctcgttgtgtagtgtcttgcttggcttgtggtggacagcggtaatatgtgtggatg

SEQ ID NO: 441143 - DNA, 149 bp, Triticum aestivum
tcgttccaccctcggcggcctccaccccaggatcgtctccaacaacgccgactgcaccatggacatccataagatcgttggctccatgaggagcccggatgggcatgtgtgttatcccaccacccggctcatatgcttggagaacacac

SEQ ID NO: 441144 - DNA, 389 bp, Triticum aestivum
tcgtgtttcctgctagggttttggtcctttgttttcggcggcgcaagatgggggagagggtcaagggaaccgtgaagtggttcaacgtcaccaaggggttcggcttcatctccccggacgacggcggcgaggaccttttcgtccaccagtcctccatcaagtccgacggctaccgcagcctcaacgagaacgacgccgttgagttcgagatcatcaccggcgacgacggacgcaccaaggccaacgacgtcaccgcaccgggaggaggggcgctctccggcggctcccgccctgtcgaaggcggtggtgaccgcgggggccgtggcggctactgaggcggcggcggtggctacggcggcggcggtggcggctacggaggcggtggtggc

SEQ ID NO: 441145 - DNA, 419 bp, Triticum aestivum
ttactcgtccgcgactccttcgccgacatcctcaagctctacgagggtggcatcaagctgcccgacatcccggccctccaggagatgcgcaagcgcttcccgctccagctcgtcaaggacctcatccccatgggcggcgactacctcctcaagccccccaagccacaagtcatcaaacaggacgagaaagcatggatgaccgacgccgagttcgcaagggagattctcgccggcgtcaacccgatgatgatcacccgtgtcacggagttcccccccaagagtactctggatcccagccagtacggcgaccacaccagcaccatcaccgaggcgcacatcgggttgagcctggagggcctcaccgtgcagcaggcagtcgctagcaacaggctctacatcctcgaccaccacgaccacat

SEQ ID NO: 441146 - DNA, 351 bp, Triticum aestivum
ttcacgcgtccgcgactccttcgccgacatcctcaagctctacgagggtggcatcaagctgcccgacatcccggccctccaggagatgcgcaagcgcttcccgctccagctcgtcaaggacctcatccccatgggcggcgactacctcctcaagccccccaagccacaagtcatcaaacaggacgagaaagcatggatgaccgacgccgagttcgcaagggagattctcgccggcgtcaacccgatgatgatcacccgtgtcacggagttcccccccaagagtactctggatcccagccagtacggcgaccacaccagcaccatcaccgaggcgcacatcgggttgagcct

SEQ ID NO: 441147 - DNA, 325 bp, Triticum aestivum
ttaaggggaagtgggacccggcgatccggatgccttggtaggaggagcccgccacggccgaccagagctccgagaagggggaggacggcctcgggacgaggtgggcggtactcgtcgccggatcctacggctacggaaactacaggcaccaggccgatatatgccatgcctaccagatattgagaaaaggaggcgtaaaagaggagaacatcgcggtgactatgtatgaagacattgccaacaaccttctcaacccgaggccaggggttatcatcaatcacccataaggcgaagatgtatatgctggcgttccaaaggactacac

SEQ ID NO: 441148 - DNA, 505 bp, Triticum aestivum
  unsure (1)..(505): unsure at all n locations
tcgttacgcgtccggcagcttaaggagacagcaaaacgtaatccctcattatcgaatctaacaagttcagcctcggagagaatatcagagctgcaagaaaagattggagaatctgaatttgacagggatctgttgcagattgtagaaaagattgcgtccggatcttctggagacttatatcgaggaacttaccttgatgtggatgttgcaataaaattccttagaactgaacatgttaacgataattcaaaagtggagtttttgcaagaaataatgattttaaggagcgttaatcatgaaaatgtcgttcgcttttacggggcttgcacaaaacagcgaaagtatctcattgtaacggagtacatggctggaggcaatctgtatgacttccttcacaagcataacaataccttggagctttccttgattcttaagattgctattggcatctcgaaagggatggattatntgcaccagaataacatcatccatagagacttgaagt

SEQ ID NO: 441149 - DNA, 334 bp, Triticum aestivum
gtacatggagggtatcccaccggaccagcagcgtctcatctttgctggcaagcagctcgaggatggccgcacccttgcagactacaacatccagaaggagtccactctccacttggtgctcagctccgtggtggtatgcagatcttcgtcaagaccctcaccggcaagaccatcaccctggaggttgagtcctcggacactattgacaatgttaaggccaagatccaggacaaggagggcattcccccggaccagcagcgtcttatctttgccggcaagcagcttgaggatggccgcacccttgcggattacaacatccagaaggaatccaccc

SEQ ID NO: 441150 - DNA, 391 bp, Triticum aestivum
gtgactttttccgccgccgccgcccctagctccagcgccctcgccgtcggtcgcagccaagcccccgcttcgagcttcgcgatctccctcgccgaccaacatgggtaagacacgtggtatgggagctgggcgcaagctcaagacccacaggaggaaccagcggtgggctgacaaagcctacaagaagagccatctggggaacgagtggaagaaaccctttgctggttcatcccacgcgaaggggattgtccttgaaaagattggcattgaagccaagcagcccaactctgctatccgtaagtgcgctcgtgtccagctggtgaagaatggaaagaagattgccgcctttgtgccaaacgacggttgcctgaacttcatcgaggagaatgat

SEQ ID NO: 441151 - DNA, 274 bp, Triticum aestivum
gttatttccgcaaaacggatccgcaacttcgggaaaaggattggctctgaggactgggctctggggtcccggccccgaacccgtcggctgtcgatcggtgagtacgaccacgtgagggagctcatcaagtggggaacggactacctgctgctcacctttaactcgtacgcctccaccatcaacaagctctacagtcaggtgggtactgccaagatcaacggcagcacgccggacgaccactactgctggaaccggccggaggacatggcgtacc

SEQ ID NO: 441152 - DNA, 473 bp, Triticum aestivum
tcgttgacgcgtggggataaactgatatggagatggattgcagaagattttattcatgataagcaaagggggaacttatataaacaaggagaaaactacttcaatgagttgattaatcggaatatgcttcagcctgttgatattgacactcatggtagtgcaaaaacatgtcgtgtacatgatatggtacttgatttcatcacctcgttatcagccgaggaaaattttgttactatactaggaggtcagcagccattgtctacagggaacaagatccgccgattatcagtccaaaagaacaatggagagcacaatatgcttgataaatccatggacttatcccatgtaaggctactttttgtcttgaggtctgctattgacatgattccatcacttttgagcttccaggttctacgtgtgctggatctcgaagaatgccaacatttggatagttgttatttgaaggacatcac

SEQ ID NO: 441153 - DNA, 378 bp, Triticum aestivum
  unsure (1)..(378): unsure at all n locations
tcggtttgaaacaacttgccagcagcgccagtgtgcagcgatccagtgaccgacacggacaagaacaagatggtcgccggctgtttcatcaccgacgagtgcgccctggcggtgtcgacggagcggatgtggaaggcggtcttctccggcgaggacacggccgtcctgcccaaggcctgcgcgggcttcatcgacgccgtggacgtcgagggcgacggcggacccggcagcgtctccaccatgacgctcagcccggcggcagcggagctcgccggctcgggcgtgatgaggagccgcctggtggcgcgcgacaancgcggcccggtgatcaagacggagctgctggagggcagcaaggtgagcgcccagctcaagtcg

SEQ ID NO: 441154 - DNA, 275 bp, Triticum aestivum
gcgttgactacacccctgagtctgccacggagctcgttgtcctcttccttggcgacacctccaagggccacaggcccggccagttcaccaacttccagctcaccggttccagcggcatcttcaccggcttttccacagagttcgttggccgtgcctgggacctcaaggaggacgatgcggccaagcttgtctccagccagcctgcgtctggcattgtgaagctcactgctgggcagaagctcccagtgccggtcgatgcggaccgcaaggacatg

SEQ ID NO: 441155 - DNA, 251 bp, Triticum aestivum
cttcgttccattcgattcgatctcggcttcctctccaagccacgcgacgcgagaccagagctccggccatggcggcgacgatccagtccgtgaaggcccgccagatcttcgacagccgcggcaaccccaccgtcgaggttgatgtgtgctgctcagatggaacctttgccagggccgccgttcccagcggtgcatcgactggtgtctatgaagctttggagctgagggacggtggatctgactacttgggc

SEQ ID NO: 441156 - DNA, 235 bp, Triticum aestivum
tttgcattctaccaccagaccgaccgcacagttgaagtgagatctgcgctaagggctcatcagcaaccatgaagagcaccaagctcgcggcgatcctgatcctccaggccgtcctggtcatggggatcctctcacacgtgaacgccgactatttacccaagagctgcaacaactgcaggtccttctcgggggtcgacgcctgcgacgacgcccacccccagtgccccaagggctg

SEQ ID NO: 441157 - DNA, 429 bp, Triticum aestivum
tcgtacatcggaagacgagagaacagaagagccaaggacactaaaacgaagtggcatcctcctcttcctttctcctccttgctgcacttcttgcgttagtctcatggcaggccactgcttttgatcctagcccactccaagacttttgagtcgccgacatgaattcaccaggaactatccgttttgtcatcatgtcttcaccaaatacatatgttgaaatctatttccggaaattatatccaagtcgaaacaactttgtaaaatctgagcttacatgtgtatatcttgcgcccccagtccgtgtcaatgggtttgtctgcaagaaaccgatggaggtcaatgcagatgactttttcaaggcggccaacctcgacaagcctaggctgcccaacaaggttggatccaacgtcacattgatcaacgtcatgc

SEQ ID NO: 441158 - DNA, 421 bp, Triticum aestivum
ttgctcacgcgtccgcggacgcgtggcgctagggttttgggattttagcctccagcgccgccgccgccgcccagcgaattcgacaagcccccgagctcgccggatccgatggccgtcacgttctccgacctccacaccgccgacgggctcaaggccctcgaggcgcacctcgccggcaagacctacatctccggcgatgggatcaccaaggacgacgttaaggtgttcgcggcggtgcccgtgaagcccagcgccgagttcctgaacgctgcccgctggtacgacgccgtcgccgcggccgtttcttcaaggttccctggccaggcctctggggtgagtgcatcctcggctcctgctgcagctgctcctgctgcttccaaggatgaagatgatgacgatgacatggatctgttcggcgatg

SEQ ID NO: 441159 - DNA, 411 bp, Triticum aestivum
tctgtttagcatattatgctgtagaagaggttaaagagaatgctactcagaaaagtcagaaggtgttcgtccacgtgccatcagaaattgcggcccatgaagtcgaggaaattggagttgagcaccttctgagggatgtgaaagacacaacaataagcacacttgccacagaggtcagcagcaagcttgcagccctgaagggactcgatgcgaggcttacggagatccggggttatctagatcttgtaattgaagggaagctcccactgaaccatgagattctgtaccacttgcaggatgtgtttaatctgctccccaatctcaacgtaaatgagctcattaaagcctttgcagtgaaaacaaatgatatgatgctggtcatatacctgtcttctcttatccggagtgtca

SEQ ID NO: 441160 - DNA, 406 bp, Triticum aestivum
ttctcttacctctccacaaaaagttcaatggatctgcagcaattaatggagcatcaactgttcgacgatggcgccgtcccgagctgcatgatctcgccgttagaggcagacaacggtttcaccgacgagctgccgtctttgcagttaccggacctggaccttgacttcgacatccacgagttctccgcaccggcaacggcaccggcgaaagcggccacctcaggtggctccggattggttggttccggttcgggatcgcacaagaagctcaaccacaacgcgtacgagcgcgaccggcggacgcagctcaatcagctctactcgactctgcgttcactcatccccaacgcagatcacacaaagaagctgagcattccgacgaccgtctgtcaggtccttgactaca

SEQ ID NO: 441161 - DNA, 374 bp, Triticum aestivum
gtcgttgcctcgcaccaaaacacaactaccaccagcggcagcagttcgactccggagaggcagagatgggctccaccgcaaccgacatggccgcctccgccgacgaggaggcgtgcatgtacgctctccagctcgtctcgtcgtcgatcctcccgatgacgctcaagaacgccatcgagctgggcctcctggagaccctggtggccgccggcggcaagctgctgacccccgccgaggtggccgccaagctcccgtccacggcgaaccccgccgcggcggacatggtggaccgcatgctccggctgctggcctcgtacaacgtggtgtcgtgcacgatggaggagggcaaggatgggcgcctgtcccggcggtac

SEQ ID NO: 441162 - DNA, 254 bp, Triticum aestivum
gtcggtttacgggctggctgagctctgctccgacgccgacgggctccttgacaaggtgcgtgtcatccaggccgacacgctgagcatgatccagggtggcttcaccggcgggagcaccacctccgagaccagctgcgaggcggtccgtctgtcgtgcgccacgctcgtggagcggctcaagcccatcacggagagcctcgagtccaagtccggcgcccctgcgccatggaaggccttgattacccaggcgacca

SEQ ID NO: 441163 - DNA, 463 bp, Triticum aestivum
tcgttgacgcgtgggttcgtcttcgaatgtgcaccgggtacgaatgccacttccattgaatgggatggtatttaccactacttggtacaacatggtcgtgatcgcatcattgcgggtgactattccaagttcgacaagcgcatgagtgccatattgattctggctgcgttcaaggtgatcgtcaatattttggcggctgcaggttggaacgatgaggatcttcacattgtgtggactatggcgtttgacatcgcattcccagttgctgatcacaatggtgatctcgtgcaatttctgggatcgaacccctcgggacatcctttgacggtgatcatcaacagcatagtgaacagcttgtatgtgcgctatgcttggtgtacgtcaaatcacaaccttgaggatttcgtgaagtatgtggctctgatgacatatggtgatgacaacatcatgggtgtgagtcgtg

SEQ ID NO: 441164 - DNA, 406 bp, Triticum aestivum
tcggtgtcctcctcctcgtcggcggccatgatccaggcggtgatggttatcagcactctgggcaagccccgcctcctcaagttctacaatttccaggattcggagaagcaccaggagctggtccgcggcgtcttccagttgttatctgcgaggcccgagggtgtgagcaatttcgtcgaggctgttgcaatctttggaccgggaacgagactggtctacaagcatttggcgacactatacttcgtctttgtctttgatagctctgagaatgagcttgccatgctcgaccttgtacaagtttttgttgaaacattgaataggtgcttcaagaatgtatgtgagcttgacattgtatttaacttcaacaagcttcacacagttttggatgaaatgatactgggaggac

SEQ ID NO: 441165 - DNA, 446 bp, Triticum aestivum
gtttggttcagttcatcaccaagaatgcaaccctgacaaatgagaaggaagttgatgcctgcccaatcagggcaatgaagttctctgtgtcccctgttgtgcgtgttgctgttcagtgcaaggtggcttctgatcttcctaagcttgttgagggtttgaagcgtctggccaagtctgatcctatggttctctgtaccattgaagagtctggtgagcatatcatcgctggagccggagagcttcatcttgaaatctgcttgaaggatctgcaggatgacttcatgggtggtgctgaaatcattgtttccccccctgtcgtctccttccgtgagactgttctggagaagtcctgccgtaccgttatgagcaagtcccccaacaagcataaccgtctgtacatggaagctcgcccattggaggagggattggctgaggctattgatgat

SEQ ID NO: 441166 - DNA, 456 bp, Triticum aestivum
ggtggacatgagggtgttgagctatttgttgcatcgaacgaattcaaggagctgaatgtgggattggttcttgacgagggacttgcatcccctagggaggagtaccgggtgttctatgcagaacgtagtccttggtggcttactattaaagcaaagggagcgccagggcatggtgcaaaattgtatgatggtagtgcaatggagaatttaatgaaaagtgtggaggctcttcggaggttcaggacagctcagtttgatttggttaagtccggagagaaagctgaaggggacgttgtatcggtgaattttgcgtacttgaaggctgggacacctacacccacgggttttgtgatgaatctacaaccatctgaagcagaggtaggaattgacattcgaatccctcctagtgttcatactgaagcactagagaagcgtcttgctgaagaatgggcacct

SEQ ID NO: 441167 - DNA, 433 bp, Triticum aestivum
tccacgcgtccgcggacgcgtgggcggacgcgtgggtttcgaaaaccgccgcgccaaccgccacccagccccgtccaagaaaccgcacgccaccgtggacgcgaccccccgccggcgccaagatggtgcggctaagcaacacggtgatcgggatcctgaacgcggtgaccttcctgctctcggtgcccatcctggcgggcggcatctggctgtgggcgcgcgccgacggcaccgagtgcgagcgctacctggcggcgccggtgatcgcggtgggggtgttcctcatgctcgtctccatcgcggggctcgtcggcgcctgctgccgcgtcacctgcctcctctggttctacctcgtcgccatgttcctgctcatcgtcgtcctcctcggcctcaccgtcttcgccttcgtcgtcacgcacaagggcaccgggga

SEQ ID NO: 441168 - DNA, 263 bp, Triticum aestivum
tccatacgctcaaacactgctctacatgtgatcgctgtgttgagcaatttgatcatcactgcccttgggtttcaaattgcatcggaaagaagaacaaatgggagttctttatgtttcttatcctagaagtttctgcgatgatcattactgctgcaacggctgtcataagagtagcaggtgatccaggctctccagcatcgtttggtggatggcttaactattcagctacgaaccatccttgggtggtgtcttttgttataatg

SEQ ID NO: 441169 - DNA, 408 bp, Triticum aestivum
ttccagagtccagtccagtccaggcttggttgcacttgcagggagctcggcgaaatccggagcgtctcgcgtgtgtgcacctttgggaggcgaggacagccgccatggccgccaagagggtgctcctgctctgcggggactacatggaggactacgaggccatggtcccgttccagtcgctgcaggcgtacggcgtgaccgtcgacgccgtctgccccggcaagaaggccggcgacgcctgccccaccgccgtccacaagcccatcgggcaccagacatatgcagagtcgaaaggtcataactttgcacttaatgcttcattcgatgagattgacgctgctgggtatgatggattggtgattcctggaggccgtgcaccagagtaccttgcgatggatgaaaaagtgc

SEQ ID NO: 441170 - DNA, 379 bp, Triticum aestivum
tgacagtttacttaagctagtacagtacaaccgttacaaaggcattggactgggttgggtgaaggaaatatgcaggtccattttggtaggtcttgattacttgcatggagagctagcaatcatccattcagatttgaaacttgaaaatgtactacttgtttcaacaattgatccctcaaaggatcccattcggtccggacttaaacctaatcttgagaagcctgaggggaatcctaatggagaagctggtcttaacccgattgataagaaactgaagatgagagcaaggagggtgctcgcaaagcttgctgagaaaagaaaatcagctgcagaatttgcacgctcagaaagaagcttggatggtattgacatgacatgc

SEQ ID NO: 441171 - DNA, 407 bp, Triticum aestivum
tccacgtgtccgctcattccttcctaccacccccggcaccaccagcccaagcagagccatggcgcccagcggagacaacaccgtggccaacgtccacagcggcatcgacagcaccaacaagacgctgctcaagagcgacgccctctacacctacatcctcgacaccaccgtgttcccccgcgagcacgagtgcatgcgcgacctgcgcctcatcacggacaagcacccatggggctacatgcagtcgtcctcggacgaggcgcagctgctggggatgctgatcaagatggcgggcgccaagaagacgatcgaggtgggcgtgttcacgggctactcgctgctggccaccgcgctggcgctcccggaggacggcaaggtggtggccatcgacaccgaccgcgagtgct

SEQ ID NO: 441172 - DNA, 245 bp, Triticum aestivum
tccacgtgtacgctcattccttcctaccacccccggcaccaccagcccaagcggagccatggtgccgagcggagacaacaccgcggccaacgcccatagcggcatctacagtaccaacaagacgctgctgaagagcgacgccctatacacatacatcctccacaccaccgcgttgccccgcgagcacgagtgcatgcgcgacctgcgcctcattacggacaagcacccatggggctacatgcagt

SEQ ID NO: 441173 - DNA, 360 bp, Triticum aestivum
tgacgcttcgcctccggcccttcccatcatagggcacctgcacctcgtcggcgatctccctcacgtctccctccgcagcctctccaggactcatgccgctgacggcctcatgctcctccacctcggctccgtccccaacctcgtcgtgtcgtccccacgagccgcccaggcggtcatgcggacgaacgaccacctgttcgcgtcccgcccgccgtccaggatcgccgacgccctcctgtacggctggtcgtccgacatcgccttctccccctacggcgagcactggcgacaggcgaggaggctcgtcaccacgcacctcttcacagtcaaaaaggtccaagtcgttccgcatcgcccgtc

SEQ ID NO: 441174 - DNA, 392 bp, Triticum aestivum
cttgcttgcagagcccgaatggcgggacgggggcagggatggtgcggattctgccggtcttcccgcagtatcttagtgattcggtcgatgggttcgatggtgtccaggatggccttgaggatgatatgatcattccaatcgaggaggagtcgtcaacgatgaacagtcaccaagcatctcaattacctgcgttctcgggcgcgtattcctcggctcaggtgagggaggtgattgaggagagcgaattggaccaggacagctcagatagagatggtgccagcacgatttacgaggagaatgagagtgtgtccgttggggaggtgatgaagagcccagtattcagcgaggatgaaatgtcagaaggctctttctgggttgatctgggcaatagt

SEQ ID NO: 441175 - DNA, 232 bp, Triticum aestivum
gtgagattgcagaagctttccttggcagcactgtgaagaatgctgttgtcactgtacctgcatacttcaatgactcgcagaggcaggctaccaaggatgctggtgtcattgctggcatcaatgtccttcgtatcatcaacgagccaacagctgctgccattgcttatggtcttgacaagaaggcttccagtgttggtgagaaagaatgtcctcatctttgatcttggagggg

SEQ ID NO: 441176 - DNA, 420 bp, Triticum aestivum
ttcccctccgcagcctgcactgctcccccattgttttgtgtcctgagccatggctgccaagctgactcgcctccacagcctcagggagcgccttggtgccaccttctcctcccaccccaatgagctcattgcactcttttccaggtatgttcaccagggcaaaggcatgctccagcgccaccagctgctcgctgagtttgacgaactgttcgaatccgacaaggagaagtatgcaccctttgaagacatcctccgtgctgcacaggaagcaattgtgctacccccatgggttgcacttgccatcaggcccaggcctggtgtctgggactacattcgggtgaatgttagtgaactcgctgttgaagagctgactgtttctgagtacttggcattcaaggaacagcttgttgatgagcatgc

SEQ ID NO: 441177 - DNA, 475 bp, Triticum aestivum
  unsure (1)..(475): unsure at all n locations
tccacgcgtccgagctcgctcgcatcagcaaggtggggattattttgcccagagagctccggggccatgaggccgatgcatctcttgggggtcacttgcctatggatcctctcatgcgccttgctgctcggcggcgcttgctccgatgggttgctgaggatcaacctgagcaagaagaggctggacaaggaaaccctagcagccgcaaaatcggcgaggcaggagaccaacctgctgaggcccgacgatggatctcgccactctctcggcctgtcagacgatgacatagttcctctggacaactacctagacacccagtacttcggagagatcggcgtcggcacgccgccgcagaacttcacggtcatatttgacaccgggagctcaaacttgtgggttccgtcgtcgaaatgctacttttcgatagcatgctacttgcaccacanatacaagtcgaccaaatcgaccacttaca

SEQ ID NO: 441178 - DNA, 482 bp, Triticum aestivum
  unsure (1)..(482): unsure at all n locations
tacaattgtagtggcgtagcagcccgagcttgcggtcttgtgagccttgagcccacaaaggttgccgagatcctcaaggatcgcccctcttggtatcgtgactgtcggtgtgtggatgtgctccagattatccctacgggtaatggtggaactattgagcttatctacatgcagacttatgcaccgacaactttggcggcaccgcgtgacttctggattctccgctacactagcggtcttgaagactgcagtcttgtgatctgtgagagatcgttgactcaagccactggcggtccatcaggacctaacactccaaattttgtccgagccgaggtgctacctagtggctatttaatccgcccttgcgaggggggtggctccatgatccacattgtagatcatgttgatttggatgcttggagtgtgcctgaggtccttagaccactntatgagtctccaaagattcttgcgcagaagatgac

SEQ ID NO: 441179 - DNA, 470 bp, Triticum aestivum
ataccctcgccgtctcctctcccacgaagcgcagcccgtcgagatggcctccgaggcggcgaaggtggcggtgcccgagaaggtgatcctaaagaggaggagggaagaggtctgggccgccgagaagaagcagaaggttgccgccgagaagataaaggccgccgagaacaccaaggtcatctacgcccgcgcggagcagtacgccggggagtatgaggcccaggacaaggagctggtgcaacttaagcgtgaggcccggatgaagggtgggttctatgtcagtcctgaggcaaagctgctgtttgtcgtccgtatccgtggtatcaatgcaatgcacccaaagaccaagaagatcttgcagcttttgcgtttgaggcagatttttaatggtgtgttccttaaggtcaacaaggccaccattaacatgctgcgtcgggttgagccatatgttgcctacgggtaccctaacc

SEQ ID NO: 441180 - DNA, 446 bp, Triticum aestivum
tcacgcgtccgacgaatcattgatgatgacatgcccctggcccaatttgctgttgccttcaatggagcatcctggacagatcctgattctattgcattaatggttatgcaaactatgcttggttcgtggaacaagagtgctggaggagggaagcacatgggttcggagcttgtacagagagtagcaatcaatgaaatagctgagagtataatggcattcaatacaaactacaaggacactggcctgtttggtgtctatgctgtcgctaaggctgattgcttggatgatttggcttttgcaattatgcaagagatgagcaaattatcatacagggttaccgaagaggatgttattcgtgcacgcaatcagctgaaatcctccatccaactccaccttgatggctccactgctgttgttgaggatattggacgccagcaactcatcta

SEQ ID NO: 441181 - DNA, 454 bp, Triticum aestivum
gtaggtgtccccgcggctcgctcctcccccacccccccgcccccgcccccgcacacgccaccccatggaggcgccgccggggccggagcccatggtgctggacgcgccgcccccgctcgccgccgccgtcgtcccggcccacgcggccaccgagaagacgaggacggaggggggcgaccctgtcaccggccacatcatctccacaaccatcggcgggaagaacggcgagccgaagaggacaattagctacatggctgagcgggtggtaggaactggttcatttgggattgtcttccaggctaagtgcttggagactggagagactgttgccatcaagaaggtgctgcaggatcgccgttacaagaaccgtgagctgcagcttatgcgctccatggaccatcccaatgtcgtctttctgaagcactgcttcttctcgaccacaagtagggatgag

SEQ ID NO: 441182 - DNA, 424 bp, Triticum aestivum
tgaaatggggagcacctgccaccagctggctccgcttctaatccggcgatgaatggggctgtggtttatcactccaacgagccgctgccagcgttcaaggacgtgccggtctcggagaagcagaatctgtttgtcagaaaggccaccctgtgctgtgctgtgtacgactttgccgatccgaccaagaacctgaaggagaaggaaatgaagcggcagacgcttatggagcttgttgattatgtcacttctgcaaatggaaagttctcggaaatcatcatgttagagatcagcaagatggttgcaattaacttgttccggagctcgaatcccactcctcgtgagaacaaggccatcgaaggagttgatatggaggaagaagagcctctcatggatccagcatggtcacacctgcagatcgtttatg

SEQ ID NO: 441183 - DNA, 466 bp, Triticum aestivum
acgcccactcgtccgctcctctttccctcccaagcaaatcctctgcgctccccacgcctccttcttcttcctctgccgcttgccgtgtttgattcgggaccgaaatggcattccacgacgaggcgccgctgctgctcaggatcaacaccgccagaggcggccacatgggcggaggcgagtgcgacgaggccgagaaccagcggtggccgccgtggctcaagccgctgctggcgaccagcttcttcgggcaatgcaagatgcacgcggacgcccacaagtgcgagtgcaacatgtactgcctcgactgcatcaacggcgccctctgctcccagtgcctcgcctaccaccacggccaccacgccatccagataaggaggtcctcctaccacgacgtgatccgcgtgtcggagatccagaaggtgctggacataaccggcgtgcagacctacatcatcaacagcgcgcg

SEQ ID NO: 441184 - DNA, 492 bp, Triticum aestivum
ttaccttcgccgtctcctctcccacgaagcgcagcccgtcgagatggcctccgaggcggcgaaggtggcggtgcccgagaaggtgatcctaaagaggaggagggaagaggtctgggccgccgagaagaagcagaaggttgccgccgagaagataaaggccgtcgagaacaccaaggtcatctacgcccgcgcggagcagtacgccggggagtatgaggcccaggacaaggagctggtgcaacttaagcgtgaggcccggatgaagggtgggttctatgtcagtcctgaggcaaagctgctgtttgtcgtccgtatccgtggtatcaatgcaatgcacccaaagaccaagaagatcttgcagcttttgcgtttgaggcagatttttaatggtgtgttccttaaggtcaacaaggccaccattaacatgctgcgtcgggttgagccatatgttgcctacgggtaccctaacctcaagagtgtcagggagctgat

SEQ ID NO: 441185 - DNA, 440 bp, Triticum aestivum
ctcattgaatttttttcctccggtctcaccgagaaacctccgatccaagcgaagccaaggttctctcctcctcctcctcctcaagatgcagatctttgtgaagaccctcactggtaagaccatcaccctcgaggtcgagtcttatgacacgatcgataatgttaaggccaagatccaggataaggagggcatccccccggaccaacagcgtctcatcttcgctggcaagcagctcgaggatggccgcaccttggcgactacaacattcagaaggagtccaccctccacctggtgctcaggctccgtggtggcatgcagatttttgtcaagacactgaccggcaagaccatcaccctggaggtcgagtcctctgacaccatagacaacgtcaaggcaaagatccaggacaaggagggcatgcccccggaccagcagcgtct

SEQ ID NO: 441186 - DNA, 524 bp, Triticum aestivum
gaaatggggagcacctgccaccagctggctccgcttctaatccggcgatgaatggggctgtggtttatcactccaacgagccgctgccagcgttcaaggacgtgccggtctcggagaagcagaatctgtttgtcagaaaggccaccctgtgctgtgctgtgtacgactttgccgatccgaccaagaacctgaaggagaaggaaatgaagcggcagacgcttatggagcttgttgattatgtcacttctgcaaatggaaagttctcggaaatcatcatgttagagatcagcaagatggttgcaattaacttgttccggagctcgaatcccactcctcgtgagaacaaggccatcgaaggagttgatatggaggaagaagagcctctcatggatccagcatggtcacacctgcagatcgtttatgaggttttcttgagatttgtagcgtcgcaggagacagatgcatagctggccaagaggtacatagaccattccttcattctcaagctactagatctttttgac

SEQ ID NO: 441187 - DNA, 490 bp, Triticum aestivum
cgggaagagaggggcggccaccccgggggaccgaaccctatcggccgcggccccccctccatcgaccgccagtcgccgccggccatggcaggggcggcgccggatcgggcggcgctgacggtcggcccgggcatggacatgccgatcatgcacgacagcgaccgctacgagctggtgcgggacatcggctccggcaacttcggcgtcgcccgcctcatgcgcgaccgccgcaccatggagctcgtcgccgtcaagtacatcgagcgcggggagaagatagacgagaatgtccagcgtgagataattaaccatagatcactgaaacatcccaacatcattaggtttaaggaggttattttaacaccgacccatcttgccattgtcatggaatatgcatctggtggtgagctttttgagagaatatgtaaaaatatacgattcagtgaagatgaggctcgctacttcttccagcagcttatatctggagtca

SEQ ID NO: 441188 - DNA, 455 bp, Triticum aestivum
gctttgcgctgaaagttcatcagcaactatgaagggcaccaagctcgcggcgatcctgatcctccaggccgtcctggtcatgggagtcctctcgcacgtcaacgccgacttcttccccaagtgctgcaacaactgcaggtccttctcgggggtcgacgtctgcgacgacgcccaccccaagtgtcccaagggctgctcggcgtgccgcgtggtgtcgacgagccccgaaatgtggcgctgcgcggatatgaaatccaccgtcgacggcacctgcggtggaccctgcaagaagtactgatcggttcatgccggcatatgatatgttccgcctaaggccccgcttggatcgtcggtttgctcctaaatacacttgtaaccaaaacagacctcgagccgtcgttttcaatctaggcggaaataacactgcgaccggtaaaatacacttgtagattaaa

SEQ ID NO: 441189 - DNA, 404 bp, Triticum aestivum
caccatccatgatgtcgtgcttgttggtggttccaccagaatccccagagttcagcagctgttgcaggacttcttcaacgggaaggagctctgcaagagcatcaaccctgatgaagccgttgcctacggtgctgccgtccaggctgcaatcctcagtggtgaggggaacgagaaggtgcaggaccttctcctccttgatgtcaccccactgtctcttggtcttgagactgctggaggagtcatgactgtgctcatcacccggaacaccaccatccccaccaagaaggagcaggtcttctccacctactccgacaaccagcctggtgtgctcatccaggtttttgagggtgagaggacaaggaccagggacaacaacctgcttggcaagtttgagctctccggca

SEQ ID NO: 441190 - DNA, 474 bp, Triticum aestivum
cacaaagcttgctaacccaaacaaggtggagtatgatcggcatggatgcctgaagagagtgaataggttggcccgctaccactctctctcctccgtcaacagatcatgatgctccggtacaagtacccacatactaagatcattgtcgtggagtactacaaacccttccttgcatttttagatatgccagaacattttggactgaatagcagcacaaccctcctcacctgttgtggtgcaggaggccctccttataactacgacttcaacgcagggtgcggcctgccgagtgtgacagcatgcgcaaatccataccaagcgcttcagtgggatggtttccaccttacggagtccgcctacaggaccgttgccgatggttggctccatggcccctacgccgatccaccaataatgcacgttgcacgctagtacacccgtagtttgtttcttactggcctaaaacgccatatgtac

SEQ ID NO: 441191 - DNA, 493 bp, Triticum aestivum
acggttacctctctgctgccaacccgacccaaggttgttcgtcgccagcatgggtctggcgaaggatggcgccgagatggaggaggggacattggagattggcatagagtataggactgtctccggtgtggcagggccgttggttattttggacaaagtaaagggcccaaagtatcaggagattgtgaacatccgattgggagatggcaccactcgtcgtggtcaagtcctcgaagtcgatggtgaaaaagctgttgtgcaggtatttgaaggtacttcagggatagacaacaagtatactactgtgcagttcacaggcgaggttttgaaaactcccgtctcacttgatatgcttggacgcatttttaatggctctggaaaacctattgataatggcccccctatattgcccgaggcttacttggatatttctggaagttctatcaacccaagtgagagaacctatccagaagagatgattcaaacaggaata

SEQ ID NO: 441192 - DNA, 471 bp, Triticum aestivum
acggtcaataccttccgctcgttggagccgcgtgccatggacaccatcctggccggactctgtgcacgcatccggccttcggacgcccgcggtctactgtgtggggccactgatcaagtcggaggatgtgggcgtgaagcgcggtgacgagtgccttgcgtggttggacacgcagtctaagggcagcgtggacttcctctccttcggcagccttggccggttcagtgccaaacaaacaaggaaggtggccgccgggttggaagccagtggacagaggttcctgtgggtggtgcggagcccgccaagcgccgactcgtcgaagaactgcgagaagccgccagagccggacttggatgcccttctccacagggattccttgagcggacccagggcaggggcctcgtagtgatagtcatgggcgccacaacgcgacgtgttggcccatgatgcggtgggctgttttgtgacaca

SEQ ID NO: 441193 - DNA, 455 bp, Triticum aestivum
tccacgcgtccgctgagctcctcatcagcgtgcgacgaatctctgcccgatcgaatctccagggtgataacagggatggctaccggtagtgatgctggaaagtccgctgaggcagtgttggagtggcctaagcaggacaaaaagaggatgctgcatgctgtttaccgtgtgggagatctcgaccgcacaattaagtgttacacagaatgctttgggatgaagctgctgaggaaaagagatgtccccgaagagaagtacaccaatgcctttcttggatatggacctgaggatactaattttgcacttgagctgacttacaattatggtgttgacaagtacgacattggagcgggctttggacattttgccatcgcaaatgaggatgtgtacaagctgtctgagacaattaaatcatctgattgttgtaagatcactcgtgaacctggtcctgtcaa

SEQ ID NO: 441194 - DNA, 422 bp, Triticum aestivum
tatgcatcgcaaactggcaacgccatggactctgccgaacgtgtagggcgagaggctgagcgttgaggctgcctggctgtcgatgttctctccatggattgcttcgatcccagttgcctgccacgcgaaaggtatgtggtcttcgttgtgtccaccatggggcagggggaccccccagattccatgaaggatttttggacataccttaccagaaagtctctgggtgcgcgatggctggaagggctattttatgccgtgtttgggctcggcgattcaacctatgggaagtacaattatcctgcaaagaagctcgatcgaaggcttttcaatcttggtgcaaaaagaatcacagaaaaaggcttgggagatgatcaacattcatctggatacgaaggagctctagatccgtggttgctgatttt

SEQ ID NO: 441195 - DNA, 417 bp, Triticum aestivum
cgcctcagctcacgcatctctccctcagctccggcaagcaacaccagctctcctctcccctcgcttccctgctgcaatgtcgaccgacgtggccgccgatgtcccggcccctgaggtggaggtgaccgccgaccccgtcgtggagaccacggccgaggccgccgccggcgacgcgaagccggccaaggagaccaaggccaaggcggccaaggccaagaagctcctccgccccgaggaagccccgcgctacccccgcccacccgacctacgccgagatggtttcggaggccatcaccgccctgaaggagcggacggggtcgagccagtacgccatcgccgagttcgtcgaggacaagcacaaggcgcacctccccggcaacttacgcaagatcctgtcggtgcagctcaagaagctgg

SEQ ID NO: 441196 - DNA, 436 bp, Triticum aestivum
gtggatttccagaaatccgcctagctctgaatgaggatttaggcattggaaagaatagctcttctacacatgattacagaagttcttctggaggaggatcagttgttcttgatgattgtaacttccatgagtcagtgcagcttgacagttttgacattgacagaactctgcatttaataccacctgatggagaatttccagtgatgaactaccggatgactcaagaatttaagccgcccttccgtgtcaccgcactaattgaagaagctggtccatctcgggctgaagttctattgaaaatacgggcagactttcctgcgaatgtgactgccaacacaatcacagtacaaatgccagtgccctcttacacaatgagggcaagttttgaactggaagctggagcagttggacagacaacggattttaaagaaggaac

SEQ ID NO: 441197 - DNA, 370 bp, Triticum aestivum
ttcggtttgtgacagagaagtgggtagatgggtgggatgatcctcgtttgatgactttggctggactgaggcgaccaggagtatcagcaactgcgagcaattcatttatccgtggaattgggataacgagaagtgataatagcttaattcgtgttgaccgtcttgaatatcatatcatagaagaactgaataaaacagcttcttgaaccatggtggttttgcatgctttaaaggttgtaataactaacttggaagatggaaaagacatagaccttgatggaaaaaagtggcctgatgctcctgctgatgaagcttctgcctactacaaggttcctttctcaaaaaccgtctacattgaaaaaactgattt

SEQ ID NO: 441198 - DNA, 460 bp, Triticum aestivum
gcaggcatggcttgctgcggcaaaatacccaccgccgccgcccccgtcgtttgagctgccggagtccgaggtgagggagaggttctccaagtgggtgatcaagtactcaaagcactactcgtgccatgaggaggaggagatgcggttccaagtcttcaagaacaacaccaacgccatcggccaattcgaccaacagaatcctggcaccgtcgtcggtcgcgggttccgaccaactgggtttcaggtccgtggctcgggcggggtccgtatgaacaggttcggcgacctcagccccagggaggtcatccagcagttcaccgggctcaacaccaccagcttcaatgccacgtcacccacctacctaccctaccactccttcaagccctgctgcgttgactggcgctccagcggcgctgtcaccggcgtcaagaatcaaggcacttgtggatcatgctgggca

SEQ ID NO: 441199 - DNA, 342 bp, Triticum aestivum
accgactgctcgcacccctcgcatgaagacagactgggacgagtcggtgatccagtctccgtggtatggttcaaacaggccttgcgtggtgaactccaccccgccaagccctgggcgtgaaatggttcctgacccggtatggctggccggcatccagatctcgtcaacgagcccttcatcggccacattgagtctgatgtcctccaacccattcagcgtgttcaaagaagccatccttggcggcggttcatcaaggatgtgcacgcccgggcagagcggcacgtgctcgccggtgatccctggcatggcgcggcacccggacgttcacatgatggacgtggt

SEQ ID NO: 441200 - DNA, 440 bp, Triticum aestivum
tcaaaaccaagagacaaacctctcctcctcctccttcttcctcctcctcatcctcttgggtggatctcatcttcagatcacatccaagcagcgcaagcaagagaggagacgcgctccaccgtcggcaaccaaaccaggcaaagggcggcgatgacgttcgacaaggtggaggagctccggccgggcacctacggccacaacctccagctccgggtgctcagcgccaagcccgtcgtcctccacaggccgcagggcggcagggccggcggcaacatgcgcatcgccgagtgcatcgtcggcgacgacaccggcgtagtcgtcttcaccgcacgcaacgagcaagtggacatcatgaagcccggggcagtcgtggaggcgaggaaggcgagggtggacatgtacaaggggtcgatgcgcctggcggtggacatgtgggggac

SEQ ID NO: 441201 - DNA, 439 bp, Triticum aestivum
tcttgctcaatgcaagaaggccatcccttcgcgggaagagggagggaaagtgattgtgatcgacatagttgtagactcttcttcgggaccaacgcacgaagcagagctcctgatggatgtagccatgatggtgatgaccaatggccggcagcgagatgaaactgactggagcgagatattcaccaaggcaggattcagtgactacaaacttgtgaagaaactgggagctcgaggtgtctttgaggtctacccgtgagacaggcccaaaaatacgtattataatttgtggtttggttcagaagatgtgctctatggggactgtcttactttgtcaggtacgtttcaaggaggatacaaggtactagcgagcatatggagtgctatgcatatgggtgtcatgcattcttggtaactttccgatcggtaaaattttcattcg

SEQ ID NO: 441202 - DNA, 380 bp, Triticum aestivum
accgctttcgtggccgtcgtcagcccgacccagctcgtcgtggccaacgccggcgactcccgtgccgtcctttcccgcgctggcgtgcctgttgcactctccgtcgaccacaagcctgaccggccggacgagctggagcgcatccaggcggcgggcgggcgcgtcatctactgggacggtgcccgggtgctcggcgtcctcgccatgtcccgagccataggggatggctacctgaagccgttcgtgacggctgagccggaggtgaccgtgacggagcgcagcgacgccgacgagtgcctgatcctggccagcgacgggctgtgggacgtggtgaccaacgagatggcgtgcgacgtcgccagggcgtgctttcggagcaa

SEQ ID NO: 441203 - DNA, 393 bp, Triticum aestivum
tgcatttccatccaccgccgccgcccgccgcattccgagaggttcgagctcgccggagagggaggagagatggccaggaagggcggagagaggaagaaagcggtgacccggtccaccaaggccggcctccagttccccgtcggccgcatcgggcgcttcctcaagaagggccgctacgcgcagcgcgtcggctccggcgcccccgtctacctcgccgccgtcctcgagtacctcgccgccgaggtgctggagctcgccggcaacgccgccaaggacaacaagaagacccgcatcgtgccgcgccacctgctcctcgccatccgcaacgaccaggagctcggcaagctgctcgccggcgtcaccatcgcgcacggcggcgtgatccccaacatc

SEQ ID NO: 441204 - DNA, 485 bp, Triticum aestivum
atcaacaagctggaaggcaactacatctacgcttcgaggaccctgctgttcctgaaggccgacggcacgctgaagcccttggccatcgagctgagcctgccgcacccccaggggatgcagcacggcgcggagagcaaggtgtaccttccggctggtattgagtctggtgttgatggccagatctggcagcttgccaaggcttacgcctctgttgacgactccgcatggcatcagcttatcagccactggctgaacacgcacgcggtgatcgagccgttcgtgattgcgacgaaccggcaactcagtgtggtgcacccggtgcacaagctgctgagcccgcattaccgcgacacgttgaacattaatgccctggcgcgaaccactctcatcaacgccggtggcgtctttgagatgaccgtcttcccggagaaatatgcgcttgagatgtcttccatcgtctacaagaactggaagctcaccgagca

SEQ ID NO: 441205 - DNA, 470 bp, Triticum aestivum
acggcgggaggttcatccagtacaacatcttcggcaacgtcttcgaggtcaccgccaagtacaagccccccatcctccccatcggcaagggcgcctacggcatcgtctgctccgcgctcaactccgagacggggggcaggtggccatcaagaagatcgccaacgccttcgacaacaagatcgacgccaagcgcacgctgcgggagatcaagctgctccgccacatggaccacgagaatattgttgcaataagggatattatacctcctgcacaaaggactgcatttaatgatgtctatattgcatatgaattgatggacaccgacctgcatcaaattattcgctcaaatcaagctttatcggaggagcactgccagtatttcctttatcagatccttcgtggcttgaagtatatacattcagcaaatgttctccaccgagacttgaagcctagcaatcttcttttgaatg

SEQ ID NO: 441206 - DNA, 360 bp, Triticum aestivum
caagggcattgttgattcagaggaccttcccctgaacatctcccgtgagactctccaacagaacaagatcctcaaggtcatcaggaagaaccttgtcaagaagtgcattgagctcttctttgagattgctgagaacaaggaggactacaacaagttctacgaggccttctccaagaacctcaagcttggcatccacgaggactcccagaacaggaccaagattgctgagcttctgaggtaccactccaccaagagtggtgatgagctgacgagcctcaaggactatgtgaccaggatgaaggagggacagaacgagatctactacatcactggtgagagcaagaaggctgtggagaactc

SEQ ID NO: 441207 - DNA, 311 bp, Triticum aestivum
cgatcatgtcgtcgccatcgcgccggagctccagccccgagagcaacatcgccggcggcagcggcagcggctccgccggtgacgagcgcaagcgcaagaggatgctgtccaacagggagtcggcgaggcggtcccgcgcgcgcaagcagcagcggatggaggagctcatcaccgaggccagccgcctccaggccgagaacgcgcgcgtggaggcccagatcggcgcctacacgaccgagctgaccaaggtggacggcgagaacgccgtgctccgcgcgcgccacggcgagctcgccgggcggctgcaggcg

SEQ ID NO: 441208 - DNA, 442 bp, Triticum aestivum
ttcactcgtccgtgtggttcttggcattgctggcttgcatagcagtaacaacgctgatcaccattcatatggtgcacatcctgcacaaacacagccgaaagagagtttcttctgctcatccgcccggccctgccggccaccccatcctcggcaacttgctctatgtcatcggcccgctccgcaacaacccacacaccacactcgcctacctcgctcaaacctatggacccatcttgtccctccgccttggtctgacccgcaccatcgtcgtggtgtcatccgccgctgcggctcacgaggcccttgccaagaatgacacagcgctcgcgtcccggcttgtgccagacaccgtccgcgccatgtcgtatggcacgacgtccatggtcttgccttcaagctccaacccactgtggaagcaggaccgtgccatcatgggcgccca

SEQ ID NO: 441209 - DNA, 491 bp, Triticum aestivum
tgaagatgtaacttcgtcagaaagtgtgcgcttgaataggaaatgtgacagaaaaataacgctgtatggttaccttcgtggatgtaacatgaaaagagggaccaaggtgcatatcacaggagcaggtgatttcagcttgtctggtgtgacaagtttggctgatccctgccctttgccatcggctgcaaagaagcgaggactacgtgacaaggagaagctgttctatgccccaatgtctggtcttggggatctcctgtatgacaaggatgcggtgtacatcaacatcaatgatcatcttgttcagttttcaaacactgatgacaacaatgcatctaagaaacaagggaaaggtaatgatgtcggtgtggctctagtaaaaactcttcagaacaccaaatactcccttgatgagaagttagatcagagttttataaatttcttcggcagacggcctgctgctcagtccgaagacagtgacatgacaggcaatg

SEQ ID NO: 441210 - DNA, 371 bp, Triticum aestivum
ttcatcaacatggacgctgatgtgatcaccatcgagaactcgcggtccgacgagaagcttctgtccgtcttccgcgagggtgtggtgtacggtgctggcattggcccgggtgtgtacgacatccactcccccaggatcccgtccaaggaggagattgccgaccgtgtcaacaagatgctcgcggtcctggacaccaacatcctgtgggtgaaccctgactgcggtctcaagacccgcaagtacgccgaggtcaagcctgccctcaccaacatggttgaggccgccaagcagatccgtgccgagctcgccaaggcgcagtaagccgtgctcgtatagcagagccccccttttaattgcaaggaggatgtcac

SEQ ID NO: 441211 - DNA, 374 bp, Triticum aestivum
ttaataggaagacgagagaacagaagagccaaagacactaaaacgaaatggcatcctcctcttcctttctcctccttgctgcacttcttgcgttagtctcatggcaggccactgcttttgatcctagcccactccaagacttttgtgtcgccgacatgaattcaccaggtactatccgttttgtcatcatgttttcaccaaatacatatgttgaaatctatttccggaaattatatccaagtcgaaacaactttgtaaaatctgagcttacatgtatatctcttgtgcccccagtccgtgtcaatgggtttgtttgcaagaaaccgatggaggtcaatgcagatgacttcttaaggcggccaacctcgacaagc

SEQ ID NO: 441212 - DNA, 420 bp, Triticum aestivum
ttcctacgcgtccgcccacgcgtccgcacttctcccgtcccgtccccagccaacctcccatccccgtctcgcgtcgcagcggcagttccactccctcgccatgggcaagattaagatcggaatcaacggtttcggaaggatcgggaggctcgtcgccagggtcgccctccagagcgacgatgtcgagctcgtcgccgtcaacgacccctttatcaccaccgagtacatgacctacatgttcaagtacgacaccgttcacggccactggaagcacagtgacatcaagctcaaggacgacaagacgctgctctttggcgagaagccagttaccgtcttcggcgtcaggaaccctgaggagatcccgtggggtgaggctggtgccgattacgttgtggagtccaccggtgtcttcactgacaa

SEQ ID NO: 441213 - DNA, 221 bp, Triticum aestivum
tccctcgcgtccgcggacgcgtgggcgccgacgccgcctccttctcctcctctcggctccttctccttccttccagtttcagccatgggtaaggagaagactcacatcaacatcgtggtcattggccatgtcgactctggcaagtcgaccaccactggccatctgatctacaagcttggaggtatcgacaagcgtgtgatcgagaggttcgagaaggaagc

SEQ ID NO: 441214 - DNA, 476 bp, Triticum aestivum; identical to SEQ ID NO: 436684

SEQ ID NO: 441215 - DNA, 254 bp, Triticum aestivum
gagcactggatctcgcgcctggccgccgccaagcggttctacgccgcgcagctcggtcacgccgatcgggcggggatggacgagctggacatggacggcgacgagaacgcgggcaggcccgacttcgcctgcccctactgctacgaggaccacgacgtcgactccctcgtcgcccacctcgaggaggaccacccctttgagccccacgccgcgccttgccctgtctgctccgaaaaggtttctaaagatatgct

SEQ ID NO: 441216 - DNA, 353 bp, Triticum aestivum
tgggtgaccgcgccacgcatgctcctcccccgcctgctccccgcgcaccgcctcctcgccggcggcccccgccccctactgctacttccaagccgtcgcctcgctccccggccgcacgccgacgaatccatgtcctccgactgctacgcgcccgcccggcgcaggggcccgctgcggggggtggtgttcgacatggacggaaccctgacggagcacgacatagactatcacgtcaaggaccaagaggtgcaccgtgcagaggcactggaagcacagtgacattaagctcaaggacgacaagacgctgctctatggcgagaagccagttaccgacttcggtgtcaggaaccctg

SEQ ID NO: 441217 - DNA, 260 bp, Triticum aestivum
tttgctctgggccgcgctgcgggccgacatgacgctcgcggggtttgacggcttccgcatccagcgctccgaccagacgttcctgttcctgggcgatggggcgcggccggaggatgctgggggtaaggagctgctgccgggttctctgatagtgctgtctcataaggataaggagatcactgatgcgctggaaggggccggcgtgcagcctacggagtcggaggtggcttatgaggtggcattgatgttcaagacgaata

SEQ ID NO: 441218 - DNA, 262 bp, Triticum aestivum
tctgatggttgcagccataataactcttctcttcataatcgcgatcaacgtggcaatcgggatactaccgcatgctgataactttgctcatattggtggattcttgaccgggttccttttggggtttggtctgctggcaaggccgcaattcggttggttggaacgcagcgagctgccccacactaatcagcctcctaagtacaaaccataccaatatgtcctgtgggttgtggcactcgtcttgctgctcgtcgggttcacg

SEQ ID NO: 441219 - DNA, 418 bp, Triticum aestivum
gtgccaccacctcctcgacccgggccaatcgaactagaacaagcgagcagagtggtctggtcgggtggccgatatggggcgaggcagggcaccgtgctgcgccaaggtcgggctgaacaggggctcctggacgccgcaggaggacatgcgccttatcgcctacatccagaagcacgggcacgccaactggcgcgccctcccgaggcaggccggcctgctgcgctgcgggaagagctgccggctccggtggatcaactacctgcgccccgacctcaggcgcggcaacttcaccgccgaggaggaggccaccgtcatcaagctgcacgccttgctcggcaacaaatggtccaagatcgcggcgtgcctgcccgggaggacggacaacgagatcaagaacgtttggaacacgcacctgaag

SEQ ID NO: 441220 - DNA, 440 bp, Triticum aestivum
tttttgcaacggcaaggcgttcccggagcacgtgctgcagtggatcgcgctcaacttcctgctcgcgggccgcgacacgtcgtccgtcgcgctcagctggttcttctggacggtcatgcagaggcccgacgtggagcgcaaggtgctcctcgagatcgcgtccgtgctcagggaaacgcgcggcgaggacacggggaggtgggcggaggagccgctggacttcgacgagctggaccgcctcgtgtacctcaaggcggcattgtcggagacgctgcgcctgtacccgtcggtgccgcaggactccaagtacgtggtggcagacgacgtgctccccgacggcaccgtggtgccggccggctcggcgatcacctactccatctactcggtggggaggatggagagcatatggtgcaaggactgcgtggagttccggccggagc

SEQ ID NO: 441221 - DNA, 364 bp, Triticum aestivum
tttcgcacgtctctttctgtcttttctctccctctcgatccaaatcgagcacgccgccggcgcttgcaaccacctcgaccccctgccccggcgaactcctcgcccctcggtcctgggctcgccagccaccacttcgcccggcggccacagacacttcccccttcgcccccagcaccggcggccccgtccacttcccccgtcgccatcgtaggcccaccggtggcgtgcagatatggcctctacttcctcttcgtcaagtcggagaccaagaccccgagcgggctgacggcgcggccagtgctcaccagctactacaagagtgagcagttcaagaaccgtccctacgacccgtaccacaactaca

SEQ ID NO: 441222 - DNA, 381 bp, Triticum aestivum
tttcctctcgttcgcagatgtatgacatcttccagcttctcccagggaagattcaagttggtgtcttctctgccaccatgccccctgaagcccttgagattacccgcaagttcatgaacaagccagtgaggatccttgtcaagagggatgagctcacccttgagggtatcaagcaggtctatgtcaatgtggagaaggaagagtggaagctcgacacactgtgtgacctgtacgagactcttgccatcacccagagtgtcatctttgtgaacacccgtcgcaaggtggactggctcaccgacaagatgaggggcagggaccacaccgttttcgtcactcacggagacatggaccagaacactagggacatcatcatgaggg

SEQ ID NO: 441223 - DNA, 448 bp, Triticum aestivum
ttggttttcacccgcttcttcagcaagaggcagactaggttcttctgggtatccgccgtcgtgccattgacgtcggacatgctcgggagcctactggtctacttcacccatgccgaaaaccatggcgttcaaataatcggtgatctgaagaaaggcgctgaacccaatctccgttacaaacctccaattcacgccgccgtacatgatgctcgccttgaagaccggcctcatcaccggcgtcatcgccctcgccgaagggatcgacgtcggccggagcttcggcatgttcaagaactaccacatcgacggcaacaaggagatgatcgccatcgggacgatgaacatcctgggctccttcacctcctgctacctcaccacggggcccttctcccggtccgccgtcaactacaacgccgggtgcaagacggtcatgtccaacgtgatcatg

SEQ ID NO: 441224 - DNA, 377 bp, Triticum aestivum
tttccttgcgtccgattgcacagcaaagtctccaagaattcaaagcctgcaagaccttaacttgatatcatggctgggcgtggacttttagctgcaggtttggtcctcctcgccgccgtcgccccggcctacgccgcggactacaccgtcggcgactcgtcgggctgggctagcggcgtggactacagtacctgggcaagcgacaaaaccttcaccgtcggtgacacgctcgtgttccagtacggcgcgtcgcacaacgtggcggaggtggggtcgtcggactacagcgcctgctccgccaccaactccatccagtcgttcagcgaccaggacaccaaggtcacgctcaccaagcccggcacgcgctacttcatctg

SEQ ID NO: 441225 - DNA, 374 bp, Triticum aestivum
tgcctacgcgtccgcccacgcgtccgcccacgcgtccggcccgccgcgacgccattagcagagccagagcagtgggggagaaggttctagaggaagaggaagaggaagatgaaggtgatcgagaagatccaggaggcggcggcgaatggccggaccgtcttatacttcgagtacttcccgcccaagacggaggagggcgtggagaacctcttcgagcggatggaccgcatggtggcgcacggactcaacttttgcgacatcacctggggcgcccgcggatacaccgtcgacgtcaccctcgacatcgacaaccgcatgcagaacatggtatgtgtggaaacgatgatgcacttgacatgcactcaacatgccag

SEQ ID NO: 441226 - DNA, 446 bp, Triticum aestivum
ttttcggaccgtggtaacttacagtctctacaagctctaagagaggaaggatagcataggcctcaagctccagcgatgcatgtaccaccgactctactgggctatgtagatggtccacatcatgggcatgaagctggccaaccgtgggggggaatgcccccagagttggcagggatgtggattggaatcattgttctcctggtcatcaactccaccatcttcttcattgaagagaacaacgccggcaacgcagctgctgcgctcatggccaaccttgcgcccaagacaaaggtgcttagggatggtcgatggggcgagcaggaggcatcaatcttggttcctggtgacattgtcagcatcaagctcggtgacatcgtccctgctgatgctcgtctcctcgagggtgatcctttgaagattgatcagtctggacttacaggagagtc

SEQ ID NO: 441227 - DNA, 427 bp, Triticum aestivum
ttctggcagaaacagagcgggaagcaagcagccataggcagcgccggcatggggaggtcgccgtgctgcgagaaggcgcacaccaacaagggggcgtggaccaaggaggaggaccagcgcctgatcggctacatcaaggcgcacggcgaggggtgctggcgctcgctgcccaaggccgcggggctgctgcgctgcggcaagagctgccgcctccgctggatgaactacctccgccccgacctcaagcgcggcaacttcaccgacgacgacgacgagctcatcatcaagctccatgccctcctcggcaacaagtggtcgttgatagcggggcagctgccgggccggacggacaatgagatcaagaactactggaacacgcatatcaagcgcaagctcctcaaccgcggaatggacccgcacacgcact

SEQ ID NO: 441228 - DNA, 466 bp, Triticum aestivum
tttctgggatgggattgtggcatgttcatgctcaaatacattgacttccacagcagagatatgggccttacttttgggcagaaacacatgccttattttcgtcagaggactgccaaggaaatattgaatttgagggctggataatgcagaggcgcatcataggtataaacaaaaggaatgtgcaaactggaggcaagtgtatgtacttaatagaatgcagctatgtcttccctggagtaccaaatgcaaggatttccgaagcccaggggttcaaaccagtcatcctgcaaggatcaagccttaagaatagtttgcaggtgaattggctgccacaatggatgttcttggcgcagaaagccattagctaacggaaagggtgttgcaaacttgcaatcgtcgtgttgtgtccgtctgttagactgcagagtcactgagagttgaaaggagggtatggttggaacttatt

SEQ ID NO: 441229 - DNA, 420 bp, Triticum aestivum
tggtcgagcgccgcgaccgacgcacgcgcgcgcggcggcgagatgaaggtctccgtgaagacgctcaagggctccaaattcgagatcgaagtgaaccccgccgacaaggtttctgatgtaaagaagctcattgagagttcacaagggcagaatgtgtacccagctgatcaacaaatgctcatataccaagggacagttcttaaggatgagactacgttggaggaaaacaaagttgttgaaaacaactttcttgtgataatgcttagacagaataagggctcatcaagtgcagctccatctaaatccaaggaaccctcaaatcaggcaccccctactcagacagtgcctgctactcctgcctctcaagcaccagccacgccagcaccttaagcagtggctgcgccagcacctattgtacct

SEQ ID NO: 441230 - DNA, 395 bp, Triticum aestivum
tttgtctcgccctgctcttgctactcgccatcgtcgtgccgtttactcagacccggacgcagagcgcacgggacaaggctgccatggcggaagacgcggggccgttggtgggaggcatcaaggactcgccgatgggccaggagaacgacctcgacgtcatcgcgctcgcccgcttcgccgtctccgagcacaacaacaaggccaatgccctgctggagttcgagaatgtggtgaagctgaagaagcaaactgttgctggcacgatgcactacattacaattcgggtcactgaaggtggggccaagaagctctatgaagctaaggtgtgggagaaaccatgggagaactttaagcagctccaggagttcaagccggtggaggacgctgcaatcgca

SEQ ID NO: 441231 - DNA, 433 bp, Triticum aestivum
tttttggtagtcgacagagtccccaccccacactcacgcacactcctcctcatctcgcccggggcgaaatcgacgccacagcgggagggaaaaggcttccggggttggcagggattccgcctcttatacgcctgcccgcctcgccagattcctcacagcttccctgccccgagcggagatcctgaactccggaggccgtcgtcgggggtaagattcggcggccatgtcgggcgccgtgctggtcgccatagcggcgtccatcgggaacctgctgcaggggtgggataatgcgaccattgcaggtgccgtcctgtacataaagaaggagttcagcttggagacccagcccttgatcgagggcctcatcgtggccatgtcgctcatcggggcgacggttatcaccacgttctccggggcggtggctgatgctgtt

SEQ ID NO: 441232 - DNA, 399 bp, Triticum aestivum
ggccgggatgtacatcgtctccgtcgcctcgctcaagcgcggcatgagccactacgtcctcgtcacctaccgcaacctcgtcgccacgctcgtcatgctgcccttcgccctcttcttcgagaaggggacacggcccaagatgacactccgcatcttcatcaagatcctggggctggcgctgctcgagcctgtgcttgaccagaacctgtactacgtgggcaacaagctgacctcggccagcttctcgtcggcgctggtcaacatcctgccggccgtcaccttcatcatggccatcgtcctgcggatggagaagctccgccttcggagctcccacagccaggccaaggtcgccggcaccatctgcaccgtcatcggcgcggtgctgatgatcatgtacca

SEQ ID NO: 441233 - DNA, 300 bp, Triticum aestivum
tttctgcgctgctggagttcgagaggctggtgaaggtgaggcagcaggtggtggccgggtgcatgcactacttcaccatcgaggtcaaggaaggcggtgccaagaagctctacgaggccaaggtgtgggagaaggcctgggagaacttcaagcagctccaggacttcaagccggccgcctgaaaagatgtaaataaatatgttatgtgagctgaaccgctcaagcttgtggatggggcctatccaacacgccagcctcactggatactggtgtaatatgatgaaataaacctgcttgctg

SEQ ID NO: 441234 - DNA, 334 bp, Triticum aestivum
tttcttcggacgcgtgggtgtcactgtgcctgcttacttcaatgattcccagaggcaggcaaccaaggatgctggtgttattgctggtcttaatgtgatgcgtatcatcaacgagccaacagcagctgcaattgcctatggtcttgacaagaaggctaccagtgtcggtgagaagaacgtgcttatctttgacctcggtggtggcacttttgatgtctctctccttaccattgaggagggtatttttgaggtcaaggccacagctggtgacactcaccttggtggggaggactatgacaaccgtatggtgaaccactttgtccaagagttcaag

SEQ ID NO: 441235 - DNA, 334 bp, Triticum aestivum
caaaagagtgagactacctagagcactcagcaccgtcgtaggctcgtcgccatccgttcagtgtctcagagtctcagcgtgcgtgtctgatctgatggcggcaccagcaggagattcctccggcggcgacaagtacaggtctcacctggccggcgagggcgagaagaacaccgtttggcggcacggcgcgccgcccacctacgacgccgtgaacagcctcttcgaggccgggaggactcacgagtgggcgaaggggtcgctggaggagacggtgcagaacgcgatcaagacgtgggagatggagctgtcgcacaaggcccgcatcggggacttc

SEQ ID NO: 441236 - DNA, 317 bp, Triticum aestivum
tgggagggcattcccccggaccagcagcgtctcatcttcgctggcaagcagcttgaggatggccgcacccttgcggattacaacatccagaaggagtccaccctccaccttgtcctccgccttcgtggaggcatgcaaatctttgtcaagaccctcactggcaagactatcaccttggaggtggagtcatctgacaccatcgacaacgtgaaggccaagatccaggacaaggagggcatccccccggaccagcagcgcctcatctttgctggtaagcagcttgaggatggccgcaccttggcagactacaacattca

SEQ ID NO: 441237 - DNA, 453 bp, Triticum aestivum
tgatgtgactcgatcggatctccagccgacgccggcgaccatggctcgccgtcaccacctcgtcctcctcctccctctcctcgcgcttgccgtctccttcgtcgccgccgcccctgagggacatggagatgccgccgccgccttcatcgacggcgcgccgcaccgctacctgcgggatcagcaggacgaccaggccacgtcgatgtcacttgatgaagtttctgcagctgtttccgtcttgcttggttttgcaccacctgccatgcttcccgcgccttcttctgcaaagttaaacaagctgctactcccaaagccatttgacaggcctcgtgctgttttcttgatgcaaattgatggatcccatgactctgtcgatagcttcgtatctgatgccggtagtatttacaaaaccaagattgagggtgcacaaaatgctgctacagggcttacaga

SEQ ID NO: 441238 - DNA, 356 bp, Triticum aestivum
tttctcgcgtccggtgctcttcgtcctcgccgccggctaccttcccttcaacgacgccagcctcatcaacatgtaccgcaagatctacgccggccggttccggtgcccgaactggttctcgccggcgctccgccacctgctacgccgcatcctcgaccccaacccgggcacgcgcatcgacacggacggcatcatggagcacccctggttccgccacggcgcgagcggcgacggcgagctggagaagctgatgcgcgggcacgaggaggaggcgtggttcgagacggagttcaaggaggacatggtgcgggacatgaccgcgttcgacatgctggccttctcgcccggctcggacc

SEQ ID NO: 441239 - DNA, 408 bp, Triticum aestivum
ttgatttgcatcctcccgtcccctctcacacgagagccccaaagctagaagaggaggaaggataccgccatggggagagctccgtgctgcgacaaggcgagcgtgaagaagggcccatggtcaccggaggaggacgccacactcaagtcctacatcgagcagaacggcaccggcggcaactggatcgcgctgccacagaagattggtctgaggaggtgtggaaagagctgccgcctccggtggctcaattacctccggccgaacataaggcacggtggattctcagacgaggaggacaggatcatcctcagcctctacatcagcatatgcagcaggtggtcgataatagctgcacagctgccggggaggacggacaatgacatcaagaactactggaacacaaggctc

SEQ ID NO: 441240 - DNA, 481 bp, Triticum aestivum
ttctgggatcacgcagggttcacgttcacgccgccgccgttcatcacgtccttcactgagcttctatcagggtctggcgccggcgacgtggaggggtcgccaagggggttcaaccgagggggtcgggccggggtgcccaagttcaagtccgcgcagccgcccagcctgcccatctcgtcgccagcggcgcccttctcctgcttctccatccctgcaggtctcagccctgctgagctgctccactctcccgttctcctcaactactctcatatattggcgtctccgactacaggtgcgatccccgcgcggagatacgactggcaggcgagcgccgatctgaacacctttcagcaggatgaggtcggccgtggagacagcggactctttggcttctcctttcacgcagtgaagcccaacgccacggtcaacgctcaaacaaattacttacctttattcaaggaacaacagcagcaacaacaac

SEQ ID NO: 441241 - DNA, 421 bp, Triticum aestivum
ttctgctcccctctcgctctctccaccaaccaagaacagcaggaactcgacctcggagcagcaacgaatccgccgccgcccggcaaaagggatccaaagctccaatggctggcaagtacatcgtcgccggcctcgtcggctcctgtgtcatctcgtatgcctgtgactacatcgtttctcagaagaagatcttcggtggcaccatcccagggactgtgtccgacaaggagtggttgaaggcgacggagcagaggttccaggcctggccccgggtcgctgggccgccggtcatcatgaaccccatcagccgccagaacttcatcgtcaaggacctcaacccctgaggctcaagatcttaaggtttgcggtcggttggaacctttaccctgatggcgatgcctgttgctaaatctacctatgt

SEQ ID NO: 441242 - DNA, 402 bp, Triticum aestivum
  unsure (1)..(402): unsure at all n locations
tgccacgcgtccgcgacgagcggctgctggtgtacgagtacatgaagaacggcgcgctctacgaccacctccaccccaagggcggcggcgccgacgccgacgcggcgtcgccggtggtgtcgtcgtggaagctgcgcatcaagatcctgctggacgcgtcgcggggcatcgagtacctgcactcgtacgccgtgccgcccatcatccaccgcgacatcaagtcgtccaacatcctgctggacggcgggtgggtggcgcgcgtgtcggacttcgggctgtcgctgatgggcccgccggagacggagggggngggcggcgcgcangcgcccgagcagcacctgtccatgaaggccgtcggcacggtggggtacatggacccggagtactacggcctgcaccacc

SEQ ID NO: 441243 - DNA, 336 bp, Triticum aestivum
ttcgttcggtcaagacaatcttcgcgctcgcgctcgggaagatgggcgccactggggaaactcggctgcttagcgcagggagtgatggttatgtgaagtgctttgattatggggagctcaagatgacacactcgatgcggtatcccaaggaattgctgtccgtggcttgctcgccgtgtgggacggtgcttgttgccgggtcttcaaagggtgacatctttgtgcgcagaaggaagaagaatgcaacagaggaggtggaagaggaggttgtaagcagcgagttcgcctggacaatgcccaagccagagaagcaggcgctcaagccgagctactaca

SEQ ID NO: 441244 - DNA, 418 bp, Triticum aestivum
ttggttgtcccaatcctcgatctgttctcagaccctcctccgtccgtcgcagctccagatttccttccccatggctccgatcaagatcggtatcaacggtttcggccggatcggcaggcttgtggccagggttgcgctccagagccccgatgtcgagctcgtcgccgtcaacgaccccttcatcaccaccgactacatgacctacatgttcaagtatgacactgtccacggacagtggaagcaccatgaagttaaggtgaaggactccaagacccttctcttcggtgagaaggaggttgctgtgtttggctgcaggaaccctgaggagatcccatgggctgctgctggtgctgagtacgttgttgagtccaccggtgttttcaccgacaaggacaaggctgcagctcacattaagggt

SEQ ID NO: 441245 - DNA, 418 bp, Triticum aestivum
tttgttttcccaatcctcgatctgttctcagaccctcctccgtccgtcgcagctccagatttccttccccatggctccgatcaagatcggtatcaacggtttcggccggatcggcaggcttgtggccagggttgcgctccagagccccgatgtcgagctcgtcgccgtcaacgaccccttcatcaccaccgactacatgacctacatgttcaagtatgacactgtccacggacagtggaagcaccatgaagttaaggtgaaggactccaagacccttctcttcggtgagaaggaggttgctgtgtttggctgcaggaaccctgaggagatcccatgggctgctgctggtgctgagtacgttgttgagtccaccggtgttttcaccgacaaggacaaggctgcagctcacattaagggt

SEQ ID NO: 441246 - DNA, 379 bp, Triticum aestivum
tctgctgcagccctgagactcgagagcgatagagaaagcatggcggctgagatgacagtccccagcgacgcccagctgatcaaggcgcaggctgacctgcagcgccacagcctcacctacctcacgtccatgtcactcaggtgcgccatcgagctcggcatcccgacggcgatccaccgcctcggcggcaccgcgtcgttgcccgacctcatggccgcgctgtcccttccgccacccaaggagccgtttctcagccgcgtgctgcggctgctggccaaatccgacgccctggcgtgcaccgaagacggggtctacagcctgaccccgctgtcctacatccttgtggacggcgtactcatcgacggcgaggctaggcaga

SEQ ID NO: 441247 - DNA, 395 bp, Triticum aestivum
tctaaataacatgccatcatctgtgatatcaagccacagcatgcatcttggagtccttgcaacagcctcccatgcaatctgcactgggaccctcttttctgttttctataaacccagaacaagtcaatctgagtttgtggtgagtgttaacaagtaccttgaagcgaagaagcagaacatttccgttggaatgagatttaagatgaaatttgaaggcgatgaagctcttgaaagaaggttcagtggtacaataattggtattgggagcacgccgatggtgtcaacatctctatgggcagattctgattggaaatctgtgaaggtccaatgggatgagccttcatccattcttcgtccagatagagtctcaccatgggaattggagccactggatg

SEQ ID NO: 441248 - DNA, 278 bp, Triticum aestivum
tttttcccacgcgtccgatcggcgcacggtggtactccgagggaattaatgccatgcacctcaagggtgagtacatgccacctcgggatttcagcggacatggcactcatgttgcctcgacgattgccggaggagaagtgcacggtgtgagctatgccggcctagccacgggcatggcacgtggcggggcaccacgtgcacggttagcaatttacaaggtgttatggggcccgaacacagcagccagtgacagcgagcatgctctgtgccattgacga

SEQ ID NO: 441249 - DNA, 384 bp, Triticum aestivum
tttctgcggacgcgtggcgagatggcccgcgacattgctcagaagcttggcttcagcgagcagtgcattgaggatgccaaggacaccatccagaagctctacaccatcttccgcgagaaggactctacccagatcgagatcaaccctctctccgagacctccgaccaccaggttctgtgcatggatgccaagttcggtttcgatgacaacgctgagttccgccagaaggagatcttcgagtggcgtgacaccacccaggaggaccctgatgaggtccgcgctgctcagtccaacctgaacttcatcaagctcggtggtgacatcggctgccttgtcaacggtgccggtctcgccatggccaccatggacatcatcaagatcaac

SEQ ID NO: 441250 - DNA, 450 bp, Triticum aestivum
tgcggacgcgtgggtgcccctgaagataagatcgaggaggaggatgtttgccctatctgccttgaagaatatgatgaagaaaatccccgctctatcaccaaatgcgagcatcatttccatctttgttgcatactcgaatggatagagcgaagcgagacttgcccagtctgtgaccagataactttgatagatgagatgtatgaatagcatgttgaccctggtggatcttctctaggagctcgtgtgtgcctgccgaggaggtttagtactagtccttttcctatggggaagtaaaatcagcaactactctgctcctaatatggtagtatgatctggtggaggtgctactggaatgcatcttgggagaacaaatgggaaataatgaaaaacacaagcatcaagaaatatgttacctaaaaaaacatccatccctatgtttatactagcatt

SEQ ID NO: 441251 - DNA, 224 bp, Triticum aestivum
ttcgatggcgatcattacgaccaaggccgtgaagaagatcgtgtacgaccagaagctttgtcagctgctcgaggagtacaccaaggtgctcatcgccgccgtcgacaatgtcggctccaagcagcttcaggagatccgcaagggtatccgcggcgactccatcgtgctcatgggcaagaacaccctcatccgccgctgtatcaaggtgcactcggagaagaccg

SEQ ID NO: 441252 - DNA, 335 bp, Triticum aestivum
tttcttcagcttcgccgacctcacccatttctccttcatgcgctatttcatggcgacggagcatgcagttgtgctcgatgcgtatccgcacgtaaaggcatggtgggaggcgctgctggcaaggccgtcggtcaagaaggtgatagctggcatgcctccagattttggattcgggagcgggaacataccatgataaggcatatgctttgtgtgcttgagatgctctaatcgtctctacccaacccacgagaaataaagtaagcaaagcgtgggtgtggatatgaaataacttgtttcggtgaattgttttctaataccaattagaattgattctc

SEQ ID NO: 441253 - DNA, 337 bp, Triticum aestivum
tgcgaccggggacctcgcatccaccggatcaaccagcttgggaagagagaacaaggtcttctacgggggacgtggagttttcggcgagatgttcggtcgcggcccgcctaacaagaacgacagcacgcgctactacgagatcctgggcgtgcccaaggacgcgtcccaggacgacctcaagaaggcctaccgcaaggccgacatgaagaaccaccccgacaagggaggcgacccagagaagttcaaggagctagctcaggcttatgaggctctgagtgatcctgagaagcgagagatctatgaccagtatggtgaggatgccctcaacgagggaatg

SEQ ID NO: 441254 - DNA, 438 bp, Triticum aestivum
tgtttgcctctctcctcttagcccaaacacacctcacctcgctccccgtcccgccgatctcttctcttagggtcgtccgcgatggcggctccggtggtggacgccgagtacctgcgccaggtcgacagggggcgccgcgctctccgcgccctcatcgcctccaagggatgcgcccccatcatgctccgcctcgcatggcatgatgctggcacgtatgatgtgaacacaagaactggtggtgcaaatggttcaattagatacgaggaagagtacacccatggttcaaatgctggcttaaaaattgctattgatctcctcgagcctattaaagcgaagcatccaaagattacatatgcagacctttatcagcttgctggagtagttgcagttgaagtcaccgggggtccaaccgttgagttcatccctggaagacgtgat

SEQ ID NO: 441255 - DNA, 372 bp, Triticum aestivum
gcgggggctgttgtacctccaccgggactcgaggctccgcgtggtgcaccgcgacctcaaggccagcaacatcctcctggaccacgagatgaaccccaagatatccgacttcggcatggccaggatcttcggcggcgacaagaaccaggagaacaccaaccgcgtcgtcggcacactaggctacatgtcgccggagtacgcgatggagggcctgttctcggtgaggtccgacgtgtacagcttcggcatcctgatcctggagatcatcaccggccagaagaacagcagcttccacaacatggagggctcgctcaacatcgtaggctacgcgtggcagatgtggaactcggacaagggggagcagctgatcga

SEQ ID NO: 441256 - DNA, 320 bp, Triticum aestivum
tttctgctcggcggcggcgcgtagaacaggagaaggagcaggcggtggcggtgcccgaagaggagaagcacggcgacctagcccgagctcgcaaccatggctaggggtttgaagaagcatctgaagaggctcaatgccccgtctcactggatgcttgacaagcttggtggagcttttgcccccaagccatcatctggtcctcacaaggacagggagtgcctgcctctgatcctcatactgaggaacagactgaaatatgctctcacctaccgagaagtgcaatctatacttatgcagcgacatatcatggttgatggaaa

SEQ ID NO: 441257 - DNA, 294 bp, Triticum aestivum
tctaaacttaggtcgaaggcaccacgttttgaagcccattgcaaccagcaattggtgccggtacacatgtcctacttggggaaaatcagaacagtgcacccggagtacactgatgctaaagaaagcctcctgcaagctgctaggaaggcaccggctgcagatcttggctttaggattcagtgcaatcaatgggctctcatagaaaggctgcttcttggggagatcccacagaggactgcttacatgcacaaaggaatgaaagaagctttggcaccatattttgagcttacaaat

SEQ ID NO: 441258 - DNA, 230 bp, Triticum aestivum
tggaacaccggcaccttcttcggcatccacgtcaccgtcgaccccttcacgctctcctactcccagctcaacctcgccgccggagacctcaagaagttctaccaggggcggagcgggcggcggacggcgagcgtgaacgtgaaggggaacaaggtgccgctgtacggcagcgggccgacgctgatggcgcagccggcggggggcaagggcggcgccggcaaggtgatccc

SEQ ID NO: 441259 - DNA, 413 bp, Triticum aestivum
atcgcccacgcgtccgagaggcgaatcgcattcgctaccttgcttcctcctgacgtgccttggcctccccgcttcccgttcccaccgacgacaggagcgagcagaggaccgcgatgcagcagccgcagctgcaggcgccgccctcgtgggcgtccgggcccgaccccgcccgccctgctcccaccaccttcgacgaggcgtccatggagcggagcaagagctttgtcaaggcgctccaggagctcaagaacctgcgcccacagctttactccgccgcggagtactgcgagaagtcgtacctccacagcgagcagaagcatattgtgctggacaacttgaaagattatgctgttagggctctggtcaacgcggtcgaccaccttggcaccgttgcctacaaattgacagacctg

SEQ ID NO: 441260 - DNA, 276 bp, Triticum aestivum
tgttcgcgactccggccagactcttcttctgtagaaagctagcgaggctcggaggtgagcgaaaatgccggtcagcaggatcgccgcggggagccaccgcgaggtgtacgaggtcggcgccctcaaggcggcgctcgccgagttcatctccacgctcatcttcgccttcgccggccagggctccggcatggccttcagcaagctgagccccgacggcgcggcgacccccgacagcctgatctcggcggcgatagcgcacgcctttcgcctgttcgt

SEQ ID NO: 441261 - DNA, 220 bp, Triticum aestivum
ccaaatccaatctcgagcccccctctcccgtccgtccgtcccaacccgatccgatctcccccctcctcctccgtcgccatgggccgcaagttcttcgtcggcggcaactggaaatgcaatggaactgtcgaacaggtagagagtatcgtcaatactctgaacgctggacagatcgcctctacggatgatgtcgaggttgtcgtcagcccgccctatgtct

SEQ ID NO: 441262 - DNA, 384 bp, Triticum aestivum
tcggccgccgcctcccctccgttcgttcttcttattcgggttgggtagtttacgtctacccaccagccatgggtaaggagaagactcacatcaacatcgtggtcattggccacgtcgactctggtaagtcgacgaccactggccacctgatctacaagcttggaggcattgacaagcgtgtcatcgagaggctcgagaaggaagccgctgaaatgaacaagaagtctttcaagtacgcctgggtgcttgacaagctcaaggccgagcgtgagagaggcatcaccatcgatattgctctctggaagttcgagaccaccaagtactactgcaccgtcattgatgcccctggtcaccgtgacttcatcatgaacatgatcaccggta

SEQ ID NO: 441263 - DNA, 262 bp, Triticum aestivum
cctatgttaccggcaatggagtggaagtaggtgcctcactggagacagaggagcggggcaagagcgcagccacatttgagtgcaacatatgctttgagatgggcggcgagccggtggtcacttcttgtggccatctgttgtgctggccttgcttataccaatggcttaatgtttactccaaccacaaggaatgcccagtctgcaagggcgaagtgacggaggcgaatatcactcctatctatggtagagggaattcttgttc

SEQ ID NO: 441264 - DNA, 278 bp, Triticum aestivum
tcttgcgcttcaaaacattaccaacaagcgagatgctaccaaggaatgaagttcttggtggatacatctttgtctgcaacaatgataccatgcaggaggatctcaagagacagctttttggcttgccagcaagatatcgtgattcagtccgagccatcactcctggtctacctcttttcctctacaactacacgacccatcagctacatggggtgtttgaggctgctagttttggaggatcaaacattgatcccaccgcttgggaagataagaagtgc

SEQ ID NO: 441265 - DNA, 414 bp, Triticum aestivum
tcttttattacaacattcatagtcgagccatttgtgccacacgatcaagagtcttatctctcaattatgtcagacaggcttggttgcaccattagattctcagagtgtggtggtcttgagattgaggagaactgggacaaggttaagacaatctttgttccaacagagaagccaatgacacttgatgcatgcgctccattgattgccactcttcccttggaagtccgcacgaaaataggcgatttcattagagggtcattttctgttttccaagacttggatttctcatttatggagatgaacccattcaccctggtaaatggtgaaccataccctctcgacatgagaggtgaactggatgacacagctgctatcaagaactctaagaagtggggtgacattgaattccctcta

SEQ ID NO: 441266 - DNA, 225 bp, Triticum aestivum
ttttcgcccacgcgtccggctgccaccaagtcgattgagcgggaaatcaactccgtcaacgacaacccactcatcgacgtctcccgtggcaaagctatccatggtggcaacttccagggcacacccatcggtgtgtccatggacaacaccaggcttgccattgctgcgattggcaagctcatgtttgctcaattctcagagctggtgaacgacttctacaacaac

SEQ ID NO: 441267 - DNA, 365 bp, Triticum aestivum
ggacgaggtggcggagcagggcgacggcttcgcggccttctgccggagggggaagggccggaagcgggtcgagatggaggaccgccacgtcgccgccgtcgcgctcggcggggaccgcgcgcaggccctcttcgccgtgttcgacggccacggagggaagagcgccgcggagttcgccgcggagaacatgccacggatcgtggcggaggagctggagaggtcggcgcgcggcggaggggcagggcgcgcggcggtggagggcgccgtgcggcgggcgtacctgcgcaccgacgaggagttctgctccacctcctccaagaaccgggagcaggcgggcggtggcgcctgctgcgtgacggcgctgc

SEQ ID NO: 441268 - DNA, 280 bp, Triticum aestivum
tatcgcccacgcgtccgggagactagagcaccggcctcatgagcgccctgaagcactgtaggaaatgcgacaacatgctgtacccacaggaggacaaggagatgcacaccctcctctacgcttgctagaatcgacagcaccaggagatagctactgatactagtgtgtacaaaagggatcttgggaaatctgctgatgaacctaaagacaccctaaaagacgcaggtgctgacgcgtgtctgccacgcaccagaagtgttaaatgctacaactgaggcta

SEQ ID NO: 441269 - DNA, 441 bp, Triticum aestivum
tttttcgcccacgcgtccgcccacgcgtccgtgtgaagtcgtctgtttcactgctgatgttggtcagggtgacattgaattggaaggattggagaaaaaggcaaaagctagcggtgcaagccagcttgttgtgaaggacttgacagaagaatttgttggtgaatatatatacccctgcttgcgtgctggtgcagtttacgaaagaaagtatctgcttgggacttccatggctaggcctgttattgctaaggcaatggttgatgttgccaaggaagttggcgcagatgcagttgctcatgggtgcactgggaagggcaatgatcaggttcgctttgagcttacattttatgccttaaatccggaacttaaagtggtggcaccctggagggagtgggatatcacaggacgtgaagatgcaattgagtatgcaaagaaacacaa

SEQ ID NO: 441270 - DNA, 399 bp, Triticum aestivum
ttgttcgcttaaccataaccagttacaaggaaaaatgaccgacgtattttccaaccttggtagcttgacaacagtggatctctcctttaattctcttactggtgacctaccagaaggtttaagttcactgtcaagtgttaagactctatatttgcagaacaatcagttgaccggttctatcaatgtcctagctgatcttcccctttctgatctgaatgttgcaaataaccgcttcactggttggattcctagtcagcttaagaagataaatagtctacagactgatggtaattcttggactacgggaccagctccaccgccaccgccatttacagctccaccttcaaaccgtcggaagagcccagctaaaaaagacaatggttcatcatcttctgatgg

SEQ ID NO: 441271 - DNA, 305 bp, Triticum aestivum
tcgtcatcgcgtccgcgacgacgtgcgccgcgagatccagatcatgcaccacctctccggccaccgcaacgtcgtcgccatcaagggcgcctacgaggaccagctctacgtgcacatcgtcatggagctctgcgccgggggcgagctcttcgaccgcatcatacagcgcggccactacagcgagcgcaaggccgccgagctcaccaggatcatcgtcggggtcgacgaggcctgccactcgctcggggtcatgcaccgggacctaaagcccgagaactttctgctcgccaacaaggacgacgacc

SEQ ID NO: 441272 - DNA, 448 bp, Triticum aestivum
tgctgacgcgtgggtcgtcgtccaacccctccgacctcacacccaacttttcctttccccatccctctgcgccctcgccgtccgcggatcaaccgatttcgcacgcaatgtctcagactgttgaactcagggttggcatgtcatgtgagggatgtgttggagctgttaagcgggttctcggcaaaatggaaggtgttgagtccttcgatgtagacatcaaggagcagaaggtcactgtgaagggtaatgtgacgccggatgctgttctgcagactgtttcgaagacaggcaagaagacatcgttctgggaggctgaaccctcggcatctgctgtttcgtcctaaaaaggcatctctaatatgtaaactgtgaagtttaatgtaacaatggcccagttgaaatgctttgcaaggacatgatcttctggtcggatggtatatgcaccatg

SEQ ID NO: 441273 - DNA, 247 bp, Triticum aestivum
ttttcgctcgacggcgatcctcgagaggaagaagtcccccaaccgcctcgtggccgacgaggccaccaatgacgacaactccgtcgacgccctccaccccgacaccatggataggctgcagctcttccgcggcgacaccgtcctcctcaagggtaaaaagaggaaggacaccatctgcattggtcttgctgatgacacatgtgaggagccgaaggtcacaatgaacaaaactgtcaggaagaacttg

SEQ ID NO: 441274 - DNA, 351 bp, Triticum aestivum
tttcgctccacggcgatcctcgagaggaagaagtcccccaaccgcctcgtggtcgacgaggccaccaatgacgacaactacgtcgacgccctccaccccgacaccatggataggctgcagctcttccgaggcgacaccgtcctcctcaagggtaaaaagaggaaggacaccatctgcattggtcttgctgatgacacatgtgaggagccgaaggtcacaatgaacaaaactgtcaggaagaacttgagagtgagactcggtgatgtggcgtctgctcatcaatgcccctatgtgaaatacgggaagcgggtgcacatacttcctattgatgacacagttgaagggattaca

SEQ ID NO: 441275 - DNA, 352 bp, Triticum aestivum
tgcccgccgccgcctcctctcggctccttcttccttcgagtttcagccatgggtaaggagaagactcacatcaacatcgtggtcattggccatgtcgactccggcaagtcgaccaccactggccatctgatctacaagcttggaggtattgacaagcgtgtgatcgagaggttcgagaaggaagccgctgagatgaacaagcggtcgttcaagtacgcctgggtgcttgacaagctgaaggccgagcgtgagaggggtatcaccattgatattgccctgtggaagttcgagaccaccaagtactactgcaccgtcattgatgcccctggtcaccgtgacttcatcaagaaca

SEQ ID NO: 441276 - DNA, 367 bp, Triticum aestivum
tgttcgagcaagcaccacccatggcggccatgtggtccttccgcctccttcccctcgcgctgctgctcgccatggcgcacgcgcggctgcagcccaccatccggctgccatcggacgacggctccgtcgggaccaggtgggccgtcctcgtcgccggctacagcggctactacaactaccgccaccaggcggatatttgccacgcctaccagatattgaagaagggtggtctcaaggatgagaacatcatcgtgttcatgtacgatgacattgcgcacaacctggagaacccgaggccgggcgtcatcatcaaccacccccagggtggagatgtctatgctggggtccctaaggactacactgggaa

SEQ ID NO: 441277 - DNA, 314 bp, Triticum aestivum
tgttcgcccacgcgtccgatcatctcctctgcctaacaagctaagcagctgaactcaagcagcggcaatggagggcaaggaggaggacgtgcggctgggcgccaaccggtactcggagcggcagccgatcgggacggcggcgcatggcggcggcgcggacgacaaggactacaaggagccgccgccggcgccgctgttcgaggcggaggagctgacgtcgtggtccttctaccgcgcggggatcgccgagttcctggccaccttcctgttcctgtacatcagcgtgctcacggtgatgggcgtggtgggcaacc

SEQ ID NO: 441278 - DNA, 405 bp, Triticum aestivum
actgccaccctcgccgtctcgccgccgtcaccaccgcatcttgataagagaaaaaaagagagagaagaactcgtcgggagggctcgagatctgtgttcggagaggggaattcttgaggtcggaatcggaacaagcgggcgcgctcgggatcggggttaccatacaatttttcccaggaacctttagtgaatgtgctaatggagtcaaagggtggcaaaaagtctagcagtagtagttccctgatgtacgaagctcccctcggctacagcattgaagacgttcgacctgctggaggcgccaagaagttctctgctgcatactcgaactgcgcgaagaagccatcctgatatcgattttggcatccccttcccgtagtttaggatttttatgcaattttattctgac

SEQ ID NO: 441279 - DNA, 317 bp, Triticum aestivum
tttttcgacccatccatcatcatctcatctcctctgcctaacaggctaagcagctgagctcaagcagcggcaatggagggcaaggaggaggacgtgcgtctgggcgccaaccggtactcggagcggcagccgatcggaacggcagcgcagggcgcggacgacaaggactacaaggagccgccgccggcgccgctgttcgaggcggaggagctgacgtcgtggtccttctaccgcgcggggatcgccgagttcctggccacctttctgttcctgtacatcagcgtgctcacggtgatgggcgtggtgggcaacccctc

SEQ ID NO: 441280 - DNA, 176 bp, Triticum aestivum
tttcgcacacatccatgatcatctgatctcctctgactaacacgctaagcagctgaactcaagcagaggcaatggagggcaaggaggaggacgcgcgtccgggcgccaaccggaactcggagcgggagcccatcggaacagaagcacaaggtgcagacgacaaggactacaaggag

SEQ ID NO: 441281 - DNA, 341 bp, Triticum aestivum
tcggcagcagctagctaagctaagcctagccaaagcttctctagcttcggtagtccaggaaacatgaggctcgcggtggttctcctctgcgccctggtggccgtccaggtcgcgctcctcgccgccccggcggaggccggcgagctggtggtcgggtactacgacaagaaatgcaggggcgtggagaacgtcgtccagtggcacgtcaggagggcgctcaagaccaaccgccgcgccggtgccgccctcgtccgcctcctcttccacgactgcttcgtcaggggttgcgatgcctctgtgctccttgacgcgtcccccgagaaccctcacccggagaagga

SEQ ID NO: 441282 - DNA, 398 bp, Triticum aestivum
tcttgagcatctgcgagtgggaagcgtgttcaggtgggtttgcttctaatcatgacttcctgaataaccatttttccatgccttttgcattctaagcagtataattcagaataacggtttctgtttcctttagtgtaacatgggtgcaaagaatcatgccattatccttcctgatgctgatcgagatgccacattgaatgcccttattgctgccggttttggtgcagctgggcaaaggtgcatggcattgagcactgctgtttttgttggaggttcagaaccatggtagagttctacgatttctatccaagacaagttttttaggctaaagtttttttttggggtcagattttgaggaagcattgtcaaccttatcttttgttttagggaggatgaac

SEQ ID NO: 441283 - DNA, 360 bp, Triticum aestivum
tgctgacgcgtgggttcagagctcaactgtgacatatggtggttcaaatggggcatgttatatgtcttcaacgactaggaggagtggtggagatggggtagttacaatggaagaaagtaaggaagcagacacaacaagtggtaaagcaactcacaggatcgcacgtggcattggcaataagggtcatgcactgactaggaaactgaactgcgatggaaaagttaacaccatgcaaactttgcagaacttgagtgaagatgagctagctgggtttgaggaatcatggcaaaggaatgcagggccttgtctgcctggttgggatcccagattaaacatgcttaacagtggaactcttagccc

SEQ ID NO: 441284 - DNA, 279 bp, Triticum aestivum
cggacgcgtggggtcaagtccaacatgttcatcgtgggcgtgtcgcacaagatccgccggcagatcgaggacctggagcgcgccggaggtgtcgagcccggcaccctcaccgtcgacggcgtccccgtcgacagctacctcaccatgtttgtgtgggacgagggcaagtaccccgtcaacgccccgctcaaggagaccgtcgccagcatccagtcccaggtcgccaagatcgaggacgacatgaaggttagagttgctgaatacggtaatgttaagagc

SEQ ID NO: 441285 - DNA, 323 bp, Triticum aestivum
  unsure (1)..(323): unsure at all n locations
ncgcagcccccaatcctcagatccgcctccgctccccttgcaagtccacccccccccccccctgcccaccgaggcgcgcacgcacgcacccggccaccgcccacccggatccagatccgcgcggcggcggcggcgcaggcgaaggcgaaggcgaaggagggagcgatggccggcggcgggggcgccggcggcttgtcggagtcggtgatgcggaaggtgctgctgccctactgctacggggcggtgtggatctaactctccttcgccgttatcgtctacaacaagtacatcctggaccccaagatgtacaactggcccttccc

SEQ ID NO: 441286 - DNA, 334 bp, Triticum aestivum
ttcgtcgatctcctcggttcagcccacagccaacgaacacactcgagcgcacgagtgagcgagcgagagagagaaagatggcgaatctgttcctgaagcaggcgaagcactacgcggcggcgcggccggactacccggcggagctcttccacttcatcgcgtccaagacggcccgccacgacctcgcgtgggacgtcggcaccggcagcggccaggccgcagtctcgctggcgaagctgtacaagaacgtggtgggcacggacacgagcgcgcagcagctgggctacgcgcgggagctccccaacgtgcgctacgcccacaccccggcggacct

SEQ ID NO: 441287 - DNA, 304 bp, Triticum aestivum
ggcccgttcgtggagtacatcccgacgagggagttctaccacaggcacacccggtgcctctactgggaggggaagctcatcctgcccttcggcgaccagctctggttcaggttcctcttcggctggctgatgccccccaaggtgtccctgctcaaggccacccagggcgacgccatcaggaactactaccatgacaaccatgtcatccaggacatgctggtgcccctgtacaaggctggagacgccctcgagttcgcccaccacgagatggaggcgtacccgatgtggctgagccctcaccggc

SEQ ID NO: 441288 - DNA, 311 bp, Triticum aestivum
actgggcgacagcaacggccacgtcggcctcggcgtcaagtgcgccaaggaggtggccactgccatccgtggcgccatcatcctcgccaagctctctatcgtgcccgtcaggaggggctactgggggaacaagatcggcctgccccacaccgtgccctgcaaggtcaccggcaagtgcggctccgtcaccgtgcgcatggtgcccgcccccaggggttccggaatcgtcgccgcccgcgtccccaagaaggtcctgcagttcgccgggattgatgatgtcttcacttcctcgcgtggatccaccaagaccc

SEQ ID NO: 441289 - DNA, 254 bp, Triticum aestivum
ttctgctttctacaagagctcgaccaatgacttgtttgagcattcggctgtcaagcacttctctgctgagggccagctcgagttcaaggctgtcctgcttgtgcccaagagggcccccttcgacctctttgacaacaagaagaaggccaacaacatcaagctgtatgtgcgccgtgtcttcatcatggataactgtgaggagttgatccctgagtacctgagctttgacaagggcattgatgattcagaggacc

SEQ ID NO: 441290 - DNA, 245 bp, Triticum aestivum
ttatctatcgcacgcaggttccgagggttggcttgactatttttatgaatcttcaggtgccaacggcagtgtccaagatgatgaccatgacaagctgaggaggaacaagaaggaggctgtgtctatgatacatgagtacttcctttctgatgatataccagagcttattcgcacactcaaagaacttggtttaccagagttcaacccggtctttatcaagaaactgatcacaattgccatggacc

SEQ ID NO: 441291 - DNA, 262 bp, Triticum aestivum
ccgacgcgtgggtccacgaagggcatccgtgttgctaggacgtacttggattccctccagcaacacaggaaaaagagtggactcatagatgatctgggtatcgaggatatgatgatggaagctctcgagaaagttgagaaggacattaagaagcctctgctgaggagcgacaagaagaacatgaatctcctattggcagattttgacaagataaacataaagctcggcattcggaaggaggatcttcccaagattgaggaaa

SEQ ID NO: 441292 - DNA, 474 bp, Triticum aestivum
gattttcaaccgcaccgtttgcttcgtgccactgcgtaaatacatttcaatttgggatttttgctgattaaatacagcccgatgggaaaagttatccaacgcaaaattaccttgaaaacgccaatttaaatggcgcaacatatttaaattaaattccgccgttaccccttgggcatcgttataggcggcttctaaaatatcagcaggtttgcataaatccacccctaataaaaagtaatcccctgggtctaacgcttgacctacttgttcaaagaatacttgacaatcttcaggggaaaaattaccgagagaactgcctaaaaatgccatcaaacgatggggataattatgatcgggcaatgatgccaacgccaactgataagtacttactaaaccttgcaccgttaagtggagataggtagctaaaatagcctccgcattttctcttaaaatcgcttcactgatatcaacggg

SEQ ID NO: 441293 - DNA, 529 bp, Triticum aestivum
agtggtttatgtttttctgaaatagagatttaaattttgtctaaatccaagttatgtcaatgaaaaaataaaggatttcagacagttcttagttagcttttttggcactctcggtttaaagtgtaatcaagctatcattcggtgtgaattatgattcaaactaagagtattgaccatcatcaacaagtgggaggtagcagtcatcattaggggcaaaatattcttgcccttgattagattctctataatcagcatataatcgagcgtcttcttcttgatagtctgacattaagtatttttcatatagaccatcgaatactttgggtgaaatataaatattggtctttcttaactctctaaggcgttctcggcatacattgaattcactttctatggtcaccattagtttgttttcacagagctccttgatatattcatcactttttttctttacatacaaaaattttatgctttcttcgattgaatgcatttggtgaaataaacttgccatgctattcattatatacat

SEQ ID NO: 441294 - DNA, 521 bp, Triticum aestivum
ctattttttggtgatgacgaagatgagctagaggaagaaccttctccccccactacaccaatgactgggtcatggcaatctcagcccgagcagcaagtgtccccaatcctagaacaaaccaccgtagaggctgaaacggtggaatcgcctccttccctggaggatgtttttggcgggttgaccgccgatgaactggggaaagaatccctttctcccgtggctgaggtggattttgtcgatgcttccctagaaacgttatctctggtgcaggcggtagaggaagcctttgattccttgccccccttagcaacgaccccagcgaccattccccaggctgaagtagaggcagtggcagctccggctcctcccgtggaacgcacccatgaacggcgggccatgcccagggagcaaaatccagctaatctttccatccgggtggattttcaacggttggagcggatgaataattgggtgggggaattggccattaatcgcaatagcctgtctttacaaaatcagca

SEQ ID NO: 441295 - DNA, 426 bp, Triticum aestivum
cgccaatggcaatgcagttagtctgggggccccgccgatgaaaccggggacagctactaaacccattgccagtggtggtggtagctctggccctagtctgggctccggccaacccagagcagaacggcccggtggcggcaatgcaggggcaaatgttggtcccattgcggccaatcccgttgctagtagtgctccccctaaaccgaaaccaactcccagttcccccgctaagccagaccccttaaagtgcgttagccaatgtaaacccagttatccctccatcctccagggggaagaaggtagtgctacagtattaatttcagtaaatgatagtggtggtgtgaccagcgtaaccatcaccaatgcccacggcaacagcgaggtcaaccgccaggccctattggcagccagaaaaatgcagtttac

SEQ ID NO: 441296 - DNA, 440 bp, Triticum aestivum
gttttctaaatggttaaccaattgggttccggtggttaaactgttgtagtcgttaaaatcctctgtgagagcctgccgttgtaattttttttgctgttgcaatgcttgcactaatagttgcaaacggttagtgttaggaatgcgtcttttgcctagcaccatttgtcctaaatctaagcaaacttcccccagagcattaaacgcatcttccattaggatttccactgtttgtaattggggtagattgtggaaattaacaatttcattgagcaacattaggcatttatttaatctttccgtatgctcgattaaaactaataataattcccttaatttactttgtccccataatcctcgctggctggccaccagagtttgccgagatttaagcaagttttgacgcagtttgaccaccaattgctgagcttgggggtcatcgg

SEQ ID NO: 441297 - DNA, 449 bp, Triticum aestivum
gtttggcctatcccaccaccatccccgcttcaattttgacgaggctgtgttgccagtgggggtagagctatttgtccgttgcgtggaaaggttctgcaatgcctagaagctgaaggtggtacgaattacccccattaccagggtgccattggcgttgttgtagtccgcattgggtaccaccacaataccgggggtaatggaaagattgtcactcactgcccactggaaaaagccttctaggtgcaaggaactgtcaatgtcagtggtggcaatgtcatcggggaagacaatggaactactgctcacccagggttgcatacccacaataatccccgccatattcccttccttgataatgtcggggaaagccagggtcacagcccaattccaaatatctaaacttcctctaccaatgctggcatccgccagatctatagatttgagggtgc

SEQ ID NO: 441298 - DNA, 450 bp, Triticum aestivum
acaaaccctatatataggcaaatttgctggcattttaatagtaatttcagttccctttctccccaatggtttggagcttctagtcaagctaaaaaagtaaaaactctaactctccaaagtttaattgaccaagaaaaaattgacaaaatcacctgtctaaaactagatattgaaggttgggaatgggctgtaattaaacagctagaaaatatagaatcctatttactgcctgcggtagtgatgtttgaatatggcggcggcgtcaaccgaggtcaaaaccaaaagggttgggccccagaattctttgaaaatacattaaacattcttaaatcattaaaaactcttggctacggctccggaattttattggattttgctccagattgccaagaaataacctttgatttaagccaattgcaaacatctgagttggataaacttttcccccct

SEQ ID NO: 441299 - DNA, 495 bp, Triticum aestivum
gggcactttttgcgcccccaatcggaggcggtgaaccaagcatcgtggttaccaaataccgttgccttgggaatgggtaaggaggcaatcaagctgaccaccggcaatgattcgttgccaaaatcccccacaaatagtgccaagtctacgccgatcgcctggagagcttggtggtccgccaattcccattgttcatggatatcccccacaacggccagggtagtggttgcggtaggttggggggccatcagctctcttcgctttccgacatttctgccaattcttcttccccagaaggaggcactagggccacagcggcgatcgcatcatcggcatctaacctttgtacccgcaccccagtggcactacgggattggggggaaatatcgttcacggactggcggataataatgccccggttggtgacaatcatcaactcgtcatcggcgttgaccacatggagggccactagctggtcatctttggatttaaagc

SEQ ID NO: 441300 - DNA, 477 bp, Triticum aestivum
tacgaaaagtggattgttaccatcaagtttatcgtttggttggcaatgatggcggtattgagcaactattacgacgggcggaagaagatataactaaagccttggttaatgaagctcgaacggaatgtgatcgttatgtgcgggaaagtccccgattttatgatgaaggtactttttccatttatcaattccggcaaactctccagcaaacttcccagggttatgatgcccaggcgatcgtggaagcggaaccagctattaaggagttgctaaaactagattttgaacctaaagttttcaatactgtacggaaaaatttccgacaaaccgtcaataataccctaaaaacccatctgctaccaatggcagaagaacaagcccaaataattttagaacagtatgatgtggcaaggaaatatcgtgagcaaacgttggaacaggatgccgaagaaaaaattgctcgcaattcccgtttac

SEQ ID NO: 441301 - DNA, 296 bp, Triticum aestivum
ttcctggccacggaggacattcaacagttggctagtttataccgggctacttccgccgacctggcccgtgcccaaacccataatctcaatccccgcctgaggcaaaacttacaagctttaatcactagggcctacagccagatttaccaaggcgatcgccgacaggaatggggcaaagtaaaagaattttacctgtggcagttgccgttagtgttgcgacaaacggggatttacaccatggcggcctttggtattttttgcttcgccagtgccattgcctggtggtatagctggcg

SEQ ID NO: 441302 - DNA, 428 bp, Triticum aestivum
attgccgtagagtacggaagccggccctttgaggacttctatccgttgtagatttgccgtgtccggaatagaaaaattatctctgaacttaaagccgtcccggagagttccgccaaattgttgaaaaccgcgaatattaaatatttcggatgtaccaccaacagtatttcctctctgcacaccactgacattttgcagtgcttccgaagcacgaattatttgcctgtcctccaacacctgttggggtaccacttgaatcgattggggaatgtcccgtaagggagtatcggttagagtcgccgttgtggcatcgtccaccgcatagccttcatcctgttcaccggtcaccactacctggatagcatcattgccatcctcttcatctgccacccctttccctggacttaaccccagtaccagggattggt

SEQ ID NO: 441303 - DNA, 434 bp, Triticum aestivum
tttaaaaaatatcttcgatattggtcgtctggctttttgccacagccagcaatctttgtaaaaaatgaaatggcagaccaatgttttccactaagtgtagagctatactacgccatggattttcaattttttctaagagtcttaaatcaagaacctaagtcagtttggattcaagaaaaactaactcgactcagatggcatgaggacagtaaaaccatgggaacaatatcacgaatagactttcatgcaatagtgccagaaccggaggtgcataaagtagctctagcagaagctgaaaatttaccaacttggctggaaaaaatattttttcgaatccaagcatttgattatctctctctccaaccttatataaattccttggacaattttcattggttacaaattactaaaaccattgttaaaagacctaccct

SEQ ID NO: 441304 - DNA, 441 bp, Triticum aestivum
gggacgtgcatctagaccaaacccgttctatttaccattggctccaccaacgcttacggaaattattacccccaccccaatgccaatttttaaccgatagtgaacccctcgggcgatcgctccaggattatttgggccaaccattcaccgtgatgcccattccccacacggattttgctgaagttgtacctttatttacagaagctgatcccattctttgctggtggcccggtgcccctcgggaagaaaaaggttggtcggtgatgcgtcatttggtttcattgccccggcctaattcacctaggctccaactaattgcggcggcggcttccggattaaaaagtgacagggaaggaattgaagttcatttaattggcgatcgcctgactagggaagaatacgccggttggttaaataaagcccaaattattctcttaccct

SEQ ID NO: 441305 - DNA, 500 bp, Triticum aestivum
tgccaacatggaatcggtttctgcattcacggcaacccgattaatgcctccctcggcttgaaactcgtcaccgtgacccacatgggctgttacgagattgggagttcctagggtcaaacccagtgccagaaaggaacttgctaattgaattgttttcatcacaccacctcaaattgggaatttgtccaagattttcccagtctgccaaagggggtatgaaattcaggtgaaaatctccttcccccgctaagatcagaccgttataaaaaaggcagaggcgatgcgaattttgctggtggaagatgagacggatttgggaatggctattaagaaagtgctagttagtgaaaagtatgtggtggattgggtgacggatggctcccaagcttgggattatttggaaaatcaatggacggaatacacccttgccattgtggattggttactgccgggattatcgggtttggaactctgtcaaaaactgagaacccagggtaatt

SEQ ID NO: 441306 - DNA, 408 bp, Triticum aestivum
cgatcgccaagggttgctaactgcaatcccaaaccgggcaagatcgctccccccaccagttttttatcttggtcaaaccctgtaatggtcaaagcagtgcctccatcaaccactagacagggaaagccgtaggtcagccccgtccctaaaccagccagggcccggtcaatgccaaagctggggtaaagattgaccaggggaagattcttcagggtcaaaattttaggctgatatactcgccaaacttcggtttgttccggtaccaccgatgccaacatcagaggaactttccccaacaaaaccggcaactgagctgacttggggttgtaatctgtaacccaggtttgcaggggagcattgccgctacaatatgcccagtgcagacgggagttgcctatcattaggcct

SEQ ID NO: 441307 - DNA, 395 bp, Triticum aestivum
tgcctactgtgatttgagcagcgtcgtattgccccagggttgccaaaccaagcactgttgctcctagtccaaggatgctgttaacgctcagatggcgaaccgcaggagagaagaaaccgttgttggtgggggcagattgaaccaagaacttatcttcaccacgagtgaaatcggtaatcacgtcaaccttggacaaattaacgttgaaccaggagaggccgagctgggaatccttaagattggtgtagtcaaataggtcattacccataccaccagtcaaaatatccttatcggcaccaccgataatcagatcattgccagcacggccattcaaagtgtcattgccgtgaccgcccatcaaagtgtcatttttttggaagccaactatgctgtca

SEQ ID NO: 441308 - DNA, 413 bp, Triticum aestivum
ctggggcttgttgttgaggagattgagaattttatcgccccgttccaaagagcggtcttctaaaaaggaaacttctggggtgcgccgtaaacgcatccgttgccccagttctcgacggacaaagggagcggcggagtgcagtccagccatggtggaggctttggcttcaggggagccgtaaatgctaacgaaaattttggcgtgctgtaggtcgccggaaacttccacttccgtgacgctaaccatgcctgtgcccacccggtcatctttgatttcgtggagaagcatttgactgacctcccgcttaattagggacgacacccgggaaactcgacgactggtagccatagacctgctcctcggcaacaaaaaagtccgagcctggacagattagcccaaactccctctacacg

SEQ ID NO: 441309 - DNA, 263 bp, Triticum aestivum
tgccgattgtttgcaccatgcccaagcggcgatcgtcatggtcggtaccgacacagaacagtttgtcgggttggggaaaccagagcttagttttcccggacaaggcccccaatacaatccgtattttgtgcgccggcaaacctggcttttgggagaatccttaatgttgttgaatagtcctgaccaaactggggaggctctacaacaggtacttcatgatgttgagcgactagaggcgatcgtctgtaatggccgacaaaggc

SEQ ID NO: 441310 - DNA, 494 bp, Triticum aestivum
cctccggttatcacttggacgtcggagaccgcggtgattcatggtatgccccccgattactccccccccgatgtgggcacggcagttcagttttatgcgcccgaatttcgtgaattcatcatggaagtttttgaacgttgtgttcagcagggcgagccttttgatgttatctgccaacttcaagtgcctgacggacgcagaccttggatacgggccattggcgaggccgaacgggacgcccaaggtaaggtaattgttgtccagggggcgtttcaggatatttcaaccctacgggaggcccaagagcgtttccagttaatatccaaagccgccaatgatgtgatctgggactggaattttgctaccaatcaagtctggtggaatgactccataacagatctgtttggctatgctttgttagatatggagccgggactagaatcctggacgctacgcattcacccggatgacaaagagcgtgttctccacagtat

SEQ ID NO: 441311 - DNA, 315 bp, Triticum aestivum
ccttttgaccgtatgattattgcccaggctcagcaacataatttttccgtcattagcaaagacgaaaatttcaaaaaatacaacgttaatttaatctgggaatgagaacaataacctgtttgtatgagtcattttcattccttgaaccttattgcttagaacgtgtttagcagttttgttcagccccctaaatctcttcactaaagctccggcaatactgggggactttcactcagtttccccccaaattggaggccaggaggacatttaaaacaggctcttaaatgcctttaacaattgccccgaagtctccga

SEQ ID NO: 441312 - DNA, 338 bp, Triticum aestivum
aattgagatgacgaagatggaggtttgactttaaactgaggctaaccgctaatagcgtatcggaaaatcttcaagatcccaaggaaagatttttatgtcagtgaacagcatccatttggtgggaagggccggccgtgaccctgaagttaaatattttgagtccggtaatgtagtttgtaacttcaccctggcggtgaatcgacgcacaagcaaaaaggatgaaccccccgattggtttgacctggaaatttggggtaaaactgctgaaatagccggtaactacgtcaaaaaaggcagtttgattggtatccaaggatcgttaaagtttgaccattggg

SEQ ID NO: 441313 - DNA, 450 bp, Triticum aestivum
aatcccatcgcccatgcggaaatgttagccatccaaactgcttgccgtcggctaggccattggcgattgaatgaatgcaccctttacgttacgttggaaccttgtcccatgtgtaccggcgccattatccaagcccgtttaggtttattagtttatggcacccccgacccgaaaaccggcaccatcgacagcgtgttcgatttggccgccagcgctgcctctaaccatcacttacaaagcttaggaggagtgtgccaagaacagtgccgtgaacagttacaggattggtttgcccaacatcgggctaggaaaaaacaacaatcccttgtttcctgaaggttggtattaccccgttgggactttgcaactacagcctttgatgggtatgggaatgttgcttaacgttatcttcagctttaaccactttgctgtcgttgagaatgcgttttt

SEQ ID NO: 441314 - DNA, 427 bp, Triticum aestivum
cccggtgcggaaatccctattgccaaaccacttcccggctttggggtttgcccctcctacgcctggatatggggcgggtctacgacggttccatggtggggcgatcggaagctaatctccgcaacgccttgaaaaccgccgagtccatttctccagctattttgttcattgatgaattggacaaagcctttgccgggggagccggttccggggattccgacggcggtacctccagccgcatctttggtagtttcctcacctggatgcaggaaaaaacttcccctgtattcgttatggctacggccaaccgggtcgatcgcctgccaggggaatttctccgcaagggacggtttgatgagatttttttcgttgacctaccttcttccgaagagcgggaagccattttccgcattcacctccataaacg

SEQ ID NO: 441315 - DNA, 461 bp, Triticum aestivum
atgctcccagatctgtcttgggcaggacttttccataggttgcatggaatttaatcaatggtaagtgattatactcacaattattccagtgatttttgatatttattctgaacagataatgctaacttaatagttgagaattatttgcagttttgggaaaaccatgacgttattggatttatcggtgggtcagttggcttttgtggagaaaattttactaggaaaccacggtcaggggttagttaatcgcctagaagcaatgggaataattcctgataaaccaattcaattgctccgcaaggctggtttggggggaccactccacctccgcattggtagcaccaccgaagtggccatgcgccgtagtgaagcccaattggtgcagattaccttaggagagtagggcggagatggtgagtcattgccaaagggggtcagtccagtccagtcgtccagatgtg

SEQ ID NO: 441316 - DNA, 498 bp, Triticum aestivum
tttcttaatctctggtcgggctggggtatcaacgacgatgtgctcataattacgggccgcttttaatccttcccgctcatcaacaactgggaaatctagcttttcatgggatgcccaaagcagtgccgaacggttcaagtccccatcaatcaggattgttggagctttgttattgaggtaggcggccaggtgaatagagcttgtggttttacctaccccacctttaaaagcagtaacggtgataatcattagatggttaaatatttaaaagtttagacgtttaactgtgtaaactttcgaatggctaaaaggggagacgcttggaagtttaaaatgttgctaagatttttggcagcaatgtgcaataaaaattactaggggttaatgagtctgattgtgaggagcttgtcgaagttcgattcagacagagtgccaaagtttttattaggggtttcaagtgatgactaaaaaaatactaggggtttgggatgaaagata

SEQ ID NO: 441317 - DNA, 403 bp, Triticum aestivum
tgtagtaaatttaaccgcattagctagaatgttaaccaatacctgtcgcacccgtgttaaatcccccaatatcgccataggtacctggggctcgatttgataaaccaaatccaatttttttgcaaaggcttggggcgcaactaaatccaggcattcttcgacacattgctgaatttcaaagggatggatttctaacttaaattgtcccgactcaattttagaaaagtcaagaatatcgttaattaaactaagtaaggcttcgccactactgcggatggtttcggtaaattgttgctgttgggtatttagatgcgtatctagcaataacccggtcatgccaatcactgcattcatgggggtgcgaatttcgtgactcatggtggccagaaaatcacttttggct

SEQ ID NO: 441318 - DNA, 390 bp, Triticum aestivum
ccggtattgggagatttagggggcaaattaaaacttggcaaacaggctctaggaaaaggcaataggtatggtggaaggtttttcacgtcgttcagaattcactctggcccggggaggggatattacccaagggaattccctcaccaatggtttggactggggctttaaacagttgacccgtctctgttccctcggagtagtggtgattctcggctggatcgcctgggtggtttttaccgatgcccgaccggcgatcgccaagtttggttgggaattcatcgtcagtcaacaatgggacagcagtgggcaactgtttggcggcttaccctatattttcggctcggtggttagttccttcatcgccctaatttttgccctgcccttggggct

SEQ ID NO: 441319 - DNA, 484 bp, Triticum aestivum
cctccacacccccaaggatgctgccattattcaggccatgctgctgttgggcaatggttttaatttaaacattattgctgaaggtatagaggaggagccccaagctcgttgtctctacgatttaggttgccgagaaatgcaaggttattggtttagtcatcccctttcagaagcagaaattacggctttcctagcagaaggcaatttccaaagattttgcctcggttagggagctttttcgacgaatttagtatagctaagttcattgattgcattccaactaaacatttgactgcggaatgtttgccattgttgataaatttccttaaattgggcatctttactggcaaattctgctagcaatgctcgggaagtttcctgggccactgttaaaatttctggagaaaaggatttcagaattgtgcctccatccagtaatgttttcagggcaatgctattaaaagtttcataacgggatagcatc

SEQ ID NO: 441320 - DNA, 461 bp, Triticum aestivum
gcgtaattatttcgggtcttgaaaagcccgttcatagacataataaactaccgttttggaagcgttttgggggccgccctgggtcatgatatacacctcttcaaaaactttgagggcggaaatggaagataaaactcctactaagaaacaatagggccgcatgaggggaatggtaatatcccaatgttgtcgccaaccgtccgctccgtcgatcgccccggcttcatagagttcctggggaatggcttggagtccggccaggtaaatgaccatgtaataacccaaccctttccacactgtcaccaccatcacactccacagggctaaattgggactggtgagccaaggaataccatcgctaaatcccagtagggcaagaatttgattcaggatgccattggaagcgtagagggctttccaggcaatgcctgccaccacaatagaggtaattaccggagtgt

SEQ ID NO: 441321 - DNA, 494 bp, Triticum aestivum
cggtaattagttccggcaacaccttaccgaccgctgcgaatattaccctgcccactgccggttccaccgagagtcaggggggaacgccccagcccgatctggaagcttttgaagggatgttggtgaaattcactgataccctgacgattacggaaatgtttaatctcgatcgctttaatgaaatcaaactcagccaaggcggtcgtccccaacaattcacccagtttaatgatgctaatgtggcaggctatggggcataccgagaggaaatcggtgctcgcaccattacctacgatgatggcctgagtgtgcagaacgcagaaattagcaatctggatggttttggttccagcttcagcaccgctagtgatattcgcatgggcgacacaatcaataacctcactggcgttctcagctaccagtgggcaggtaacgcttccagtggagctacttggcgggtgcgctctgctgtagatgggacaaatcagtttact

SEQ ID NO: 441322 - DNA, 491 bp, Triticum aestivum
attttcattcccaccgctgacattttgcgagaattggcccagtttgccccctgggaggtggatgtaattaccctaagcggcagcggagagccgacgttagccaaaaatttaggggaaattctcgaaggcattaaaaagttgactgggaaattaaccctggtactcaccaatgcgactttgttaaatgatgctcaggtaagagaagagctctccttagcagacaagatttctgtcaaattagacggattgtggccagaccagttacaaagaattaaccgaccgatcgccggcattgagttggagcaaattttgactggtattcaaacctttcagcaggagtttacaggggaattatcagtgcaaaccatggtgctgcagccctgggaccagacaactgagaaccgttatttggagcttttatccctaattaagcccaccgaagtgcaactcaacaggcccaccaggcccaaacccctccagcgggaattgga

SEQ ID NO: 441323 - DNA, 357 bp, Triticum aestivum
tgatgacctccgttatttttgtcggttgaggtttgtgaccttggttcccattctagtttgcatccccaataaagacaatatagtattttaagcacagattgcatccaaaatagggacaataggaatatcaatggacaaacttgaaagtatttacgcctttacccaagttgtgcgggagggcagttttgcggcggcggcgcggaaaatgaatctggggcgatcaacggtgaataagatggtgattgccctagaaaatgagcttaaagtacagcttctccaccgcagtacccgtaaagtgacccccacccccacagggatagccttttatgaaaaatcggtgcaaattttggcagattt

SEQ ID NO: 441324 - DNA, 362 bp, Triticum aestivum
tgctttcctgccccagggaagaatttttacgaacatggtgtcatcaatcggggcaccaggcgatcgcctaccaagaagatgggattttacggggttatggcgttctacgcccctgccgagtaggttacaaaattggccctctgtttgctgatactccagaggtagcggaaattatctttttagctctaaaagcaattcctacagcggaaaataccatttacctagatgtgccagaacccaaccaagcggcgatcactctagcaacgaaatatagcctgcaggtagtttttgaaactgctcgaatgtacactgggcaagccccctccatcgccctagataaaatttacggagttacatccttt

SEQ ID NO: 441325 - DNA, 162 bp, Triticum aestivum
ggtccagagggaaaagccccagtcccttggccgatggcagttcgtagtccggactggcattctagttgctacttttatcctcgctttggggagcctcgcaagccctagcctagccctagactataaccggggtaacttagtgggggcagatttttcccatca

SEQ ID NO: 441326 - DNA, 495 bp, Triticum aestivum
ctcttcgatcgccagttccgccgcttcaccacggtggtttcactgatggccatggtgccactgagggagtggtgcaaaccaactttaatcggttccccggtgggagcagtaccggtggtgggggactcagtcggttcagcagtgggttcggtggtaggttccgtgccgccgccacaggctttgagcaatagactggcgcctagggttgctgatccatacagcaaaaatttacgtcttccaaaagggttagtcatacgcgaaaaattattacctcgtaaggattctaaatatgcttgttggctggtggggaggagtttattgggcggaaacagtgctcttaaaaagtttttatccgcagtttattttggtcaacaaggcagtggatttccagggtaaatccgccggaaacaaataagaccccatactacgagtaggttaagaaaaaattatgtagcataggataccgttttgtccgactaagccccttttgcgcct

SEQ ID NO: 441327 - DNA, 517 bp, Triticum aestivum
cgccattcggaaaagcaaaaaagcagaaaccgggtggaagaaaaatccgcagaatacgcttcccagtctagcggaaaattacctcggctccatcccaactgacctaatattgaccctcccctctatcgacatatcgacagtgcatccattaaccatggacgaaaatatcggcctaagcctaggcatcgaacaatttaaccggcaagatttttacgcctgccataacaccctcgaagcagtgtggctagaggctaacccgacggagaaaaatttctaccaaggtattttgcaaattgccgtagcccactatcatcttggcaatcacaattggcggggagcagtgactttactgggggagggtatccgccgcttgaagggttttcgccctgaccatcgggaagtggatatagagagtttatttcggtccagcgttttgctgttagagaatctacaaactattacgccagaaaatctcccccaatggttagaatccgctgcagcggaacaactaaccccc

SEQ ID NO: 441328 - DNA, 369 bp, Triticum aestivum
cccttctccccgacgggatgccagcaccggggcgatcgcccacggcattcgtttatggttgaggtattgtcaggcaggggtatttgctgctagttgacccggcttaaaatcacagcaaaccattgttggtcatcggtccacacttggagtggctctaggccatggtccgccaattgccggggaatggcgttgggattgttagcatggagggaaaatttgcgggatatttccgtcagaatggtttctccagcttgcagatccaccgttaaatcaagattttccaaccgcaccgtttgcttcgtgccactgcggaaatacatttcaatttgggattattgctgattaaatacagcccgatgggaaaagtta

SEQ ID NO: 441329 - DNA, 123 bp, Triticum aestivum
aattaccgcattcatggtgcagttaaatgcccgcatcaaagctgctataccgaacattctagtatccgtctgccctgccacctacaatctcgcttacaacacttttttgcaggattggttgga

SEQ ID NO: 441330 - DNA, 322 bp, Triticum aestivum
cttttgtggagaccacgggggaaacccctgggcaactgcgcctggcctatgctttttccctacctccctttatcagttcttctgagattcaaggggctgtggccaaggtgatcgccgtttgcgaaaatctagggcatcaattggaggaagcctgttttgatgtcactagtttaattgaaccctttgcccaaatttggaaagctggggtgggggcttccggcattcctttacccctgttggaatcggttaatcagtggttaggggaaaccagtggcactgcgggggactatctgcggggggtaaggaatatgcaggtgatttc

SEQ ID NO: 441331 - DNA, 477 bp, Triticum aestivum
ggaattgggagcgttttctaaccatgggagtgtaaaagccgaaaaacgacgcaacggaaatagttaattgactcaggtgaacaagatggccgagaaaagccagcaaggaaggtaatctaaggttattgtatccactagttcagggattgatgggcgcacaattcttaatatttttgaccattgttgctgatttccaggctgattgactgtggatttttgtggccagttccagaacaggtggagtagttcaagggatagtggtcggttaactgggggggactatggggacatttacctatgaaaggcaagtttacctggcggacacggacggagctggggtggtttatttcaaccaatttttgcaaatgtgccatgaagcctatgaaagttggctgtcatcagaacatttatccctacaaaatatcattagtgtcggggattttgccttgcccttagtccatgccagcattgattttt

SEQ ID NO: 441332 - DNA, 231 bp, Triticum aestivum
aatttttggccccgacttagaacaactccgcaccctcgggaaatcggtggaaacagccatggcggatattcctgggctggtggatttacaactagaaccccaagtcccggtgcgtcaggtacaaattcagtttgatcgcctagcggccgggcgttatgggttaaccgttggtcaactttctgagctggtagaaacagcattgaatggtagagtcgcctcccaaattttgca

SEQ ID NO: 441333 - DNA, 420 bp, Triticum aestivum
aagctcccttagctccttctgattaagcacttggtagtattcatcaagttctcgtccaacaaatattattcgtccccagtaatccttagaattgtgccagcgtttccagtactctgacactaatgccaggcgagtttggcggttttgtgaggtcaagatgccgatttgggcaatcccgaccacgactagtagtcctgtagcaattgcagtgattgtcgcgttgtccatttaaaattgggatagttagaaaatttgagccagacttaaggactacacagaaaatcttcagtctccccaatacagtgattgtgtctatgctttggagaagctttgtttcaagacgaaataaaatcctttcctggtaataaaatattctgcttcggtgatgataaggggtgaattaaatgaatagtcaaaatt

SEQ ID NO: 441334 - DNA, 384 bp, Triticum aestivum
tgggggctccgggggggaaaactcccaggcttggggacggatttccctctagccttgggtttagccagtagtttctcttttgagcgctgacattgccccccagtcggcaataatgtatctgtcgttaaccttgtctttgccaggcccatgctgatttcccgtgcccctgtccgcattagtttttttggtgggggaaccgattatcctgagtattttctccagcatggtggtgcggttctagctacggcaatcgacaaattttcctacgttactgctagtccttttctgagtcatttatttgactattccattcgcgtttcctaccgcaaagtggaattggttaaaaatcctagcgaaatggagcacgtggtttttcgggaatgc

SEQ ID NO: 441335 - DNA, 536 bp, Triticum aestivum
taataatcctagggacttagccaagttggcctcttgggaagattacctactttattacgaggcggaattgtcaccagcttgtgaacatatcttggttgataatactcttaataaagaaatcaagaaataaagaattctgatatgggcacaaatagcttaatctagggtcatagcaataaataacgaaaacaagaaaacacgaaatgaagataatcgccgtgactggctacaaggggggagttgggaaaaccatcacctcgattcacattgcccgttacttagccgacaagggaaaagtgttgctaatcgactctgaccctaaccgttcggtggagaaatgggccgcccgtggggaaaaacaacccttatttaaggtcaaaaatgaaaagtctgctccagcccatattgccgggaatgattttttggttttggacaccctcgcccggcccgatagtaatgaactcaaagaaattagccaagaggcccatctaacaattctgccctgcgtgccggatgccattagtcttgaccccatg

SEQ ID NO: 441336 - DNA, 369 bp, Triticum aestivum
aggggagtgcccagaaaagcggagattaaaagaaaaacagtgaccccaaaacaaactcccaaagaccactgtttcccactggggttgcccaggagcagtagtagtaagacaatgggaatgagggcgctggcaaaaaaaggatttaacaaacctgtgccagggagactgttacccaactccggtaaagaactacccatggcgcggaagggccattggggcaagtcaaaaatgtatagaccctgtagaaagaataagcccgagctaccgaaaattaatccccagttgaacggccaggtaaattgcaacggtagatagatccgcaacagtaacaccaacaggtatgaccccaacaccatggctaatttgggt

SEQ ID NO: 441337 - DNA, 353 bp, Triticum aestivum
aaattgattagcctgtcgtgcttgagcgtagttgccaactccagttcttgggtttgttctttttcccttttgctatcccagaccattaatttcaccgcaaccttggcgatcgccccatcgtggccgactgtttttgacagaaacactgcgccgaacccaccaatcccaagcaaggtttcaagtaagtacttgtccttcaaatgggttccctctaagcttttccaggactgtaaaaacataaactctataatcaagttgggatcttggtaaaacaatgatagttccaccaactcaggaaaactgtaaagattaataaagttgtttagtattgaaattttattttgagtttggac

SEQ ID NO: 441338 - DNA, 528 bp, Triticum aestivum
aatttagcagcatatgaaatcacagtaagtaatctggctgtaacagaccctgaaaatcccaacttctccattccatccggagagcaaagaagtaagggggttgaattcgatatcgcgggggaaatcctaccgggctggaatattattgcttcctatgcttataccgatgccagggtcaccaaggatgacaatctggagcctggtaatttgcttgagggggttccctttaactcggccagtttgtggtcaacttacgaaattcaagccggtgatttacagggtttgggatttggcctgggattgttttatgtgggggaacgccaaggtgatttaaataattcttttcaaataccgagctatctacgtactgatataagcgtattttaccgccgcaataactggagggccgccattaacgttaacaatcttttcaatatagattacatcgaagcgacccaacgccggactcgcgttgatcctgcggcgcccctaacggtaaggggaacaatttcggtggaattttaaact

SEQ ID NO: 441339 - DNA, 500 bp, Triticum aestivum
cggaaagggaagttggctttatggtgctagcgggagcaggggcagaaatcgataccagtaccgccaatggaagactattcttcgccgtgttcgccgccctagcggaatacgaggcagagttaatctcagaacggaccagagcaggactacaggcagcgagggcgaggggaaggatgggaggtagaccaaggaagatggatagggtaatgctccagatgttaatggaagcgatgaagaacccagaagcctgtgccaaggcagtagcccagaagctcaatatcagcaccgccaccctctactcctacgtcaatggggacggcaccccgaaagaagccggactaaggttattgagaaaagcccatggggaacagcaagaatcagagggaccccgataatctcattgtctgctccccttccccccgactgcaaagtagggatagggaaacatcgccctctgctctgaaagggagcattagcatttcacagggtatgggggaata

SEQ ID NO: 441340 - DNA, 319 bp, Triticum aestivum
ccggacattgtactggtgggagaattgcgggatttggaaaccattgcccttgccatcactgcggcagaaaccggacacttggtttttggcactctccacaccaactcagcagcgggcaccattgaccggatgttggatgtgtttccggctaaccaacaggcccaaattagagccatgttatccaactctttactagcggtatttgcccaaaacttagtcaagaaaaagtcccccaaacccggggagtttggccgggccctagtgcaggaaattatggtcattaccccggcgatcgccaacctaattcgggaaggcaaag

SEQ ID NO: 441341 - DNA, 380 bp, Triticum aestivum
tgagtgcggccgtttatctcggtttcaaacccaaacccagggtatatccctagaagcccaagcccagcgggccattcccctggccactgccttggacaatggtcgtcccaccttggtggaattctatgctgactggtgtactagctgccaagccatggctccggacttagcagagttgaagaaaaactatggcggttcggtgaactttgccatgctcaatgtggacaacaataaatggttgccggaagtgttgcgctatcgggtggatggcattccccattttgtttacctagatgacaccggcacggcgatcgccgtgacgtaaacgctcttccacatagggcaacatacgttcaataatttccgctcggctggggact

SEQ ID NO: 441342 - DNA, 458 bp, Triticum aestivum
cccacgacattgatgaagccctcttcctggccgatcgccttgtgatgatgaccaatggcccccacgccaacattggcgaaattatgaccatacccttttctcgcccccgggaccgggacaggattatggaagaccccacctattaccagctacgtaactacgccctcgacttcctctataaccgctttgcccatgacgacgtggcttagaaagttatagccaagatactactcccaaattgtttaggctaattccctgctttttgggagaaattgattccaacagtgcgctaggagtagttcttgagacgaatagttgctcgtactacatccaagaactttccgggggaacatggggaacatatagttcatttaagggtatgctaatcggcgtaacacacttttgcggatgatatacggaaaagctctggcgatcagggaattattgctcttctatca

SEQ ID NO: 441343 - DNA, 456 bp, Triticum aestivum
tgctctgcgccggatagtttgggggaagaccaactgcgaattttaagtttgtttaaacggagccaacaacgatggattactttgtttgggggaataattagtctgggtctattgtggctggtgtattactacgctccgatcgcctatccttgggtgacggatttgccccagattcgtttggcaggggttgggctagcggcgatcgcctatttgatggccaatttatttttgcaggtgcccctgagtgtgttgggggtgttatccacaagccagtccaagtttactgagacgattcccctagagccaaatcagatcgaacaacagttcaccattcccggcattaagttgcggcagattcccctggtgccaaggattagctcttgataacaaaggatttgcgctctctgctggggtagaatcggtaacgggcgatttttcctaggtttagccgatgtt

SEQ ID NO: 441344 - DNA, 399 bp, Triticum aestivum
cctgccgacggcgatcgcgccattccagggtggtgaggtagagaatgccaccactaacaagcactagcattaccagggccgctaaaaaaagggtgttgaggacaggagtaggagttgcttccacggtatcaaagactcttaaacaacgggaaatccaggtttaatcctagaagccgttccgaccccataccaccatgctgatggaccaggtgaacagaactaacacgcttacccaacctaatgtcaaaatgtccatagtcttttgttaaatacgccaataaaaacaagctttgccagcctttatcttacggcgatcgggcaaaattttaaagcttgcctcagggacaaaacgcccgagctaatctcccctggaaccatcattgtctctatccccttttt

SEQ ID NO: 441345 - DNA, 336 bp, Triticum aestivum
tgggggactgttggcctgtgaccggtggggagtggggcgtttggcgtaactcggcgcaaattatgcatcgactgcaagcactgctgttcaccggaggtcaggaagatttacggggtaaaaggattcttatcaccgctgggggcacccaggaatatctcgatgcagtgcggtttattggtaatccgtccaccggaaaaatgggtttagctctggcccagtcggccggcgatcggggggcaagggtgactctcatccatggccccataggggatttgcccatacccatgggagtaatcagtatggcggtggtcaacgccgagcaaatggagcaagcct

SEQ ID NO: 441346 - DNA, 547 bp, Triticum aestivum
aaagttaggcttgaaacctgttgtggccagtcttaaattgagtacaattttagggttttcatccatgttttctagaataatttactgggaaatttagttagaagttttagtaaatttttcgtattattagtgagcaaagtacggcggtaagtatcggcggcttttttaatcgcttcggcctgggtgggatagggatggatcaccccggctaatttgcttaagccaattttattaacaatagccgtggtaatttcagaaatcatttccccggcatgggaggcaacaatggtagcacctaaaatttcatcactgttggctacgtggataattttcaaaaatccctctgtctcgtcagcggcgatcgcccggtcaacctgggaaaagggaattttaataattttatagcctatgtctaaggcctcagccatagtttcatttaatcctacatgggcaatttctgggtcggtgtaggttacccaaggcatggttaaactgcttagtttactgcgtcctaaaccgaagggagaaaagagagtatttttaatca

SEQ ID NO: 441347 - DNA, 442 bp, Triticum aestivum
aatacaaaaagcgacgtttgagcaaaggttggattaataacaatactaaaccatcaaacaaaactaacacccccaatacctgggcgaaattcaaactgaaccaaggggcagtcaaaaccgtactatccaaaccccagttgccattcaggtaaatgtaacggattggttcgatggcataggttaatggatttaaactggccaccacctgcaaccaatgggccatgaagtccaaaggagcaagggcagtactggcgaagagtaggggtaaattagtgacaaaaattaccgcaatcaattcaatgtggcccggcagggcaaaggctaaacctaaacttagggccgttacccccaacacgattaggaaaacaatcagggcaatcattcccaaaccaaagctattgggtaaaccagctcccagcagagcactggccccgacaatcac

SEQ ID NO: 441348 - DNA, 441 bp, Triticum aestivum
gcaacaggccttagccggtttggaagaacgtacccgccgcattgtggaatttgtttttctccacgactttacccacaaggaagccgccgaaatgatgggggttagtgtgattaccgtttcccgtcgcattaaacagggcattggggctctgaaaaaagccttaaatacggaaattttttaactgtttagagtctatctccagtagtaagtagcaaaaattcagccaaggtcggcgatcgccctggtagtatggcaaatggagctttatgtctaacttttccattttgttttgagccattgtgttaacctatgctgcaattgacccccagtgccgcccaggaaattaaacgattgcaacacagtcgccaactaacccgccaccattttcgtttggcggtcaggcccggagggtgcgccggttggttataccatttggatttt

SEQ ID NO: 441349 - DNA, 372 bp, Triticum aestivum
ccctggactaggttaggatttattaatgtaaaaaaaatataagcacagtcaaattgtctccaaacttggcatctaagcttagcgtttgcttagaataacttaattgcgtttatttaaaaatcaataatttctcttttttggaacgaacaaatgtcatgaattcctcgctttaccatggtgaaaaaatccgccattggtttcctaactcctccctagattttgtttcctcactacatgcaatgttggacaatttgtcaaaatggtttcgtaatttacctatcccaaattttagtaacaattccttgtttctccgtggagttagtaaagttcccaactctccccaatttaatgacccaattcaaaacctggcct

SEQ ID NO: 441350 - DNA, 532 bp, Triticum aestivum
ttttgggacagaatcaagtctttactcaactttgccaaaacaagcctgcagataagattaatcaactgttacaagaccgctaccatggcattattcccccagaagaattacaagataaaatcactgctggagaaagggaggcattggcacaacaactaagtgaaggcggggaaatgaatttggatgccatccgaaccgaagggtcaggggcagaactagatgctaaacttaaccagattgtcgccattggtggggaaaatttagacggaagtggtagtggtactttaaatttcagtagtccctatgtttttggcggtggattagtcggcttgctggtgttggtatggtgcctgcaatctctgaatacttggtcaaatttacgggaaaaattgatgggggaagagggagtctattatcaaattttagaaaagtttggcaaagctaaacctaaggtttctgaaagtgatttatttctctataacaaagctttggtggagttagaaaagcaggctaaaaaagctatcagtattga

SEQ ID NO: 441351 - DNA, 509 bp, Triticum aestivum
tttgaccgaagctggactggaactgaccctggctaccacgggccgcttatcaacaccaaccacttccgttgtgggcaatgcactaattgtagatattcccaatgccatcctagccttgccggatagtgacggactgcaacaggaaaaccccaccgaagaaattgccctagtgagcgttacagcattacctgataatattgttcgcattgccattaccggggtcaatgtgccgccgacggttgaagttaatgccacagaccaatccctggtactggggttaagtccagggaaaggggtggcagatgaagaggatggcaatgatgctatccaggtagtggtgaccggtgaacaggatgaaggctatgcggtggacgatgccacaacggcgactctaaccgatactcccttacgggacattccccaatcgattcaagtggtaccccaacaggtgttggaggacaggcaaataattcgtgcttcggaagcactgcaaaatgtcagtggtgtgc

SEQ ID NO: 441352 - DNA, 396 bp, Triticum aestivum
tcttgccttggaggggattgccctggatgcccaccacagtgaacgtttccgtcacggcttgatcggccaagattggcggattcaactgttccgccacccgtcgtaccccgtcgtaatagcactgcttccggattagtggccagttgatcaatccagccaaaggctccaccagcgcttgtgtcgttgttattacccctggggggagtagacaatgccccagcaattttggggggagcggattgaaaaataacgttaaattccccccggtccagggtgggaacaaatccctggggaatgaggggaataatggctaagcctgccattaaactgactagggccagggccacaatccaccaacggtgtgccaaagaccaagctagaacccgttgataacca

SEQ ID NO: 441353 - DNA, 385 bp, Triticum aestivum
  unsure (1)..(385): unsure at all n locations
aggatctgaagaatctattacacaaaatgctttgttagcgtagatagtatagataatatatttcgtagtattcttaccgcgcaaaaaataactgaagaacaacataatcagttagaaaaatacataaacacgattgaggatttttgcagaatgttcatgccaaaatttgagtctatcaatgattcattaatgagtgatgaagagtattcagagaaagtttataaagaattttcatcacccaggtatgactctaatgagcagaatgagcagaggtacaaatacaactataaatacagtaaggtaggtgaaatgtatataatgaatagcatggcaagtttatttcaccaaatgcattcaatcngagaaagcataaaatttttgtatg

SEQ ID NO: 441354 - DNA, 450 bp, Triticum aestivum
atctgcaccggcttattaaactgactagccataggcctgtgcagccggggaaaacgttgcaaaatttcccccaggggcaacatgcgggcccacatgagctcatcccgcagggaaaataccatctgcttttgcacatgcactgtttgatgggccggcctggaaagtagcaccacatcatccacggactactccaactgcatgatttcttccaaaatttcctgcaactgggccgatagggtgccataggaatccatttccagggcatcgaagttatgctctagccatccctgggaccttggctgggcccgcaacatggcttccccctgcggccggattgccaactggtccgccaactgtctcagtttcagcgccatggtctggaaggtgccaaaacgttgccccagggctcccacagccgtttgcaattgctgattttgtaaagacaggcta

SEQ ID NO: 441355 - DNA, 441 bp, Triticum aestivum
ggtgaagtgaatcaccacagggactgatttggattgaccactggcgggggccgtaaactgcatttttctggctgccaatagggcctggcggttgacctcgctgttgccgtgggcattggtgatggttacgctggtcacaccaccactatcatttactgaaattaatactgtagcactaccttcttccccctggaggatggagggataactgggtttacattggctaacgcactttaaggggtctggcttagcgggggaactgggagttggtttcggtttagggggagcactactagcaacgggattggccgcaatgggaccaacatttgcccctgcattgcctgcaccgggccgttctgctctgggttggccggagcccagactagggccagagctaccaccaccactggcaatgggtttagtagctgtccccggtttcat

SEQ ID NO: 441356 - DNA, 410 bp, Triticum aestivum
caggtcgactctagaggatcgggggaatgtggagcttgatattagctattttcatttggcccttccgtcccaatcaacctttgcggcaaatggttgccaacaattacagcattttaggcaattatctccgggccatggccgccgctaactttagtcccgatgacccccaagctcagcaattggtggtcaaactgcgtcaaaacttgcttaaatctcggcaaactctggtggccagccagcgaggattatggggacaaagtaaattaagggaattattattagttttaatcgagcatacggaaagattaaataaatgcctaatgttgctcaatgaaattgttaatttccacaatctaccccaattacaaacagtggaaatcctaatggaagatgcgtttaatgctctgggg

SEQ ID NO: 441357 - DNA, 474 bp, Triticum aestivum
ctatccagtggcaatttagaagactatggccccattgccggttctttccagccagtgttaggggcaacggaaccggaagatggcaacctcagcaatagtgttttgtactatacttttcctgccacggaaaatattcgtctgtgggccatgggggccgggggcgctttcgacgatttcaccaatacagtcaatgttttagacggggatggagcctttggagcattgactacctttggcacccgtagcccgatctatttcttgggggaaggtaccggggcggccctccagggcacctgggataaattacaacttagccttggttacctggcccccgctggcaatgatccttcccagggagaaggattatttaacggcagttttggcacgatcgcccaggtaaactatgatttcagcgataatctgaccgtagctgtaacctatagctatggctataacaccttggacactagcacc

SEQ ID NO: 441358 - DNA, 420 bp, Triticum aestivum
attctatctggcattatttcggaacttcaacgttctaccacaagtaaagttccaattctaggggatttaccggtgattggagcattgtttaggcagtccacagacacaacagaccgttcggaagttattattctcatgacccccaagatcattcatgatagtacagaggcgcagtttggcttccgttacaatcctgacgcggctacggcggaattcctgcggcagaaaggatttcccgttcaggctcagccatagttaaattcctagcgggagactaaagtgttgaccagccgttccagaatgttaactcgataatagggttcacaaatctgggatagctggtttgcttttggttgataatttctaaacaagataatgttgccgtaaacgctttgaggggggaaaagtttatccaactca

SEQ ID NO: 441359 - DNA, 370 bp, Triticum aestivum
agaggatcttcctgcaccattttgctcagagccatacccaatttttcgtccatgccttttttcttgggcttaatggcaatggagatcaccgggtcggggaagaccatgggttccaaagtggccggatttttggggtcacagagagtgtggcccgtttgcacatttttcatgcccacgatcgccacaatgtccccggcttgagcggactcaatttcttcccgggaatcggcgtgcatttccaccaaacgaccaatgcgttctgttttaccggtggcagtattgagaatggtgtcccctttactgagggtaccggagtaaatccgggtgaaggtcaaagcaccaaagcggtcgtccataattttgaacgcca

SEQ ID NO: 441360 - DNA, 268 bp, Triticum aestivum
aggatccgttaaatccaaagatgaccagctagtggccctccatgtggtcaacgccgttgactagttgatgattgtcaccaaccggggcattattatccgccagtccgtgaacgatatttccccccaatcccgtagtgccactggggtgcgggtacaaaggttagatgccgatgatgcgatcgccgctgtggccctagtgcctccttctggggaagaagaattggcagaaatgtcggaaagcgaagagagctgatggccccccaaccta

SEQ ID NO: 441361 - DNA, 341 bp, Triticum aestivum
gcaggtcgactctgaggatcccgccagctataccaccaggcaatggcactggcgaagcaaaaaataccaaaggccgccatggtgtaaatccccgtttgtcgcaacactaacggcaactgccacaggtaaaattcttttactttgccccattcctgtcggcgatcgccttggtaaatctggctgtaggccctagtgattaaagcttgtaagttttgcctcatgcggggattgagattatgggtttgggctcgggccaggtcggcggaagtagcccggggtaaactagccaactgttgaatgtcctccgtggccaggaacttgatccccgggtaccgagctcg

SEQ ID NO: 441362 - DNA, 452 bp, Triticum aestivum
cagaataattggcgatggaggtaatcaccgcagcgtgatttgccatggctgccagcattaagggggtttttccttcccatagggtttggtccaggtcaacccctgcccggcccaaggcgttaaccatgaccgcttgggtctgggcattcccatgggtggcagtgagggctgttaggaggggcggatccccattgctggaaaaattaccgtcggcgccggcattgagtagttgggtcacaatctccacatgtccctgggcgatcgccaaatgtaaggccgtgtcccccgcttgattgacggcattgaccatatctttggggcccttttctaacagaatggtcaccatggattggtaaccttctaaacaagcaatgtgtaaggctgtatcgccgccatccccagcctgggtaaggggataaccgccctggatgaaagctttcacctgatcaacg

SEQ ID NO: 441363 - DNA, 338 bp, Triticum aestivum
aggatcgggatggcaagtgattctcatcgagcaaatggaggctttgatggatcgcttcacaatctttatgaagcgctttgagctttccgatgacttcatggccaagatgactgttgagcaaatgaaaacccaactgggccagtttggcatctcccctcagcaaatgttcgaccaaatgaatttgacactggaaagaatgaaagccgaaatcaagtagacttcacggtgtcgaaattgtctagccagacgttcctcaccaatgtcagaatgatgggagtaggttccccgtagcaattgcgagaactatgcccaccctggatccccgggtaccgagctcg

SEQ ID NO: 441364 - DNA, 382 bp, Triticum aestivum
aactgtctgcgagggaatgggctgggtcggtactcagaactagggtcttatggcctaattccgcacaacggagaccggaggccgccgcaacggaggttttaccaaccccccctttacctgtcatcagaattacgcgcatggatggatctgcctagaaagatgaaaaattggagacggaatgttacatattgttaacttccatgtctgcattatgccgggaaagccagatttcttgcagggttgtggcataactctctaggctgtggtgccgacggtaagcttgggccatggctgctaattgctgatggatgcttgaatcggccaacttttggtcaatttctgcccatactagggattgggcttgccaatccactactaaact

SEQ ID NO: 441365 - DNA, 504 bp, Triticum aestivum
  unsure (1)..(504): unsure at all n locations
ggatcgccgttgtagtgcccgcagtcttgctaatagctctgccatcacaaacggttttgttagatagtcatctgccccggcatctagtccttcgacacggttttccggttctcctaacgctgttaacatcaacaccggcaaggaattaccctgggttctcagtttttgacagagttccaaacccgataatcccggcagtaaccaatccacaatggcaagggtgtattccgtccattgattttccaaataatcccaagcttgggagccatccgtcacccaatccaccacatacttttcactaactagcactttcttaatagccattcccaaatccgtctcatcttccaccagcaaaattcgcatcgcctctgccttttttataacggtctgatcttagcgggggaaggagattttcacctgaatttcatacccnctttggcagactgggaaaatcttggacaaattcccaatttgaggtggtgtgatgaaaacaattcaattagc

SEQ ID NO: 441366 - DNA, 433 bp, Triticum aestivum
gtagacctaggcatgcaaagtatcttgatttctggtgcatgctctcctcaaagtttggtcaaggtggtcaactttgacaacgttatcggtaccattgggaatgacatcattattggtgatgatcaagagaacattcttgatggcggtaaaggcgatgacagcatagttggcttccaaaaaaatgacactttgatgggcggtcacggcaatgacactttgaatggccgtgctggcaatgatctgattatcggtggtgccgataaggatattttgactggtggtatgggtaatgacctatttgactacaccaatcttaaggattcccagctcggcctctcctggttcaacgttaatttgtccaaggttgacgtgattaccgatttcactcgtggtgaagataagttcttggttcaatctgcccccaccaacaacg

SEQ ID NO: 441367 - DNA, 440 bp, Triticum aestivum
ccaataaccatgggtgattttttagctctacgtttcccgttatccccggtatctgatcagttttaccctgggcatctttttctccgttttcacttggctccagcccctattaaaaaatcgtgtcggggcgatcgccctgatgggactgctggtcagtggattcatttttctctatttcactctgcgggccatgttaggattgaccgtgtagagggagtttgggctaatctgtccaggctcggacttttttgttgccgaggagcaggtctatggctaccagtcgtcgagtttcccgggtgtcgtccctaattaagcgggaggtcagtcaaatgcttctccacgaaatcaaagatgaccgggtgggcacaggcatggttagcgtcacggaagtggaagtttccggcgacctacagcacgccaaaattttcgttagcatttac

SEQ ID NO: 441368 - DNA, 355 bp, Triticum aestivum
aggatcgccgacaggtcacaggcccgccgcaacaaggctaattcagtttcacttttaacttgccggaggggatgcaccaagggatgggaattcactaaagcttggggaccatagccttggcggggataggcggccaattgtttttgccagtgcttgaggatggtttgatttaacgcttcatctcgaccgaggtggtaatggattttatctgccttttccagatatttcggtaaatgctcatccaattccccaatgggataggcaatgtccgacccaaagctggattgaaccccctccacaccgtagcgaatgcccgtccaggtttccttggctggatccccgggtaccgagctcg

SEQ ID NO: 441369 - DNA, 309 bp, Triticum aestivum
aggatcgccctgagccaaagcaagtggccgaatacggcaaacactggcagccctatcgtagcctggctagatggtatttgtggcggaggttgtccgcaacagctagccagattcactcgaaggcgttagctctgaaatttttctagtcaaaacctaacaccattgatccctgagaatctctgcaatgcggcgggccgatccagcttgtcccagcctttcccggccattacaggcgatcgcctctagtccctcaacatcatgaagtacttgttgtaaagcttccccagattggtcaggactatgcaacaa

SEQ ID NO: 441370 - DNA, 490 bp, Triticum aestivum
ggatcagtcaccagttctgccaacatttcagcgttacccaggataaccgctaataaattgttgaaatcatgggccacaccgccggtcaggtgccccaccgcttccattttttgagattcccgtagcctttgttccattgccatacgctcagttatgtccagcatactcccaaccatacgggtggctttgccttgtccatcgcgagtcacaaaaccacggtctatgacattcgcgtactggccatcgcttttcataaatcgataatcgcattcccagtaattttcttcaccgtcgataacttgataaatactgtggagaacacgctctttgtcatccgggtgaatgcgtagcgtccaggattctagtcccggctccatatctaacaaagcatagccaaacagatctgttatggagtcattccaccagacttgattggtagcaaaattccagtcccagatcacatcattggcggctttggatattaactgga

SEQ ID NO: 441371 - DNA, 335 bp, Triticum aestivum
tcggagacttcggggcaattgttaaaggcatttaagagcctgttttaaatgtcctcctggcctccaatttggggggaaactgagtgaaagtcccccagtattgccggagctttagtgaagagatttagggggctgaacaaaactgctaaacacgttctaagcaataaggttcaaggaatgaaaatgactcatacaaacaggttattgttctcattcccagattaaattaacgttgtattttttgaaattttcgtctttgctaatgacggaaaaattatgttgctgagcctgggcaataatcatacggtcaaaaggatccccgggtaccgagctcg

SEQ ID NO: 441372 - DNA, 508 bp, Triticum aestivum
tcccggtcccatgggtcattgaccacacagcctaaaccactggtggccaaagttcccaaagcaatggtgcctagtaggggtaggggtggtagaccttgggccgctaaacacactgcccacagcgccggaatcattaaaatcagtcggccggcgggtttatgccagcgcaacaggtaaatgattgttaaccagaggggcggggaagatggggtttgggcaaccatagaaaaattaaaggactactagggggaaggggggcggtcactgctccaggcccaccaaccctgaccacattcacactggtaaaattcctgccatttgcgccgtcgatcatcccccaacactggcgatcgccgattgatccaagcccggagggcctgacgggggccagcttggcattggggacaacaaaaacccctggcatgaacagtatcctcaacccaagggggaggagtggggtcaaagactttcatggggttctggcatgggtaagggatggaaaaattcg

SEQ ID NO: 441373 - DNA, 475 bp, Triticum aestivum
agtgcccaattctgtgacgattttgcggaacggtttacagcggcggcccgtacttaccaagttcggcctcaagctaaggaacatttagccattggggaaaaatgggacaaatttaacttttctttggagaaaaaacgcattctcaacgacagcaaagtggttaaagctgaagataacgttaagcaacattcccatacccatcaaaggctgtagttgcaaagtcccaacggggtaataccaaccttcaggaaacaagggattgttgttttttcctagcccgatgttgggcaaaccaatcctgtaactgttcacggcactgttcttggcacactcctcctaagctttgtaagtgatggttagaggcagcgctggcggccaaatcgaacacgctgtcgatggtgccggttttcgggtcgggggtgccataaactaataaacctaaacgggcttggataatggcgccggtacacatggg

SEQ ID NO: 441374 - DNA, 411 bp, Triticum aestivum
tattgctgagaatggttgcttctagccccacatttttaactgctcgactgagggacaaagcctgttcgtagtaatttaatgcctggtcataatcctcacgggcatagtaaattgtcccaatattatttaaggttaaagcttccccatcccggtctttaatttcccgacgtaggactaacgcttgttgataatagtccatggcttgattaagttcacccaagccgtcatacacgtaaccaatattgctcaaaattgctccttccaccaggcgatcgccagtttcttgggatatttttagggcttctttgtagtaggttaaagcttcatctttttcaccaacactatcatagagcaatgcaatattatttagtcgtatcccttccccagagcgatccccgggtaccgagctcg

SEQ ID NO: 441375 - DNA, 511 bp, Triticum aestivum
cggagagtgctgaaatgagacatggtggatttcctccagagaaaaatgtcaacaacaacaattgagaagtgggaaatgccgccatcaaaacggcttatcttaaactactaacccaacggttagtctttgctcctgcgggaacaggagaaagcttgttagaactccagtcgctgatattcagccacagaagcggaggcaggccgagccctttgtcgggcccagtcacgaagcgcggtgacctgctctaccatagtgcgcgacaggggcaacgtcgatttgatcgctgcgataatgtcgagctggttaaattctctttcttgggcaaaggcttcgtacatagccgctacgatcgcctgctcaatctctgctccggaaaaaccgtcggaggtgcgggccaattcccccaggtcaaaacgggaagtgtctttgcgccgtttatggaggtgaatgcggaaaatggcttcccgctcttcggaagaaggtaggtcaacgaaaaaaatctcatcaaacc

SEQ ID NO: 441376 - DNA, 297 bp, Triticum aestivum
ctgtttctttaatcagaccaaagttttccggtctaaagccagcttcaaactgggtttgttgattgtattttgccttgcttaactttgctccggttaagtctgcccccgtcagcaaggctccatgcaaacaggcatcttcaagattagccctggttaacaaagctccggcacaaagggcattgtttaaatgagctccctggaggttgactttaagcaaaaaagtttttattagagatgcttgccttaggtccgccttagctaaattcgcccccgacagatccccgggtaccgagctcg

SEQ ID NO: 441377 - DNA, 542 bp, Triticum aestivum
caggtcgactctgaggatccggttgaagaaagtggatttacctgtattgggctgaccaataaaagctttctttccttgcacatctggacgactggactggactgaccccctttggcaatgactcaccatctccgccctactctcctaaggtaatctgcaccaattgggcttcactacggcgcatggccacttcggtggtgctaccaatgcggaggtggagtggtccccccaaaccagccttgcggagcaattgaattggcttatcaggaattattcccattgcttctaggcgattaactaacccctgaccgtggtttcctagtaaaattttctccacaaaagccaactgacccaccgataaatccaataacgtcatggttttcccaaaactgcaaataattctcaactattaagttagcattatctgttcagaataaatatcaaaaatcactggaataattgtgagtataatcacttaccattgattaaattccatgcaacctatggaaaagtcctgcccaagacagatgctgggagcattg

SEQ ID NO: 441378 - DNA, 211 bp, Triticum aestivum
ctgcaggtcgactctagaggatcgccggagggattttgcaaggcattacccgcaatcctttggcagccccttaaattattggtgtcaatgcgggggctagtttggtggcggttaccttcatcgttttgctaccgggtatttctccttccttgctgccagtggccgctttttgcggtggtttaacagcggcgatccccgggtaccgagctcg

SEQ ID NO: 441379 - DNA, 498 bp, Triticum aestivum
ctgcaggtcactctagaggatcgccgtgaccgtggtagtaatttgggcggcaaagggatgggacgcatcgacattgactgcaatgctatggcgttttagaaatttcggtatttcctgtggggttaaagctccaacgtgaaccgtcaaacattgatgaatcggatataaatgcttggcctccgatgtggtgactgtcaccagacaatttattccctgggcaattaacccttcggctacggcacgactatccaccgttccaccaattaaccaaacggttgccaggctatccaccatgatttaagtgcttacaactggaatttttcacccaagtaatattgccgcaccaaaggattttccgataactccccggcactaccggaagccaaaatttgcccgtcccgcataatgtaaccccggttggtaatggctagggtttcccgcacattatggtcggtgattaaaatgcccatatttcgttcccgcaactgggcaatgata

SEQ ID NO: 441380 - DNA, 461 bp, Triticum aestivum
ttgccctagctcaagccaaattattagaacaagaaagggaaattcgtcaacaattaatagagcaaaataaagctttaatgacggccacaaaagccgcagaagatgccaaccgagccaaaagtgattttctggccaccatgagtcacgaaattcgcacccccatgaatgcagtgattggcatgaccgggttattgctagatacgcatctaaatacccaacagcaacaatttaccgaaaccatccgcagtagtggcgaagccttacttagtttaattaacgatattcttgacttttctaaaattgagtcgggacaatttaagttagaaatccatccctttgaaattcagcaatgtgtcgaagaatgcctggatttagttgcgccccaagcctttgcaaaaaaattggatttggtttatcaaatcgagccccaggtacctatggcgatattgggggatttaaca

SEQ ID NO: 441381 - DNA, 390 bp, Triticum aestivum
gactctagaggatcacgctgggaatggaagcaatcagttccaccagaaaggcaatgggcacccgctccggtgcaggtagaaggttttcgctggtcataaccgccacggccagccccaagggcagggcaaaaattagggcgatgaaggaactaaccaccgagccgaaaatatagggtaagccgccaaacagttgcccactgctgtcccattgttgactgacgatgaattcccaaccaaacttggcgatcgccggtcgggcatcggtaaaaaccacccaggcgatccagccgagaatcaccactactgcgagggaacagagacgggtcaactgtttaaagccccagtccaaaccattggtgagggaattcccttgggtaatatcccctcccc

SEQ ID NO: 441382 - DNA, 489 bp, Triticum aestivum
ggtcgactctagaggatcattaccgacgccctagtaggggaaggctcatccccccgccacaaggaatcccccgtttccactaaactcagacaacgagaagttgttacccccaaacgatgcaacgcctcagcggccaacacttcccttaccccacctttgagggttaggcggccatcaccgccccgggaatagggagtctggccagagcctttggtgccaaaatcgaataattccccgtttactccccgcacttggccgtagagaaaaccccgaccgtcacccaaattaggattatattcaccgaattggtaaccgtggtaacgcagagctaaaaatggccttaccccatggaataaaccgaaagcttcaacgaaattatcatccttaacctgacttggctccagacccaacatgggcaacaggcgatcgttacggaatctcagtttatgctcaggaaaagtcgctgctgacactgggtcaaaaaattca

SEQ ID NO: 441383 - DNA, 467 bp, Triticum aestivum
caagtttacagcgactttaatatcattaacttcaccgccggtaacaccgttgctcagatggctggttggtttaaaaagccagtggaatccctagcggatttgcggggtttaaaaatgcggattcccggcttgggagggcaggtaatggctcaactaggggtcaacgtccaggtgattcctgggggagaactattcctagctctagaccggggcaccattgacgcagcggaatgggtagggccctacgacgacgaaaagttagggctaaataaggcggccaaatactattactatcccggttggtgggagccaggccccagcttggacgtattggtaaaccaaagccaatgggcgaaattgccgccggaataccaagctattttccaggaagcggcccgtagtgccaatctattgatgctatcccgttatgaaacttttaatagcattgccctgaaaacattactgga

SEQ ID NO: 441384 - DNA, 472 bp, Triticum aestivum
  unsure (1)..(472): unsure at all n locations
aaccaaaaactgcggggcatcatctggtttcgcatggcctattacactccggtaattacctctattgtggtggcaggcattgcctggaaagccctctacgcttccaatggcatcctgaatcaaattcttgccctactgggatttagcgatggtattccttggctcaccagtcccaatttagccctgtggagtgtgatggtggtgacagtgtggaaagggttgggttattacatggtcatttacctggccggactccaagccattccccaggaactctatgaagccggggcgatcgacggagcggacggttggcgacaacattgggatattaccattcccctcatgcggccctattgtttcttagtaggagttttatcttccatttccgccctcaaagtttttgaagaggtgtatatcatgacccagggcggccccctcaacgcttncaaaacggtagtttattatgtctatg

SEQ ID NO: 441385 - DNA, 419 bp, Triticum aestivum
gtgtctgccccacggggatcttgaccaatggccgtgctttcactttacaggtcgatggtcttgaagtagttgaggacattgaagcccgttaccttcagggaaccgccaacattttctggtgtgacagggcgatcgttcaccttagtaaactgatttgtcccatctacagcagagcgcacccgccaagtagctccactggaagcgttacctgcccactggtagctgagaacgccagtgaggttattgattgtgtcgcccatgcgaatatcactagcggtgctgaagctggaaccaaaaccatccagattgctaatttctgcgttctgcacactcaggccatcatcgtaggtaatggtgcgagcaccgatttcctctcggtatgccccatagcctgccacattagcatcattaaactgggt

SEQ ID NO: 441386 - DNA, 450 bp, Triticum aestivum
cctggtgggcctgttgagttgcacttcggtgggcttaattagggataaaagctccaaataacggctctcagccgtctggtcccagggctgcagcaccatggtttgcactgataattcccctgtaaactcctgctgaaaggtttgaataccagtcaaaatttgctccaactcaatgccggcgatcggtcggttaattctttgtaactggtctggccacaatccgtctaatttgacagaaatcttgtctgctaaggagagctcttctcttacctgagcatcatttaacaaagtcgcattggtgagtaccagggttaatttcccagtcaactttttaatgccttcgagaatttcccctaaatttttggctaacgtcggctctccgctgccgcttaaggtaattacatccacctcccagggggcaaactgggccaattctcgcaaaatgtcagc

SEQ ID NO: 441387 - DNA, 583 bp, Triticum aestivum
gcaggtcgactctagaggatcaaactagccgattccagcggttgggcaatgcgaatcaataaatcgtaaccctcggcgatcgcgtccacaaatcgatcctgcagagttaactgcacttccacttgggaatgtaaagccataaacttcgccaccagcggcgcaatgtacatggtgccaaaggtcatgggtgcattaactcgcaacagacccttcggttccccatggagttgggacactgacaattctgcttcctctaaatctgccaaaatttgcaccgatttttcataaaaggctatccctgtgggggtgggggtcactttacgggtactgcggtggagaagctgtactttaagctcattttctagggcaatcaccatcttattcaccgttgatcgccccagattcattttccgcgccgccgccgcaaaactgccctcccgcacaacttgggtaaaggcgtaaatactttcaagtttgtccattgatattcctattgtccctattttggatgcaatctgtgcttaaaatactatattgtctatattggggatgcaaactagaatgggaaccaaggtcacaaacc

SEQ ID NO: 441388 - DNA, 505 bp, Triticum aestivum
cctgcaggtcgactctagaggaccacttttccccacgaatttttgcagttttgcgggattttgtcacaatctttttctaaaacttggattttacccggacttaaaagttaacctaactcaaaggatgtaactccgtaaattttatctagggcgatggagggggcttgcccagtgtacattcgagcagtttcaaaaactacctgcaggctatatttcgttgctagagtgatcgccgcttggttgggttctggcacatctaggtaaatggtattttccgctgtaggaattgcttttagagctaaaaagataatttccgctacctctggagtatcagcaaacagagggccaattttgtaacctactcggcaggggcgtagaacgccataaccccgtaaaatcccatcttcttggtaggcgatcgcctggtgccccgattgatgacaccatgttcgtaaaaattcttccctgggggcaggaaagcattgatccccgggtaccgagctcg

SEQ ID NO: 441389 - DNA, 209 bp, Triticum aestivum
caggtcgactctagaggaccctgatgggaaaaatctgcccccactaagttaccccggttatagtctttggcttggctagggcttgcgaggctccccaaagcgaggataaaagtagcaactagaatgccagtccggactacgaactgccatcggccaagggactggggcttttccctctggaccctggcgatccccgggtaccgagctcg

SEQ ID NO: 441390 - DNA, 488 bp, Triticum aestivum
gggagtcccggtctgttatttcatgctcgggagcaaatgcttagctttacagcggaactgcggcaaaagttaatgcaaccaccaactagtcctctagcagcctttgatttggccaagatggtggatggcaacttggataacagtgcccaactctggttagtggactatctccagtatcactattggcatggccaccaccaacggccatggttagaaattctggaaaaagcccgtaaatacctggccgcctacgttcaacctcggctagtgtgggaaacgactttcctcgccctttatcgtttagaaaactctggcgatcgccgataattccccaataactagccccaagattgttcttgctgaacggttccaatgctaagcctgcctgacaatggggacaaaacaggcgcaaaaggggcttagtcggacaaaacggtatcctatgctacataattttttcttaacctactcgtagtatggggtcttat

SEQ ID NO: 441391 - DNA, 461 bp, Triticum aestivum
cgacttaatctcaatttggggggttagttgttttgtttcagcggattctaaccattgggggagattttctggcgtaatagtttgtagattctctaacagcaaaacgctggaccgaaataaactctctatatccacttcccgatggtcagggcgaaaacccttcaagcggcggataccctgccccagtaaagtcactgctccccgccaattgtgattgccaagatgatagtgggctacggcaatttgcaaaataccttggtagaaatttttctccgacgggttagcctctagccacactgcttcgagggtgttatggcaggcgtaaaaatcttgccggttaaattgttcgatgcctaggcttaggccgatattttcgtccatggttaatggatgcactgtcgatatgtcgatagaggggagggtcaatattaggtcagttgggatggagccgaggtaatttt

SEQ ID NO: 441392 - DNA, 338 bp, Triticum aestivum
tttttcccctgaagattgtcaagggtactgcgaacatgtaagcgaagcatttgacccagctgactactctgtattagggggggattgatgcaaccctgctgatgttgtaggagccgcctataacgatgcccaaggcgtaacggcggaatttaatttaaatatgttgcgccatttaaattggcgttttcaaggtaattttgcgttggataactcatgccatacggctgatttgaatcagcagaaatcccaaattgaaatgtatttactcagtggcacgaagcatacggcgcgggtggaaaatcttgatttaacggtggatctgcaagctggagaaacca

SEQ ID NO: 441393 - DNA, 180 bp, Triticum aestivum
atccaatccaagccaatcctgcataaaagagttgcaagcgagattgtaggtggcatttgttatcggatacaagaatgttcggtttagcagctgtgatgctggcatttaactgcaccatgaatgcggtaattttatcggctcgccagcgaatccaggccggatccccgggtaccgagctcg

SEQ ID NO: 441394 - DNA, 328 bp, Triticum aestivum
atcgccggtaggccggccgcattggcgggggggcagggggcaatccattcaatatttttttgcaccacgtcggggggcgatagatgggtccattccccgatttttgggggccgatgattaaaaacgggcaaaattagggcgtcatactgttccataaagccgacaatttggcgggaaatcacctgcatattccttaccccccgcagatagtcccccgcagtgccactggtttcccctaaccactgattaaccgattccaacaggggtaaaggaatgccggaagcccccaccccagctttccaaatttgggcaaagggttcaattaaac

SEQ ID NO: 441395 - DNA, 516 bp, Triticum aestivum
aatcgccgtttgccagggttggggtaagggcgcttttttcctttccggtagggcaatgcagacatggtgggtttgggcccgggccagcagttgggcagactcggcttggctaatctcataatcacagcaaaaacgatgggcactagcctgggtaatggtcaagttcaccaacaggcgatcgccgcagtgggcaggggcgaaaaaatcaatgctggcatggactaagggcaaggcaaaatccccgacactaatgatattttgtagggataaatgttctgatgacagccaactttcataggcttcatggcacatttgcaaaaattggttgaaataaaccaccccagctacgtgcgtgtccgccaggtaaacttgcctttcataggtaaatgtccccatagtgccccccagttaaccgaccactatcccttgaactactccacctgttctggaactggccacacaaatccacagtcaatcagcctggaaatcagcaacaatggtcaaaaatattaagaa

SEQ ID NO: 441396 - DNA, 364 bp, Triticum aestivum
caggtcgactctagaggatcgccatcgttttggttcttctaattgcggtggtgctattacggggcaatcaatttcccctgatggtaacgcaatacagttggcgcaacaccaacatcggggcccaaacccaggccctgaccatgacttttaaccatcccgttgacccggacgtaatggagtcaggcttggtaattgacccacccctggcgggcaaaaccatttggcaggggcggcgttggttctacaccctaacggacatcccccgttatggcactaactatcaattgaccttacctttacctgccatggtgcggggtccaaggggacaggatttcaccagtctgatccccgggtaccgagctcg

SEQ ID NO: 441397 - DNA, 458 bp, Triticum aestivum
tgcaggtcgactctagaggatcgtctccaaaaagttgctccgtttgaaggcgaactttaccgctaccttaatttcaatgagattgataatttcgaggacttcggccgagtcattcccctagaccaaatgcccaagattgaggatattttgggaatgccagtgggagctaagtaagccgtaaaattatggtgggccttttatggctcaccttaattttgactattcatttaattcaccccttatcatcaccgaagcagaatattttattaccaggaaaggattttatttcgtcttgaaacaaagcttctccaaagcatagacacaatcactgtattggggagactgaagattttctgtgtagtccttaagtctggctcaaattttctaactatcccaattttaaatggacaacgcgacaatcactgcaattgctacaggactactagtcgtggtcggga

SEQ ID NO: 441398 - DNA, 446 bp, Triticum aestivum
tgacaacccaccttgtctttgaccaaatgcctttcgacataaatggcttcataggctaaatccaaaggacggataaattcccctttaaaagagtgcagagcctggagcaaggaaaccgtaaaagcagaggaagaccccagaccggtaaaagctggtaaatccgccacgttatgaagctcaatatctttttctaaaccacagaatttcaagcattcccgaaaaaccacgtgctccatttcgctaggatttttaaccaattccactttgcggtaggaaacgcgaatggaatagtcaaataaatgactcagaaaaggactagcagtaacgtaggaaaatttgtcgattgccgtagctagaaccgcaccaccatgctggagaaaatactcaggataatcggttcccccaccaaaaaaactaatgcggacaggggcacgggaaatcagcat

SEQ ID NO: 441399 - DNA, 183 bp, Triticum aestivum
ggtggaagttaatgccaagttggatttggcccaggaaacattccaaagttttcgccatttaccttttgctcaacgggggcaatggttaagaaaggcggcggatatcctcgaacaacggcgggatgaatgggccgccctgatgaccctggaaatgggcaaatcgatccccgggtaccgagctcg

SEQ ID NO: 441400 - DNA, 367 bp, Triticum aestivum
gtaactcatctgctgatttactagggtaaggaggggcaatcgtaatcaaaactcggtaaacggtaccggggaacaaatcatgaaacatctggagcatggggtcaagactaatggcatccggcacgcagggcagaattgttagatgggcctcttggctaatttctttgagttcattactatcgggccgggcgggggtgtccaaaaccaaaaaatcattcccggcaatatgggctggagcagacttttcatttttgaccttaaataagggttgtttttccccacgggcggcccatttctccaccgaacggttagggtcagagtcgattagcaacacttttcccttgtcggctaagtaacgggcaatgtg

SEQ ID NO: 441401 - DNA, 263 bp, Triticum aestivum
tcggtgcaactgcaacaggcaaaagttggtttatcgacaagggcggcagaaaatttaaccatagccgaagtgtcggaaccagaaatggtattaaaaattctcaaagcctctgcccgctctgtgcccaacgatagtctgaattactacggtgctggccatgtcaacgccggggaagccgtcaaacaggcccaacaaggagagatttccttccgggatttcatgcgttggttgcgggataacggttatctcaatcccatcttttg

SEQ ID NO: 441402 - DNA, 309 bp, Triticum aestivum
atcttctttataacttcccacgtcgtaattttgcttaggctacagcaaaaaaaggcgatcgccacagtcaatgacgacagacaggtccaaactcaaaataaaatttcaatactaaacaactttattaatctttacagttttcctgagttggtggaactatcattgttttaccaagatcccaacttgattatagagtttatgtttttacagtcctggaaaagcttagagggaacccatttgaaggacaagtacttacttgaaaccttgcttgggattggtgggttcggcgcagtgtttctgtcaaaaaca

SEQ ID NO: 441403 - DNA, 572 bp, Triticum aestivum
agaggatctgtgcattctaaaatgttgttttgattttgacaaaattacggaaaagtttaaaattccaccgaaattgttccccttaccgttaggggcgccgcaggatcaacgcgagtccggcgttgggtcgcttcgatgtaatctatattgaaaagattgttaacgttaatggcggccctccagttattgcggcggtaaaatacgcttatatcagtacgtagatagctcggtatttgaaaagaattatttaaatcaccttggcgttcccccacataaaacaatcccaggccaaatcccaaaccctgtaaatcaccggcttgaatttcgtaagttgaccacaaactggccgagttaaagggaaccccctcaagcaaattaccaggctccagattgtcatccttggtgaccctggcatcggtataagcataggaagcaataatattccagcccggtaggatttcccccgcgatatcgaattcaacccccttacttctttgctctccggatggaatggagaagttgggattttcagggtctgttacagccagattacttactgtgatttcatatgc

SEQ ID NO: 441404 - DNA, 309 bp, Triticum aestivum
caggtcgactctagaggatctttaactggagcgacaaacgtagccatggttaattgtctccgtcacaatttttcgagcttaatagtttggggtcagatgattagggggattgcaccgaaaaacttatgttaatcggtatatttccgtatgctaacgacgtttagcggcaacctggggggtcatgccaccgattaagcgctgtagctcgtccggcttaccactcttagctaaaccttcttccagggaaattacccccgacaccaccaacgtggccaggccctgttccatggtctgcatacctagttttgc

SEQ ID NO: 441405 - DNA, 208 bp, Triticum aestivum
ggatcgccgtctgacgattaacttacctcccaggagttggaagagatttttgtgtcatttcccaatttaaactcaggcaaccggtttggggctggaacatcaacaattcccccagagccctgacgggattggcttggtgtactgactgggtatggaactgcacttttaactggtcaccggcagtggtgatccccgggtaccgagctcg

SEQ ID NO: 441406 - DNA, 404 bp, Triticum aestivum
tgcaggtcgactctagaggatcatcgggacagttatgaagatttagtgcattttgtcgaaatcgtggcaaacgctggctgtcaaagattcactgtccatgcccgtaaagcctggctccaggggcttagtcccaaggaaaaccgaaccattcctcccctacgttacgaagatgtttatcaattaaaaaaggattttccccagttattgatcgaaattaatggcggtatcacccaaactgagcaaattcaacagcatcttagccatgtggatgcagtgatggtgggccgagccgcctacgaaaatccctaccttttcgccaccgtagaccgggacatttaccacaaaaccaatttagtccccagccgagcggaaattattgaacgtatgttgccctatgtggaaga

SEQ ID NO: 441407 - DNA, 454 bp, Triticum aestivum
gtcatcattgctttgggcattcaaccccattggttaacccagtggagtgagccccaaacggcggttttgttgacagggcacccagatttagtcagtgtgccagccccgccccgcatcgaaattgaagtcaaggaattgggggaagtgtagggctccagcaaaccgaagtgagtttaacccacaatgatagaagagcaataattccctgatcgccagagcttttccgtatatcatccgcaaaagtgtgttacgccgattagcatacccttaaatgaactatatgttccccatgttcccccggaaagttcttggatgtagtacgagcaactattcgtctcaagaactactcctagcgcactgttggaatcaatttctcccaaaaagcagggaattagcctaaacaatttgggagtagtatcttggctataactttctaagccacgtcgtcatgggc

SEQ ID NO: 441408 - DNA, 508 bp, Triticum aestivum
aggatcaacaggggataattggtctttcctcggccatggtcaaggccaacatcttctaaacctaggaaaaatcgcccgttaccgattctaccccagcagagagcgcaaatcctttgttatcaagagctaatccttggcaccaggggaatctgccgcaacttaatgccgggaatggtgaactgttgttcgatctgatttggctctaggggaatcgtctcagtaaacttggactggcttgtggataacacccccaacacactcaggggcacctgcaaaaataaattggccatcaaataggcgatcgccgctagcccaacccctgccaaacgaatctggggcaaatccgtcacccaaggataggcgatcggagcgtagtaatacaccagccacaatagacccagactaattattcccccaaacaaagtaatccatcgttgttggctccgtttaaacaaacttaaaattcgcagttggtcttcccccaaactatcctggcgcagagcaatga

SEQ ID NO: 441409 - DNA, 468 bp, Triticum aestivum
gatcccgactttgccgaatgactaaagtccccgccagtaaatctccaatgcgtttttcccgccggccaaaaatgattaataaagcgccgatgtaaagaaaatcatcaatggggcggaacagagctcttaaactagcttcctgtaagccaacggggcggccatctccccgaattacccgaattttagccctgcgtttaccgggggtttgaccctgccagagggtttcaaaaaagacaaaataacccacataaaccgcaaaaatgaggaaaatttggatagcggtgagccagagttgccattccccggaggcgtagagggaaaggttataggccaacaccgcccaaataattagcaaaattaaaacaacgcttcccagacagacatagtcgatcagcaccgcatagagacgattgccgatgcccgccaaagtaaattccaattctacgctttcgggggtttccacctgat

SEQ ID NO: 441410 - DNA, 237 bp, Triticum aestivum
agtgctgaatttgccccggaagcggaagggctgaatgtctggttattgacgggggttaatggagccggcataaccaccaccatcggtaagttggcctttatggccaaacaatccggttatgactgtgtgattgcggcggcggatacttttcgggcggcggcggtggaacaggtgaaagtttggggggaaaggagtggcgttcccgtcattgctaaccctgggcaaaatactgacccg

SEQ ID NO: 441411 - DNA, 108 bp, Triticum aestivum
aattgatggggccgtttttgtttgctcacctgggcaattaaatccggtaccggagccaacggcaaactgtcgggtaaatcctgtttagctattttggctgtccatgtt

SEQ ID NO: 441412 - DNA, 414 bp, Triticum aestivum
gggagccgtcaagcacacttaaaagaagttccgggttgtaattaatacggcctatggcctggccagagcccacgccgtgaatagaaaaaaacaactcatcaacaatcttgtaaggcactgcttcatatggccattggtgatggagtaaaacctggtgaccgggtttaagcctcatgcgaacctgggagtgaatgcctaaacgacctaatactggtacatccgcctcaacaacttgaaaaatcatgtctgcaattgaatcgcgagaaaagaccgcaatggcaaaaccatctaagtcccgcacattggcaataacaacctgattttcagttggttttaatcccaaaaaattcagctcccctggcgttattcctataacgggcctgaagtgctcaacattcacacactgtccagcgt

SEQ ID NO: 441413 - DNA, 385 bp, Triticum aestivum
attcattgccgatagtgataacctccctttggaatttattctttgtcagagtgctcccaacaaatagggaaaattatatttttcgccatcaaagattaaatttaagtcaattaatcgcccttactctgctcaccttactgctaagcctaggttttgcccaagcccagtcggcacaaactctccttagtcaactaccgccccaaattgacctagtggatcccgtcaagtctgatttccccctgcaaaataaagcttttaatctaggctttgaatcagatttatccggtagaattggtaacttggattacaccaccgttagggtagatggagagccaatttttttgattgctgtgcccacaggaaatgctagtaaagaaggagattc

SEQ ID NO: 441414 - DNA, 468 bp, Triticum aestivum
gtcggggccagtgctctgctgggagctggtttaccctttagctttggtttgggaatgattgccctgagggttttcctaatcgtgttgggggtaacggccctaagtttaggtttagcctttgccctgccgggccacattgaattgattgcggtaatttttgtcactaatttacccctactcttcgccagtactgcccttgctcctttggacttcatggcccattggttgcaggtggtggccagtttaaatccattaacctatgccatcgaaccaatccgttacatttacctgaatggcaactggggtttggatagtacggttttgactgccccttggttcagtttgaatttcgcccaggtattgggggtgttagttttgtttgatggtttagtattgttattaatccaacctttgctcaaacgtcgctttttgtgattttgtctgttgatcatagctgatccccgggta

SEQ ID NO: 441415 - DNA, 220 bp, Triticum aestivum
ccaaccaaccaatagaaagcaccaaatcagtgcgttagattgcggtaattgccaagacaaaggtgagcatttgtccgcctacaaattcttttctaaattaggagcaaaggacaagctgcaactacacacctgggcagcattgggattggtgaaacgaaatcctccccccattaaatcctcggcatagtctaatttgagattgtggaggtaacctgcactc

SEQ ID NO: 441416 - DNA, 294 bp, Triticum aestivum
acctagttcgataatgctttggagaattacctgatttttttccctagtcaaaaggtcatctaagaacgacttatgaatttttaaagtctggagaggtaaatccttgagataggagagggaagaatagccgacaccaaaatcatcaatggcgatttgtatgcccatttcatttagttgattgaggcgattaatggtttcccctggttcatagagcataagactttctgtcacttccagggtaatttgctggtaacttatttgagtctgagcaacaatactttctatctcgcttac

SEQ ID NO: 441417 - DNA, 410 bp, Triticum aestivum
ttgatggcaaaaatcataaaactgttgctgtttctttcccctacaactgctttccacctgccccaaagttaaattgctagcctgagctttaatagcggattgtaaagtttgtaagtaagtttttaagccttggtaatcccctacatcattgttgaatgaatagcggattttagcaaaaacaagaaattcattactgctaaatttgtcgttgtcaatactgatagcttttttagcctgcttttctaactccaccaaagctttgttatagagaaataaatcactttcagaaaccttaggtttagctttgccaaacttttctaaaatttgataatagactccctcttgccccatcaatttttcccgtaaatttgaccaagtattcagagattgcaggcaccataccaacacca

SEQ ID NO: 441418 - DNA, 302 bp, Triticum aestivum
aggatcatggtctaagcactccgcatggtttgccagagttgcttatattggttgtacggtggcaatgtccaggggcgcgagaaatggacaacgctccagtaactccggtgaaaaagccaataaagggttagtgctcagggcggaaacctccaggttttgatagggcaccgccagggcattactgaaagttgccatctgctctagactggaaggctgggcggaaaaatttaaccattcataggtaatttcagccgcctccatctcagcgggcatagtccagagatccccgggtaccgagctcg

SEQ ID NO: 441419 - DNA, 495 bp, Triticum aestivum
taactacgggtgaaatgaaaaagcgtgcaacttccgtgtcaaagtcccggaaatttccccccccctcataagccgcatttaatcgataaagagctgttcgttgtgagtttaacggccctgacaagtcaatggttggacgcaccagaccaaaattacctgcctgcatagcaacttcataaaaaggttctgaaaggggctgtttggtaatgtaattaataacgccgccaggatctaaattgccgtagagtacggaagccggccctttgaggacttctatccgttgtagatttgccgtgtccggaatagaaaaattatctctgaacttaaagccgtcccggagagttccgccaaattgttgaaaaccgcgaatattaaatatttcggatgtaccaccaacagtatttgctctctgcacaccactgacattttgcagtgcttccgaagcacgaattatttgcctgtcctccaacacctgttggggtaccacttgaatcg

SEQ ID NO: 441420 - DNA, 360 bp, Triticum aestivum
tcgacttcgcgaaggcaaagatccaggacaaggagggcatccctccggaccagcagcgcctcatcttcgctggcaagcagcttgaggatggtcgcaccctcgctgactacaacatacagaaggagcccaccctacacctggtgctccgcctgcgtggtggcatgcagatcttcgtcaagaccctcactggcaagaccatcacccttgaggtcgagtcctgtgacacgatcgacaacgtcaaggcgaagatccaggacaaggagggcatgccccctgaccagcagcgcctcatctttgccggcaagcagcttgaggacggccgcacccttgctgactacaacatccagaaggagtccaccc

SEQ ID NO: 441421 - DNA, 229 bp, Triticum aestivum
tcgatcaacatcggcaatgcgcgctcggttcacctgcaggaggacctggggctgacgggcgtgcaatacaacacggcgtctaccgtcttcttcgtcccgtactgcatattcgagatcccatccaacatcttcctcaagaggttctcgccgaggatatggctgagcatgtgcggcttgagattcggtgccgtcaccgtgttcatgggactgtgccagaacttttcgggat

SEQ ID NO: 441422 - DNA, 452 bp, Triticum aestivum
ttcctctccacggaccggaacgcgccatgacgagctcctccacgccgtcccgcaaggcgctgagcaagatcgcctgcaaccggctgcagaaggagctcgccgagtggcaggtcggcccgcccgccggcttcaagtacaaggtctccgacaacctccagagatgggtgatcgaggtgggcggggcggagggcacgctctacgccggcgagacgtaccagctgcaggtcgacttccccgagcattaccccatggaggcacctcaggtcattttcctcaacccggcgccgatgcacccgcacatttacagcaacgggcacatctgcttagatatactgtatgactcgtggtcgcctgcgatgactgtaagttcagtctgtatcagcatcttgtcgatgctgtctagctcgccagcaaagcaacgcccggcggacaatgaccgctacgttaggaac

SEQ ID NO: 441423 - DNA, 385 bp, Triticum aestivum
tgtcgttgcccacgcgtccgcaatctctagcgtgttgcaaatttggagagctagagcaacctgcagtccacgaaacagatcagaataagcttccagccatgaggttccccattttagtgtttgtgtgggctgcggcggtgctgctcgccgtggccgccttctcggcggtggcggacgcgtcgcctcggccgtcaaagtctttgaaggtcgggttctacaagcacacatgcccacaggccgagtacatcgtgcgtgacgccgtccgccgcgccgtctcccgcaacccatgcctcgccggtggcatcatccgcatgcatttccatgattgcttcgtcaggggttgcgatggctcgctgctgatcaactcgacacctgggaactcggc

SEQ ID NO: 441424 - DNA, 373 bp, Triticum aestivum
cggacgcgtgggttggacaggagcacaggctgtcgataccctcctttggagtgcagcggtaaatccacattacgcttttctatctgggggttttcgaactatgccacccgtcacgtatttgacacccaacttccgtttttggaggggatcaatcgtatacaaattccgattcatcaaaacggcctttcataaaggtcgtgttttgatttcgtacgatcccaacggtgatattacgggtacatcagataccgagaccacaactttttcgcgagtagtggatttggagcaggaaactgaagtagaatttgcagtcccctacatggcaacatcgcctatgttggagattgttgattttgcctcttttccccttacc

SEQ ID NO: 441425 - DNA, 473 bp, Triticum aestivum
ttggtctccttcggctccggcgacagcgaccgcgaccggcgaccggcggcgggcgtccctcccttgcaggtgtacaggacagagtaaataggcagggtcgtgcaaaaggagaggaaagtgcgcatccatttgattgaatggcttcaaagattcaagccttcttgaaccatcccgctggccccaaaaccattcatttttgggctccaacatttaaatgggggatcagcattgcgaacattgctgactttgctaagcctccagaaaagatatcctatcctcagcaaattgcggttgcctgcactggagtcgtctggtcacgctacagcatggttatcacaccgaaaaactggaaccttttcagcgtcaacgttgcgatggcaggcacaggcctgtaccagctttcccgtaaaataaggaaagattatttctccgatgatggaaaggaggtggctgctgcatcactggaaggatag

SEQ ID NO: 441426 - DNA, 422 bp, Triticum aestivum
tcgctgtcgcgtggctggacctgaaggcccttttgatgtcgatgtctttgactctgctacagattacatcaagctaatgaagacaatctttgacttcgagtctattaaaaagcttctggcatctccaaagttctcgttctgttttgatggtcttcacggcgttgctggagcttatgcaaagcgcatgtttgtggatgagctcggcgccagtgaaagctcactgttgaactgtgttccaaaggaagactttggaggtggtcatccagaccctaacctcacctacgcaaaagaactggttgatcggatgggtcttgggaaaacctcaaatgttgaaccccctgaatttggtgccgcagctgatggggatgctgaccgcaacatggctcttggtaaaagattcttcgtgacaccatcagattcgg

SEQ ID NO: 441427 - DNA, 303 bp, Triticum aestivum
cggtcgcgtggctggacctgaaggcccttttgatgtcgatgtctttgactctgctacagattacatcaagctaatgaagacaatctttgacttcgagtctattaaaaagcttctggcatctccaaagttctcgttctgctttgatggccttcacggtgttgctggagcttatgcaaagcgcatgtttgtggatgagctcggcgccagtgaaagctcactgttgaactgtgttccacaggaagactttggaggtggtcatccagaccctaacctcacctacgcaaaagaactggttgatcggat

SEQ ID NO: 441428 - DNA, 302 bp, Triticum aestivum
ttgtggtgttccctgaaccttggtgcatgcctagtctgttcaccgccgagattgcagctttctacgagagttattatactaacaaaggagtcaagatcttgaagggtacaattgctgctggttttgatgctgacgctaatggtgatgtcaccgcagttaagctaaaggacggcagtgtgctcgaagctgatattgttgtcgtcggtgttgggggcagaccgttgactactctcttcaaaggccaagttgccgaggagaaaggtggaatcaagaccgatgcttttttcgaaacaagtgtcccc

SEQ ID NO: 441429 - DNA, 448 bp, Triticum aestivum
ttgcccacgcgtccgcggacgcgtgggctgaccggtggactccgtgtgggcggagcgaagtgggagccaacgccaagccagccgagcggactcctctcctcctcgcagcagttcgcgattcgcccccaaatccagcgccctccccgccggaatccggcgccgaatcttgcagagagcttgaaccgagctatggacaacttgtggcatctcggagatgagttccgtgggcaatcaaaggtggtggaggaccgccaatggtctctcatgacatcaaagctggctgagatcacaaagtcaaaggctgagaggatgaatgactctgagtatgcacggatgaacaccgtccctgatgtgaagcaatgggataagttatcctaccaccaagaagacaacatgatggaccacctcaatcttggcctcatgaacctggatcttaagatgaatgatc

SEQ ID NO: 441430 - DNA, 315 bp, Triticum aestivum
ttgatttgcaactcctaatagttgccggccactgcaagtagttaagcttagctccaaggagctagcagagaagaagcccagctcggtaaggagaggagaggcagaaatggaggtggaggccagcgctcatggtgacacggcggcgagcaagttcacgctgcccgtggactcggagcacaaggccaagtccttcaggctcttctccttcggcaacccacacatgcgcaccttccacctctcgtggatttccttcttcacctgcttcgtctccaccttcgctgcggctccgttggtgccaatcatccgtgacaacct

SEQ ID NO: 441431 - DNA, 349 bp, Triticum aestivum
tcggcttactcctaccatctgtatgaagaggatgtcaaagcgctgaaggacatgggcatgaaagtgcataggctctccatctcttggtcgagaatactgccaaatgggacgggggaagcaaaccaggcaggcatcgactactacaataacctgatcaactcactgataagtcacgacatagcgccatatgttacaatttggcactgggacacccctcaagcactggaagacaagtacggcggcttcttagatctgcagattgtagatgattacaaacaattcgccaaggtgtgctttgagagcttcggcgacagggtgaagaactggtccacctttaacgagccacata

SEQ ID NO: 441432 - DNA, 405 bp, Triticum aestivum
tgtcgttcgcaccaacaggctcgcagctgctagctcaatggcagggacgcgagcgttcttggtcgcgctcgtcgtggctctcacgtttctcttcatggagggcctggcggcagcggtgccggcgactccggagagtacagcgcagcggcggctggaggcgcgaagcctcctcaggcggctcaataagcctcctgtcgcaagcattcagagctcggatggtgatgtcatagactgtgtgcacatatccaaacagcctgcattcgatcatcctctcctcaagaaccatactattcagatgcggccttcttacaacccaagaggcatgcatcatgactccaacatcacagcccatgcaatcactcaaatatggcatcaaaatggcacgtgccctaagaacaccatacc

SEQ ID NO: 441433 - DNA, 388 bp, Triticum aestivum
tctcgtttgcccacgcgtccgcccacgcgtccggcgcaggcggatctcatcccatccaaggcaggcaggcaggtacgagatggctctcaccagaattggtcttgctggcctcgccgtcatggggcagaacctcgccctcaacattgcggagaaagggttccccatctctgtctacaacaggaccacctccaaggtcgatgagactgttcagcgcgccaagctagaaggaaaccttcctctctacggtttccatgaccctgcatccttcgtcaactccattcagaagccacgtgtcgtcatcatgcttgtcaaggccggtgccccggttgaccagaccattgcaacgctcgcagcacacctggagcagggcgactgcatcgctgatgga

SEQ ID NO: 441434 - DNA, 367 bp, Triticum aestivum
ttgattggattcaaacggtgcataaatggaaacaccataatgatggctggatctgcaccaggatttccccacggtttaattgaccccatcgaggaacttggggagctggcttcacaatatggcatttgcttgcatgttgatctatgccttggaggctttgtattgcctttcgcccataagcttgggtatccaattcctccttttgatttttctgtcaaaggtgttacgtcgatctcaacagatgttcataagtatgggctagccccaaaaggcaccagtactgtcctatacaggaatcatgaaattagaaagcaccaatttgttgctgtgactgaatggactggtgggctctatatttcccctacta

SEQ ID NO: 441435 - DNA, 345 bp, Triticum aestivum
tcggtttaagcagagacagaagagagatcgattccgactaaaacctctggccgtcgacgaccaagctcggagacctattgacctagttcctgatgtcggacgccgatgattaccgctgcttcgttgggagtctgccatggaacacaactgatgtggatctgaaggatgcgtttgggaaatttggccgagttactgagaccaaggtggctcttgacaagttctctggccggtcacgtggctttggatttgtgacttttgatgacaagaaggccatgaaagaagctgttgaggctatgaatggaattgatttggatggaaggaatattacttgtgaaagagcacaac

SEQ ID NO: 441436 - DNA, 352 bp, Triticum aestivum
tgtcgttcggctcccctcgctgctaagtatatgtcctgagctccgaatctcctaccgggttgggtctcgtaggcggtggatgagagcttgggacagtggaggagcatgacggtgatggagctgaaggcgctaccgttcggtttccggttccaccccaccgactaggagctcgacaggcactacctcaaggggaagatcacggggcagatcaagaacgaggtcgaggtgatcccggtgatcgacgtctgcaagtgcagagccgtgggacctcccagataaagctttgatccgctcggaggatccggagtggatcttctttgcacccaaggaccgcaagtaccccaatggaagc

SEQ ID NO: 441437 - DNA, 271 bp, Triticum aestivum
ttgcgcgtcccagagcgggggcctctcggcgcaggtgatcaagagggccttcggcgccacggaggaggcgttcatgggcatggcggagaagtcgtggccgtcgcagccgcggctcctgtccgtcggctcctgctgcctggtgggcgccatcgaggacggcacgctccacgtcgccaacctcggcgactcgcgcgccgtgctcggccgcctcgccagcacgggcgggaagaagcggagggcggcggtggcggagcggctgtcacgggaccac

SEQ ID NO: 441438 - DNA, 346 bp, Triticum aestivum
tcgcggacgcgtgggctgaaagttagggagatatggctgggattggtcctatcaggcaggactgggagccgatagtggcgcggaagaaggcgcataacgccgccgacaagaaggacgaaaaggccgtcaacgctgcccgccgctccggcgccgagatcgacaccaccaagaagtacaacgctggaacgaacaaggctgcatctagcggaacttccctcaacaccaagcggctcgacgacgacacggagaacctctcccatgagcgtgtctcaagtgacctgaagaaaaaccttatgcaagcaagactggataagaagatgacccacgcacaacttgctcagatgat

SEQ ID NO: 441439 - DNA, 325 bp, Triticum aestivum
tcggccatggcggcggcggcgcacaggctcctcgcggctagcacgaagatcgtcggggtcgggcggtactacgtggcccacgccaaggagctcggccaccccgtccccaaggagccggtgctgttcctcaagccgacctcgtcgttcctccacgcgggcgtggccaccaccgccgtcgaggtgcccgagccgctcgagtcgctgcaccacgaggtcgagctcgccgtcgccatctcacggagcgcgcgccacgtgcccgaggcctccgccatggacttcgtctgaggttatgctcttgctttggacatgacagcaagggaccttc

SEQ ID NO: 441440 - DNA, 375 bp, Triticum aestivum
ttgctcgcgtcgcggcggcagttccactccctcgccatgggcaagattaagatcggaatcaacggtttcggaaggatcgggaggctcgtcgccagggtagccctccagagcgacgatgtcgagctcgtcgccgtcaacgaccccttcatcaccaccgagtacatgacctacatgttcaagtacgacaccgttcacggccactggaagcacagtgacatcaagctcaaggacgacaagactctgctctttggcgagaagccagttaccgtcttcggcgtcaggaaccctgaggagatcccgcggggtgagtctggtgccgattacgttgtggagtccaccggtgtcttcactgacaaggacaaggccgctgctcac

SEQ ID NO: 441441 - DNA, 312 bp, Triticum aestivum
tcgcccatcgcgtccgcttgccttctacatcctgtgctttgcattcctccttccagttccaaccgcaatcaatggccgccatgaagatcactctccttgccgtggccacaatctcggcagtcttactgggcaccgcgtcggcggcgacctacggtgttggcgagccgggcggttcgtggaccctcaacaccgactacagcaactgggtgtccaacaagaagttccacccgggtgatgagatcatcttcaagtactcccccgcggcgcacgatgtggtcgaggtcagcaaggctggctacgactcctgcagca

SEQ ID NO: 441442 - DNA, 374 bp, Triticum aestivum
ttgagtccgccgtgttcttcagagtcttcaaggatgggcatggcaagcctctcgtcctcatgtgcagtgaccccaccaagtcatctctcaccccgggtctatacaagccgacttttgccgggtttgtcgacaccgacatttcgtccgggaagatctctctgagaagcttgatcgaccgatcggtggctgagagctccggcgccggagggaagacctgcatcctatcgagagtgtacccatccatggcgatcggtaaagacgcacacctttatgtgttcaacaacggggtgaccgatatcaaggcgtccaaactaacggcgtgggagatgaaaaaaccaatgatgaatggtgcctaagtagtatataccgtatat

SEQ ID NO: 441443 - DNA, 413 bp, Triticum aestivum
ttgccttcgcgtccggcgacccgcgtccaccaccgccgctttccccgtctccccctcaccgcgcggcgacgccgagcgacccagcggcgagcccggcatgcatcacgaccccaaccccttcgacgagggcaccgccggcgacgagaaccccttctcgaatggaggaggccgcggcgggaagcagcagcacggcttccggcccaccgagcccgtcggcttcggcggcggcggcagcaggggcgacgccaccgtcgacgtgccgctcggcaacatgggcgactcgaatggcaaggcgagggagctctcgtcgtgggaatcagatctgaggcgccgcgaggcggatatcagaaggagggaggaatcactgaagaatgctggagtgcccatggaggagaagaattggccgccttttt

SEQ ID NO: 441444 - DNA, 373 bp, Triticum aestivum
ctggtgccccactggcttcaagtgtggtatcaactaccagccacctggtgtcgtcccaggcggtgaccttgccaaggtccagagggctgtgtgcatgatctccaactccaccagtgttgtcgaggtcttttcccgcatcgaccacaagtttgacctgatgtacgccaagcgtgccttcgtccactggtacgtgggtgagggcatggaggagggcagtgttctctgaggcccgtgaggatcttgctgccctggagaaggactacgaagaagttggtgctgagttcgacgagggtgaggacggtgacgagggcgatgagtactagagcctgcctcctggtgctttcccaaggcatgctgctgcaatcctatgatc

SEQ ID NO: 441445 - DNA, 338 bp, Triticum aestivum
ggcgagggggagtgcattgacttctaccctgtcggccacagaagcaacgacaactcatcggagatgttgcacgtgttgaaggccagcatggacgactaacggcacgactactactcgctaggcacgtacgactcggcagcaaacgcgtggacgccgatcgacccggagctcgacttggggatcgggctgagatacgactggggtaagttttatgcgtccaccttgttctatgatccggcaaagaagcggcgcgtgctgatggggtacgtctgcgaggtcgactccaagcgggctgatgtcgtgaagggatgggccttgattcagtcagttccaaggac

SEQ ID NO: 441446 - DNA, 271 bp, Triticum aestivum
tcgcgcgtcccagagcgggggcctctcggcgcaggtgatcaagagggccttcggcgccacggaggaggcgttcatgggcatggtggagaagtcacggccgtcgcagccgcggctcctgtccgtcggctcctgctgcctggtgggcgccatcgaggacggcacgctccacgtcgccaacctcggatactcgcgcgccgtgctcggccgcctcgccagcacgggcgggaagaagcggatggcggtggtggccgagcggctgtcacgggaccac

SEQ ID NO: 441447 - DNA, 339 bp, Triticum aestivum
tcgcggacgcgtgggcgcggtggcgcgggagctgcgagaccaatgccaccgacttcccctcctcgatgtgcaaccggaagctcatcggcgcgcgcggcttcttccggggcttcggggcgggcggcaggaacggctcctcccatgggaccaccgagctctcgtcgccgagggaccacgacgggcacggcacccacacggcgtccacggcggcgggggccgtggcggccgacgcgagcctcctcggttacgcccacggcacggctcggggcatggcgcccggggcgcgcgtcgcggagtacaaggtgtgctggaagcagggatgcttcaggtcggacatac

SEQ ID NO: 441448 - DNA, 245 bp, Triticum aestivum
tcgagttcgccgcgttctgcagagtcttcaaggatgggcatggtaagcctttcgtccccatgtgcagtgaccgcaccaagtgatctctcaccccgggtctatacacgccgtcttttgccgggtttgtcgacacctacatttcgtccgggacgatctctctgagaagcttgatcgaccgaccggcggctgcgagctcaggcgccggggggaagacctgcatcctatcgagagtgtacccatccatg

SEQ ID NO: 441449 - DNA, 143 bp, Triticum aestivum
ttcggttatcacacacgctctcctcgccgacaggatgttcgggttcgggcaccaccacaaggaccaggcaccggcggagtcgggccccaaccagatcttcaagatctactgccgggcctcggaggactactgcctcgccgtcc

SEQ ID NO: 441450 - DNA, 362 bp, Triticum aestivum
ccgtgatccgtcactggcttgcatcttcttgatgaacaatggcaagtacattatccagaaagtgaatgacagcgagctaggtgttctactcggcgatgactggatcaagcagttgtcaactagagtgcgtcgctggagcatggattatcagcgttcaacatggggcaaggttacaactgtgctgcacattggtggctcaggcgttggtgcactcccaaccaaggcaatgctgcagaaattgcggatgtttaatacctactttgaggagatctacgcagtacaatcagaatgggtggtagccgatgatcagttgcgaatggacgtcagggcagcagtggaggattcagtgatgccagcatatg

SEQ ID NO: 441451 - DNA, 256 bp, Triticum aestivum
tgaaaaagcagaggagaggaagcggaggcgacgatgtcggcgatgacggcggcggtgcccttctggcgcgcggcggggatgacctacatcggctactccaacgtctgcgcggcgctggtgcggagctgcctcaaggagcccttcaagaccgaggtctcctcccgcgagaaggtccacttctccctctccatgtgggccgacgagaagcagcataagcccactgtgcgcacagatgatgaatgaagatcgggtgcca

SEQ ID NO: 441452 - DNA, 391 bp, Triticum aestivum
tcgcggacgcgtgggtccgccgcgatctcgtctcgctacgcactctctatctgagatttggaatcgggcgaggcctgcagctcctgccgacatggcgctcgttttgcattcgggcagtggcaacaagaatgccttcaaggcacttattgctgcagagtactgtggggtcaaggttgagctgaccaagaattttgagatgggtgtctcaaacaaaacccctgaattcatcaagatgaacccccttggcaaggttcctgttcttgagactcctgatggtgctgcttttgagagcaatgctattgcacgctatgttgcccgctcaaagggtgacagcctgctttggggtggttctcttattgaatatgcgcgtgttgagcaatggatggacttt

SEQ ID NO: 441453 - DNA, 437 bp, Triticum aestivum
tcgcggacgcgtgggcggggagtacgaccacgtgagggagctcatcaagtggggaaccgactacctgctgctcaccttcaactcctccgcctccaccatcaacaagctctacagtcaggtgggtaccgccaagatcaacggcagcacgccggacgaccacttctgctggaaccggccggaggacatggcgtacccgcggccggtccagcaggcgagcgcggccccggacctcggctgcgaggtggcggcggcgctggcctcagcctccatcgtgttccgcgacaacgccgcctactccaagaagctggtgaagggcgcggcgacggtgtacaagttcgcgcgcgccaacgggaagcgcacccgctactcccggggcaaccctgccatcgagtacttctacaactccaccagctactgggacgagttcatgtggagcg

SEQ ID NO: 441454 - DNA, 269 bp, Triticum aestivum
gaagggaccaaagggccgtttcaagtaccagcctgggcaagtgagagcatttggaatgatagctggaggatcaggcattacaccaatgttccaagtcacaagggcaattcttgagaacccaaacgacaatacaaaaattcacttgatctacgctaatgtcacatatgacgacattcttctgctggaagaactggacaatatggctaaaaactatcctgatcgcttcaagatctactatgtcctgaatcagccacctgaagtctgggatg

SEQ ID NO: 441455 - DNA, 295 bp, Triticum aestivum
caagctctacattcatttcacggtggagtttcccgactcgctggcaccggatcagtgcaaggctctcgaggctgtgcttccaccaaagcctgcatccaagctgaccgacatggagctcgatgaatgcgaggagacgacaatgcatgacgtcaacatggaggaggagatgcgtcggaaagcccatgctgctgctcaggaggcgtacgatgaggacgacgagatgcctggaggcggtgcccaaagagtgcagtgcgcacaacagtaagataggttgggcagcatgcttttttgggac

SEQ ID NO: 441456 - DNA, 209 bp, Triticum aestivum
tgattggtactcttaccggtgctcagtggggaatctatgacgcgttcaaggtcatggttggactcccgaccaccggcggtgctccaccagttgctccggtagaggaagcagcgaaagccagcgcttgattgatttttcctactacgacgatgacgatgtattccgggatgatgtggtattggtggatggggactgtatcaattacttga

SEQ ID NO: 441457 - DNA, 311 bp, Triticum aestivum
acatgcatgcctaaccctcttgcaaaagggaacagctttggctcaatggcttctctgtacagccagacaagatgggcttctcaagccactgctgtgaaagaaactgaccccagtggcggcaagataagcattgggcccaaatccaagcagatcaaggaggaggacaaagatgatggactggtttatcagggaccgatatcatcaaccatcaagaaagtgaagcttctgtccctgtccacctgctgcctctctgtgtcgctaggccctgtcataacgttcatgactacgcccgacatgaatgtgatcctcaa

SEQ ID NO: 441458 - DNA, 302 bp, Triticum aestivum
acaccctgcttcagggatattctggcatccgcttcgagatcctcgagacgatcgccacgctcctcaacgccaacgtgacaccatgcctaccgcttaggggcactatcaccgcgtctggtgacctggtcccgctttcctatattgcgggactggtaaccggccgcccaaactccatcgccacggctccggatggcaccaaggttaacgcggtggaggcatttaagattgctggcatccagcatggcttcttcgagttgcagcccaaggaaggccttgccatggtgaacggcacagcagttggc

SEQ ID NO: 441459 - DNA, 399 bp, Triticum aestivum
cacgcgtccggtggttgggaggggctgagcacagcgcgggtcaatttgagaggttactaaaggaaatgtgtgctgatgatgacggtgaccttctaatagagtcttctgtgaaaggcattccgaaggtttttgctgtatcaactttagtcagcgccatgcctgcccaaccatatatattccggaactatcagtatccaccgggcactctggaggtatcaccaggaatggcagaaagtccatctcctggcgcagttggaacggttgtttctggtgcaccagttgggattaaacgtggagcttttatggggagctgcaagcatcacgtatgggaagccataagagcatcatctgcagctccatattatctggatgatttctctgatgatgtaaatcgctggc

SEQ ID NO: 441460 - DNA, 380 bp, Triticum aestivum
  unsure (1)..(380): unsure at all n locations
cgtccccagccaacctcgggtggtcgnctcngtagtcgcagcggcggttccactccctcgccatgggcaagattaagatcggaatcaacggtttcggaaggatcgggaggctcgtcgccagggtcgccctccagagcgacgatgtcgagctcgtcgccgtcaacgacccctttatcaccaccgagtacatgacctacatgttcaagtacgacaccgttcacggccactggaagcacagtgacatcaagctcaaggacgacaagacgctgctctttggcgagaagccagttaccgtcttcggcgtcaggaaccctgaggagatcccgtggggtgaggctggtgccgattacgttgtggagtccaccggtgtcttcactgac

SEQ ID NO: 441461 - DNA, 304 bp, Triticum aestivum
ggcgcgatgttcgggcgcgggccgccgaagaagagcgacagcacgcgctattacgagatcctgggcgtgcccaaggacgcctcccaggacgacctcaagaaggcctaccgcaaggccgtcatcaagaaccaccccgacaagggcggcgaccccgagaagttcaaggagctagctcaggcttatgaggtcctgagtgatcctgagaagagagaaatttatgaccagtatggtgaggatgccctcaaggagggaatgggaggtggaggaatgcatgatcctttcgacatcttccagtcattctttg

SEQ ID NO: 441462 - DNA, 314 bp, Triticum aestivum
cccgccaatcccaccaagtccgccaaggccatgggccgggacctgcgtgttcatttcaagaacactagggaaacagcgtttgccctgaggaagatgtcgctcaacaaggccaagaggtaccttgaggatgtgttggcacacaagcaagccatccccttccggaggtactgccgtggtgttggacgcacagcccaggtgaagaaccgtcagcccaatggtcagggacgctggcctgccaagtctgctaagttcgttctggatcttctaaagaatgctgagagcaatgctgaggtgaaaggtcttgatgttgatgc

SEQ ID NO: 441463 - DNA, 310 bp, Triticum aestivum
ccgcgcgacccgcaccgtagagcgtgtaacatactccaacacagcgacgaccgatggcccccgccgccgcctcgcagcaccaggcgaccaccgcggcgccgccgagcggccgtaaggtggtggacgaggtgtccggctggttgcgcgtgatggacgacggcagcatcgaccgcacgtggacgggcccgccggaggccctgccgctcatggagccggtgcagccctacgccgtgccccgcgacggccacacgctccacgacctccccggggagggggagccaagcctccgggtgtacctccccgaggtcga

SEQ ID NO: 441464 - DNA, 130 bp, Triticum aestivum
ggagacggtggccgtcgggtcggtgaatctcatgatctggaactgcaccatccccggaaagcaggggactgattgggaaagtggatactacccacttactttacacttcagtgaggactaccctagcaaa

SEQ ID NO: 441465 - DNA, 305 bp, Triticum aestivum
aaggcccgcagatcttcgacagccgcggcaaccccaccgtcgaggttgatgtgtgctgctcagatggaaccttcgccagggccgctgttcccagcggtgcatcaactggtgtttatgaagctttggaactgagggatggtggatctgactacttgggaaagggtgtatccaaggctgttgacaatgtgaactcgattatcgcgccagctttgattggcaaggaccctacagctcaaactgagctcgacaactatatggttcagcagcttgatggaaccaaaaacgaatggggttggtgcaagcag

SEQ ID NO: 441466 - DNA, 288 bp, Triticum aestivum
tctctcatcgttttataatgacactatcgtgaactgcccaacgtgctcttgcggctgccaaaacaatattactcgtccaggaagctgtgtaaatgacaattcgccttatttgcaatctgccatcaatggccctggcaaattaaccggccagcctcttgtccaatgtacttcccacatgtgcccgataaggatccattggcatgtgaagctcaactacaaggactactggagagtgaaagtcaccatcacaaacttcaactaccgcatgaattatacagactggaacat

SEQ ID NO: 441467 - DNA, 308 bp, Triticum aestivum
actgctgcaacagtcaagccacttcctgagcgagtccctcgtagagccccctctgcaatggaagaagatgaagatgaagatgaggatgaggatgaggaggaagagtgggttgaagtggacccaagtgtgctggagtctacctcaaacatgcaagttgatgaggactctaaatcagatgatgagatggctgatcttgaaatgttggatccctcggtctgcttcatgtgtgatctcaagcatgacaacatagaggactgcatgatccatatgcacaagaagcatggtttcttcatacctgacagtgaata

SEQ ID NO: 441468 - DNA, 320 bp, Triticum aestivum
atgggacgcatgcacagcaacgggaagggcatgtcgtcctcggtgatcccctacaagcgggaggccccgacctgggtcaagacgtccgcgccggacgtggaggagatcatcgtccgcgccgtcaagaagggccagctgccgtcgcagatcggcgccctgctccgcgacggctacggcatcccgctgtccaaggccgtcaccggcgccaagatcgtgcgcctgctcaaggcgcgcgggctggcgccggagatgcccgaggacctctacttcctcatcaagaaggccgttgcgatccggaagcacctggagaggaacaggtc

SEQ ID NO: 441469 - DNA, 340 bp, Triticum aestivum
aagcagtccgacgtgatgaggttcgtgcagcgcgtgcgttgctgggagtacaggcagcagcccgccatcgtccgcatcaccaggcccacccgccccgacagggcacgccgtctcggcttcaaggccaagcaggggtatgtggtctaccgtatccgtgtgagacgtggtggcaggaagcgcccagtgcccaagggtattgtttatggcaagcctaagcaccagggtattacccaactcaagttccagaggaacaagaggtctgttgctgaggaaagagctgggcgcaggcttggtggtcttcgtgtcctcaactcctactgggtgaatgaggactccacct

SEQ ID NO: 441470 - DNA, 190 bp, Triticum aestivum
tgaggccgctgctcaatttgccttttcccagttgaagaagatcctccctaatgcaggtgagccgcttaactacctagtgtcacactggggcctagacgagaatacgcttggcttctacacctttgacggggtgggcaagccgtgcgacctttacgagaagctccgcatacctggcgacaacctatttttt

SEQ ID NO: 441471 - DNA, 313 bp, Triticum aestivum
tacgggcgtggaatcaccgtggtcgagagagctatggcaaagaggaacggttcccccgtgatttctgattttgagattggcgtcgaagaattccactctgagggcaggtctgcgatcaaaggattcaatttcagagacgagcgtgttatggatggtaactgggttcaccaagcccactccggtgtcatcgagatgttcttccggttgctggccatatgccacacatgcataccggaggtcgacgaagttacagggaagatttcatacgaagcagagtctccagatgaggctgcctttgttgtcgcggcacatg

SEQ ID NO: 441472 - DNA, 421 bp, Triticum aestivum
tgcagcctactgcactggtgtgcttttggctcgtcgtgtgcgcgagaaccgtgatctcgatgaggagtatgaaggcaatgttgaggccacgggtgaggacttctctgttgagccttctgatgagaggaggcctttccgtgcgctcttggatgttggtcttattaggaccaccactggaaaccgtgtgtttggtgcccttaagggagctttggatggcggccttgacattccacacagtgacaagagatttgctggtttcaagaaggatgaaaagtcgctggatgctgagattcaccgcaagtacatctttggagggcatgtcgctgactacatgaggtcactagcagatgaggaaccagagaagttccaaactcacttcagtgagtacatcaagaggggaatctcagctgatgacatggaa

SEQ ID NO: 441473 - DNA, 134 bp, Triticum aestivum
cttccaggccaacatgcggatcctggtcaccggcggagctggctttatcggctcgcacctcgtggacaagctcatggagaacgagaagaactaggtcattgttgctgacaactttttcactggggcaaaagaca

SEQ ID NO: 441474 - DNA, 291 bp, Triticum aestivum
aggagggtgtcaccaaaggtgcccaccggtagctaccccatcgcccaggtgaattacgagctcaacgtgctgggcaccagggggccgaggcgtatgcagtgcacgatgcactccatcccagcctctgcagtcgacccggatggcgtggtgcctgggcaaccccagcagctgctccccggtccgttcgacgagtccttccgcagcacgaacgcctcctccaggttctccatggcagacttcagcagctctcgcttctcaagctcccgattctcagatgtaagtggtgggttg

SEQ ID NO: 441475 - DNA, 283 bp, Triticum aestivum
catgtatgttggagaatcagagaagaatgtcagggacatctttgagaaggctagatcagcacgcccatgtgtgattttcttcgatgagcttgattcccttgctcctgcacgaggatcctctgcagattctggaggtgtgatggatagagtggtttctcagttgctggtggagattgatgggttaagtgataacagccaggacctcttcataattggggctaccaataggcccgaccttcttgattctgcacttctccgccctggccgatttgataagctgttg

SEQ ID NO: 441476 - DNA, 319 bp, Triticum aestivum
ctgttttggaagaagctgcgcaggatactgaattggatacctgagcctttggattatatccatcatgcctctcttcgtcttggccgagacgcctgcgggctacggtctcttcaaggccaaggacaagaagcttctgtctcgcgatgatattacgaagtcgctcgatggcgccgatgccatcaattccgctctttcattgaagaagatgatcaagttcgaggactccgcccaggctctcggtgaatacagctctctgtgcgagggcaaggttaccccgatgctgcagcaattgctcgacgacatcaaggaggagcgcaag

SEQ ID NO: 441477 - DNA, 268 bp, Triticum aestivum
cgctcgccgtcatgggacgcatgcacagcaacgggaagggcatgtcgtcctcggtgatgccctacaagcgggaggccccggcctgggtcaagacgtccgcgccggacgtggaggagatcatcgtgcgcgccgccaagaagggccagctgccgtcgcagatcggcgccctgctccgcgacggctacggcatcccgctctccaaggccgttaccggcgccaagatcgtgcgcctgctcaagacgcgcgggctggcgccggagatgcccga

SEQ ID NO: 441478 - DNA, 221 bp, Triticum aestivum
accaaggcgcccaaggtgagcattcggttcgtcggcacggagctcggcgtcaagccggcgccggccgtggcgtacttctccgcccgcgggccgacccagatgagcccggcgatcctgaagccggacatcgtcgcgccaggggtggacatcctcgcggcatgggtgcccaacaaggaaatcatggagatcggcaagcagaagctctacgccaagtacatgct

SEQ ID NO: 441479 - DNA, 253 bp, Triticum aestivum
aagggtatttggggtggcttgattgggggaacggccttgcagacagtcattatgctatgggtcaccataagaacagactgggccaaagaggtagaggaggcacagaaaaggttgaacaattgggacgagaagaaagagcctctccttgcagggttcaaggacaataacaaataagtggaccagtctagttttgtgtttccagttatccgagtcagaagtgtactggctatgagactcgccgtgggcgtgggtg

SEQ ID NO: 441480 - DNA, 294 bp, Triticum aestivum
aagcgcgcccccggcccgcgcaaggacgaggtggtgacccgcgagtacaccgtcaacctccacaagcgcctccatggatgcaccttcaagaagaaggcaccaaatgccatcaaggagatcaggaagtttgcacagaaggccatgggaaccaacgatgtccgcattgacgtgaagctcaacaagcacatctggagcagcggcatcaggagtgtccctaggagagtccgtgtcaggattgcccgcaagaggaacgaccaggaggatgctaaggaggagctgtactctctggtcaca

SEQ ID NO: 441481 - DNA, 371 bp, Triticum aestivum
gcagaagctggccaagaagcagcgccagaaccgccccatcccctactggatccgcatgaggaccgacaacaccatcaggtacaacgccaagcgcaggcactggcgccgcaccaagctcggattctaagccggggatgacgatgatgacgcccgttgccgccgacgggagaagggtctagggtacctagggtttatggcgtctcgttgtttttgcaagctagcatgtgactccgggatgcctgttttaagattaagatttcgcttgtgttgagagatattattatttactgcttgtagcctacctgggataccatcatattttgctgattatggaacagcttttatcctgcttaagctctgtattttgcccg

SEQ ID NO: 441482 - DNA, 361 bp, Triticum aestivum
aagatgctgtcgaggatctcccgccttggcgtccacgccctgaaccgggcgaggctaggtcaaaagtcagtaacttcaaggaatcaggaagaacccatcagagcctgtatgaactatgtgggtaatcattctctatgttccgccacggaagctaaagtcagtgacaggagcgaacagccgaaagctaagatatctgtgacatttgttgataaggatggcgatgaaacggttatcaatgttcctattgggatgtcaatgctggaagctgctcatgagaatgacatagaacttgaaggagcatgtgagggctctctagcatgttctacctgtcatgtgattgtaacggacgtagactactata

SEQ ID NO: 441483 - DNA, 218 bp, Triticum aestivum
ccatgttgaccgacaagattatcagctgattgacataactgatgatggatatgtcagccttctaactgagagtggcaacacgaaggatgacctgaagcttcccactgatgatgttctgcttggccagatcaagactggatttgctgatggcaaggacctgatcctgtctgtgatgtccgccatgggtgaagaacagatctgcgctgtgaaggaaatcg

SEQ ID NO: 441484 - DNA, 237 bp, Triticum aestivum
gaagcgcgcccccggcccgcgcaaggacgaggtggtgacccgcgagtacactgtgaaccttcacaagcgcctccatggatgcaccttcaagaagaaggcaccaaatgccatcaaggagatcaggaagtttgcacagaaggccatgggaaccaacgatgtccgcattgacgtgaagctcaacaagcacatctggagcagcggcatcaggagtgtcccgaggagagtccgtgtcaggat

SEQ ID NO: 441485 - DNA, 384 bp, Triticum aestivum
gataagtttgcgaagatatgggacatgcagacaaaaacatgtgtccaaacatttggagaattcaagtcttcggttatttctgttgtttcccatcccagtcttccagttttaattataggcacaagagatggtgctattcatttgtggggcacaaatttcaggtacaagcgacaacttagcattggcggtcctggaggtgctaatggtctcacatgtctgacggcgttaggaagggttgtgatgggaaatgagtcggcgctattcatgatggagatccttgatgaagaaccagatgctcctgtcggaagtgaagaagcagttggtagctcgggcagcaattgaaattcccagtgtgggagacggtcgattatgaaatctgaattg

SEQ ID NO: 441486 - DNA, 310 bp, Triticum aestivum
aactccatcaagaagacccaccgcgtgctgatcgtggaggagtgcatgcggacaggcggcatcggcgctagcctgaggtcggccatcatcgacaacttctgggacgagctggatgctcgccccgtgtgcctgtcgtcgcaggacgtgccgaccccgtacgccgagaccctggaggacgcgaccgttgtgcagcccgcgcagatcgtggccgcggtggaggagatctgccaatagtaacgctgtcatgagttacatgtttcgaggattcagaagcagcgtgcgtgtccagtttgctttgtcgtgtaattag

SEQ ID NO: 441487 - DNA, 296 bp, Triticum aestivum
tggcggcggtgcggatctgtttgtgcacttccgcaacatccaagcctccggcttcaaatccctcaaggagggccagcaggtcacgttcgtcgccgtccaaggccagaaaggcatgcaagccaatgaagtcatcactgaggagtaattaagtaatcttccggcgcccgcttctatctcgtttattctggatctcacactctgtaacacgtactacgtccggtctgcttgttggccaataattgtgtggggctgaacaaccatgtatgcacttttgtcatgttgactttcaactttgg

SEQ ID NO: 441488 - DNA, 242 bp, Triticum aestivum
cagataaggcagctgggaccaggaatgattcagcaaatgcagcagccttgcaacgagtgcaggggaagtggggagaccatcagcgataaggatcgctgtgggcagtgcaaaggtgagaaggtggtgcacgagaagaaagtcctggaggtggtggttgagaagggaatgcagcatggacagaagatcaccttccccggcgaggcggatgaagcgcctgataccgttactggagacataatctt

SEQ ID NO: 441489 - DNA, 223 bp, Triticum aestivum
gaggagaaaggtggaatcaagaccgatgcttttttcgaaacaagtgtccatggagtgtatgccgttggcgacgtggcgaccttcccgatgaagatctacaacgactagaggagagtggagcatgtcgaccattccaggaagtccgcggagcaggccgtgaatgcgatcaaggggaaagaggcgggctctgccgtggaggagtacgactacctgccctacttct

SEQ ID NO: 441490 - DNA, 234 bp, Triticum aestivum
atacaacagagtcctgtccacccactccctccttgagcacactgatgtgtctatccttcttgacaatgaggccatctatgacatctgccgccgctcccttgacattgagcgcccaacatacaccaacctcaacaggcttgtttctcaggtcatttcatcgctgacagcttccctgaggtttgatggtgctctgaatgttgatgtcaatgaattccagaccaacttggtgcccta

SEQ ID NO: 441491 - DNA, 180 bp, Triticum aestivum
ggcaagaaggtcatcctcttcggcgtccctggcgccttcacccccacctgcagtaatcagcatgtaccaggcttcattactcaggccgaggagctcatagccaatggtgtagacgagatcctgcttgtcagcgttaatgacccctttgtcatgaaagcatgggcgaagacatacccagat

SEQ ID NO: 441492 - DNA, 236 bp, Triticum aestivum
aaaagcgggcctcacgagattcggagcgtgaagcgcatcttcctgctggagacgctggagaatgagctgccggagggcaccatcaggtactcctccaagatcgtcgacatcgaggaagagggcaacgtcaagctcctgcacatggccgacggttgcaccatcagagccaacgttcttgtggggtgcgacggagtgaactcggtggtggcgaggtggctgggcctgcccaagccgat

SEQ ID NO: 441493 - DNA, 300 bp, Triticum aestivum
agccaggctaacttcatcagtatcaagggacctgagctgctgaccatgtggtttggtgagagtgaggctaatgtgcgtgagatctttgacaaggctagagggtcagcaccatgtgtcctcttctttgatgagcttgactctattgccacccagagaggaagcagcgtctgcgatgctggaggtgcagctgatagagtgctgaaccaactgctgactgagatggatggcatgaacgccaagaaaactgacttcatcattggtgctaccaacaggccagacatcatcgaccctgccctgctt

SEQ ID NO: 441494 - DNA, 368 bp, Triticum aestivum
gcgccgccggctgtctccctcctccaactccgcccacaccctcgccgccggctgcctccgccgactccgccacgcccctagccgctcgaccccgacccctccacgtccctcgccgtcgtgccccgacttcgccccgccctcaccgacagacgccgtttcaatcatggcacgccgaggattgatggagcaggacctaaccaagcttgatgtcaccaagctccacccgttgtcacccgaagtcatctcgcgccaagcgaccatcaacattggtacaattggtcacgtggcccatggaaagtctactgttgtgaaagctatatctggagttcagactgttcgcttcagaatgagcttgaacgtaacatcac

SEQ ID NO: 441495 - DNA, 233 bp, Triticum aestivum
ggcagttccactgcctcgccatgggcaagattaagagcggaatcaacggtttcggaaggatcgggaggctcgtcgccagggtcgccctccagagcgacgatgtcgagctcgtcgccgtcaacgacccctttatcaccaccgagtacatgacctacatgttcaagtacgacaccgttcacggccactggaagcacagtgacatcaagctcaaggacgacaagacgctgctcttt

SEQ ID NO: 441496 - DNA, 277 bp, Triticum aestivum
  unsure (1)..(277): unsure at all n locations
cgacctcgncaacctcgacctcagcgactgcaccgacaagatcatcgtcgagtacctctggattggaggatccggtatcgacatcaggagcaaagcaaggacggtgaacggccccatcacggacgcgagccagctgcccaagtggaactacgacggctccagcaccggccaggctcccggagaggacagcgaagtcatcctctacccccaggccattttcaaggacccgttcaggaggggcgacaacctccttgttatgtgtgactgctacacacca

SEQ ID NO: 441497 - DNA, 173 bp, Triticum aestivum
gccggaggcggaggcgatggtggacgtgtggctggaggtggaggcccaccatgtacaaccccgcggtcagcgccatcgtggtgcagtgcatcatcttgccgctcctgggcggtgcgcgggaccagtcggtggtggacgagaacgtggacaagcttaagaaggtgctggaggtg

SEQ ID NO: 441498 - DNA, 259 bp, Triticum aestivum
acatcctccatgggaagtttctttccaggtcgacgggttatcattgtatcagataccataccaactcctactggcacttgttgattttgaagagaaatttgaacagatacttttgatgaactcccaagtgttataatatcaccatcagcaagttcgggaggcgcactccaacgactagaaccaacatcacgatgggtaactgcctgggaattcaagaaggttccattcaaactgcccatatacacaagttcccatctga

SEQ ID NO: 441499 - DNA, 346 bp, Triticum aestivum
cccgagtgcgctcgccgcattccgatcccgccggccaattggttcggcgccggcgcgggggcgatggtgtcgggcgggtgcgtggggacggaagggggcgcggagccggaggagtccgcggcggtagcggccgaggaggtggtggcggcgacggcgcccgcgcgcgccagggagctggtggtcgggtacgcgctcacgtccaagaaggccaagagcttcctccagcccaagctccgggggctcgccaggaagaaaggcattcaatttgttgcaattgatcaaaagcttccactgtcagatcaaggcccttttgatgttattctgcataagttgactggaaaggagt

SEQ ID NO: 441500 - DNA, 245 bp, Triticum aestivum
ggagaggaagcagaagctcaacaggtacaggaagaagaagatccagaggaactttggcagaaagatcaagtatgcttgcaggaaggctctggcagacagccagccgagggtgcgagggaggttcgccaagatggacgacggcgacatgctcaagccgaggaagtagacggggccatggaggccgccgccaagccgatgaggatggaagacaaaggttgttgcaaggagggaattaagctgctgct

SEQ ID NO: 441501 - DNA, 295 bp, Triticum aestivum
tcccccggcagcccaaacatggactctagcaggcgcccgagtggaatccagcaattgcttgctgcagagcaagaggctcagcaaattgtaaatgctgctagggctgctaaaacggcaaggcttaggcaagccaaagaagaggctgagagagaaatagctgagtaccgtgcacaaatggaggctgatttccagaggaagctcactgagaccagcggtgactctggcgcaaacgtcaaacgccttgagcaagagacaaacgtaaagattgagcagctcaagcagcaggcagcaaaca

SEQ ID NO: 441502 - DNA, 145 bp, Triticum aestivum
gcctactgcggcaagtacaaggatgagctcatcaagaacgctgcctacattggcacccctggcaagggtatcacttgctgctgatgagtccggcaccatctgcaagcgcttcgccagcatcaatgttgagaacgttgaggacaac

SEQ ID NO: 441503 - DNA, 208 bp, Triticum aestivum
ggagggcagggaggcgggatggacgccgcgctcctcgacgacatcatccgccgtctgctcgaggtgcggacggcgcgccccggcaagcaggtgcaggtctccgagtcggagatccgccagctatgcaccgccttctgcgacatcttccttacccaggccaacctgctcgagctcgaggcgcccatcaagatctgcggtgatatccatg

SEQ ID NO: 441504 - DNA, 234 bp, Triticum aestivum
  unsure (1)..(234): unsure at all n locations
caagagccgntagtgtcctagcccaattcagatccttagctgcagctggttttagttgcttcccctctggtgctgaggtagaagaagaaggaggaggtagcagcatcgccatgagcccgccgagtgtgatggggcagttcggggacacgacctacaccaaggtgttcgtgggcgggctggcgtgggagacccagaaggagaccatgaggaagtacttcgagcagttcggggaga

SEQ ID NO: 441505 - DNA, 367 bp, Triticum aestivum
tcccgatctcgctggcgctgctggaccggctgcggctggggcggctgccgccgggcccgcgcccgtggccggtggtgggcaacctgcggcagatcaagccggtgcggtgccgctgcttccaggagtgggcggcgcggtacgggcccatcatctccgtctggttcggctcctcgctcaccgtcgtcgtctccacctccgagctggccaaggaggtgctcaaggagcacgaccagcagctcgccgaccggccccgcaaccgctccacccagcgcttcagccgcaacggccaggacctcatctgggccgactacggcccgcactacatcaaggtgcgcaagctctgcaacctcgagctcttcacccagaa

SEQ ID NO: 441506 - DNA, 351 bp, Triticum aestivum
ggaggagaatgtgagcacattgacgattctggtgatggggaagggcggtgtggggaagtcatccactgtcaactccattgtcggggagagggtcgcgaacgtcagtgcgttccagtctgagggtctgaggccaatgatgtgctcccgcaccagggcaggattcaccttgaacattatcgacactcctgggctcattgaaggtgggtatatcaatgagcaggctgtcgaaatcataaagaggtttcttctggagaagactattgatgtcctcctgtacgtcgatcgcttggatacatatagaatggatacattggatgaacaagttataagagccattactaattcattagg

SEQ ID NO: 441507 - DNA, 322 bp, Triticum aestivum
gcagagcttcctcccgccctcggcccacgcggcgaggtcgtcgtcccggcaccggcccagccgcgcccgccccttccagtgcgcggccgtctccgcgccgtcgtcgtcggccgcctcgccgtcggcctcggccgtcccggcggagcggctggagcctcgcgtggagcagcgggagggcggctactgggtgctcaaggagaagtaccgcaccagcctgaacccgcaggagaaggtgaagctgggcaaggagcccatggcgctcttcacggagggcggcatcaaggagctcgccaagctgcccatggagcagatcgacgccgac

SEQ ID NO: 441508 - DNA, 254 bp, Triticum aestivum
cccatacgtggtcagggtgcagctcgcgctccacctcaagggcgtgagctacgagtacgtcgaggaggacctcgccagcaagagcgagctcttcctccgctccaacccggtgcacaagacagtcccgatcctcatccacaacggcaagcccgtctgcgagtcccaggtcatcctccagtacatcgacgaggccttcgccggcgtcggaccgcccctcctccccgctgacccctacgagcgcgccgtcgcgcgat

SEQ ID NO: 441509 - DNA, 320 bp, Triticum aestivum
taaagaaatggcagccgagacgttcctcttcacgtccgagtctgtgaacgagggccatcccgacaagctctgtgaccaagtctccgacgccgtcttggatgcctgcttggcccaggatgccgacagcaaggtcgcctgcgagaccgtcaccaagaccaacatggtcatggtcttgggcgagatcaccaccaaggccaccgtcgactatgagaagatcgtgcgtgacacctgccgcaacatcggtttcatctctgatgacgttggtctcgacgccgaccgttgcaaggtgctcgtcaacatcgagcagcagtcccctgaca

SEQ ID NO: 441510 - DNA, 226 bp, Triticum aestivum
atgctttcctcctatgccccagggatctcagctgacaaggcttaccatgagcagctgtccgttgctgagatcaccaacagcgcctttgagccttcgtccatgatggccaagtgcgacccccgtcacggcaagtacatggcctgttgtatcatgtaccgtggtgatgttgtgccaaaggacgtgaacgctgctgtggccaccatcaagaccaagcgcactattcagt

SEQ ID NO: 441511 - DNA, 290 bp, Triticum aestivum
ccactttattaaccacatgtcgatgctggaagccttcttcggcaagggcggcgccgccgccggcggcggcttccgcgccgccaagtgcaagacgctgctcaagctgtccatcccgcggataaagctgctgcggaaccgccgggagctgcagctgcgccagatgcgccgggacatcgccaagctcctcgaggccggccaggaagccaccgccagaatcagggtggagcacatcatccgggaggagaacatgatggcggcgcaggagatcctggagctcttctgcgagctcg

SEQ ID NO: 441512 - DNA, 258 bp, Triticum aestivum
ctgctcctatttcgtccatgatgaccgtgaagcgatggtcacgtggccctgcaaccacacaaatcgggaagccagctgtgcatatggctagcgttgacttgagaggaaaagcatatgagatgttgaggcagaattcatccagctgcttgttggaagacatctacagaaaccctggaccactccaattcgaagggccaggtgctgatgccaagcctatttcactgtgcgtcgaggatcaagactacatgggcaggatca

SEQ ID NO: 441513 - DNA, 250 bp, Triticum aestivum
ggtgaagctcgcattcgggagctgcggtgactccttcagcgccacgtccgtcagggcgtatgtggcggagttcatcgccaccctcctcttcgtgtttgccggcgttgggtccgccattgcctatgggaaactcaccgatgatggcgcgctcgacccggctggccttgtggcgatcgcgatcgcccacgccttcgccctcttcgtcggtgtcgcgatcgctgccaacatctccggcggccacctcaacccc

SEQ ID NO: 441514 - DNA, 219 bp, Triticum aestivum
ggctgcatcgaccgcatcaagcggcgcgtcaacaagatcaaaggagtgaaggaagtgacggtggacgctgccaaggacctggtgaaggtgactggcaccatggacgcagccgccctgccgggctacctcagggacaagctcagtcggacggtggaggtggtcacccccggcaagaaggacggcgacaagaaagacgacggggagaagaagaaggacaag

SEQ ID NO: 441515 - DNA, 256 bp, Triticum aestivum
ccgacgacgcgcgcaagtgcagccgcgcccgcttcatggactgcaccgagaagctcggcaccttcaccgacgacaacgtcgagttccagcgccgcatcgtggagcgctccgggctgggcgaggagacgtacctccccgaggccgtgctcaacctcccgcctaacccctccatggccaacgcgcgcaaagaggccgagctggtcatgttcggcgcgctggaccagctgttcgccaagacgggcgtcaagcccaagga

SEQ ID NO: 441516 - DNA, 299 bp, Triticum aestivum
atcagatcaatccggtttacgtcggatgggcagttcctgtcgatggcggaaccagcggactttgtccatatctttgacgtgaagagcgactacaacagaaggcaagagctggacttcttcggcgagatatctgggatgtctttcagccccgacacagacgccctcttcgtcggcgtgtgggatagaacatatggtagcctcctccagtttgggcgtctgtataacaattggtaccatgacacgctgctttgaggctaaagcggagcggatgtcgggcctgcatgtctgtccccccacag

SEQ ID NO: 441517 - DNA, 287 bp, Triticum aestivum
cagctcttgtgcgccatggtcgtgcgcaagccggcgcacctcttcctcgacgagctcaacatcgagtacgacgagcaggaggactacgtcgtcatcaagcacgccgcgctcttcacctccacggtcatgagccgcctcctcgcgcgccccaacgtgaagctcttcaacgccgtcgccgtggaggacctcatcgtcaaggagaaccgcgttgccggcgtcgtcaccaactgggcgctcgtctccatgaaccacgacacacagtcctgcatggaccccaacgtcatgga

SEQ ID NO: 441518 - DNA, 291 bp, Triticum aestivum
agccgcgtcttcttcgccaacgatggcgacgtggagctgcaggcgtggtggaaggaggcgcgcgaggttgggcacggcgacctcaaggacgcgccatggtggccgaggatgcaagccgtgggcgagctggccaaggcgtgcaccaccatcatctggatcggatcggcgctgcacgcggcggtcaacttcgggcagtacccatacgcggggttcctcccgaaccggccgacggtgagccggcgccgcatgccggagcccgggacggacgagtacgcggagttagagcgcgac

SEQ ID NO: 441519 - DNA, 300 bp, Triticum aestivum
cgcacacacactctctgcatgttccatgtgttttgtcacgacagctgggcatgatcatcaacgagacgctccggctgtacccgccggcggtggcgacgatccggcgcgccaaggcggacgtgcggctgtcggacgggtgcatgatcccgcgcgacatggagctgctcatcccgatcatggccatccaccacgacgcgcggcactggggccaggacgcggcgcagttcaacccggcgcggttcgccggcggggcggcgagggcggcgaagcacccgctggccttcatacccttcgggctcg

SEQ ID NO: 441520 - DNA, 256 bp, Triticum aestivum
gctcagttcttgtgctctgcctcgtaaccggaggcgcgaggtgcaacaagttaagcagcaatttctatgactggacgtgccccggagtgtacaacatcgtccagcagcacgtgttttctgccatgagggaagagctgagaatgggggcctcccttctcaggcttcatttccatgactgctttgtcaatggctgcgatggttcaatcttgctggatggcgctgatggcgagaaatttgcactacccaacatgaactc

SEQ ID NO: 441521 - DNA, 196 bp, Triticum aestivum
gaatctaccgggagatcctgccgaacccagagcacctggtctccaaggcgctttacaccttcgacatcggccagaacgacctcaccgtgggctacttcgacaacatgaccaccgagcaagtcgcggcctacgtccccgatctaatggagaggatctcgtccgcgatccaggccgtgtacgaccttggtgggagata

SEQ ID NO: 441522 - DNA, 341 bp, Triticum aestivum
cagatggcatcctcctcttacttccttctcctcgccgctcttgttgcgttggtctcatggcaggccactgcctccgatcctagccccctccaggacttttgtgtcgccgacatgaattcaccagttcgtgtcaatggctttgtttgcaagaacccgatggaagttaatgcagatgacttcttcaaggcagccaacctcgacaagcctagggtgaccaacaaggttggatccaacgtcactttgatcaacgtcatgcagattgctggactcaacaccctcggcatctcaattgcgcgcatcgactatgcttccttgggtcagaacccaccacatacgcaccc

SEQ ID NO: 441523 - DNA, 275 bp, Triticum aestivum
tggagagggagacggagacgctgcgggagctgctgcgccagcaggggcccgactgcaagctcatcttcgcgggccactcgctcggctccggcatcgccgcgctcatgacggtgctggtggtcaacaaccgcaaggcgttcggcaatatacccaggagccacatacggtgctacgcgctcgcgcccgcccggtgcatgtcgctcaatcttgccgtcaagtacgccgacgtgatctactctatcgtgctgcaggatgattttttgccaagaacacca

SEQ ID NO: 441524 - DNA, 231 bp, Triticum aestivum
ggcgtcgccgtcgccgtcgccgcgcgccagatctcctccacgcgctcgcggtgcgccctcgccgcctgcgcgatctacccggccaagatggcgacctatgagcccaagaacatcctcataactggtgctgcgggtttcattgcatctcatgtggcgaaccgtctaattaggagctatcctcactacaagattgtcgtcctcgacaagattgactactgctccaacctgaaa

SEQ ID NO: 441525 - DNA, 286 bp, Triticum aestivum
gagaacgagaagaacgaggtcattgttgctgacaactttttcactgggtcaaaagacaacctgaagaagtggatcggacacccaagatttgaactcatccgtcacgatgtcaccgaaccactgctcgcggaggttgaccaaatctaccaccttgcttgccctgcctcaccaatcttctacaagcacaaccctgtcaagaccatcaagacgaatgtcattggaaccttgaacatgcttggacttgcaaagagagttggagctagaatattgttgacttcgacctctg

SEQ ID NO: 441526 - DNA, 304 bp, Triticum aestivum
caccactagcctgcctgcctgcctgccgccaaggcaagatggtgaagatctgctgccttggggctggctatgtgggtggcccaacaatggcggtcattgccctcaagtgtcctgacattcaggtggttgtggtagatatcaccaagtcccggattgatgcctggaacagtgacacactgccaatctatgagcctggccttgatgaagtcgtgaagcagtgccgtggaaagaacctcttcttcagcaatgacattgagaagcatgttagtgaagctgacatcatctttgtgtcggtaaacacccc

SEQ ID NO: 441527 - DNA, 174 bp, Triticum aestivum
tcaactacacctccggcaccacgtcggcgcccaagggcgtcgtgcactgccaccgcggcatcttcgtggtcaccatggactcgctcgtctcctggtccgtgccggagcagtcgacgtacctgtggacgctacccatgttccacgccaacgggtggagctttccgtgggggatgg

SEQ ID NO: 441528 - DNA, 295 bp, Triticum aestivum
agcacggcgacctagcccgagctcgcaaccatggctaggggtttgaagaagcatctgaagaggctcaatgccccgtctcattggatgcttgacaagcttggtggagcttttgcccccaagccatcatctggtcctcacaaggccagggagtgcctgcctctgatcctcatcctgaggaacagactgaaatatgctctcacctaccgtgaagtgcaatctatccttatgcagcgccatatcatggttgatggaaaggtccgcactgacaagacctaccctgctgggttcatggaca

SEQ ID NO: 441529 - DNA, 219 bp, Triticum aestivum
tggccgtggcggcgctccggtgcgcgccggccgccgcggagctcccgctggtggagcacccggccaagaacgacgggtcgctcagcctgctcgtcgtcggggactggggccgcaacggcacctacaaccaatccagggtcgcggagcagatggggaaggtcggggagaggctggacatcgacttcgtggtctccaccggcgacaacttttacgagaatg

SEQ ID NO: 441530 - DNA, 199 bp, Triticum aestivum
gggatggatactatatccatggtcagtgtgcgataatcatgtttgatgtcacttcaaggttgacatacaagaatgttcctacgtggcacagggacttgtgcagggtgtgtgagaacatccccattgtcctgtgccgggaacaaggttgatgtgaagaacaggcaggttaaggccaagcaggtgacattccacaggaaga

SEQ ID NO: 441531 - DNA, 228 bp, Triticum aestivum
  unsure (1)..(228): unsure at all n locations
agcatntgaagaggctcaatgccccgtctcactggatgcttgacaagcttggtggagcttttgcccccaagccatcatctggtcctcacaaggccagggagtgcctgcctctgatcctcatcctgaggaacagactgaaatatgctctcacctaccgtgaagtgcaatctatccttatgcagcgacatatcatggttgatggaaaggttcgcactgacaagacctacc

SEQ ID NO: 441532 - DNA, 286 bp, Triticum aestivum
catgaatcccgaatatgactacctcttcaagctgctgctcattggggactcgggcgtggggaagtcttgcctgctgctgaggtttgcggatgattcatatctggagagctatatcagtactattggtgttgacttcaaaatccgcaccgttgagcaagatgggaagacgataaagctgcaaatttgggatactgctggacaagagcgatttaggaccatcacaagcagctactaccgcggtgcccatggcatcattgttgtgtatgatgtgactgaccaggagagc

SEQ ID NO: 441533 - DNA, 187 bp, Triticum aestivum
gccatggcgtccgggaagcacttcaagtacatcgtcctcggcggcggcgtctccggggggtacgcggcgcgggagttcgccaaacagggggtgcagccgggggagctcgccatcatctccaaggaggcagtggctccttacgagcgccctgccctcagcaaggcatacctgttccctcagagtcctg

SEQ ID NO: 441534 - DNA, 331 bp, Triticum aestivum
ctcaagaaccagactgtcgatcttgtgttcacagcgcaccccacgcaatccgtcaggaggtccctgctccagaagcacgggaggatccgaaattgcctgaggcagttgtatgcaaaggatatcactgccgatgacaagcaggagctcgatgaggctctgcagagggagattcaagctgccttccgaaccgatgaaatccgcaggacacctcccactccccaggatgaaatgcgtgccggaatgagttatttccatgaaactatatggaagggtgtaccaaaattcttgcgccgtattgacactgctttgaaaaatattgggattaatgagc

SEQ ID NO: 441535 - DNA, 182 bp, Triticum aestivum
cgagacgttcgagtgctcgcacgacctgttccgctccgccttcctgcgcggtttagcgtgggaggtggtcaaggactactccggcccaccggtgatcgccttcaagttccggcactggggccacatggaggggccctacaagggcaacgcccccaccggggacaaggtcgagttctacggcg

SEQ ID NO: 441536 - DNA, 240 bp, Triticum aestivum
cacgtggagccatgatctttttccgaagggggtgaaagaaataaacaaacaagggaaggaggttaagtatgattttgaggacaaaatcaatgcagctgtcttcccaggtctgcaaggtggaccccataaccatactattactggccttgccgttgcgcttaagcaggcaactactcaggagtacagagcttatcaagagcaagttatgagtaactctgctagatttgctgagagcttaac

SEQ ID NO: 441537 - DNA, 302 bp, Triticum aestivum
agcactcacggctgatcttgtttctgttttacaggaatatcagcacctcatggccgcatatgagtatgaaaggaaactgaaggtggaccactccgagtcgctgcagggaatgaagaaaaattatgactccatggttacagagttagagaagcttcgtgctgagttgacaaacacaactaatattgacagaagtggtactttgtacaatcctaattttgctcagaaggatggcggtacatctagccaccattctgcttatgatggtggctatggggttgcacaggctaggacgccccctggta

SEQ ID NO: 441538 - DNA, 304 bp, Triticum aestivum
agagaatcaaatgaagcagtttttatttttacaggaacagatcgcttatatccaggaccacattgcacgatttggtcatggatctgcgaagcttgctcgtcaggctcagagcagagagaagactcttgcaaagatggagcgtggtggtcttgctgagaaggttgtcaatgacaggattcttgtattccgctttacagatgttggcaaactcccaccaccagtgctgcagtttgctgatgtcacatttggttacactccggataatctcatctacaagaaccttgacttcggtgttgaccttgac

SEQ ID NO: 441539 - DNA, 270 bp, Triticum aestivum
tggcactaccagagccgccgtttccttatcacctacgagggcatcatgtacccgctccgcgtcaccgacgagctccagcagtggcccgagatggcgtcccgcaagcgcacctgggcaactgtgcagcaggtcatggagggatgccagcactgctggatgcgggaggcgctcgaggagctcgtcgcccggcacgccaagccgcagtccgccctgtgagcagccaagcgggctggcggggtgactggagctcgagcgcgcgcgactctcgcg

SEQ ID NO: 441540 - DNA, 314 bp, Triticum aestivum
atctgccctctctctctctgtcgtcctctgtgatacgatccgcgatggctttccgggcgcggaggaggagcgcggcggcgagggccccggcgcacctgtgcctgtggctggcgctcgtcgccgccaccctggtgctcgcccagggtaagaagtcgaacctgtcggaggtgacgcacaaggtctacttcgacattgagatcgacggcaagcccgcaggtcgggttgtcatgggacttttcggcaaggctgttcctaaaaccgcagagaacttcagagcactctgcacaggagagaaaggcatgggcaacagcggc

SEQ ID NO: 441541 - DNA, 321 bp, Triticum aestivum
cagcggcagcgcaagaggttgtttgttattatcaccaccaccactcattatacggcggccgagactttcctcttcacctctgagtctgtgaacgagggccaccctgacaagctctgcgaccaggtctctgacgctgtgcttgacgcgtgcctcgcccaagacgctgacagcaaggttgcctgtgagacatgcaccaagaccaacatggtcatggtttttggtgagatcaccaccaaggccactgttgactatgagaagattgtgcgtgacacctgccgcaacattggcttcatctctgatgatgttggccttgatgctgac

SEQ ID NO: 441542 - DNA, 255 bp, Triticum aestivum
cccgccctgcgccctgctgttcgtacagatcacacgcctccggtgcggcggcctggtgctcggccaggcgatgcaccactcgatcgtcgacgcgcgcggcgccgcccacttcttcgagacgtgggcgagcatctcccgcggcggaggcgcgcccaccgtgtcgccgtgcttcgaccacacgctcctcgccgcgcgcccgccgcagtcgcgggcggtgctgtacgaccacccggagtacaagccggagccggagcc

SEQ ID NO: 441543 - DNA, 293 bp, Triticum aestivum
cgctcacccggaacctccccgtggcttttttcggtcgcccgagacctccccgtcgccgccgatctaccggagcctccgctcgtctccccgctgatatcctcctcctcctcctcctcgccggagacaacatgtcgacgcttgccgcggcgagggccgacaacttctactacccgcccgaatggagcccgaagaagggtgggctgaacaagttccacggccaacatgccctcagggagcgggccaggaagctggatcagggcatcctgattataagattcgagatgcctttcaat

SEQ ID NO: 441544 - DNA, 316 bp, Triticum aestivum
tctcccctgcctctctccagtgtactcatgtcccccaccaccgaagctcttaaccccacccgaagcggcagccatggcccccaaggcagacaagaagccggcggccgagagcaaggtggagaaggcggccgagaagacccccgcgggcaagaagcccaaggccgagaagcggctgccggcgggcaagacggcgtccaaggaggccggcggtgagggcaagacccggggccgcaagaagggcagcaaggcgaagaagggcgtggagacgtacaagatctacatcttcaaagtgctgaagcaggtgcaccccgacatc

SEQ ID NO: 441545 - DNA, 307 bp, Triticum aestivum
acaggagttacaactattgttgttggtttttcaagcagaggagggcatgttgatggaccaagtgacgatgcaaaattttctactgattttgaagtccgttacattgccagtagctgctcccttttggtgattgacagaggaaatcaagctattcgggagattcagctcaactttgatgactgtgtgtaccagtatgaagctggttttcctctaggagtagcactgcttcttgctgctgctttcttcggctacatgcttgcattgctccaacgccgggttttagggatggtatcaacagaagatgaac

SEQ ID NO: 441546 - DNA, 303 bp, Triticum aestivum
cacaattggttgcaacactgatcgttgtctatgccaactgggacttctcacggatcaagggaatcgggtggggctgggctggtgttatctggctgttcagcattgtgttctacttcccactcgacattttcaagttcttcatccgatttgtgctgagtggaagggcctgggacaacctcctgcagaacaagactgctttcaccaccaaagagaactacggcaaaggggagagggaagcacaatgggctaccgcacagagaacactccatggccttcaagcaccggagccggcctcccacacac

SEQ ID NO: 441547 - DNA, 300 bp, Triticum aestivum
atcgagacaacccgtgaagcaagtcctacttttatcattgggaagtttgatggtatacttggccttggatttccggagatttccgtgggaagtgcccctccaatttggcagagcatgcaagagcagaagctgatagagaaggacatcttctccttctggcttaaccgtgatcccgatgcatccgcgggaggtgaactcgtgttcgggggtgtggacaaaaagcactataaggggaaacacacatacgttccggtcactcgtaaaggctactggcagtttgacatgggtgatcttctcatt

SEQ ID NO: 441548 - DNA, 352 bp, Triticum aestivum
gggtgcggcgcccgcgtcggcgtcattcttaggtcctgcagccttcctttagcgctaaggacaggccagcaatctccatgatcgaagatgcggagaagaaggggctgataaccccaggcaagacgacgctgatcgagcctacatccgggaacatgggcatcggcctggcgttcatggctgcactcaaagggtacgagctcgtgctgacgatgccatcatacaccagcctcgagaggagggtggtcatgaaggccttcggtgcgcagctcgtactcactgacccggcgaaggggatgggaggcaccgtcaggaaggcaacccagctctatgagaaccatcccagcgccttcat

SEQ ID NO: 441549 - DNA, 327 bp, Triticum aestivum
gcaagccggagtacaccgacctcttgttttacaaactgaagcaccaccctgcgcagatcgaggccgccgccatcatggagcacatccttgaaggaagctcctacatggcactcgcaaagaagctcggcgagcttgacccgttgatgaagccaaagcaagataggtatgcgctccgcacatcaccgcaatggcttggcccccagattgaggtcatccgtgctgcaaccaagtcgatcgagcgggagatcaactccgtcaacgacaacccactcatcgacgtctcccgcggtaaggccatccacggtgggaacttccagggcacaccta

SEQ ID NO: 441550 - DNA, 380 bp, Triticum aestivum
  unsure (1)..(380): unsure at all n locations
gagtatgttccatatgcttgtgcnctagacaagagtctgacagttgttccagcagcccagaactggatccagcaccagggagatgtgttccatttcccaggaggcgggacaatgtttccaaatggagcaagctcttacattgatgaacttgcatcagtcattccacttgctgatggcaccattaggactgcacttgacactggatgtggggttgcaagctggggtgcttacctaatggatagaaatatattgaccatgtcatttgcacctcgagactcacacgaagctcaggttcaatttgctttggagcgaggtgttcctgctgtaattggagtgcttgggactatgaagctcccatacccatctagatcttttgatat

SEQ ID NO: 441551 - DNA, 281 bp, Triticum aestivum
ccgattacatcataacgacaaaagcgttcgttacagagctggttgactctatgaaaagagtcttggataggttctacggggaggatccgttgcaatcggcggacctgtctcgtattgtgaatattagccatttcggacgattaacgaagttgatagacgacaaagaagttgccaccaagattcagctcggtggccagacagatcaggagcaactaaaaatagctcctacggtgttggtagatgttcctcttgatacagcacttatgacaggggaaatattt

SEQ ID NO: 441552 - DNA, 418 bp, Triticum aestivum
gacgcgtgggtttggatcctgcagatgtattctactcttccttcttcttcttccctcacctctgtttaatccatgatgagcaaattagcggcagcattgtgcatgcagcctcaatcaacaagcaaaccggcagtgcagagaaatcatctccagatactcccatgaattcagcaagcacaaccccaagatatccgctgatgataatagacagggcaagtgcagacatgacaaaggccataaccgatccctcgcacccagaggggcaaaggcttgcgataagaacactgaagggtagcaccttgaagaacatgaggccctctagcagccctgagaacacaatggtgtataaggagtctgatattcccacctttctgtatactccctgaacaaataacacatctgacaacattacaacagc

SEQ ID NO: 441553 - DNA, 353 bp, Triticum aestivum
  unsure (1)..(353): unsure at all n locations
accacggcacggcacaccgtggcgtcctgatccgaggtttttcgtttgtttccctccgacacgctgngacatagcctcttgatagcacaccaaatcaagagctcagcatggctgattccatggcggattcgatggtggcaagcttctgggggccggttacatcaaccaccgagctgtgcgaggagaactatgcgcgctcgtcatacatcgcagagttctacaatactctctctaatgccccttgcattcttttggcgcttattgggctcgtgaatgctctccgccagcgtttcgagaagcgcttcagcgtcctgcacatatccaatatgatactttctattgggagtatcatc

SEQ ID NO: 441554 - DNA, 265 bp, Triticum aestivum
caccgaagaaggagaaggccccggcggcgtcgtccaagccggccaagtccggcggcggcaagcagaagaagaagaagtggagcaagggcaagcaaaaggagaaggtgaacaacgcggtgctgttcgaccaggccacctacgacaagctgctcaccgaggtgcccaagtacaagcagatcacgccctccgtcctctccgagcgcctcaggatcaacgggtctctggcacgcagggctatcaaggacctgatggagaggggactcat

SEQ ID NO: 441555 - DNA, 342 bp, Triticum aestivum
gcttgatggaaccaagaatgtgtggtgtttttgcaagcaaacgcttgttgctcatgcaatcctggctgtgtcactagctgtttgcaaagctggagccagcgtcaagaagattccgctgtaccagcacattgccaaccttgctggcaacaagcaattggttttgcctgttcctgcattcaatgtcatcaatggtggatcccatgctggaaacaagcttgctatgcaggagttcatgatccttcctactggagctgcctcattcaaggaggcaatgaagatgggcgttgaagtgtaccacaacttgaagtctgttatcaagaagaagtatgggcaagatgccac

SEQ ID NO: 441556 - DNA, 321 bp, Triticum aestivum
ccccgccaggcccctcccgctcccttttctcgctcgggtgcttcctccctccctctgtccactccactcgccactggctccgttcggtccgtgaatcttgaccgacccgcctgagccggcagccaccggtggcctgctgccgcctctcgctccagtggtggtgtggctacgagctgcggacggagggggtccgggatggagcggtacgaggtgatcaaggacataggctcgggcaacttcggggtggccaagctggtccgggacgtcaggaccaaggagctcttcgccgtcaagttcatcgagagggggcacaagattgat

SEQ ID NO: 441557 - DNA, 268 bp, Triticum aestivum
tcatccgcggcgatacgatccattatggcgatgagggcgtggagtgttgagcgcggcggcgagggccccggcgcacctgtgcctgtggctggcgctcgtcgccgccaccctggtgctcgcccagggcaagaaatccaacctgtctgaggtgacgcacaaggtctacttcgacatcgagatcgacggcaagcccgcaggtcgggttgtcatgggacttttcggcaaggctgttcctaaaaccgcagagaacttcagagcactctgcaca

SEQ ID NO: 441558 - DNA, 416 bp, Triticum aestivum
agcgtcgctatgctcagcacacttgttttagcaggtgggcacattgtttcaaccacagatttgtaccgcaagacaagaatttacatggagactgagctccccaagaggggaattacgatgactgttattagacctgctgacatggatgctcttcaagatgcacttgataataataatgtatctttattcttcactgagactcctactaatccatttctcagatgcattgatattgagcttgtctccaatatgtgccataacaagggagcattgctatgcattgatagcacctttgcctcccctatcaatcagaaagcactgactttaggtgctgacatagttgttcattctgcaacgaagtatattgctgggcacaatgatgttattggaggctgtatcagtggcagggacgagct

SEQ ID NO: 441559 - DNA, 391 bp, Triticum aestivum
aaatcaaaggttctagttgaggtgttttcagaaggcaaatatgtattttatattgataagagcatcgatatcacaaaaatcacaccttcaacaagagttgctcttcggaatgatagctatatgcttcatttggtccttccaagcaaagttgatccactggtcaatcttatgaaagttgagaaggtcccagattctacatatgatatgattggaggtcttgatcagcaaatcaaggagatcaaagaggtcatcgagcttcctatcaaacatcctgagttatttgagagccttggaattgcgcagccaaaggttgtcctcctttatggaccaccagggacaggcaaaacattactggcacgtgcagttgctcatcacaccgactgtaccttca

SEQ ID NO: 441560 - DNA, 319 bp, Triticum aestivum
cgtactgccttgtggaccgtgcctcgttttttcaactccgtctcccgctcttccaccgagaccttcggctccggcgccctaggctccacggtcgcctcgtccttcaccccgatggtcaagaaccctcggatggagacgttctactacgtgcagctcatcggtatcagcgtgggcggcgcgcgcgtccctggcgtggcgaactccgacctccgtctcgacccgtcgtctgggcgtggcggcgtcatcgtggactccggcacgtccgtgacccggctcgcccgcccggcctactcggctctgcgcgacgcattccgggggg

SEQ ID NO: 441561 - DNA, 334 bp, Triticum aestivum
cgccgaaatcccccagatctcgctccttctttagcgcggcaatggcatttgtggacgccggcgaggggcaggcagcgccggcgcccagggccaccgtctcacacgtcatcttcgacatggacggcctcctcctcgacacggaggggttctacacggaggtgcaggagaagatcctcgcgaggtacggcaaggtgttcgactggtccctcaaggccaagatgatgggcaagaaggccaccgagtcggcgcgcatcttcgtcgacgagtgcggcctcgccggcctgctcaccccggagcagttcctcgaggagcgcgagggcatgctgcaggagct

SEQ ID NO: 441562 - DNA, 276 bp, Triticum aestivum
tttggtgctagactacttgttgtttattcactcctgttgcctggggtgccttcaaaggacccagaaacccagaaagatgttggcaaggctgataagtcaggggacaaggcaggtggtgagaaattgacaattcttcataagcatcgctcttccttggcagacacaatgcacttcagaagaccagctgcaccaacttccagtgtgaatgctgatattgtgggtacatccactctacattctgcaactttgcccaaacaggagtcctcaacagctaca

SEQ ID NO: 441563 - DNA, 239 bp, Triticum aestivum
caaaaccctagccgtcgcgtcacattttgacgccgacgcagcgagctcttcctccaccgccgcaaccatggcgacccagatcagcaagaagaagaagtttgtgagcgatggcgttttctacgccgagctgaacgagatgctgacccgggagcttgccgaggacggctactccggcgtggaggtacgcgtgaggccgatgcgcacggagatcatcatcagggccacgcggacgcagaacg

SEQ ID NO: 441564 - DNA, 336 bp, Triticum aestivum
accttgaggcagcatcggactttgtttttctttgaatcaaacactgtggatacagctaaagaccccttcgacttttcttccactggcaattttggcaaagcagatgtagcacctttggcagctcccaaaactgatgcgtctgactttggtgccttcgttgcaaacactgtagaagcaactaaagacccctttgatctttcttcaagtattaatggaagggcagaccaaacacctttggctgctcccaagcccaacaccaagaaagaaaattttcaggttaaatctggcatatgggctgactctttgagccgtggattaattgatctgaacataact

SEQ ID NO: 441565 - DNA, 355 bp, Triticum aestivum
cgagcagattcgcgccggactcgcgactatttttgatgagataagccctctgccacctcggggttcgcgatgctgcggaaggcggccgtcgggttcctcgcctgcctcgtgctctacctcgccttctcctcctacctccgtagccagagggctgcatatgttcagttaccagcggttactcacagggtatacctggacgtggaaattgatggccaaaatataggtagaattgttattggtctttatggggaagtggtgccaaaaacagttgaaaattttagagccctttgtacaggtgaaaagggcgatgggcccaagggtaaacctcttcactataaaggaacaccatttcatc

SEQ ID NO: 441566 - DNA, 261 bp, Triticum aestivum
  unsure (1)..(261): unsure at all n locations
gagcggcagcgcccgatcggttattctcgcgatggctggcggcggccgcgggttcctcaacctggagcggcacttcgccttctacggcgcgtaccacagcaacccggtcaacgtcttcatccacgcgctcttcgtctggcccatcttcctcaccgccctcctgctcctccacctcaccgccccgttcccgcgcgccgncgcggtcttcaccgccgtctacggggccttctacgtctccctcgaccgccgctcgggcgccct

SEQ ID NO: 441567 - DNA, 265 bp, Triticum aestivum
ctgaccacctgacacacaagctaattttccaccctggacagatcgaggctgccgccatcatggagcacatccttgaaggaagctcctacatggcactcgcaaagaagctcggcgagcttgacccattgatgaagccaaagcaagataggtacgcactccgaacatcgccgcaatggcttggcccccagatagaggtgatacgcgctgccaccaagtcaatcgagcgtgagatcaactctgtcaacgacaacccactcattgacgt

SEQ ID NO: 441568 - DNA, 257 bp, Triticum aestivum
aaatgatgctttcggcactgcacatttttctcatgcttcaaccgttggtgtaaccaagtttttgatgccttctgttgctggcttcctcatgcagaaggaacttgactatcttgtcggagctgttgccaacccaaagaagccatttgctgccattgttggtggatccaaggtctcatctaagattggtgtgatcgagtctctgctggccaaggttgatatcctcatccttggtggtggtatgatcttcacattctaca

SEQ ID NO: 441569 - DNA, 181 bp, Triticum aestivum
aaggtggagccggggctgagcgcgtacgccggacggccgcaggaggcggccaagtccatcgtgcctctgctggagaaggccaagagcaccgtgcctcgctggctcatgaagaaaactcccgtcaaactaggggcgacggctgggctcaggctcatcggagacgagaaagcggagcaaattc

SEQ ID NO: 441570 - DNA, 193 bp, Triticum aestivum
gggcctggcggccggcgcggcgcgggcgtccaacgaggagggggacgcgctgtacgcgctgcggatgcggctgtcggaccccaacggcgtgctccagagctgggatcccaccctcgtcaacccctgcacctggttccacgtcacctgcgacaccgccagccgcgtcgttcgactgtaagcgacagcccttccc

SEQ ID NO: 441571 - DNA, 217 bp, Triticum aestivum
  unsure (1)..(217): unsure at all n locations
cttcttcctctccaagctacattctcggccatggcggcgacgatccagtccgngaaggcccgccagatcttcgacagccgcggcaaccccaccgtcgaggttgatgtgtgctgctcagatggaaccttcgccagggccgctgttcccagcggtgcatcaactggtgtttatgaagctttggaactgagagacggtggatctgactacttgggaaagg

SEQ ID NO: 441572 - DNA, 320 bp, Triticum aestivum
acgtcggcgtcgcggaagcgtgcttttggcagtggcctgcgtggcgccacgtcttccgcggtcgctacggccgccgcaaccgcatctcgtcgatcgtgtcggaggagatgttctcgagcctgttcctgcacaaggacgacacggcctgcccagccagtggattctacaactactcttccttcgtcagcgcggcggagtggttcccggagttcggcagcggagcccaccacgtcgactgggacacgcgcaagcgcgaggtcgcggccttcctggcgcagatctcccatgagaccaccggcgggtgggcgacagcgcccgac

SEQ ID NO: 441573 - DNA, 304 bp, Triticum aestivum
tgcccgggcttaacaagccgggcatgtagtaacgctcatggctcggctgtgacaccggtgacggtgcggcagctgccggggctgaacacgctgggcatctcaatggcgcgcatcgacttcgggcccaacggcgggcagaacccgccgcacacacacccccgtggcaccgagatcctcaccgtgatcatggggcagctgctggtggggttcgtcacctccaaccagcaggacgggaagaacctgctcttcaccaagcagctggtggagggcgacgtgttcgtgttcccacaggggctcatccact

SEQ ID NO: 441574 - DNA, 297 bp, Triticum aestivum
ctgctcaccattccaaggattctcgatctttctgaagagctgcgcatgtctctcgctgctgtgaagtactcccgtgggatgttcatcttccccggtgcacagcctgctccccacaggagcttctctgaggaggttgatgtcctgaaccgctactttggccacctgaagtctggtggcaatgcctatgtgattggagacccagcgaagcctggccagaagtggcacatctactatgccaccgagcaacctgagcagcccatggtcaccctggagatgtgcatgactgggctcgacaag

SEQ ID NO: 441575 - DNA, 268 bp, Triticum aestivum
cgcgtccgccaccattgagattgtcttgctgtttgagggcattgacttctactccaccatcacccgggccaggtttgaggagatgaacatggatctgttcaggaagtgtatggagcctgtggagaagtgtctcagggatgcaaagatggacaagagcaccgtgcacgatgttgtccttgttggtggttccactaggattcccaaagtgcagcagcttctccaggacttcttcaacggcaaggagctgtgcaagagcatcaaccctgat

SEQ ID NO: 441576 - DNA, 233 bp, Triticum aestivum
gcgtggtgccaatgccggcatcatgtgttttgctcgtccgcctcttcttctcacgactgcttcatcaggggttgcgacgcctctgtgctacttgacgtggccgaccctagcagcgccacggagaagttcggccccccgaacctaagcctgcgaggcttcgaggtgatcgacgcggcaaaggctaggatcgagaaggagtgcgggaacgtcgtctcatgcgccgatgtcttagc

SEQ ID NO: 441577 - DNA, 363 bp, Triticum aestivum
agcagagagagaaacggaatctgatttttagaagacttgcagaggatagtgagcaagccgcggaggaggcagcggcaagggaggaggggtcgccggaagggggacatgctccctccacatctcacatctcgcagcttgaactgagagcaagagtagaaacccataagatgagacgcaagcaaaatatgcatgaaaatggcacaatcatgattcagtttggtcagcaagtgcctaactgcgagtcctcagctagcgattctcctcaagaagtgtccgggatgagtgaaggaagctttaatgagcagaatgatcaatctggtaatcgcgatggctacaccaagagtgatgaaggcaagatgatgt

SEQ ID NO: 441578 - DNA, 216 bp, Triticum aestivum
cgcctcggccagtcgtctgcgtttcttaaaccctaaccctagcctcttagctcaggcgacgctcgcgcctccaaatggacgggggaggcacgcatcgcacgccggaggacgtgttcagggatttccgcgcgcggcgggccggcatgattaaggcgctcaccaccgatgtggagaagttctaccagcagtgcgacccagagaaagagaatctatgtc

SEQ ID NO: 441579 - DNA, 277 bp, Triticum aestivum
gatccaaccaatcccggttttttctacgagggtgtttctccgctctactcgtcgacgagatcatggccggaaaaggagacgggccggcgatcggcatcgatctcggcaccacctactcctgcgtcggcgtctggcagcatgaccgggtggagatcatcgccaacgaccagggcaaccgcaccacgccgtcctatgtcgccttcaccgacaccgagcggctcatcggcgacgccgcgaagaaccaggtcgccatgaacccgatcaacaccgtcttcga

SEQ ID NO: 441580 - DNA, 303 bp, Triticum aestivum
cttgatcatttgatctgggcttagtgattactcggcagcaacggcaggcttcgcatccatcgcgctgttcctcgccgtgaacctggtcgtgttctccgtggccagcgcgtgcgggggaaactgcccgaccccgtccacgcccaccccatcgacgcccaccccgaccccgggctcgctcggcaggtgcccacgcgacgcgctgaaggtgggcgcgtgtgtcaacgcgctgaacctggtcaaggtccaggtgggcaggccgaccgcgttgccgtgctgcccgctgctggatgggctcgtcgacct

SEQ ID NO: 441581 - DNA, 270 bp, Triticum aestivum
cacacattccgtggaggattttggaattactttagtatgggtatggatgctcaagtgtcttatgggttccactctgaaaggaagaaaaatccagagaagtttaaaaaccagctaacgaatcagggtacatatgctaaacttggacttaaacaaggatggtttgctccttctctaacccattcttcttcaaggaacatttctcaacttgcaaaggtgaagatcatgaaaagacctggtgccaaatgggaagagcttaaaatccccagcagt

SEQ ID NO: 441582 - DNA, 267 bp, Triticum aestivum
gtccgacccgcgcagctggggcgtcctcgtcaacagcttcgccatgttggacgaggactacgtatcagccttcatctcgttctaccagccggacgcgcgagcctggctggtgggccctctgtttctcgccgccggcgacgtgccggaccgcgtgggggagcaggaccccgaggggtgcctcgcgtggctcgaccagatggcggagcggtcggagtcggtgatctacgtgtcgttcggcacgcaggcccatatctccgacgagcagct

SEQ ID NO: 441583 - DNA, 289 bp, Triticum aestivum
tgggctacgtctccaactacgccttggcgcgcctcccgatccacctcagctggcgcgtcatgctcggcatcggcgccgtcccgtccgccctgctcgcgctcatggtgttcggcatgccggagtcgccccgctggctcgtcatgaaaggacgcctctcggatgccagggccgtgctggccaagacctccgacacgccagaggaggccgtggagcgccttgaccagatcaaggctgccgctggcatcccgagggaccttgacggcgacgtggtcgtcatgcctaagacaaa

SEQ ID NO: 441584 - DNA, 227 bp, Triticum aestivum
cgatagcttgggccggcgacagccaacggctcgggcgcgtttttgaccgaggtgggcattaatgacaccatcctccttggctacgactccaaccacgccttcgcgcgcctcaccatgcacctcatctggcgcgtcatgctcggcatcggcgccagcccggacgacctgctcgcgctcatgcagctgggcatgccgaaatggccccgctggctcggcatcaaaggaca

SEQ ID NO: 441585 - DNA, 341 bp, Triticum aestivum
gcaaagaagataggaaagctaggctgcaggcacagttttcacaaatgcgccctgttccaatggctcaaactgttggtcctcgtatgcaaatgttacctcctggtgttccagttggtcagcaaatgttctatggccagccaccagcgtttattaacccacagcctggatttggcttccagcaacctttcatgcctggaatgaggccaggtggtgctccaatgccaaactttatgatgcctatggttcagcaaggacaacaaccacaacgcccagctggtaagcgagctggtgctggaggaatgcagcaatccatgcagatgggtcagcagcagatgatgggt

SEQ ID NO: 441586 - DNA, 212 bp, Triticum aestivum
gccaccgaggccgcgctggtgctctctccggccatgcccctacccgtcttcaccggcgactcctccccgggcttccacgcggcgtcgtgcccgcagctggacggcatcgtgtggacgtccgaggaggcggcgctgcggcaggaggtggcggtggcggcgggcatgctccgcctctactttcacgactgcttcccgcagggctgcgacgcctc

SEQ ID NO: 441587 - DNA, 234 bp, Triticum aestivum
tgcactccattggcgtctgcaacggcgtgatcgggaacaacctgccggcaccgagcgacgtcgtgaagctctacccaaaccaagggcatcgaccccatgcggatctacgcgacggagagcaacgtcctcaaggcgctcagcggcacgggcatcagcctcctcatggacgtcggcaacggcgcgctgaccagcctcgccaacgacccctccgccgcgcccgcctgggtcaaggcc

SEQ ID NO: 441588 - DNA, 332 bp, Triticum aestivum
tccatctatccctgagaagaacatcagttgtttgacccgcctagaccacaacagggcactcggtcagatttctgagagacttggtgtccaagtttctgacgtgaagaatgctattatctggggtaatcactcgtccagtcagtaccctgatgttaaccacgccactgtgaagacttccagtggagagaagcctgttcgtgaacttgttcaagatgatgaatggctaaacggggagttcattgccactgtccagcagcgtggtgctgcaatcatcaaagcgaggaagctctccagtgctctctctgctgccagctcagcttgtgatcacatcc

SEQ ID NO: 441589 - DNA, 191 bp, Triticum aestivum
ccatcctggcgtcggagacgatggagatcccggaggaggtgaccgtgaaggtgtccgcgaagatgatctcggtgacggggccgcggggcacgctgacccgcaacttcaagcacctcaacctcgacttccagctgcaagagggcgggcgcaagctcaaggtggacgcctggttcggcacccgcaagaccatg

SEQ ID NO: 441590 - DNA, 299 bp, Triticum aestivum
ccattcttcgagatgggtcgcgtgatccgcgctgggcgaaagtgagcgggctttgtcttcaagtcccacacccaccaccggaagggccccgcccggttcaggtcgctcgacttcggcgagcgcaacgggtacctcaagggcgtcgtcaccgatgtcatccacgacccggggcgcggtgcgccgctggccaaggtgaccttccgccacccgttcaggtacaagcaccagaaggagctcttcgtcgccgccgagggtatgtacaccggccagttcgtctactgcggacgccgagccaccct

SEQ ID NO: 441591 - DNA, 306 bp, Triticum aestivum
gatagctcggcgtcccgaccaccatccacagccggggtggttcggcatcgctgcctgatctggtcaccgcactgtcccttccacccgccaaactgccttacctccgtcgcatcatgcggctgctggccacgtccggcgtcttcgccgccgacaacgccgccgacgtggtcacctactaccgcctgacccccctgtcctggctcctccttgacggcgtcgccgtagatggccacccaagccaaacctccattgtgcttgccgcaacctcgaggcactgccttgaggctgccatggggctctccgact

SEQ ID NO: 441592 - DNA, 402 bp, Triticum aestivum
  unsure (1)..(402): unsure at all n locations
gaaagactaatcgaaccatctgggagcttttataccgccgttgcttttcttacgacagcagngttgnattcagttttatgaggtaaagcgaaagatctaattgacaaatttttgacagaagaccctcatcaacgtctaggatcagatggtgcctctgaggtcaaacaacatccattctttaaggacgttagctgggataccattgctagacagaaggctgccttcgttccttcctcagatagtgcatgtgataccagctacttcaccagccgttactcttggaatccatcagatgaaaacatatacgaagcctatgaatttgaggattccagtgagaatggaagccttagtggcagcagtagttgtgtgagcaatcaccaagatgacatgggggatgagcat

SEQ ID NO: 441593 - DNA, 298 bp, Triticum aestivum
  unsure (1)..(298): unsure at all n locations
ccaggtcgaggnggcgttccaggccgtggagaactggatcgcggaccgggccgtgctccccgtggagaactcgctcggtggcagcatccaccgcaactacgacctcctgctccggcaccgcctgcatatcgtgggcgaggtgcagctccccgtgcaccactgcctcctggcgctcccgggcgtgcgcaaggaggacatcacccgcgtcatcagccacccacaggcgctggcgcagtgcgagcacacgctcactcgcatggccggcctcaacgctgcccgcgaggccttcgacgacacg

SEQ ID NO: 441594 - DNA, 345 bp, Triticum aestivum
aaccagaagacaggggcgtactccaagcgtttccaagtcaagttcaagagaaggcgccagggcaagactgactacagggccaggctgaggctcacaaaccaggacaagaacaagtacaacactcctaagtaccgttttgttgtgcgatttaccaacaaggatgtcactgcacaaattgtttatgctaccattgctggtgatattgtgatggccgctggctactcccatgagttgcctcgctatggtcttgaagttggcctcaccaactatgctgcagcttactgcactggtctgcttttggctcgtcgtgtgcttaagaaccgtgatcttgatgaggagtatgaa

SEQ ID NO: 441595 - DNA, 389 bp, Triticum aestivum
  unsure (1)..(389): unsure at all n locations
gaatanttatataaagtctcggtaactccaggagggagtgtttaaatccgtcagttatttgattatagctcctctgaagtcaatttttcttcttcagatttctgggttttagttgcttctttgaaggaatttattgcaaatgagggcaatggtgagctacctctcgagggaacaataccggatatgacatcacttactgagtattatgtaagcttacaaaagatttaccaagctaaggctgaatctgattgtcttgccatagagcatcgtgtgaagagtattttgaagcgaattggcagagaccctgattctatttcaagggcatgtatcaaaacgttctgcaaaaacactagaaaactcaaagtctgtagataccgcagtatggagga

SEQ ID NO: 441596 - DNA, 351 bp, Triticum aestivum
gatctcgatccacatcgggcaggggggcttttaaatcggcattgcgttcttttaactttactgcctcgagcacggcatccagcctgatggccagacgaacggcgacaagaccatcggaggtggtgatgacgccttcaacaccttcttcagcgagaccggagccggcaagtacgtgccccgtgcggtcttcgtcgatcttgagcccaccgtgattgacgaggtccgcaccagcgcctaccgccagctcttccaccccgagcagctcatcagcggcaaggaggacgccgccaacaacttcgcccgtggtcactacacaattggcaaggagattgtggatctctgcctcgaccg

SEQ ID NO: 441597 - DNA, 339 bp, Triticum aestivum
ccgaaacccagcagcgaccgccggcgcatctaaccccgggccgaggccggcgaactccgaagggaagcggagatgcagcagggcgaaggcacggaggcgcaggcgacgcgggatgaccagcagaacaccaaccggtacggccgcctcaacaaccgcctacacgagctcgccgacgagatcaggctcgccaaggaagcaaaggaaaacctcgaggacgcggggaatgaactcatcttgcctgatgaagacggggagcgactccaaatcggggaagtgaatgcccacatgccagaggacgatgtggaagctaggctagagcagatgaaagaggacgcagct

SEQ ID NO: 441598 - DNA, 311 bp, Triticum aestivum
gcaagatcatggacaagctgcctggttaccacaagacaggggaggaggacaaggccgccgccgctacaggcgagcacaagcccagcgcttgatcgccgccgtgcccgagacccgtgaccggacctcgattgaattgttggcgtgtgttgtgtttgctttacgtctaagttggtgtcaaggtgggaggggttgatcgtctttgaaggtccggtccgtgaagcccgttgagtgacgggtgcttctgtttcagtctttgaaggtcctggatattggtaagctttgttacttatgggcacttgtgtattggttta

SEQ ID NO: 441599 - DNA, 280 bp, Triticum aestivum
cgacaacacagctgggggtcagttatacttgaacaaagagtcactgggcgcttccattacttcggctaaatccagtgaaatgaatgtattggttcctagcgacgagactgatggcgactgggtggagcatccattgccgcagcagtacatccatcttttcgaggacgggcagttcaccacatccccagtttctcattccggcgcataaataaatccgatgatatcttccttttttgtgtgtgtgtgtggctgtttgtttgttcgatgctgcctttgcatt

SEQ ID NO: 441600 - DNA, 353 bp, Triticum aestivum
ttctgacttctctggcattcatatttctggctggaatatttgtttcttcgtggttgggttcaactgtcttctgggttggagaatggtttataaagaaaatgccatttgtgaagcacatatattcggcatcaaagcaagtcagcactgccatttcaccagatcaaaatacgacagcatttaaagaagttgcaataattcggcatccacgtgttggtgaatacgcattcggatttataacatcaactgttgtccttcagacagacaaaggtgatgaggaattgtgtagtgtttatgtgccaacaaatcatctatatattggtgatatatttctgctgaactctgaagagatcatc

SEQ ID NO: 441601 - DNA, 389 bp, Triticum aestivum
cccgaaacccagcagcgaccgccggcgcatctcaccccgggccgaggccggcgaactccgaagggaatcggagatgcagcagggcgatggcacggaggcgcaggtgacgtgggatgaccagcagaacatcaaccggttcggccgcctcaacaaccgcctccacgagctcgccgacgagatcaggctcgccaaggaagcaaatgaaaacctcgaggatgctgggaatgaactcatcttgtctgatgaagatgtggtgcgattccaaatcggggaagtgtttgcccacatgccagtggacgatgtggaagctaggctagagcagatgaaagaggacgcagctaagaagctggagaagctggaggaagagaaggaatccatccttgcccaga

SEQ ID NO: 441602 - DNA, 279 bp, Triticum aestivum
  unsure (1)..(279): unsure at all n locations
cgactagttcaacccagtaaactactgccacccgtgcgccggttaaatggcccacgcccttattctcctcctggcgctcgccgccctggccacggccaccgtcgccgtcgcctcctcctcctcctcctcctccttcgccgtctccaacccgatccggcccgtcaccgagcgcgccgcttcgacgctcgagtccaccgtcctcgccgcgctcggccgcacccgccacgccctccgcttcgcgcgcttcgccgtcaggtacggcaagagctacnagagcgc

SEQ ID NO: 441603 - DNA, 310 bp, Triticum aestivum
gatgacgaagaaggagctgggcgagacccacgacgtcctccgcttcggcgtcaacgacagcgtccgcggcgacctcgcgccggcgcaccccgtccaggccaccatccacaaggagaacaagttctgggaggagaagaagaagttcgggaccgaggccatctacggatccgccttcaacatccgcagggatctcgacgcccagatcctctccaggttccaaaggcccccaggtgcattggcatcatctatgctaggatatgaggcgatgacaggttccttggatgattttggatttgaagattaccttaac

SEQ ID NO: 441604 - DNA, 382 bp, Triticum aestivum
gactagttagccagtgtctgatacaggccgccggggacatttgcagcttcacgccattcagtcagccaccggagcttgcgctcagaccgattgccgaccggagccatggaggaggactacgtgttcaaggtggtggtgatcggcgactcgggggtggggaagacgcagctgctggggcgcttcacgcggggcgacttctgcctcgactccaagtccaccatcggcatcgagttccagacgcgcaccgtcgacatcgccggccgccgcgtcaaggcccagatatgggacaccgccggccaggagcgctaccgggccgtcaccagcgcctactaccggggcgcgctgggcgccatgctcgtctacgacgtcacgcgccgggaca

SEQ ID NO: 441605 - DNA, 458 bp, Triticum aestivum
cactgtttccgtgggaaactgggtcgcaactcggagaaattgactgaatacttcgaggcgattcctggagtgcctaaaatcaaagataagtacaaccctgcaacgtggatgcttgaggtcagttcagttgctgcagaagtacgcctgagtatggattttgctgactactacaggacttcagatctgtacaagcaaaacagggtattggtgagccagctaagtcgaccagaaccaggaacatcagatctgtattttcctacagaatactcgcaatccattatagggcagttcaaagcctgcctctggaagcattggctgacctattggcgcagcccagattacaaccttgtcagattttccttcactttgttcacagccttgctgctgggctccatcttttggaagattggcaccaatatgggggatgccaatactcttagaatggtcattggagcaat

SEQ ID NO: 441606 - DNA, 339 bp, Triticum aestivum
accatctgttcctctcgctaccttccatcttccttagcgacgaggccacccagagctccacaggaaagaagcgcgaccggagaaagaaggagagcaagatgtcgtcggtgttcagcggcgatgagacggcgcccttcttcggcttcctcggcgccgccgccgccctcgtcttctcatgcatggggggcggcctacgggacggccaagagcggcgtcggggtggcgtccatgggagtcatgcggccggagcttgtcatgaagtccatcgtgcccgtcgtcatggcgggagtgctcggaatctacggcctcatcatcgccgtcatcatcagcaccgggatc

SEQ ID NO: 441607 - DNA, 403 bp, Triticum aestivum
gagctcacggcgacgttcaggtccaggtcagagctgttatttataggaaggagggccggccatgtcttcctcctctccccccaatagcaacgacagcggcaagaagaacccgctggacgccatgggcgccttcttctcggcgcaggtgaaccgccgcaagctggtctccacgcagaagctggccatgtccgagcgctgcacctcctgcggcgacgagttcccgggctgcgcccaccgccccgccgaccgcaagacgtggatggcggagctcggccccgaccgcctgcgcgtgcaccaggtggtgtggccgggcacccacgactcggccaccaacaagatcggcatccccttcatcacccgccccttcgcgcagtgccagtcgctctccgtctaccaccagctc

SEQ ID NO: 441608 - DNA, 342 bp, Triticum aestivum
catggcatcctccaagagcagccgggcaatgtttgcactggtcatagtcatggtcgcggcggccggcgtctcggcgcagaacaccccgcaggacttcgtcaacctgcacaaccgcgcccgcgcggcggacggcgtcggccctgtgacgtgggacaacagcgtggccaggttcgcgcaggactacgcgaacaagcgcgccgccgactgccggctgcagcactccggcgggccgttcggcgagaacatcttctgggggtccgggcagtcgtggacggccgcgaacgccgtgaagtcgtgggtggacgagaagcggaactaccacctcaacagcaacacctgcga

SEQ ID NO: 441609 - DNA, 316 bp, Triticum aestivum
ccctgccctcgcagccgcagcggcgcgcacccctgggcctctttactgaagacagcgccgttttcggccagagcacaggatggcgaccgtccccgctcccgcagccgagaccgcggcctccaccgcgcgcacggtgaaggatgtcaacccccacgagttcgtcaaggcctactccgcgcacctcaagcgctccggcaagatggagcttccagagtgggttgacattgtcaagactgcaaggttcaaggagctgccaccttctgatgctgactggtactacatcagggctgcctcgatggcaaggaagatctacctg

SEQ ID NO: 441610 - DNA, 413 bp, Triticum aestivum
  unsure (1)..(413): unsure at all n locations
gatgccttgctccgtcgccatcctcgtcgaccgggggctttttggccactcccaggttgcttccaagaacgtggagttctccgtggccatgctcttcttcggcggggcggacgaccgcgaggcgctggcgtacgcgacgcgcatgtcggagcacccgggcgtcgccgtgaccgtgacacgcttccggcccagccgtccatcatcggacgacgcagctgacgaggtggccatcgaggtgttcaagggcaaggtcgaggccgtgaaggacgggtcggcgatgtacgaggacgtagaggcgtcggtcaaggaggacgtgctccaggccatcaactcgctgtccaagtccaacatgttcgtggtggggaggatgccgncgacggagccgctggtggagaggccccaggagctgggcc

SEQ ID NO: 441611 - DNA, 125 bp, Triticum aestivum
agtgttggtgtcaggtccatattctgtattttggaaaaagccgacgccaaatggtggaataagcttgttcgagatgatcagaaggcaccacacttcgtgaaagttgattgggacaaatgggtcga

SEQ ID NO: 441612 - DNA, 428 bp, Triticum aestivum
  unsure (1)..(428): unsure at all n locations
caatccctcacgcgcgtccggggcgccgtttgcccgccgggacgatggtcgcgtcggggtccgggtccgggtccggccagatccagccgctcaagatcccggacgccgtcgtcgcgctcgcgcaggccgccgccaaggccaacaacagcagcaacaccgccgccgccgacgccaccgacaaatatctccccgggtggccgctcttctcgccgcccaagatgcagctgaccaagtgcgccaagtgcccccgggagttctgctcctccgtcgccctccgccgccacacccgcgtncaccgncgcgccctcaagatcgacaaggatttccccaagaacagagaccaccttgctgcattctgggacaagctcacggtggaccaggcccaagcgatactgtccttggagggcgtggctatagaggagaccagc

SEQ ID NO: 441613 - DNA, 395 bp, Triticum aestivum
accgagacctttgcgcaggtgacctgcctcgcggagcccgccgacccgagcgatcccctcctccgcgagtgggtcaagcaccccgccaaccccgtcgtgtttccgccccccggcatcggcatgaaggacttccgcgaccccaccaccgcgtggttcgacgagtccgacggcacgtggcgcaccatcatcggctccaagaacgactcggaccactccggcatcgtcttctcctacaagaccaaggacttcctcagctacgagctgatgccggggtacatgtaccgcggccccaagggcaccggcgagtacgagtgcatcgacctctacgccgtcggcgggggccgcaaggccagcgacatgtacaactcgacggccgaggacgtgctgtacgtgct

SEQ ID NO: 441614 - DNA, 405 bp, Triticum aestivum
aactagcttgcggacgcgtgggcgacggcgacgggggcctttttagccatcgtgcgcgcttcttcctcccgctactacgttgaagcggccatggggatggcggactggttcaggaaggactttgatggacctgtgccatcgccgctcgaggacgtgcatggcgcggccatcttcgaggagagcatgacgctcctggacccggagatggatcagctgatccacgacgccggcgctgctcacgaccacatggggatcggccccgtgctccggcagtgccgtgagctcttcgaggggctcgagtctctcactgactgcggcggcggtgatgggacgacggccaggtccatagtcgaggcctacccgcacatgaagtgcactgtgctggaccttccaaaggtcatggac

SEQ ID NO: 441615 - DNA, 307 bp, Triticum aestivum
ccggccgccgcccccaaggccaagaccccagccctcaacgagcggatcctgtcctcgatctcgcgccggtcggtggccgcgcacccgtggcacgacctggagatcggcccggacgctcccacaaccttcaactgcgtgatcgagatccccaaggggagcaaggtcaagtacgagctggacaagaagacggggctcatcaaggtggaccgggtgctctactcctccgtcgtctacccgcacaactacggcttcatcccgcgcaccctctgcgacgactccgaccccatcgacgtcctcgtcatcatgc

SEQ ID NO: 441616 - DNA, 357 bp, Triticum aestivum
ggctgtttatggtttgacggaggttcttcgagatgaaataagaaatgcacggcttgttgccaacccgggatgttatcccacgtctattcagctccctcttgttcctctaataaaggcaaaactgatcaagctgagcaatataataattgatgcaaaatctggggttaccggggcaggacgtggagctaaggaagcaaatctttacaccgagatagctgaaggcattcatgcttatggaataaaaggccaccgtcatgttcctgaggttgaacaaggattgtcagaggctgcagaatccaaagttactatcagcttcactccaaatcttatctgcatgaaacgtgggatgcaatctac

SEQ ID NO: 441617 - DNA, 479 bp, Triticum aestivum
taaacgaagttatgaagtattatgcacagttttaccatggggtgggtaaagatggaagacctgtctatgtggagttaataggaaaagttgatgccaacaaggtgctgcaagtaacaactatagaccgatatgtgaaatatcatgtcaaggagtttgagaaatgtttccagatgagatttccagcttgctcaattgctgcaaaacggcacctggactcatgcacaactattctggatgtgcaaggcgtgggattgaagaacttctcgaaatgtgcaagggaactaatcacccgactgcagaagattgacagtgacaactacccagagacattatgccggatgtacataattaatgctggccaaggcttcaagatgttatggggcacaataaagtcttttcttgatccgaaaactgcttcaaagattcatgttcttggaaccaagtaccaaaataagctacttgaaataattgatgagagt

SEQ ID NO: 441618 - DNA, 280 bp, Triticum aestivum
agattctattccaaatctcttcttcccctccttggaggcctttttgagttcacatgtttggatgatgtcttgcagctgtggatcaggttgcagctgtggctcagactgcaagtgcgggatgatgtaccctgatctggaagagcagggcagtaccaccgcccaggtcgccgccgtggtcgtcctcggtgtggcgcctgagaacaaggccgggctgttcgagatgaccgccggcgagtccggtgagggctgcagctgtggcgccaactgcaactgcaacccc

SEQ ID NO: 441619 - DNA, 335 bp, Triticum aestivum
tcggcgtgttcggcctcatccgcctcctttccctgctcttggcggcggtctacaggcgcgtcgtcatgctcggatgggtctgcgttggcttctcggtcagcgtcttcgtcgcacccctcagcgtcatccgtcttgtggtgcgcacccggagcgtggagttcatgcccttctccctttccctctccctcaccgccagtgccgtcgtctggttcctctacggcctcctcatcaaggacaaatatgtcgcccttcccaacattcttgggttcgcctttggggtgatccagatggggctctatgccctctaccgcaacgccacgcccagaccagccccc

SEQ ID NO: 441620 - DNA, 345 bp, Triticum aestivum
agatccgtaaactctgcagcctatctttccatacatatagccatgccgatcgcagtcttgcgaaacgtgctggtgggtcagttacatcctgttcgtgcttgtccattgtcgcctgtgtcaaatcatcagtatgacatcgtggaatacgtaactcacctaacttgttctgtcctacagtcaatcttgaatcaatgcccatcccggtcgaccgtccaaggggatccaagcctatctaagcctgcatccaatatcaaattgtcaccaatgagttctcgaaaatcaaaactgtggccattctcttacaaagaccatactgggaaaaacctggcgttaaccaacttaaac

SEQ ID NO: 441621 - DNA, 218 bp, Triticum aestivum
gaccacaaagtgaagaaggacaagaagaacgaggagcaacaaaaacgcccacgcgcattgaccaccagaccggcatcatcacatcgaatgcgaactcatacgattttccgctgaaaaaaatagcggaaagcatcaccgccatggccagcatcattgccaaaatgaaggagaagctccggataggtggcagcagcgaagaattcaagaaggaacacgag

SEQ ID NO: 441622 - DNA, 291 bp, Triticum aestivum
agtcactggagaaacagcacttcaatggagccactagtgcccctcggttagctgcagacgatgaaaattccgttgctagcgacttgcagtgcggttagttgaacatgcatggaagatgctgtgcagacggacgaccttgacggtacaccactaatagtcgtcgactgcatgtcatcacccttcagaagagtggacttttcccaaggcagtggtccgtcaatgtacgaggatctcaatgggaaagccccgttctataacaagttaagtgaattgaagcagaaccccctttca

SEQ ID NO: 441623 - DNA, 277 bp, Triticum aestivum
gggtcgacaggcagccattacagttgcatagcagtatataagtcaatcacatccccataaaatttgagggttgcccaggagtaacggtatcaccctcagactttacaggtgcactagtagtatcgcaactgggtgcaacctcgaggattctagctgcgacaaacgtttcacatcaattgacatagtcaccacgtgtgctagttgcacaagactatgtatctagttagcatccttaggaaatccatatgcccacagagcataatagagatttggcagc

SEQ ID NO: 441624 - DNA, 361 bp, Triticum aestivum
agggacgcaagcaccgccattctcacccgtccccctgtcctcacctccacaggagattaagcctacgcacgcgttgagagcttccaatctgctaccatggataacgttccacataccaatacgacctactgcaacaacatagatgtgcaagaagcacaccctccacagcgttacacaatacagggcccgcaacgatagtctttctgctcacggcaatcgtcgttatgaccgcaatcagtcaggatatcgtggccagaccaagcctgttttccacaagaatgccacgacaacatataatattgtactgaatctgcagtgccagagcttcatgcattactcgcaacgcgccatcatgaggtgc

SEQ ID NO: 441625 - DNA, 227 bp, Triticum aestivum
gggtccacgtgtcatcttcgacctcgtcttcttcttaatcatcatcatctccgccgtatacatcctctgggacaacctcatcttcttcaacttgctatactactccatgtgcgtcatctacaccttctgcgcctgatacatcgtgtccgactgcttcacctacatcttttagaccatcgtggtgggccacttctgcataaactgctacttactcacgcttcacttat

SEQ ID NO: 441626 - DNA, 130 bp, Triticum aestivum
gggtccacaggtgcaccataaatatgcccatggaagtcgtcaatttgattgatcactggaagagccccgatgagttcaccaatgacttgttcaaaagctgcgtcgccaagaaccacatcactaggggcat

SEQ ID NO: 441627 - DNA, 314 bp, Triticum aestivum
acagcgtgaatgatgcacctacacccctgccctggtcgaggtggtccggccggatttgtgaccagccatgagcagagagagagagtgtgtggccgcctatgtcttgcgtagatctagagagcatgagagagtgaaacagaggaaccctagtagagcaagcgctaaggctcctgcttatatatatggtggagtgattttgttgtaccagcttcaaaaaaatgcgctcctacgtgtacccgcgagtgggtgtgagagaactagtgcgtgcgtgcaccgcttctcgtcgtgagagtacaagatacgatgcccaaaga

SEQ ID NO: 441628 - DNA, 201 bp, Triticum aestivum
cgggtcgacaggacagcccaaactgcgtctgatatatattgcaaagtgtccccttggaattgacttccatatgttcttaagtcacatatcacaccatcgacttcgcctatcaactattccccgaagatcaggtgtatcggtactttgattctagggaaagtacacctttgcaactagtacaagacttatatcagaggattg

SEQ ID NO: 441629 - DNA, 162 bp, Triticum aestivum
cgcgtcctgcagaccaagattgtccagttcgctgagcggtaaccggacgtgcggttccagcaagtcacctatcagaggcacacgtccatgtgcaagagccgccatgtccatgtcctcacgttcgtcaggttctacatgcggagggcaacgcacggtcagcag

SEQ ID NO: 441630 - DNA, 132 bp, Triticum aestivum
aaactgtctggtgcgggtcaggatcggtgggggcgttgcagcggcgcgacgcgtgcggcgggggcggcggcgccgctgtgtgggagcatgaggacggcgttcggtacgggatggagtaggatggtatgcgag

SEQ ID NO: 441631 - DNA, 318 bp, Triticum aestivum
agatccgtatcctctggagcctacctttacatacatgtagccgtggcgatcgcagttttgcgaaacgtgctgttggagtagtgaaatctgtccgtcgcttgccattgttgcctgtgcgaagcatcatgctattatgaacattcgtaggatgtacgtatctcactaagcatgttctgtactactgtcactcttgaattcattgcccatcacggtcggccgtccaaggcgatcaaagctaatctaaccttgtacgagatatcagatcgcaccattgagtcgtcaatattcagatctgtgacgatcatcttacatagtcca

SEQ ID NO: 441632 - DNA, 445 bp, Triticum aestivum
  unsure (1)..(445): unsure at all n locations
tcgcgggtcgacgggaccgcggagtcctcctcttccttcctgcccgtgaccccacgcctcctccccatctagatctcctctgctcatcaaccgccgctgcccttcgatccgcccgcgctgcaagagctcgccgccgcgctagcaggaggccgtcgcgggatcctccttctcctccctgccacgggatccttctccttgaccacgaccccgtgcttcctcctgatctcgagatcgcctgctcgtcaatcatcgcgccgcagcttcgtcaagagctcgccggagctaccctgcagcacccctttctcctaacgtctccctcgccggagcttctttctgccatgataaaatccgctcaaggccatcgtccaccgcctcgagctcgacgctcacgctcggatctagccgctggcaagggccagtgcgtaacttttntgtgaaatattgt

SEQ ID NO: 441633 - DNA, 103 bp, Triticum aestivum
tgtgacattaatctggggaagatagcaggagctgaagctggcccggatcagcgttggcgtgaagcggagcatggacggcggcagagagcgacattaatctgcg

SEQ ID NO: 441634 - DNA, 258 bp, Triticum aestivum
gaccacaaagtgaaaaaagacaagaagaaggaggagcacaaaaagcggcgacgcgaattgaccgacagaccgggagcatcgcatcgaatgagcactcaacgatgtccctcggaaagaaataaccggaagcatcaccgccatggccggcgtcatgcgcagaatgaaggagacgctccagataggtggcagcagcgacgagtccaagacggacaaggagcacaggacaggcggaggaacacaggacgaaggacggggagc

SEQ ID NO: 441635 - DNA, 397 bp, Triticum aestivum
  unsure (1)..(397): unsure at all n locations
cagccattctagttgcacaacagtatataatttagtctcatctccaaaaaatttgagggttgcccaagagtatctttagcaccctcagactttatacttgcacagtagtatccaattaattggcatcctcgacaattctagttgcacaatacttttctaactagttgacatactcaagactttttctagttgcacaagagtatgtatttagttggcatccttagcatttctagttgcacagtaaacaaaatactgtgttggcatcctcaacttttttaatccagatttctaaagaacaacanaaaaattatgcagtgttaactaatcaccttttttcaccttcatgatattgtgcaggggggtgagggtaatgaagaagataatgcagaacgacagt

SEQ ID NO: 441636 - DNA, 383 bp, Triticum aestivum
gacgcaagcgccgccgttcgcacccgtctccctgtcctcaccgtgcgcatggagatttgagcactgcgctacgcgattgaggaagcttgccaaatgcttgttgacacagtggatgtaacgtgtccagcatgaccaataccaccttactgacaagcaacattagatgtgcatttaagcataccctccacagcgttacacattacagggaacgcaacgatagtctttctgctcacggcaagcgtcattatgaccgctatcagtcaggatatcgtggccagacaaagcctgttttccacaagattgccacgacatcattgaatattgtgctgaagctgcagtgccatagctgcatgcattacgcgcaacgcgccatcatgaggtgc

SEQ ID NO: 441637 - DNA, 97 bp, Triticum aestivum
agcatcactatgatagcacagcgccaggacatgagctggttctgctacaagcatgtgaacacaatgtccaaaacaagcatgttcatactggtaatct

SEQ ID NO: 441638 - DNA, 86 bp, Triticum aestivum
agctagcggaggcgctagggtttgtgcgaggtggcgaggtggaagaagagatcgtgaccgcggcgagttgtgtatttataaggagc

SEQ ID NO: 441639 - DNA, 430 bp, Triticum aestivum
gactgccggccggtgccgtcggcgtggtacgtaagctccatgcatggcaacggcatgcggccggtacgtaacgtacttagtctgacgacgactactcaatattatgttccttcggtaaatactccatatatatctgccgttcacgttgaacaagtctgccaagtgccaagtaggaatatatatattctttccaccaaaaaaaaaaaaaaaaaagaaaaaaaaaaaaaaaaaaaaaaaaaaaaaaaaaaagaaaaaaaaaaaaaaaaaaaaaaaaaaaaaaaaaaaaaaaaaaaaaaaaaaaaaaaaaaaaaaaaaaaaaaaaaaaaaaaaaaaaaataaaaaaaaagcgggccccccaaaggtttcaaacttaatttcccgttcaaggaaatttaaagcccttcaaaaggggcccccaattttaatttcc

SEQ ID NO: 441640 - DNA, 424 bp, Triticum aestivum
  unsure (1)..(424): unsure at all n locations
tgcaacatccaggtgcccatggaggtcgtcaatttgattgatgacgggaagaaccccgatgagttcaccagggacgtgttcaacagctgcatcgccaagaaccagatcacgaagggcaagacggatgctttcaagagcctgaggaagcatcttcttgaggagctggaagaagcttttccagatgacgttgaagcgtacagacagatacgtgctacctctgctgctgagtcaaagaggttggctcagtcccaaagtgctttgcctaatggagatgccaaagtgaaacctgagcattgagagaataacccaagtgcaaagagcaagatcttgctttatatttcctatagnttttcttaagaaggcttntgtgaacaacaactgatataaccttgtatgtgctgctccctcatatgagtgatcaata

SEQ ID NO: 441641 - DNA, 442 bp, Triticum aestivum
aagtggatactgggaaccactgatacctatctggtactcatatgcaccattttcattgacaaggatgggaaggagaagacaggatttggtggaagaatggggaaccgaattgctgcaccaagactgctcaagctcagcccactccactctcatcttgcaggggacaacagcaagtttcgtgagggcaggttttcatgggtcacggataacggcaagcaggagaggcatctcgtgacgaccgtggggaggtacagcgtggtgtggaacttcctccaggtgaagaacagccaccatgagtgctacaagaaccaggaggggctcaagagttgctactgctacaaagtgatccccaaggacgagtccatcgtggccagtcgcttcatgcacgagaagtacgacgtgagcgactgccccgaggcacctctggtcgtcgcgaccccca

SEQ ID NO: 441642 - DNA, 445 bp, Triticum aestivum
tagcataattcaattcatggggtttaagttgtcgtgaggcatatgaaacaactctcccctcctgcataagcactcctccaagtcctcgatgtgaagcatcacaatacacttgataatccttatgttgatctggaagaattaacacgggggctgtaaccaaaggtttcttcaactcctgaaaactggcttcacattcctcagtccatttgaacttggtgtccttctttagcaactccgtcacaggtttcacaatcttagacaaattctcaatgaatcttctgtcgtatcttgcgattccaagagaactccagatctccccaaatgacgtgggtgcttcccaatttgttacactgacaaccttggtggggtctactgctattccttcttcggatatagatgtccgaggaatccaacttccttcaacaaaaactcacatttgctgaac

SEQ ID NO: 441643 - DNA, 110 bp, Triticum aestivum
gtaccggatcatgaattcccgcggtccacggggacctcttaaagctgtcgaactaccttcaaggcatagctgtactcttgaatcagccgtacatggccctcctaggcatc

SEQ ID NO: 441644 - DNA, 391 bp, Triticum aestivum
tagccactgactctgggcacgtacgttcaaagggtaatgctcctcactccgcacccatatctcggcctcatagccgtgtcaacgacattggtgtctgccctaatccacattaaagctatttcacagcagacgttacgggactctcccagtgacacaatcaatgggaagactctgtcgtccaccgctcacactatcatgcaacgcgaatcatctactcaattcattaagctgaatgcgtatcacgtccagaacttgataagcatcttcaaaggtcatcaatgagtggccaatacttgagtcaagggaagcacaatgtcatatgtagaccaccattatgggaacttacatgcatatccgtaggagaattgtgcctctcacgaatagtccagaa

SEQ ID NO: 441645 - DNA, 122 bp, Triticum aestivum
gatattgtaactgggaaatcctttatgttgcagaggaagtttggcgatccacggtatgcccctctggatcggctgtggagttcggaggatgggcacgtcacaacagaatcaacatgtgcaaa

SEQ ID NO: 441646 - DNA, 272 bp, Triticum aestivum
tgatgcacgaaaaggccgtcatgatatctgagccgaacaggtgagcttaggccacgaccgatgatcgctaaccttcagtgccttcttaaacaacggactcaagcatcattcttaaagacgatgacactatggtcatcacacttatgggaccaatctcagtgtcagaacaggcggatttcgagtacggtatgttgctcaggacttccagatcaacgattgctagatacaagacatatgagtttcacacgcacaatcgggcgatcaccaggtac

SEQ ID NO: 441647 - DNA, 403 bp, Triticum aestivum
tagccagtgtcgctgcgcacgtaccttcgaggggtagtaatagtgatcacgcacccatacatcggcctcctatccgtgtcagcgtcagtggcgtcgcccctaacgcacactaaagagatttggcagcggcctgcacgggcctcgccgatggccacaatcaaggggaagacgctgtcgtcctcctccgagactagcaggcagcgctgatcctccagcgactccagcatggtgaacgggtagcacgtcttgtacttgatactcttccccaagggccattagtgattgccgcatgcctgcgtcaggtgatgcacaatgtccgccgacgagccccaaaatggcaccgggcactcatagtagtagacgaagtgctccttggaggcatcgaccaggccgtccatgaaac

SEQ ID NO: 441648 - DNA, 421 bp, Triticum aestivum
gatagctagtcgtattgaagactatgcttctagcaacctacatcttgcagcatgtagaagagagtagatggtaagttcaccaagtatcatcgcatagcataatcctacccgatgatcctcccctcatcaccctgtgagagagtgatcaccggttgtatctggcacttggaagggtgtgttttattaagtatccagttctaattgtcaaaaggtgaaggtacaactccgggtcatcctgttacagagggacacggctattcgaatagataaacttccctgcaggggtgcaccacatttcccaacacgctcgatcccctttggccggacacaccttcctaggtcatgtccggccttggaagatcaacacgtcgcagccctacctaggcacaatagataggtcagcatgctggtctaaatccta

SEQ ID NO: 441649 - DNA, 60 bp, Triticum aestivum
aatctgatcgcgtctagtagatgcgactggatacggacttgcgtacgaccaggcaggaag

SEQ ID NO: 441650 - DNA, 73 bp, Triticum aestivum
gaactctcgcgtcggtactgatgctgattggtctaaccacatctagctcgatgacgcttgttgtgatctgcca

SEQ ID NO: 441651 - DNA, 92 bp, Triticum aestivum
gatattgtagctgggaaatcctttatgttgcagaggaagtttggagatccacggtatgcccctctggatcggctgtggagttcggaggatgg

SEQ ID NO: 441652 - DNA, 403 bp, Triticum aestivum
tgatggacgacaaggcggtcatgatatctgagccggacaggtaagcctgggccacgactgatgctcgctaaccttcggtgccttctttatcaacggaatcaggcatccttgcgaatggcgatgacactatggtcaccacacttatgggatcaatctcagtgtcagaacccgcggatttccagtacggtatgtcgctgaggacttccaggttgacggttgctagttccaagacatttgagtttcacatccacgattgggcgatcaccaggtacgcgataagtgcgacatgctaccgtaagggtaatcatgtggctaataccagcatggctctaccctcagatgattaacgctacacccacgagtctttccgagtatcttattgtagcacgaccaactgggcgac

SEQ ID NO: 441653 - DNA, 108 bp, Triticum aestivum
tcgacgggttgtcccagtgaggaaaggatgatggagactatgattcccccacaaatcgggatgagattccggacggaaaagaaaaaaaagaaaaagaaaagagggcat

SEQ ID NO: 441654 - DNA, 409 bp, Triticum aestivum
atggaggacatcgtggagcccaagccgacatcacaaccagagcctttagcaggtgaggaccaactttagtcaggataagtgtactagatattccccttcaaaatggccaattgttggcgcccttcccgctcaatatttgggaggaggcccagggcctttgcctacaaatagggctagccaccacaagatagaaacaagggaatcctcaccaggaacccagtagagagagcgactgaactccccctagtagttcatcgcactagtcaaaaatagaccctcgccaggctgttcttccttgtattgttcatcatcagcccaagaggcaatccatcactacacacactagagtagggtattacaccacaatggtggcgcgaactagtataaactctgtgtctcttgtgctgtt

SEQ ID NO: 441655 - DNA, 434 bp, Triticum aestivum
  unsure (1)..(434): unsure at all n locations
gcgagtcgacgggagacactagagtgagtcgtcttagcacccggggggtccaaccgcaaacaaacattagcatacataggcaccaggaaaggaggcacaggcaaaacctcaggttaaaggggtctcaccagaggattcagcttaataactcgggttcgcaaaaggattcaaaacaaacggagcaacgaaactcaaacggcgaaggaaacaggatccgtttactaatctggacctatgtcaaattttatagtagcaaaaacttgttcaggttgattaagcagaaagagggtctcgggacgaagatctaggcgcttgaatcgcctgattccgactaacgagcgaaaagataaacagaaactaagatcggatcanaaatcgcgatcagaaaaatcgcggaataaatccgataaaaagaaaattgacgaatagactaa

SEQ ID NO: 441656 - DNA, 411 bp, Triticum aestivum
gactttgacatgggaggagtccgttaagagagacctgaaggattggagtatcgacaaagagctagctatggacaggggtgcgtggaagcttgctatccatgtgccagagccatgagttggttgcgagatcttatgggtttcacctctagcctaccccaacttgtttgggactaaaggctttgttgttgtttgttgttttttacggaagaaaaagcaacatgaagttcctgtctgcatcaaactgctttcacttatattctgctgaatttcttccttctatgggactgtacatggggattatctacaagggttatgtcctttgcaggtagattatcttataggacgggcgaaatgcaacagaagaagctcctccgctgctactcgccaaactccaagcaaaaaggaccttcc

SEQ ID NO: 441657 - DNA, 310 bp, Triticum aestivum
aacgtgaacacgctcactaagcagatgaattacggtcaggggtagttttgataggaacatgtgatagggtagggattcttggagagatgaagtacactaacgccacaccggactggtcggccgtcacgattccgtgctccggacgcccaatatgatccaagcatagagacatacatcgacgtcagtcacctctacatcgccacgcatcatcaattcgaaggttctcgttacaaacagtcctgacgaggaaacagctgtcatttttaagctgaaccctcttgcaccacaatcgccttccgctaacgggtgt

SEQ ID NO: 441658 - DNA, 377 bp, Triticum aestivum
acaggacacactagaatgagtcctactataagtcagcctagatgttccggtgtttgtgacacacagcatgggtagtcatcgaagtggaagtgcgccgcaggtttccacaccaaaatgtcggcatggtaccccggcagaataaaccccttgttcttctgccccgccatgctcagcaggcgtctccctctagcatgaagcgaactggttcagggtgatgccatactttttcccatgtgacaatgttactgggaggacaaactgcaaagatgagatacctcaccatatcttcatgaaattgccttcctccattaccttgagatcatgaatcaatggcaagtggtctgaactgagcatgtccatgtgaccatcaagcaagg

SEQ ID NO: 441659 - DNA, 378 bp, Triticum aestivum
aggtggaagaaagacgaagaggcaaggggagaaaaggaaaggcaccctcggccctatttataagacgaagggataagcgacaggcatgggaatcgaggagcccaaaaaatggatatgtgacatagccgtcgcctcgactttcggaggctcattaataaaagtaaggtatatgcggttttttaatgaacaggtgacgtcatgacagtttactataatcctggaagacgacgtcatggcggattacaaggtttactcgaaggtgctgaagaagaaattttcctaagtgttgaaaattgacatgaacatgttcaaatcaatctggggcctaatgttggggatataactactaagtataaaccgcccaggagggtccgggtt

SEQ ID NO: 441660 - DNA, 392 bp, Triticum aestivum
ccgggtcgacctaaggctgcatgtggctgccgcgctctccaccccaagattgcgcagttcgctgagcggaatccggacgtgctgttcctgcaagtcaactacgagaagcacaagtccatgtgctacagcctccatgtccatgtcctccctttcttcaggttctacaggggagcccagggcagggtcagcagcttcagctgcacaaatgcaaccgtaagcctcactgattatgtttcttcttttgtccactacaaaaatatgttcttcagacacgtttaagatgaatgctgacatgcttgctgcaattcgttctgattacagatcaagaagttcaaggacgccctcgcaaagcactcgccggacaggtgcagcctcggcccggcgcgggggct

SEQ ID NO: 441661 - DNA, 131 bp, Triticum aestivum
aaattggttcaaattaccaattgttaatcctgaattgttagttaattaaaattttaccattaacaataataaaacaatgtcccaattaagaaaagattattgaaaacaagaatcccccaaaagttcggaat

SEQ ID NO: 441662 - DNA, 418 bp, Triticum aestivum
  unsure (1)..(418): unsure at all n locations
gaaagcattgttggacaaggcttacatgaacgccaaaacgcttctcacaaaccacaacaaggtgctccacgcgctagcaaatgccctcctgaagcatgaaactctcagtggtgacccgatcagggagctagtttcgacaggacgacaaggagatggtcctagcagtagccagcaaaatcagggaacaccttctcctggtgacgagttctcgaaactagtatcgactgaacaacaagaagatggtcataacaatagcanacaggatcaggtaacaccttctcccaccggtgacgagattaaggaatcagcanggagatgatcctaacaatggtcagcagaatcagggaacacctttctcaccctagccttggagacgcttatacaggaagaaatatttctttgcctgatagatactaca

SEQ ID NO: 441663 - DNA, 297 bp, Triticum aestivum
gggtcgacgggccacgctatagtgtgtcgtctcaacagcttcaagcgcctctcctaagtctctgtatgccgtcgcaatggattgttatgactactgtcgcgtttgatcggttgatcgttttaagatatttggttgtcgtgtaatcagatatattatgcgctccagaacatctgagatgtactacacttgatcctagataactggttgctgtcaaacactgccgctgtgtactctgcatcaatctttgagtacctcactgacgaggtccttgaactggccgacaacaaaaaccgggat

SEQ ID NO: 441664 - DNA, 406 bp, Triticum aestivum
  unsure (1)..(406): unsure at all n locations
gtcgacggggcttcaaaaacttaatgtgatgtgctaggtttccgtgaatttgatgattgttctttaaatttgcatcttgtggattccaccattaagaaacctatgggaagaattgatgatgttcttattgttgcaaataggaattatgtgcccgtagattgcaatcctacatgtcatattgttcttggtaaacctttcctaattagaacgattggtgcaattattgatatgaaagaaggaaatattcgattccaatttctgttaaggaagggcatggaacacttcccattgaagaaatttaaatttccttatgaatctattatgggccacttacggatctcataccaaagatggcaatacctagatctattcttgtttttatgcctagctangggcgttaaacgat

SEQ ID NO: 441665 - DNA, 82 bp, Triticum aestivum
gggtcgacgggggcctcgagaagagatatctttactgcttaacggcctgccaaccctggaaacggttcagccggaggtaggg

SEQ ID NO: 441666 - DNA, 425 bp, Triticum aestivum
gattgttctaatgaataatagattgtctattgactagcctggcctcagtttatatatgcaccgtaggcctagggttttagaggagtccttgtcttggaagccaagtcttgtggaatcttccttgtatatgcatcggttgtctgaactggcccatgagtaaacggccacgggggtcttcggcccaatccaactgatcgggagacaacatggtgagtaccccctagtccaggacaccgttactagtcactagcccccgcagtcaagctcctatggctaagtgaaggtaataaaaccacatagtctgattgccttgtttccctcatgcactacctcttccaggcatcgagacatcggctaagggtcatagtgcggaggacgaaacacccctcgtagtatctacatgggggttgaagccgacgactggt

SEQ ID NO: 441667 - DNA, 433 bp, Triticum aestivum
attaaagagatggcctgagggcgcttgtaagcacggcggtggtgtgaggtcgaggggagggcggggcggcggaggcaggggtctggggttcgagaaagatcgtcaacagtgactggcgggaggtagacgaaggccatctccccgttccttatagatcggacggttcataaaaaaaatagtcggacctatttattttcagtcgattgttatcttgatatgaccacatgtggtggtgtgctggaggagtacctgcatttcctgtgctcatatattacaaaatcatacggagtagaatccaagattgtttgccatgcaatgttgtagagctatcatatgtctcctggcatttatttttcagccacctgctatctgctacttttacagtgcactagttctgcacacacttcacccatactctcactaatgtgttttt

SEQ ID NO: 441668 - DNA, 289 bp, Triticum aestivum
aacatcgggcacaacgaaacggcaagtgcctaccgataatgtgatgtcggtaagccccgtgcatgtttctatccagtactttggatacggcgttctgtatattgagcctgtaatgatcgggacgattagtattcagcaggataacctaatactttttagacactggatatgccagacatggtctcttagatcacgcaacgtgttcttgagggtacacgggaatttcgaccagttaccttccgcacgcttggtttgatctcttcttccgctacctctgacactttttttt

SEQ ID NO: 441669 - DNA, 311 bp, Triticum aestivum
  unsure (1)..(311): unsure at all n locations
actaggatgcagccaaggaacggtgatctgtgttgaatattcccccaaagggaacccttattcacataaccgttactaaggtgaactttaccggaaccaaccttatccaattccaaaaaggaattttccaaggtttcatccaccccaatgacaaatgcacgtttttcagggaggtatcanaccagccaatatattaataggggataacctttgtcctaaaatctatgacttcggtctctcccagatgttttaagaagaagaaacggaacgtattgttgaaaatgtcgccggaacattcggatatatggcac

SEQ ID NO: 441670 - DNA, 420 bp, Triticum aestivum
ttcagctactgtgtgttcagtgagcattgatctctgggatcactgtacacgtgcattcggtgatcacgacttatgagtcagggtccccacagtcgtccccttcctaggcctcgccgtcatccatcgccctggtgctcttggcacggcctgggcaacatggtcaaggaacgacttccatcggaagagtactgtacgtggagaggctgacagctgggtccacggcggccgcaagtgcctccttattactgccaaaataattattcctccacctcacagtggggacccactggtcgggccaccgtatttcgtgaaaaaaacgttcccccctctatcagctcggacccaccggaagtgccttcttattacgcacaaaagaataaatattccacctgctagctgggaacctccttggtgggaagc

SEQ ID NO: 441671 - DNA, 419 bp, Triticum aestivum
tgtgccttaaggtttaataaatcaccaattgaatgttacctaagatgctctggcgctccaaaaaatgttgggaacctttcaatcctcaacttaatccagtgaggaaacccatatacagctatgccatccactagttccttgacctcttgagatgtccaatgggcgttgtttcttctctgcccacgtttttggcctctacctgcagagtgcatgtaccgagagcatggttccgtggtaatcgaccaagttcctctcttgtgtgcacttctcacgcgactctcatgcctccaatcactttctagcatctgatctgaaacacaaaatgtatgcgtttaactacctgaactatgaaaaatgatatagttcaactagtggccttcaaaattcataccccagtagatcgcagcccccctcctccg

SEQ ID NO: 441672 - DNA, 403 bp, Triticum aestivum
ccccgccatgacgtcatcttccattaagttcgttttttattccaccatatcccaacggatcttatctttaatggccatcccaaaaatcgaggcgttttcgtggcacgataatcacgtcgtggcctcctcgtttctcgcgcccacttactatccgctcattataaataagcccggcccatgagccttccttcacctgtcgcctacatcgccttcctcctctcgctactgtactgcctctcgagctccgccgtcgccgccgctctcctggccttcgtcaacctcggccgctgcatcaccctgatttgtgcagagaaacggcggcgacctccgcaacccctcagcaccggtaagtccctactcctctccaccgtagattcgcatttagggttccgctgttcctcct

SEQ ID NO: 441673 - DNA, 366 bp, Triticum aestivum
agacgataaaatgatgagagagcaaatggattaggtcgggggtggatttgatgcaaattgtgatggggttgggattcttgggagtgaaatacactaccgccacaccggcctggtcggccgtcacgattccgtgctccccaatcccaatgtttgtcgagagtagcagacacacctttccatttatgtacgcggcgcctcacctcgcctcacctagaggaaatttcctggcactagcacctcgggcgattcaacggagttcacttttaggccgccctctctccctcctcgatcgccctcgcctcatgtgtggcccatatgctgggcaaaaggggcaaccgccccgggcccgataaggaaaaagccccg

SEQ ID NO: 441674 - DNA, 410 bp, Triticum aestivum
ctaactgcaaagggttgcatgaacgatagtagcgagccaacgccatttaatggatgtagcaaaaaaacctcgccggtcgtagcaaaaaaacaatgacggttgcagcaaaaatcatcgccgccgtcgtcccgggtcaaatcttcgccatgaatggatgtagcaaaaaacctctctggtagtagcaaaaaacaattacgggggcaacaaaaatcatggtcgccgccgtccctggtcgcatctccatcatgaatggatgaagcaaaaaaaacatcgccggtagtagcaaaaaacaattatgggtgcaacaaaaatcaccgtcccgggttgcgtcaccgccatgaacgaatgtagcagaaaaaaaacttcgtcgttagtagcaaaaaacaattacaggtgcagcaaaaatcctc

SEQ ID NO: 441675 - DNA, 205 bp, Triticum aestivum
cgggagaaagggtgcagcgagtgagggagaggtgagagggggtcggaggcgcgtggcgtcaccggggcgtcgaggaggaagcaggaggtggccaggggaagcaggaggtggccgaggcctctcgggcgcgcgccacgcctcggtccttctggcgaggaggaagacgacagggggagtggagatgggttgggccgtgctgggcccc

SEQ ID NO: 441676 - DNA, 210 bp, Triticum aestivum
tctaaaattaccatcttcatatctcaaaacaatcatcaagtaacaaccttctcatagtattcaatgcactccatatgaaagtttttaatacatccctaatggatgcctatcagagtaagactaaattcatcaccaaagaaaataggaaccgtgacatacctccttgggcgaacaaatgcttgtatgggaaaagtgaaaaaaacaccaatc

SEQ ID NO: 441677 - DNA, 331 bp, Triticum aestivum
taggggcacgccggggcggcggctgccgaggagtagggtggccgacgggatgcaccgggcatccactctagcacgcccgctacccgtttggcgaaatgccaggaggcataggacggggttgactggtcgcttaacgtccgtctgtttcatccatttatccctgccacgtgacatctgacagcgggatctacctgtcaggttttcacttaaacttttttaatcggccgatcagcgttttttgcaaactgtcagcgcaatggtggtgggtttttgaaaaaaaactgaatgatggtggttttctgaaaaattattttactggcccaaaataaaa

SEQ ID NO: 441678 - DNA, 166 bp, Triticum aestivum
tagtgaataaatatatagctccaagtaaagttaccgatgaacgaagacgaaagaggggatgccatccggggcatccccaagcttaggctcttggttatccttgaatattagcttcgtgtgccttgggcatccctaagcttaggctcttgcgactccttattcgaga

SEQ ID NO: 441679 - DNA, 70 bp, Triticum aestivum
  unsure (1)..(70): unsure at all n locations
gggngnangtttacttaggncgcggcacggtnataggtcataaagtcccgggtccgacgcgggatgtcta

SEQ ID NO: 441680 - DNA, 406 bp, Triticum aestivum
atttagtccggctcgggcggacgtgtccggcggcgcggggtggaagagactagggttaggggtgggtttgcccgaaatttcggagggggaggtgtttttataggtagagggagctaggagactccaaatggagtgcggttttcgcccacacgatcgtgatcgaacgaccgagagcatggaggggacttagatgggttttggtctgttttggaggggtttttgctgcaacacacaaaaggactttgcggttacccggttaactgttggagcatcaaacgacctccaagtggaacgaaacttgacaggtggtctaccggtggtaaaccaaggccacttggcaagcctcggtccattccgagaatgtttaacacccgctcacgaaaagaaacaagagggtgccccggtg

SEQ ID NO: 441681 - DNA, 409 bp, Triticum aestivum
  unsure (1)..(409): unsure at all n locations
ccaactatactccccaattatcaaagcttagagccttcatggcgaacggtttgacaggagttgatcttgctcgttgctggataagctggagcattctgcccttaagctggcgccccggtttgatgtgtgagtacacggggagtttgaaggatgcttagcggcacattgacattcaacttacagacgaagaagtcactgaggctgtaaagaaaatactgaacgaaccggaggccgtctgtgcccaaaccggactactccctttctgcaccttcaacaaaccaccagctgtaagaatcatacaatcctttgtttctgaatttgcttctgtccaaatattttctgaaagtgtaattatttttctaaganggtgatgatccgttctggaacaaggaaacatcacaagacaaac

SEQ ID NO: 441682 - DNA, 397 bp, Triticum aestivum
ctcccgagtccacggggatcagactgatcaggaaaacagatatccagccggatagcctgtatgtcctagcccgctatagcctgatgctcatgtcgagtacgattgatcgtcaatcgcacagactacgtccactgcccacaatgataccaccgtcaccaagaaccacggaactactgacagggttgattcatccacatcggatggaccagataccaccacttctatcctagatgttgatgcgggcagccatcaagagggatcaactgttcctgctgctacaaatgtacatgtacggaacacacctgtatcttcagatcaagctgtctcgaatgaacagcgtgacatagtctctgaactaaacatcttctacataccacatctgcggggcacgtcacaa

SEQ ID NO: 441683 - DNA, 373 bp, Triticum aestivum
atgccagagtgtggactgtaggttctatgggtgtcatgatgtccagctcgtgctcgatgacttgcgcgacgtgctgaatcgtctcagaaaagagaagatgcaattgtgaggaatctcgcatccaacctgaagctcacatggcgaaggcagttcacgtggagatgggcatgaggttgtctgtgaatgagatgcaattgatgaacacaacagtagtacgtagagatacgtggagatatatggtgaatgactgcggcgacagctactacgacaacggcggcgacgcaagtgcagcaggtgtggatggcggcgctgcggcccttgcgatttcttctctgagtatgaagtatgaacacgatacaagagcgagacggac

SEQ ID NO: 441684 - DNA, 365 bp, Triticum aestivum
  unsure (1)..(365): unsure at all n locations
acgacagaacggggaagctccttggaggtggaggacagggtggctgaaccggcgggacgacaagatcgacgacggatcctcatctggtgcggtggatgagggacgtcgaggtaattctgtggacaacgtcgtcggggaagaggctttggctgggtggcggatggaggagggtgtggggcttcgcgggttttcgcggcctgggtgtacgaatgggtgggcggatgggatgggagggggaaccatggcttagggacgcgcttgtccgaaatgtgggataagttacgaaattacccccaccgatttgagctaggggtatcacgagcatttagcgtgttgggatttcgcangangtgggagttttcgcg

SEQ ID NO: 441685 - DNA, 393 bp, Triticum aestivum
aagaattagtgtagagcgacaatcagcatccacggaggttgcgagaggactcgttgtagagcagccaccacagtctgggtaaggcgccaaaagggatgacatcacaaacaaatgagcaccaaagaccgaggaaaggcacatcgcgagatggactaagtgttgggaacaccagaaacaccattggaaatcactagagggcgagcgagagacaccacgtctaatgatattgttttcccctctttacttttcttacttcttttttcacaaactaatcagctcgtagatggcttcaagaaaagcactccagcccgatcgcacaggtcaacccaagtgcacgcagccagccaacctggaggccacgcttccgagcacacacgcccaacagaaagaaca

SEQ ID NO: 441686 - DNA, 105 bp, Triticum aestivum
ctgctacataagactactcctgctataaatgcacctgtttcttgcatccagttatatgtatacagtctatggaagaagagaaaccttttcattgcatatagcagc

SEQ ID NO: 441687 - DNA, 454 bp, Triticum aestivum
  unsure (1)..(454): unsure at all n locations
cggggtccctaaaaaaacggaaaaccaaaacgggggtcaaaaatccgtataaaatggcaagcaaccggcaatcccaaaagcaaaaaaccaaaacaaacacggcaaatcaacggaagctaaaatgcatgtaaaattaattatcccgaggtgaacatacatgttaccaaaggagggacattttaatttcaaaaaaaaattacagagatcattaagacgttttagtacattgattgattttccatgggtataatgtgaaaaaatcaaatttgagctacatcacacgtgacagtgcacctaaatggattgcaaaaacacacgtgtctcacagggtgcatgtttactccccatgcaacanatttcaaacattgagaatcttgatttttaaattctaatacatccaaaacttatttgaagttcatgaaacttatcgtgttgtcatatggacaccaataca

SEQ ID NO: 441688 - DNA, 344 bp, Triticum aestivum
taatagacagattcctcatgtccaccaatttatttcagaactttctgagttacagaagtattcgaaagttacagattactacagattgttctatttttgacagattctatttttcgcgtgttgtttgcttattttgatgaatctatgagtaggggtatgaaccatggagaacatggaatgcagtagatattacaccagtataaataaagaatgagttcacaacactaccttaaaatggtgatttattttcttatactaacgaagctcatgagattttctgttgtgaagttttaatgttttgggtaacgatttgatggattttggaataaggagtggcaagagcc

SEQ ID NO: 441689 - DNA, 420 bp, Triticum aestivum
gtcgacgggctagacaaaaacgaatagttgaaacacaccctggtaacttcagcgtacacaccacgataatttatgtatcgtaggtgtgatgatttttgacatgaacagaatatcatcaaagcacacttacatgagatctagttctgaagatctcatcaacacaatttttttacgtgaaagcggaatttgaatttgagcgatggcttgagatacacaacattttaaattttgaaagagaaaaaagaagtgctgacatcatatgttttcactctgagtttgcaaacccaaacccaggctgcatgcgctttcatcgccgtagacacgattatccagcaagcaggaatagaagaagtagatgagtgattagctacgaagataaccaaacggactaactagttgacagttaaatggggtttgggt

SEQ ID NO: 441690 - DNA, 400 bp, Triticum aestivum
gcgttggaaaaggtgggggaaagaaataccatcatatcccttccccaccgattgttatccccctttttagggatcttgatcttatcccttcgggatatgatcttattccttctaaggtgggattttggtgcgccttgaccaggggtgtggggccttgcccccactacccacgttcatgtgggtccccccatgcaggtgggccccacttcggaaccttctagaaccttcccggtacaataccgaaaaatcccgaacatttttcggtggccaaaataggacttcccatatataaatctttacctccggaccattttggaactcctcgtgacgtccgggatctcatccgggactccgaacaactttcggttaaccgcatactaatatctctacaactctagcg

SEQ ID NO: 441691 - DNA, 143 bp, Triticum aestivum
tacagctaacagaagacaacgggaagtggggcagacatgacttgtttgggtcaatgtggcaatcgagtggaggaatccttctggccccgcgagggttgtccttgttcccagccagaaaaaaagaagaaaaatcacatagaaaa

SEQ ID NO: 441692 - DNA, 392 bp, Triticum aestivum
aaccacaacgctcgcgtgttggacatcgacagaaggagtccctagccgccgtcgtccagatctgcttgggttggcggaggtatggctacggcgctacgcaccatggccgcgaaactgatgcagaagatcgccgccgctgtcgagagggttcgcatctcttcgcatgctcaggcacatgctgatgctgaattcgacggcttccgaccaaagtttcgtcgggcactggagaagactgctcataaacacacgaacatgctcggtgacgaggccttggcctctggtactggcttcagtcttggagcactcacctatttgcatggtgtccaacggtctagtctacagacatggctcaatggtgacttactggaatatctatcctgcaccgcattttc

SEQ ID NO: 441693 - DNA, 313 bp, Triticum aestivum
  unsure (1)..(313): unsure at all n locations
ctactaaaaccctaaatcaactgcgggtgttgtttaaaaaattttgcgcccggtattttaatcgtacggcaactgctaattagttatcaaccgctctaaggagctattgtactgtcgtgtcgcgttgtgtcngatttgctgttcaattagtagttgcggtggtgaatgcgtggctagagatgtttcatggccgtgcaatgaactgcatgtcgtcagctctgtatccgtcgttggtgtgttgtgttttctagtttataaatctgatttacaaaananaaaataagaaaaaaaatataaagattatttttaattt

SEQ ID NO: 441694 - DNA, 405 bp, Triticum aestivum
  unsure (1)..(405): unsure at all n locations
ttaatcaccctaaaataatgttgggaaccttggagattaaggccaaaatgacctccacaattgacaacaacaacttgaattacacaatgaccaaaagttcaataaccccgcacaaatcttcctaacaccaaatggccatgaacagcgacggcggcctcagcatgccagcgacgatcagaacatcgacaaggccctccgtcgccggtgggccaagtcaggagaatcaccatagaatgaaagaaacagctggaaacttgnggctgtacaatgagggtatgactgtcaaactgatacggggagcttagtttgtagtggggtcaaaaaaccattcatttgcagtgtattcagcccaagtaattcgaaaattttgggttgagagtgtgaagtacagatgttgttagaaaa

SEQ ID NO: 441695 - DNA, 306 bp, Triticum aestivum
ggtccacgggcacggcgaaagcgagaccttctgcacgtccaaatggatggtcaacagcgtgggcgccttctacagtgacggcatcccggacacctgcgtcaccgtctgcggcgtctccgacctccacgcatgtggctacacccgcacgtgcaccgtcagcgtaaatcggcactatttgcccatgtggaacgacgtcagccacaagcgctgccatatcgagtgtctcaagcgcgcctccaccatcatgtagcaacggtggcaacgaactgcagtgcctcctatcctgatgcggtgtgttctgcatca

SEQ ID NO: 441696 - DNA, 68 bp, Triticum aestivum
ctcgcgtttcgacgggattccctgaagtgagtcgtgacacgtttccagtttttgggtccgggcagtcg

SEQ ID NO: 441697 - DNA, 71 bp, Triticum aestivum
aaacctcaaagattcactcactggcaactgtagttcggtgctgtttgcccagaattagtgttgctcaatgg

SEQ ID NO: 441698 - DNA, 99 bp, Triticum aestivum
ggtcatagtcgcgggtcgacgggactcgccatattttgtctcgctagctactgtagttcggtgttgtgtgagtacaattagtgttgcacattggaaatt

SEQ ID NO: 441699 - DNA, 407 bp, Triticum aestivum
cacgggaaacgaggaagatggtgagggtggggtttggattacctgaccatatcgacgaagccgcacaacaagaagaagggtcggcggcaaggacgccccgcagcacgaagaagggtcgccggcgatgaagcaacgctgcaagaagaagggtctccggtgaggaggcggcgcttcaagaagaaggttcaccggcgaggaggcggcgctgcaagaagaagggtagccggcgaggaggctgagctgccagtaagcaccagtgaaggtttgaacttggaaagtgatacgtccattttgcatcatgcttttatatcgatatttattgcattatgggctgttattacacattatgtcacaatacttatgcatattcccgcttaatctgcaaggtttgcataaagagggagaat

SEQ ID NO: 441700 - DNA, 384 bp, Triticum aestivum
tgtacggaaggatgactattgtcttaatgtgttccaaaggcttatatgtataagcaagatgctatcctacagagcgatctttgaaggaacacacctatgtgagcccgactgctagtcacagtctatgagattggggtgatctctagtaaactcatgaataggccaggagtgtgacttatatgctccacccgaggggtcagccttcggcagcccagtactagtaagacatgtggtgaaacttctttacgccaaactgacaattcaaggcatagtccattgttcagttgtgaaggaatgtagctacttgctctaggtgaagctcaaccttaacaggtcttcactgaaacactagtatatcaaaacagtatttggaacagatgacac

SEQ ID NO: 441701 - DNA, 398 bp, Triticum aestivum
gtcgacacggaccagcaggatccgggatgctccatactgatgcataacaaggttctctcggtggttggaattttgcaagatgaagttgatcctatggtttctgtcatgaaagttgagaaggcacctttggagtcttatgctgacattggtggtttggatgcccaaattcaagagatcaaagaggcagtggaacttcctttgacacatcctgagctatatgaggacattgggatcaggcctccgaagggagtcatactatacggggaacctggaacagggaaaactctacttgcaaaggctgttgccaattctacatcagcaacattcttgcgtgttgttgggagtgagttgatccagaagtaccttggtgacggacccaagcttgtaagagaactgtt

SEQ ID NO: 441702 - DNA, 164 bp, Triticum aestivum
gtttgtcatcctctttgttgtgtatgtaacgtctataccacgagttcgaggtaattaaatatcgccgatagttcctgtagcctgtgttcatttggagaaatagagaagatgcctttggtgcacatatgacacagagctagctccctctgtttgcagctgtgcag

SEQ ID NO: 441703 - DNA, 175 bp, Triticum aestivum
cgggacagaatgacgaacctatataaccagacaatcccaggaaaatggagctcggaagtcgagcttccagaggagaaaccttaactagtgtggctcgggtatttcatctaacaccctcatggtgcataaggaaggtgaagctaagaggcaacccaagatgcccctccccctcctt

SEQ ID NO: 441704 - DNA, 415 bp, Triticum aestivum
ggtcgacgacgaggatgcaggctaggcatcattgacatcgagaacaaattctatgcaaatttaacattttttaaatgcttggattgcgatttcttatatacgagaaacctttagtccgtggctaggaatatgattcagaatcataaagaattctcttaacctttaagggatttaacaaaatggtgtcattctggatgtgcagaaaatggtccatatttttcatgatctcatctacccttctatatgccatgttgtctagtgtcaagggattcaataaaaccatggcttcatcattagctggaagtaacaggcgcatgatggtacgaagctctccaaagtcgtcttggaacggaatcccggataggataattagctttatggtatgaagttcagcaagagccttccgaatatcgct

SEQ ID NO: 441705 - DNA, 440 bp, Triticum aestivum
ctcgcgggtcgacgggatgcttggactcgctgaatcgtattatcagccgactaggagagaaggctctccccctgtactgactcatgaagaagtccactcacttcgagtggaatgaccaagccgaccaagccttccatgagttgaagaaaatgctgaccactccgcctatcctggcagcgccgactgaaaaggagcccatgctcctctacatcgccgcgactagccgagtcgtcagtactcttgttgtggtccagcgcccagaagaaggccgagcccagctagtccagaggctggtgtactacctaagcgaagtgctatccagctcaaagcagaactacccgcactaccagaagatgtgctatggggtatatttcgccgccaagaaactgaagccctacttccaagagcaccccatcacggtcgtgtgcaccgccccgctc

SEQ ID NO: 441706 - DNA, 410 bp, Triticum aestivum
acagtcttttcgaaaattgttttagaagtgggggaggggaaaatgagaggcgaatggcaaataatgtaatgcgagagatgagagtttatgatgggtacttggtatgtctcggcttggcgtaaatctccccggcaacggcgccagaaattcttcctgctacctcttgaacttgcgttggtttttcctttgaagaggaaaaggtgatacagcaaagtagagtaagtatttccctcatcttttgataaccaaggtatcaatccagtaggagacaacgcgcaagtcaccgaatacctgcacaaacaaacaccaacttgcacccaacacgataaaggggttgtcaatccgttcatggttatttgcaaagtgagatctgatagagatggataaacggtaaagtaatatttttggat

SEQ ID NO: 441707 - DNA, 403 bp, Triticum aestivum
aaggcatgatgtgatctaatacgagctatcgcctcacgggcagccatctgcatagcatgcctctctgtaggcatggctctccccaagaacaagaagcggcgtatcttagcacgccctcgcttgaattgcaccgcggcctggtgcatggtcaggctatcgttgatcttgtgtgggtaaagtgtgaagactgggcgcactgacggccccatcgcgacctgaacgatgaacgagaagagcttgacgaacccctcaagcacgttggcgaacatctgtgattcacagtcgttgccagccatctacaaaagtaggcaaaaattctaaacgatcagatcataaattttatgctgactgtcagaaaaatgactacatttggaaaaacatgaataaactctatcatgctaat

SEQ ID NO: 441708 - DNA, 97 bp, Triticum aestivum
  unsure (1)..(97): unsure at all n locations
ggnngngnacgtttacccgncggtaccgctccanaaattccaaggtcgacgggtacggtgcaagaagacgacagaagtcgacggggtgcttagctga

SEQ ID NO: 441709 - DNA, 415 bp, Triticum aestivum
aaggcatgttgtgatatgatatggtcaagacgtgataagatataaattgttgtatgagatgatcatgttttgtaaaagttatacgcaactagcaggagccttatggttgtcgctttattgtatgaaatgcaatcgccatgtaattgctttactttatcactaagtggtagcgatagtcgtataagcaatagttggcgagacgacaacgacgttacgatggagatcaaggtgtcaagccggtgacgatggagatcatgacggtgctttggagatggacgtcaatggcacaacattatgatggctatatcatgtcacatagtttgattgcatctgagatttatctattatgcatcttattttgcttagtatctgtcacagcactataataatacatgtaattagtggcatttcatcc

SEQ ID NO: 441710 - DNA, 419 bp, Triticum aestivum
agtccatgatcggaaaggacaatgacgccgagctgcttcaagttctgaaggtcgcctgttcctgcgtgctttctgctccaaaggaaagacctacaatgtttgaagtgtaccagcttctgagggctgttggggagaaataccattttagcgccgctgatgatgaactggcgctccgaccacaggatgcagactctaagaagctggatgagcttattgtggcgaaatagacgggtctgtctggtacgttgatgctgggtgtttgttgtatcttgtgaatggtcaggttgagatggtagtaatgtactactactatctggactccttcgctagctagcgaaaccatcggaagctcaatcaatgttcatggtcctggaaatagcatgttgttgtaagatgtgtatgacttgtgagttccacgt

SEQ ID NO: 441711 - DNA, 413 bp, Triticum aestivum
gatgggggaggccgttggagaggctcggagcgcgccacgtcgccgggcagggaaggtcagtgttttttgagtttcaccggaccggcaaaacctctcgggacgagtgcttcgccccggcgtgcgattggacacgaggccgcccgtctcctgttttcgtccaaaggagaagaaacaacaaattacgccctgcctctgattgtgaccggggatgcatgaaactatcaacatctctttctttcttttttttgtcttttgaaatgatcaacatctcacttttgacatgttcaaaaaaaaaacatctcacttttgacacgttgtgagctatatcaccagtcctgagttgaaaaacaaggagaacttgcaggtaggaatatggatgataatttttgactcaagtgatatttgcaccgggt

SEQ ID NO: 441712 - DNA, 190 bp, Triticum aestivum
gagacaaacagggacgagagtgcactctggatccagcccaaggagctgggctcttacaccagcaacgaggacaactggatcgaaggtgtgaacgaaacgacgcatcggcctcaggggagccttggacactacagtctccttctgtagtctcctctaaaccgagacaaaagtgcaaattaagcgctacccc

SEQ ID NO: 441713 - DNA, 190 bp, Triticum aestivum
  unsure (1)..(190): unsure at all n locations
actcccgggacgaaggagatgggggattaatttctagagttttgaaagtggaaggactaaaatgcaaaaaatcaaatgtactatcnccgcgacattattttcaagacggagggagtagtagtattatttcctgaaaaaaaaaaaaaaaaaggaaaaaaaaaaaagaaaaaagaaaaaaaaaaaagggggc

SEQ ID NO: 441714 - DNA, 398 bp, Triticum aestivum
tagtgaaaaggtggtgcatgcaacagagttaacgagtaggcatgtttagatgctctatgcactcactacagatcatgtcatgacaaacgagtcatacacgcatcaagagtacataccataaaagttacatatggcactaatcataacatagcatgcacggctgaataggagcatcctcggcaaaatcgctaaacatgtcaacattctgccaggaacattttatagcgacacgtacagctcgattgacacaagttatggtgctctatagctgcaaacagatacatgtacggatagatgaacacaatattgacagtgcattattactgatcaacatcagcagatgcacgggtcacgatgatacaacatgaacatatggcatcgggtcggatagttaggtt

SEQ ID NO: 441715 - DNA, 361 bp, Triticum aestivum
ggccacgaggggcacgcgaagggagcgcagccgccggcctccgccgtggttgctcgcggcatcggcgaggacgacctcctcgaggggtttcgcagcccaggtaagtcagaaagaaatattccatcctcggacaaacttctcttgttgcaatggaatccaagttctttcggttcctgaagcttgtcggagttggtttcaaagcaaggacagagcaaggaggccgcgagttgtttctgaaactaggctacagccatgaggtgcagttcaccgctccacccgccgtccgcgtcttctgcttcaaacccaacataatatgctgcactggcattgacaagcatagagtgcaccattttgccggagc

SEQ ID NO: 441716 - DNA, 402 bp, Triticum aestivum
catgggggtcttagtcgtacttatcaaaaagataagggaggcaagttgggaaggacggagctcagcacgttaggcacctagtgtcatctcagtgaatgaggcatagatgaacctctcgagtggaatttcaagaaaaacatcgagagcgagtacgaggtacaataagaagttccaagttgttagataatcgttcgatgtctgaaacaaagtgtgaaaggggtactgactaacgcgagaaagtattgcgtctgatgccagaatagatcagtaggaaggtggctcatggtctacataagaagccaagcgtggggaataactttgggaacagggggtgtacaccaaagtcaggttttgatcgtgtggaagggttatgggcccaccatgtgggaaaagtaggaagag

SEQ ID NO: 441717 - DNA, 426 bp, Triticum aestivum
acggtatattttcacctgcatgagcttgatcttcgttatcatctaagccgtcaaactggagctctaaatcgcataattgaccgaggcagtcgtgccataaattacattcttacagtgatggtgttcaatgttgttcccacaatactagagattggtatggtgtcaagtatacttgcgtaccagtttggttccacttttgcttggattacttcagtttcagttgctacctacattgttttcactttggctatcacacagtggcggactcagttcaggacagccatgaacaaagctgataatgcttctagtacagtggcagttgactccctgctcaattatgagactgttaaatacttcaacaatgagcaatttgaagttcagaagtatgataaatacttaaagagttacgacgatgctgcactgaaa

SEQ ID NO: 441718 - DNA, 208 bp, Triticum aestivum
acgggacaacggataatggttcgtaggatttatgaggtctcgttgtttttgcatgctagcaaattactccgggatgcgagttttatgatttcgcttgtgttcaaggattttactattattagtgcttgtatcctacctgtggtatcgtcatagtttgctgggtatggaagcccttttatcctgcttaaaaactgtattttgcctggaa

SEQ ID NO: 441719 - DNA, 413 bp, Triticum aestivum
acaagctaaaggtatatcactctttctaacttctgtgaggtctctaaataaggtttggtggttggcccacccagtagtggctgaaagagacgttaatcgatcatctatgggcgataatactacacgcatggacaaaagccgaaatcactaaaaaaatttaagcatcagtacatacgcaggcgctcatatacacgcgcatacactcacccctatgaacgcacacacgcacaccctacccttatgagcacctccgagagactgagccggcatatcatcttgagatttacgaagccaccgtagacgcctcatcatcgacgagaacgtctcctcccactgaaagcgcatcgccggaaatcctgaaataaatccaggaataatgcgagcaccaggatttgaaaccctggtgggttggg

SEQ ID NO: 441720 - DNA, 391 bp, Triticum aestivum
ggcgatgacaaaagcgacggccggagctcggtggttgcggctgagagggctagagctcgcgggcgaggaagctgagcagcgcagcggcatctacatagcacgtggaagaagtctgcgaggtcggcttggtcattcgggcttgctagcgatggcagtgacaagagcgacggcgagaagccctcggtcatggcggggctacggcgtagagggcgggcgcgaccatgggagaagggggagatgatgcgggtgctcacaacgcgtccgatggcgtcgtcggcgatgtcgggggcggtcgggttgctgcgaatcgacaacgacggctgtcggtggagaggacgaagacaacagcgatggaagcactactgggcgctccggcatcgtttgtctcggc

SEQ ID NO: 441721 - DNA, 413 bp, Triticum aestivum
ctcacgggtcgacgggatactgcaacttggccctgcctatcttttttcattgtagaggtgacctttggattttaaagaaattacgtcaaaccaattgagggatttatttatcacggaaagttgaacgaaaaccatgcaattttctatggttttgcattcctacacccagattcgttaagatttctagcaaacaggttaggcctcaaggggtcttctatgtgtcttacatgcatcttctatgttttcaaaactcttagaaaacatcttgtagaacacacaaagagctttacacataaatccaagtgtgttgattccttgtaaagttgtaaaattcaagaagttgtgtcattttcaatcgtgcattttattacttgtcttatgagaattctgcgctccaatggaacggttcccaa

SEQ ID NO: 441722 - DNA, 297 bp, Triticum aestivum
ctcgcgggtcgacgggacacatcacaattagtcgtcccagtcgcccatatgtgcttaccacgtacaccgaccgtcccaggatcaaagatcattcgggagcggccgcattataatccggacccatgttctccgcagcagtggaacgacttgtggataggaactgcatccaaaacatgataatccagcacgtgtccgtgtaagactgcgtcagtcctaccttgtagattacctaaaggttcaagtacgaaagagtacacgggcagtagtgtcacgaatgtttcagtgtaaaggaccgat

SEQ ID NO: 441723 - DNA, 415 bp, Triticum aestivum
gggacactctcacatcacgtcgtgactaggcgcgcgatccggcggctgagcagccgcaccttcgtgcggcggctctgaatgccgcgcaggaggagcacgacaggctcttcaccgacgagaagctcgcaaaaagggagatggaaaggttagtgcagaaacaaggcatggagcggattgagggatggccgttggttgtgatccgtggtttgttcttcttttcagttctttgctcccagatttcttgcgggtttgcaacagcaggcttctattactccaggcagatagagtcgcgctgtgctctcggtccgcttgatatctttgctttcgtgttgattggagtcgtttcactgccgtaccatttgttccttttctgggtttctctgggcgggaactaatgatgtcgatgatgagtttc

SEQ ID NO: 441724 - DNA, 438 bp, Triticum aestivum
tcgacgggccccctgaaatgggcaatgtttctttgtaattggatcgggtgacttacgagagtacaccctttagttcggacggggggtttactgagagccggatgatctcagaagtttgtttgggttttccaggcgctttccatcgcacagtacctcagtactatggccgccaagtcagcgaactgtgttatgtcacggcgacttatggcattgaggattcccttgtccgtgcaatttttgcaaaagaatgaaattgcgtcttcctcgcgacagtccttgaccttgttcattacaacgaggaatctggcccaatagtgaagtactgtctcttggggctcttgtctaatgtgggaaagatcacgtgtatccgggtgggctggtacatctaagtctgaacccgtacccgatccgagacccatgggcgggggaagttcccaa

SEQ ID NO: 441725 - DNA, 438 bp, Triticum aestivum
tcccgggtcgacggatgagatgaacagtatcccgtggagtcccgttttgcggtatgccacacccctcccgatgaacaggacctccgttttgaccatagcgctccaacacaagtccgtttcatccgttttgtggtacgccacgcccctcctgatcaacaggaccctgtttcgactgtaggaggtccaacacaagtccttttcctccgttttgcggtacactagacccctcccgatgaacaggatcccgtttcaaacgtggtcggtcgaacaaaaggccgtttccttcgttgtgcggtacgccaggcctcgtttccattgggtgttctgtccaagccggttggctcccatgtgttccattgcctcccgatgaacacgacgcattccgttgcctctcgatgaacacgacgcattccgttgcctcctcatgaacatgacgat

SEQ ID NO: 441726 - DNA, 172 bp, Triticum aestivum
acaataaaattatcggggagggggtatatcgaccccccctcgtgttgacgttatcgggagaggggtatatcgacgacgacggacccgataaaacagaagaaaacgaagaacaaatagatagaggagaagaagaacatgaatacacgcgaagatcaaatcaataatgtcacct

SEQ ID NO: 441727 - DNA, 424 bp, Triticum aestivum
ggttgttccggttgggtggcctcagtgttagtaccacttggagtgggcggtagtaccactcgttctggagcagcgaggttctcttcctccttctcttccatgcttggccttggtccttggattctccatggtcgtctcggttgtgccttgtgtccaatggtgtatattcgaggtctcgtcatatgtcctcttggggcttggagagtagtacgagtgtacatggggatgaacgtgggatgctccacatcaatcccatcctccgaggactttgagttaaaatcatcaagtgaggaaaacccaaatcccaaacccattcacctacgaacccaaagtgattgagcatcacttaagagattgttcctgtgtggaaccgacgcttgttaactttgagaactgtgtatcctccagaccgttaggcatcatg

SEQ ID NO: 441728 - DNA, 310 bp, Triticum aestivum
ttccgggtcgacggggtgctattactgttgtttggcataatgtccttgttgtcagggccagaagggcaattgtaatttccccaggaacttcggcaggactctgccagactcctggagtagttaccaagcttagcttatttgatgggtgatggcgacgaaagccggccgtccttcaccaactggatggcgattcattagtttagtcaacacatcattgtaacacttggcttgccactcataaagtaacttgatgttactgaaatcttctatgctgatgacagcgagacgggctgaccatgtagtagacgaa

SEQ ID NO: 441729 - DNA, 82 bp, Triticum aestivum
gacgggactagagaattgtcccatgtgaggaaaggatgatggagactatgattcccccacaagtcgggatgagattccggac

SEQ ID NO: 441730 - DNA, 394 bp, Triticum aestivum
tcgacgggccgctgccgctctttaaaagcaaggtttgaagaaggtaaacgctgtaaggagaaaaattcccatccctttcaaataaagacgcgagaactttgaaattcattccaaatagtggcaaaccagctatagaaagcaagcaaaagaatagtcgcgtcgggcacctacactagtcttctggtcttcccgccagcgcgaagcatggaacttccactaagacgtgggtgggacccccgtgaggctctggggcaacactcaggagactccggggcgtgtaaaacctcactcattattacatagagtgtcacgagcagagacctatgaggcgcatggtgataacccacaagtttatggggatcgcaacagtttttgagggtagagttattaaccc

SEQ ID NO: 441731 - DNA, 204 bp, Triticum aestivum
aattcgaacggccgctctttttatttttttttttttacaaaaactaaaaccttagcctgcgattctgcctctcgaattcaatacaacacacaacaaaagaagaaaatctgtacagaaatggccggattcggcctggtctcgagttactatcttccagaggggatcagcgagccattctcagatcccagagtgagaggctgcgtc

SEQ ID NO: 441732 - DNA, 141 bp, Triticum aestivum
cacgccagctgatatggaccctatgcatagttgcccatccttactgggtaacgcgattctcaatgtgttcggacatatcacaccatgagtctggaaacataacccactgttatagctagccgtacgaacatgtaaggatcc

SEQ ID NO: 441733 - DNA, 442 bp, Triticum aestivum
aggtgtgagagagtagaggaatggcctggccaacaatgaagtagggtggggcggtgcggcctgtgcggcagcacagccggccatgggaggcgggagcaggcagtcccaccggagctggtttgggcggctggagtaagaagatcagatattgaagaagcagcacatccgttagattaacatccaacggtcactgctgctagaatcgtttatggactaagttgacaaagccaaagtacacgtcaacctagtagacccacaagtcagcctccaaatctgtcccaaacagcatacaacccgaaatttctaaccagattcaaattaattttaaatctaaatataccttaatttaaattcaatgaaacttacccgcacaaaaacaatgaaatttaaaatatcaaaatccgaaagaaaacagtattttggaactaattgcctaattgtt

SEQ ID NO: 441734 - DNA, 448 bp, Triticum aestivum
agaacgtgatataatcttggcctttcatcgatgacttaatatcaataggaaggcccgtactcatctttgaccaaataagtgcctgtttaatacacgttaaactaactggaatttgtgcagtgcaattcaattagacagaacaggcaacaaagagtattaactcctaactgcaaacatgttcataactacagagtaacagaataagataatcatctatcagaatatccattacaggtccaatgttcaaagtctgcttaccgcagctagttactcttactcaactgaggcaaaatgtcacacacattctgtatgcatgggacagcttaaccatcagaacacaaagtttacaagcgtacaacataattgtacatgtctcactattgaagattaaacacaaatttagtgagaaaataggacaaccgttataactaaaatgttgattttcttt

SEQ ID NO: 441735 - DNA, 202 bp, Triticum aestivum
aacagacaggttcatcgtcgatgaagtggatcgtctagcttgatgtttatgtacagttgcgtcatcaaagataacttgtactaatgcgtgtttgagtttcggatggtataatgtacggcagtcatcaagctctgttagattctttagctgataaaaaactgtcatgacttgatttgccctgttagaatttcatcactgtcct

SEQ ID NO: 441736 - DNA, 384 bp, Triticum aestivum
caatgggagtgagcagatgtgatctgttggtggtggctagggttaggagacaccgcacacttatataggcgcagccgcgtggagagacgtgggcggcccacgtccgagtccgtgacagcccacgatccgacgtctcagattgtggcccagctgtcaaaaactctccgttagtgactggcaaaaaaataagcacgtatgtgtgagctcggctcgctcattcccgcaacccgcagcgtgacgcgcggcggaggaggagtgcgcgagggccttttctattctcaagccccaatagcatgtgaaagacaatccttctccactagcggggtgagactaaacttcccgctacacctagtgccaataaacccacatgggctagatttttca

SEQ ID NO: 441737 - DNA, 428 bp, Triticum aestivum
cgggtcgacggaattctctaaccgcaaaaagggtgaactattgttaatccatataaccaaacgaaaatacgtgttgatagatagtcaagttatttgtatcatcttctctgcaagaaaaggaagttatacgtatgaagcaaagttttgtagtacgatttacctggtccattggatataacatccagctagtaactcgttgattttctggttccacctaatcatcctggagaaagtaactcgttgttcttctcccgcgcttaacaggaatcgaacgctgaatctcccgctattgtgggggcaacgatagccaacagaccaatcaaaccttggtgacggacatgctgtaggtactgtaggagtactgtagctagtgcgttttttaagacgaacatgaaatattaatttgaactccagaaaatatttttttt

SEQ ID NO: 441738 - DNA, 420 bp, Triticum aestivum
gtcgacgggacttgggaacgggggaacctgaacagttaccagtgcttgtcaatttcaggaaatgacttaacagaactttacgaaatgcattaaaactttaaaaagtgatacaacatataccgtttatcagatgacactacttcacacatgacatatgctcatcactacgaaacaggtccgaatacacaatctgttcaaccaccacacatcactagcataccgaacatgcaaacgtccccctctggtcagtctgtccaaaaatgccaaacatcggggatactttactggatgttttcccccttcgcgagtagcacctagtactgcgttagatcaccctagcaccgtatattgccatgttatgctttgtgatgcttcaaatgctctgttaattactgtgttccccctccgttacctctttcc

SEQ ID NO: 441739 - DNA, 419 bp, Triticum aestivum
aagcactacgatccggtaagactttcctgaaatctggcatgacacgtcaggtcagtacattgaatggacttccaaactcacaacaagtaaaagcataatggcaaacaataacatgacaattaagcaagttaaatgcaaggctataatatactactcatgaagtgatcatgcttgtgcaatgagtccctcggactcccttaccatacgggttacctcgtaaccaacatcatcaatatggtgatcacctccggatcacgaacgaaaccaacccttgggttccaacatcaaccatcttcacggtttcaacattatcatcgcataatcagtgtcatctgtatgaccttattgtgcaaaattaacttattgttgttgatccatggtgtgacctactacgaactgtgtccgtaaccgtggacgcg

SEQ ID NO: 441740 - DNA, 404 bp, Triticum aestivum
agaagttttcactccgactccgaagatactcaagatgaaggtgttgccagtctagcacttgtgtcaaccaactcctacgacatatttgactcaccaaatgaaggaattggaagatgcttcatggccaaaggtcctaaggtaacacaccccgagtatgttgatttcaatagtgatgaagatgacttgttaggtgatgatttgcttggtgacaactctagtgatgaatactatgatgaaagaccaattaatcatgctaaaacgagtgacaatgataatgagaagattgaggctctaactaaagaacttaaaactcttaagttagctcatgacactatcttcgaagatcatcgagaacttttaagagctcatgagaaactacgctttgaaaagctcaatcttgagca

SEQ ID NO: 441741 - DNA, 359 bp, Triticum aestivum
ttcagttaccgtgcgtgtccttgtgcaggaaatgactagaaagagcatcgccgccatcatcgaccggggacaaggctgtcgtgcccgtgctcatcccgaacagtcgctgcatgcgcgccgcgtcagcacatcctacggcaggagggcctctgcgcggccctgttccaggagcaccatccagcaggtggcaggggatggagacaatccgcccgagccactccggcgacgaaaccctagctaataagatgggttgagagcgagcgttggtggccgggtgtagtaaatctaaccggatgggatgaaagagccgagcgaggggaacatgggggtgtgctgggcgccggccatacctgacagaa

SEQ ID NO: 441742 - DNA, 438 bp, Triticum aestivum
ggataccaacaagtcaggggctgctccatcaaagcccaagactgcccccaaggttgctgctgctcaagcctctaagctaacagcaccaaagagatcaactagaaacataccagcagctgagaagaacaaggcccagtgccttaaatggaagaagaagaagagccccaagtgctcagaaaactcaaactaaagattcctgatgatgatgacaatcatccagttgttgataatatgaagaaaagaaaacatgtaggactcatattgtggagacactcagacccctatgctctgagaagaaggactattgtggactacatgtttcacactaaggaacaacaggacttctatgagattgtgctcttggacaagaagcccattgtgtgtgacatgaaatgggtggactggaaatacattgaaaacaatgaagatcactttcct

SEQ ID NO: 441743 - DNA, 51 bp, Triticum aestivum
ggtccaggactcacgggtcgacgggataatcaaaattatatcattgcacac

SEQ ID NO: 441744 - DNA, 104 bp, Triticum aestivum
gccaggtggctacctaaaagcccggcctaagtgggccaaggctgagaatgatatgcttgataaaaggatcgaaccagagacagcagacagacgcgccaatcaag

SEQ ID NO: 441745 - DNA, 420 bp, Triticum aestivum
  unsure (1)..(420): unsure at all n locations
taagccgacgcgtgttgatgagccgctagctgagccgccagcttggcctcccgacgtgctctgccctgatccaccaaagactgggcattggcaccattgcgcgttgggtcatgtccacggggttggttacgatgttgttcagtacttgaaaccgctggcgagtcgatgtgcctgctgtaactccggcttggacgaggggttgagtgaatccactcacgactataagaataagccgcttgctgctccaatgctgtttgaagaagctctctggccctccgcgtttcaaccgccgatggagactcgccttcaagtggtagagccgccaatcgtatcgccgcaacaatcatattgtccaaagggttggaataatgactcgacggcgtcaaaaactgctgaggcggngtattattcacacgcgga

SEQ ID NO: 441746 - DNA, 418 bp, Triticum aestivum
attgctcctaaacatgcatatgcgctaccggagagaacagttctattcttcattatggacatacggctgctccaaatgaccggacgctgaatgatggagacatggctctaatggacatgggagctgaatataatttctatggctctgacatcacatgttcataccccataaatgggaagttcaacagcaaccaggcaatagtatacaatgctgtccttaaggctcataatgctgtcatatcacacatgcagcctggattaaaatgggttgatatgcacaagctggccgagcagacaatacttgaatctctcaagaatgaaaagattatccatggtgatattgctgatatgatggctcgaaggttgggtgctgtttccatgcctcatggtcttgggcacttgcttggaatcgacaccca

SEQ ID NO: 441747 - DNA, 378 bp, Triticum aestivum
tatcatcatcatcacttgtaacgaatcaaggcgggtgaggatctccatctgaactatataactcaaaaagtctacatgttagagcaacgctagcacagttactgtgtgccctcctccattataagcgtcgatatgggggttgggtagcgaaaatgcagcctaaccaaatcgtcaaaacaatcgccgtcgccatacattttggagcaccctccatatttgcctctcaagcctttgtatttgcagttttcggggcctcttttggagcaccctcagtccacgaaaaaagtgcgcgatgaaaatttcaggatgctccaacccccatggccacccgcgctggacgtggaacatcacagtaagagcttcgcctcaacccatgcc

SEQ ID NO: 441748 - DNA, 407 bp, Triticum aestivum
agcatcctccatgtcgtatgaaagctccctgagctcgtcagcccagatgatgacctggttgtccagctggtcccttggcacctccgccaccttgacgagggcagcgttcatgctcttcatctccctctggagggactcaacgtcctccttgacgcccttctgcagcttgtactcacccacgagcagctcgccgagcttggggagcaagcttcccatggcaccggtcaccacctccatggtggaaccggtggatcttcgttctcagtgtatggatcctttagctaggaagcagtgctgtaacacacaaggattggaagttagaaaagcaaaggaaattgttctctatcgcatgaaatacacaggataagaaatgcatccactccaacaccaaggaaaaatagctgctt

SEQ ID NO: 441749 - DNA, 416 bp, Triticum aestivum
  unsure (1)..(416): unsure at all n locations
gttcaataactgatgatatattgggtggttcaatttacgatccttcttactactcttctctcttcgaagatgttcgaaataatgcatgcaatcatcagggtgataaacatagtggtggtaatgatggcgggtcaacatctgcaggccaatctccacggcttaaatcttttggtagtagatcttttctttctaatgatgtggatgctggactaagaaggccgctgaattcatgctcagtggagacaagttgaaaatggaacttatttttgccaacctgactacctgagcactctttgtttggtcctccttgagtcagtaactcttgttgacttaacatagagatttgtacagtgcaaatgttcatggctcggaacagtggctcaccggtaaaacaagagcagcangatagtacaatg

SEQ ID NO: 441750 - DNA, 358 bp, Triticum aestivum
aaggataaatcatacagcagcccctctggccctctgctaccatcaccgatgtgggattactacagccctgaggcaggctggaagatggatgagataaagatggccccacaagttagctacagtaaaggaattggccccagttattgaagccatatatattgtatcagattactaagttacttgcaacctagcagaagtgaaatgcttttgttgaaagaaccattagcatggatctaaaaagtatttatatctatctagcattccaagtgggctcatgttttatgtatctactatgtagcatctagtgtgcaagacatgtaatgcaaaaaaaaaaaaaaaaaaaaaaaaaaaaataaaa

SEQ ID NO: 441751 - DNA, 328 bp, Triticum aestivum
  unsure (1)..(328): unsure at all n locations
tcctaanaagggattcaaagccttaacgttacgccgtngcaatggcgaaccgtncaatnacctcctttctnatnagttgttcaccctaaaatttcaaattcaactgggccggtcggtttttacaaacgtcngtgaactggggaaannnnnnnnnnnnnnnnnnnnnnnnnnnnnnnnnnnnnnnnnnnnnnnnnnnnnnnnnnnnnnnnnnnnnnnnnnnnnnnnnnnnnnnnnnnnnnnnnnnnnnnnnnnnnnnccaaaaagtttgcgcaaaccctgaaattnngcgaaatggggaagccgccctngtanccgggcgcattaaagc

SEQ ID NO: 441752 - DNA, 162 bp, Triticum aestivum
tcgacgggaccaatgaaagattccagtgttattgactttgttaacacggtatgcacccttcagtacagataagtggagttcgaagagtttgcggcttccgccatcagcgtacatcacatggaagctctggagtacctgcgaacagcatgctcagcacgcgta

SEQ ID NO: 441753 - DNA, 78 bp, Triticum aestivum
tcgacgggaccttcatactgagcaggcattgaaagaatatttctttctcttctttcgtaagagcgtagctagcaggac

SEQ ID NO: 441754 - DNA, 404 bp, Triticum aestivum
agcagcagaacacgaggattccaaaacggctggtatcgaggatgtagttgtaatggaagatgacaacaccaagtcagctgaatacaaggactccaaaatggttattgtagaggatgcaaatgcaaacgaagatgacaaagccaaggcagtagaacacgaggattccaaagcggctggtattgaatatacagttgcaaaggaagatgccaacaccaagtcagcagaacacaaggactctaaaatggttattgtagaggatgcagatgcaaaggaagacgacaaagccaaggcagcagaacacgatgatcacagagcaggtggtgtggcagcagaacgcaaggatcacagaacaggtggtgtggaggatgcagatgcaaatgaagacattagcgccaaggctgaag

SEQ ID NO: 441755 - DNA, 405 bp, Triticum aestivum
acctactcaccacatgttcgcgcgcaagttcgcgcccgagacccttgcgccgctcatggagatcgccgactccgtcatcctccgtgactaggcgccaagtgttcgtggacatgaacagaacaagggttggtgatgtgatgaagaagcataagctgatccatccatccatcccctttgtggtttcttcagagaggagcaagcaaccagcagcaaacctacttcgccttgttgttccgtcggtggcgccgtgggcgaaggggatgctgctgcttgcttagaatcagagagtgatgtggtgttggtggcgaagtgccccgactgcctctatcctatgtgagtattgttgtgtttcttggtgtttttcctttccactttgatccgagcgagaggaagtcgttggcacgc

SEQ ID NO: 441756 - DNA, 193 bp, Triticum aestivum
agaagtatatcacatgaatgggccaaaagtcaagaggcagaatggccgcagtgggtgaccgcttgctccctcatgcactggacctaattatggctaagagtgtaccaggagctggacagaacacgcattgttttctttgacaactatctataacagatggggaaaaccatcccctttgtggtatcatcaaaat

SEQ ID NO: 441757 - DNA, 441 bp, Triticum aestivum
tgtttattaataattgacatcttattttctttctccaagaaatactcagagggctgtatacaagatgtattacaattatggctccgagctaacttatgaggagaaaggatctcttgtcacgctaataaatgatgttgagatttttaagaccaattatcaaattagccaaaattatagtggatacatgccactagtatacgagttgcatgatggcaacttcattgcagaaaacatggtatgattttgttaactatggttgcatacattcttcttaagtaaactatattgctaactatatatgttactattatgttcttcaacagaagctcgcgatggagtttttacctgacatgatgtttaccgaaggtcatatgcatatggttaccttaagaccgactccgccgacggcttaccatagtgcatactcgatttctctaaaag

SEQ ID NO: 441758 - DNA, 416 bp, Triticum aestivum
gtcgacggggctgacaatattaagtacagttcaaatgggcaataagatggttgagagggtagtgaacatgagaagactagctcctccgaaacatgatgatcaaagatccagcctcaatagtttgtcaggaaaatcattaaattctccagatagctctggcttcggtcggtcattgtcaaagaagtcactggacatggcacttcggcacatggacatacggcgcagcattccaaacaatctacggcctcttatgacgagcattccagcatcatctgtgcatatcggccggtctggctccacaaggggcagaccgataagtgtctcggactcacctcttgcgactagcagcaacgccagctccgatccgagcgtcaacaacaacctgatgtgctttgacagcatcgacattgacgacg

SEQ ID NO: 441759 - DNA, 422 bp, Triticum aestivum
ctcacaggtcgacagagatctggaacatcaatcttgataagccgacccctgaggtgaacaagtgggaggcggacaactcggcatccaacacaggttgggcagcgagtcaggagcctctgagcagctggaacaaaatcagcaccggctggggtgatgccctggcgcagcccggttggggcagctcaagcaacaaccattgctcagggaataactggaacagttcccatggagcatccagcaacagtaacacatactaccaggatccatgcagcgcatatggcacgaagaggaacagtggcggcgggtactcccagcagaggaacagcaagcacagaagccaggctgagagccaccaccagatgggcagatggcatgatcaccgggacagggggacgcatggtgagcggtttccgtttgacaat

SEQ ID NO: 441760 - DNA, 427 bp, Triticum aestivum
tcgacgggggtgtcgaaatatattcgtactatatgatgcatgccatgcatataggccaagcgtttagagaatcgtttccaacagtaatgacgcctcggtaaaatccattttcgactcctcatggcttgacatcattgccgagaaaacttttctacatcagaagtgaacaaataattcttagattaaaacacgaaatacaccaaattacaacttgatttgagtcaccaaagtgatattcatttcaacacggatttttcaatctagacgcgataattatgaaaattgggggaatctccaactgtctagagttacagagaattataaaaagaatccacaggactgacgaatgaaatcccatgccacaattttgtgctaaagccatgcagaatcattcagctcgatatcaacgcatcagtcacgaaattcc

SEQ ID NO: 441761 - DNA, 405 bp, Triticum aestivum
tggttgtttggtggtctcgaattttgatgtaatttttattatgttcaattaagatgccttgtactttcgatgaacttttgtatataataatatatttgatcctttcccgacacacatacgtgcggttttaagccatgaaacattgagtcacaaccttaacatgttcttcttacatgagtttttgtaataaatagcaacgacctcatcatctgacgaggactttccttgctcgatctctgcgcagaaaccagaccaacgtggataatgtacgtctgtaaatacctaaaggttcggacgctgacgttggtgtgggaagatgatagcactgaatttgctatgatcgtggacaacgtcagtgccgagatagggacaacaacaaggcggtatgggactttactgttttct

SEQ ID NO: 441762 - DNA, 405 bp, Triticum aestivum
cagacggaaacggtgcacttcgacaagatcacggtgcggctcaagaagctcagctatgggctcatccaggagcactgtgaccccgtgctcgtcgcgcagaaggtctgcgtagaatgtctgcgtcagggtatacatgggcgtcaccaccagccagctcgacgagctcgccgccgagaccgtcgccgagctcaccgcctcccagcctgactatgcctccctcgcggcgaggattgctgtgtctaacctgccgccaagtggaaatagtctgtgtggcgcccgtaaatagagaacattttggtagaaaggtacaggaaagaatagggaaacttctgtcattttctttggtctttggaaaataaatggtgatatgggctgatacattgctaaattacatgatacggactc

SEQ ID NO: 441763 - DNA, 321 bp, Triticum aestivum
gactgacaaaggtgaccgtccgaagaagaaggtggtcattagtgagtgcggggagcttccagtggtctgagttttagatggcttatcatcttcgatctgcacatctggattttgttctggacttgttacaggtctttctcctactagttagagactgctgagttgaagccaatatttctaatctgagcatacggcattcaactactgttcggctggaataagaatgtgattgctttcctcaacctgttttgtagcattgttcatgatagataatgccttgtgaattttctggcagatccatgaaatgcctggatatctctt

SEQ ID NO: 441764 - DNA, 432 bp, Triticum aestivum
gtttacgcaggttgttatcgtgctgaggatgctatgggaaaacagggacatgtttgatcttgttatcagtgatgtgcacatgccagacatggatggctttaagcttcttgagcttgatatggacctccctgtcatcagagtaatggaatgttaattggctggtggcggcatgttcaactatgggaaatgatgagctcctacttttatgccagctctatgtcgtaggttgaccatactattgtgagaatctcggccaggatcattctttatatcatgttggttcatcttggaattcgtacagccgtttatcgtcgaaggatttactcacagaacacaatcagtgtgattatgcttttctacacttctgtccagagcaatggatatgtattttgtattgtacgactaccctctaatgcactactcagccttcag

SEQ ID NO: 441765 - DNA, 213 bp, Triticum aestivum
cgggcaaggatgatgattccatcttaggaggccaaacttcgaacaaaataggtagtacaatcagcagacgcttcaagatgactgactgggagctaaacatttatatgattacttgctgtattgggtctgttgttgtatgggagtttgtgagggatgttctaaaaacctctgcaccgggaaatccttggcgattaatctatgacctcccatagt

SEQ ID NO: 441766 - DNA, 384 bp, Triticum aestivum
ctcacacgcgaaaatgagtcgcgggatgatggccccaagacataggaatcctcaaacataaagtggctgctcaacagtttgatcggcaagccggagccagacaaagtgtctgtcgaacatgcatacccctttgcacagggcaagctctttgtcctaaccatcacagtcggcctcgaaagctaccatgtcaatgtccattagcgacatggtacatccttcccttaacgcactggttacaacctcgaagacgcaacgggcctgtcgttgaacggggaccttgacatcgactcggtttctgcagcccatctgcccaaatcacaccctagcttcgacccacagcgatacctcgaaatgtctgaacagtggaaggcctcgcctctgcca

SEQ ID NO: 441767 - DNA, 385 bp, Triticum aestivum
gggtccacaccattttggcaagcgatgcccgaaatcttgagcacctttacatcattgggaatgtcaaccgaaccaaacatttattgggggctgtatacaaacctggcaaacaactcccaaggccttgtggcaagcaagtaaaggtacacaaggacatcgctgcgcatgcacatctaagcgacgacgaccttgggacgagacccgacacgagtgccggtgtactcgatgtcgaacccgaccaccttgtacttctcctcggcaagcaacaactccatgatgtggatggagtgctccacccagaccgggttgttggtgtacaccaccgagagctccgtgaacattctgtgggtgtccaacacggcatgcattgtgaactgctgctcat

SEQ ID NO: 441768 - DNA, 405 bp, Triticum aestivum
cgtcttacagtagtatggctgaggcagtgccagcttggtagttagtactagctgagaaaattcatgatgctggctgggagcataacatttataggcttagttgctgtattggttctgttgatgtatgggagtttgtgaaggatgttctatagacctctgcagctgctattctttgtctattaatctatgtcctcttatagttgataaagttgagtacttacagtatgtgtgcgactacgtcccttgtagttttagaaacacctgaatttttctgtcctgttctgttaatcctgaagataaaactcatatgtatatgttgcttaactataccgtagcttcagaaacatattgcatcatcaaactgcatgtatctgtgttcttcttctggtcctgaggataaagatc

SEQ ID NO: 441769 - DNA, 401 bp, Triticum aestivum
gtcaggtgactacctcgtagcccggcctaagtggtccaagactgagaatgatctggttgataaagggatcgaaccagagacaattaactggccagaccgttgtcggacttggttcttcggggctggcggaaccttggaccctgtaacagggaagtgcatttggacgaacgatcaaatggacataccagtcaggaagcttaagcagtatatcaaagtagcacaggaagggacgttctttccagacagagagaacgacgagctcacaatggccctcgggaatcctgatcaccctggacggacacgaggcacgccaggccccattccgtggaaggttgggtttccggaagcaggcggttacaaatcccatgagaagacgaaaaaagtgcagcaggcccaaatgc

SEQ ID NO: 441770 - DNA, 426 bp, Triticum aestivum
atctgagtctttgatgtgttgtgatgtctgattataaatgacagactgtttatgtgcatcttattttgctacagtatataataagagctgtaatgtaatgaagtctcatgcgatttactgataatatggttatcgctaaatatgtttgatgtgcatcttaacgtctggtaatatatttgatatgaacctagcctgtttcgagaaactacagagcaaagaatgagagatggcaatgttaaatactaaaaggactttggatggtttcactcggctcagtgatattcactcatgttgtttcgccaaatgaatcaggggcttatcagtctctcaaaccaacttcacagttcaattttcacaaattcggttctttaacttgatctgccaaagcataggcctctggtgaatcagcaacagtaacttgaagat

SEQ ID NO: 441771 - DNA, 389 bp, Triticum aestivum
tcacgggtccacgggtatcgctgaaataagacgacagaagtcgacggggagtatatgggccttattgggccatacgggaatagaggagagagaccaaaaggaaggaggcatgtgccctccctctggtccgaattggacaaggggcgcagcccccttttccttcttcctctccccctctttccccttctcctactccaacaaggaaggagggagtcctaccgggagtaggactctccttggtgcccccctcctaggccggccgccccctccccccttgctcctttatatacggggggaggggggaacctctagacacaacaacaattgatcccttggatctcttagccgtgtatggtgcccccctccaacatagtccaactcaataatat

SEQ ID NO: 441772 - DNA, 77 bp, Triticum aestivum
  unsure (1)..(77): unsure at all n locations
ggnnngnnngttantctcccgtacggtacaagtcanngggtcgacggncaacgataangannctatcntaagaggcc

SEQ ID NO: 441773 - DNA, 220 bp, Triticum aestivum
ctgagacgaactcgacatctggggtggagatgctcaacgggctgctttgcccaagtccggattgaacatgcttaagatcaatacatctatcacatctgtgatacctgcagttcaactatagcctcaacgatgttcatttaatcctccacatcaagtccatcatgacgcacttgcgcaagccgttgcggaaaacatgcacagtatctaccccaatgagtta

SEQ ID NO: 441774 - DNA, 395 bp, Triticum aestivum
tgtacccatggaagaggattcagctgagaagaacctcgacatctggggtggacatgctaaaagggctgctttgcccaaaaacgggaatgaaaatgcttaagaaaaataaatctaccacatctgtgattcctgcagttgaacttgagcctcaaggatgttcatttaatcctccacatgaagcccatcaagacgctcttgctctaaccgttgctgatgaaatgcgcaagatctacactagagagttaagccccacaccagtgccacttactgttcttggtcaagcagtaactgaagaagataaattttttcttgatgctgctgatgatggagatgctgctgctggagatgtatatgctgcagaaggtgataaagaccacgatgctgatgctctaact

SEQ ID NO: 441775 - DNA, 396 bp, Triticum aestivum
acacatgaatcggaagttagtagtatactatatgtgcttcacgtacatcttttgagttatatactttttgctctagtgcttcagttatatcttttagagcacgtcggtggatttgttttatagaaacctttgttctcgcacgcgtcacttatattaatttgagagtccaacagaacatcatggaaattttctctaattatttgaagcattctagataaattcaatcaaattttcttaagatcgtgttgaatactatgaaaactttgatacgtgataattgttttgatatatggagatggtgatattacagtcgtactagttgagtacttgtgaatttgagaaatgcttgtgttgaactttgtgagtcccgtaacatgcacgtaatgtgaaccgtta

SEQ ID NO: 441776 - DNA, 373 bp, Triticum aestivum
  unsure (1)..(373): unsure at all n locations
atgacctgtgcggcttccatgaatgggacccactccttgctgagctgaaggaactgatatagaagaagtgctcgagcaagaagcatcaagttccgtgaagcgtgtggcgatggatcttccttccggagagaatgagcggtgatggcctcctgcgctcatctgctggagcgctgctgcctagtagtagtaacctagatatagatatagtacctagtataatgtaatgcgggaataaccagacgaactgaagtgatgctgcataatgcagtgcactgcagccgcagtactagtagcagccagtaagcacggccataatagtccggcgctacagtgtgtgtcagctcgtgcaccgtggtntgcctttcgtgtaagc

SEQ ID NO: 441777 - DNA, 425 bp, Triticum aestivum
  unsure (1)..(425): unsure at all n locations
cgggtcgacggggagggacaaatcggcaagatccggtcaccacgcgacctgaagagcaacagtgatctccacaagctgtaggccgatggcgtgctccatcccctgcgatggggtgaccatggcggtggccacaactcctcatgctcgcctcgatcttggcgacacaccctgagtgtangaggcagcaacgacctcgacgaaatcatggcctccatccaggaacgcaatcatgtcgctctaaataaatggattcgatcatgtgactctaattacttcggattgttatgtgcacactaagcggggtgcagttaggaaagaaaatgttctctaattaaagtgattgagtgatttaaggtaaggttaattaatttagatttgatttttagtgattgttagtaaagtacgatgcgtctttaaaatctttt

SEQ ID NO: 441778 - DNA, 397 bp, Triticum aestivum
atttaaaatcggtttcattgagtttcgtctgaagcgagcttttggcacaaattctgagagctacttatctgacatacgtgaaacagtccgcgaactcttcaatgaatactgcaaccctacagatctgccaagtgcagcttcaaatagtgcagctttggatgcggataatgatttattggaagattgggatcagcatctcaatgaacaagcaagttgtcagatatctacagaacttgatgactaccttgaagagggtctagttccaagaaaggatgagtttgacattctaaactggtggatgaatcataccacaaagtacccaacgctagcagctatggcacaggacatattagctatgccagcttctgctgtccaatctgaagcagcattcaacagc

SEQ ID NO: 441779 - DNA, 307 bp, Triticum aestivum
aggtccagggcttgctgcaaaatgaatctaataaatgtggggcacaggtagtagatcgggcggctatcacgtccggcatccaacgaccgttaaagtgacggataaaatcaagaaatctgccggcggacgcgtatggtcacccatacaatatgcgttacgagaactatgtcatgatcacatgcctgcctgaactactgttgtgcggacggtaactggctaaagactttcatcactatgcctgtagatatttgttaatacaaggttagttcatgacatactctgcatgacttaccggaaccctacatta

SEQ ID NO: 441780 - DNA, 422 bp, Triticum aestivum
gggtccacgggtatcaattaaaaatccaacataattttccctgcaaaaaaaacaatcgaatttgaaattttgaaatgctaaaaaactattattgaaactaattgtcggtttgccatgtttttaaaatttatacccatttcttactacttatagcccattttctgggcaagcgaatacatccctctcgtcttgaaagatttacagcttagcagggctgagaaaaggaagtaggcctccattgggtattcttttaagaaaatagaactggactagccattttcaaaagaaaaaacaacaactgggctcatcatgtggtgaatattatataaaagcctgggctatacggaccacagcccccgcaaagccccgttgataactgctccacctctaaaactaaataataactacccgacctgctgagt

SEQ ID NO: 441781 - DNA, 243 bp, Triticum aestivum
gggtcgacggggcagactaaatctagccgtcataaacctccttatatcttcctcagaacaaccaccacacgtacctattatggcatttctataaccattccgagatacattgccatgcaacgtgccatcgttccatttatcattatgacacgcaggacttttgtcatagtgccattgcatgatcatgtagctcacatcgtatttgtggcaaagccatcgtgcagaatttttcatacatgtcac

SEQ ID NO: 441782 - DNA, 425 bp, Triticum aestivum
  unsure (1)..(425): unsure at all n locations
acaggaaaagacattattcagaaggtggtcatcacggatcttagggaggaagtggtagtttacatcaagggaacaccgtttgttttgagagagttagatcaacctgttgatacactgaagcatgtgggaataagtggcccaatggtagagaacatagaggcaaggctgaaggaggatatactttctgaagttaaacagctagaaggtcggctgcttctgcatcaagaagaatttaacacagccacaaatcaatgcagtgtactaggttattgngagcacatagatctggaggacgtaatgacaccggctgaagtgtacagcacatttaagggatcanggggtattgtattgactacaaaaggatacctctgaccagggaaagagaagcattagctgctgatgttgattcaatacagtcatcaatc

SEQ ID NO: 441783 - DNA, 59 bp, Triticum aestivum
ggtcgacggcgtcgtattaatagaaaatccctactcatcacgacatgtttgcaatctgc

SEQ ID NO: 441784 - DNA, 127 bp, Triticum aestivum
gggtcgacgaaacagtcaaatgttaagttgcagaggcggcgaagcctgctgcttattataccgtgtctgtgttatctgagacttgaggttgtggtggttattgttttgcttccgaatggtcggagtt

SEQ ID NO: 441785 - DNA, 401 bp, Triticum aestivum
ggtctcaaaaaaaaaaaaagcgaaagaggtctactaccatcccagacgaggaggagcagagccaccgcaatcgaatccccttccttccttccttccgtccccgacgacgatggagcgcgtgagaagggcgtcgcatgccggctcctggtacaccaacaacgccagcaagctggaagaagaacttgatggttggctttcggcagctgctctcaccaagtcacctggagttaggggcataattgcaccccatgctgggtattcgtactcagggcgctgtgcagcttatgcttttggcaacattgatccaactaacatttctcgggtgtttctgcccggcccatctcatcactactatactccaaaatgtgccctgtcaagagctactggttatagcaccccga

SEQ ID NO: 441786 - DNA, 405 bp, Triticum aestivum
agaagctaacactccgactccaaatatactcaagatgaaggtgttgccggtctagctcttgtgtcaaccaactcctacgacatatttgactcaccaaatgaaggaattggaagatgcttcatggccaaaggtccaaaggtaacacatcccgagtatgttgatttcaatagtgatgaagatgacttgctaggtgatgatgatttacgtgttggcaactctagtgatgaatactatgatgaaacgtcaattaatcatgcaaatcaagataaaacgacagaacattataaggaaaaaaatgagattctaactaaagaaacaaacactcctaagttagctcaataaactatcttcgaagattaacgagaacttttaagggctcatgagaagttatgcttcgaaaagctc

SEQ ID NO: 441787 - DNA, 426 bp, Triticum aestivum
  unsure (1)..(426): unsure at all n locations
agaagggtactagggtacctagggtttatggcgtctcgttgtttttgcaagctagcatgtgactccgggatgcctgttttaagattaagatttcgcttgtgttgagagatattattatttactgcttgtagcctacctgggataccatcatattttgttgattatggaacagcttttatcctgcttaagctctgtattttgcccgagttgaaatggcctgaccagttgaaatccttcggtaccctagtatggttacctacctgcattttgaatgaatttctcgtgtagcggtttggctttaagctgttcatttgtttgtagaattgttaactggttgcttggtangggatagttgtattgtggttagtgtagaatacctgttgtaggcatgtgtaattcctgngtgacttgcctagtatcctgcac

SEQ ID NO: 441788 - DNA, 97 bp, Triticum aestivum
  unsure (1)..(97): unsure at all n locations
ggnggngggaanttctacttnggncgggccccggtcatgaaataancgggtccacgggtacggctgangagatggaagagaatagttctctcagtcc

SEQ ID NO: 441789 - DNA, 408 bp, Triticum aestivum
ggcagtaaacagcgaggtcgtcccaaggccagtccttctcgatcctcgggactcctgatgaagctcgcgccgtccccggtgtcacccggcttggccgccgatggaaagcctttccctaggtcggggaaggagctgaagcgaaagcaagaacatgatagcacaacagcaagtagtgagagtagcaagctaaaacatttcataacaggaagtccagggcacgatgatttgaatgatagttttgatgagcaatttggcttgaagacttctgggtctggaaaggagctgaagcgaaagcaagaacatgatagcacaacagcaagtagtgagagtagcaagctaaaacatttcataataggaagtccaaggcatgatgatttgaatgatagttttgatgagcaatttggctac

SEQ ID NO: 441790 - DNA, 376 bp, Triticum aestivum
cacggcgaacacataaccattagaaaaaggactgcaaggccgagtagaaacgatcgccctgaacagcttgctgatccagagacaacgactgatacagacaggaacatggctgctctgtttaatgttctgaggaagaagaaaaaagcaaggctcgaaaaccttgttttgaacagaacgtcctttgcccaaacggtggagaacatatttgccttgtcattcctagttaaagacggcagagtggaaatgaatgtgaatgacgatgggcatcatatcctctctccaagaaatgcacctgcagctggtgcaattgcctcaggagaagtgaaatacaaccattttgtcttcagatatgattttaaagactggcagctcatga

SEQ ID NO: 441791 - DNA, 134 bp, Triticum aestivum
aggttaatagtattcctgcatgacatgtgtaacagatatatttcaaccaacacaatcaacactcattatatcttactatgccataccgaacatacccgtcacgacggagaccggcggaaagctcacgcctaccc

SEQ ID NO: 441792 - DNA, 419 bp, Triticum aestivum
aacaccacagcgaaatggtgtgtctgaacgtcataacagtacttttttagattgtcgggggactaatccacgagcacctatgggaccggcggaccgagtccctttcggttcggcgggggcgagggtcgcacgaagagcggatcgaggcgaagcacacgagcagtttacccaggttcgggccgcacagatgcgtaaaaccctactcctgctttgtggtttgtattgagttcttgctcgggagcgcggagtgctacagtacaccccagcagctaacgagaccgagcgtgagtgttctcttttttcatctacgttgcgcatgagcctccttttatatgcgcaaggggtcaccgacaggtggcaacgtagacaagggtaaaaatggaaaggtgttgcggttggtacagctacctgctacagtg

SEQ ID NO: 441793 - DNA, 95 bp, Triticum aestivum
ctggctggcgcgctctccatcgcaaggttagagttcctggacgaacacccctgttccgttccggcactctgattctgatactgctacctatagtc

SEQ ID NO: 441794 - DNA, 418 bp, Triticum aestivum
atccgggtcgacgggggaggaaaaagatgagagattgaagatggatgccggtcgttggatgtaaatccaacgactaacatgtcagaatcatttgttgactaaattgacaacacttgcgttgtctttgacctattggcccacatttcagcctccaagaatgtggcacgtattcaacccattttttcagaatttacagtctttttttgcgcagtaaaatttacagtcaatttgatctttttttttgaattacaacaataacctgggctgggtgaccaattaaggtaccttcaagttaaccaattaatttaattcccaaaaagttacaaggcaattgcaacttaaccaaaatcacgaatttgccgaaccgaatccaattaaaatgttgggttgggccaacaatgttatccaaaaattaaaa

SEQ ID NO: 441795 - DNA, 420 bp, Triticum aestivum
  unsure (1)..(420): unsure at all n locations
ttcacgggtcgacgacaaatttccatcggaagaagactccatgatatctgctccagcttcgtcttcataatcatcatcattgtcggggtcggagtcggtgtcgtcgatgatgatgtagtcttcgggatggtcgtcacctcctggcatagggtctcccatgaatactcctagcttcttcttcaggtcttcattcttctctagtagtactgcaatttcctcttcatattcatcgcgtgtagacttgagttcctcttctagctccatgttcctggtcatcaccttctttaggtatatcatgctggcgcacatctggttctcctgacgacgaatgtgttggttcaactcttggatgtaggctgcaatggacttgtcnctcctggtgcaaatcatctaccatttctcatcttggcgttcacatat

SEQ ID NO: 441796 - DNA, 427 bp, Triticum aestivum
ggtccacggctgcactttacaaccaaattggaatcaccttcaaattcgtccggagcgttgagttgtggacgaaacaatctgatgctgcagcagaatccgagtcaaactacaagtccaaaggtgttacatcacctccacttgggcccattgaccttgtacgacctagatttagttttaggctgccttgggacgtcctcccacctccttggccgccaccccttgctcctatataagtagatccatctagtagcttttccttgggttttgtttagattaaaagttcgacatagctgcaacttcgcgtacttcgtttgtgttcaacgaccagacaaaggcgtcacagaaccccaccttgatcaataaagctttcatcttatattcgcaatatccagattgcaatctcagtttcttgcgtgttcctcgtttg

SEQ ID NO: 441797 - DNA, 405 bp, Triticum aestivum
gggtccacggcgagttcgcaagggaaatggtgcagaggcagggcgcatggcggtgggttgtggcccgggcagtagaggccgggattagcaccccagggatgtctgcgagcctttcatactttgatacctataggtgcaaccggttgccagcaaatctgatccaagcacagagggacttgtttggagcacacacctatgagcgcattgaccgcccaggttctttccacaccgagtggactaagctggcgagggagggcaagtgaatgactttgccgccacctgaggaatttggtggtaccatatgtggtctcggtgactctggggtgatgtctcttcgtggttgtctttaatttatctattgctgtttttgcaatacgagatctgaattgtgtaccttgaataatg

SEQ ID NO: 441798 - DNA, 382 bp, Triticum aestivum
  unsure (1)..(382): unsure at all n locations
gtccacgggccgatggaaatggaaatgggcgagttcctcaatgaggggggcgatgacggcgaggtgtccatcagcctggtggagacgaaaggcgggaactggaagagcggcctcatcgtgcatggcatcgagatagacgtaaganatcgggctgagtgaagagcccctgggattcgactcgcccgggtcgatgtaaatgaattaaggaaaacatatcttccgtagtgccttggttttgaacacttcgccttttgcggctaaaccatactatgtgtacacctatgccaactaatatgaatggataaattacggtttaacaaaatttccttcgggcaatttaaaatccttgtgtcttgtgtctaaaagaaaaacagcggactcc

SEQ ID NO: 441799 - DNA, 384 bp, Triticum aestivum
ggtggctagtagaatcatccttgatctatatttttgggttggttagtcaaagagcacgtgattaaattagaggaagtacatgttactttgttgtttaccctggatgtgttcctacgaacatgcatatgcatcaaaacaatccaattcatcaagaataattgatccaaagcagttaattcacaaaatccttggacaaccttccaaataagtttcaacaatccaatttccaacctcaattttaaaaaagggccaaccaacaaaccaatccatttatccggcaaatttggtccaaccgaacattgataaattgcatgttaaaatttgggtcccaaaaatttccccggtaagtcaaaggcacaaaggaacaattttttccaacccaat

SEQ ID NO: 441800 - DNA, 406 bp, Triticum aestivum
gaagaccaaattaaccatggcgaccctgccgcccaggtcgggagctttctccaagggctataagttggcctacgcctgggacaaggaggcgccgctcacggggcagcagaacgccgccatctccgcgctctcgcacgccctcgccgcccggctgttcccggctaatctgcacgatgcagacaacgactctgctttcaaggatgccggtgcagtggatgcggccttggtgaacacacatcagttctacaaatggtttgttcaactagaatctgccatgaaatccgagattgacgataagtatcgcctctatgagagtacattacaggaacatgttatcacatgtgatggtatccttcgacaagtggatgacacactcaacttgtttgaacaagtacaatccttgcac

SEQ ID NO: 441801 - DNA, 325 bp, Triticum aestivum
ccgggtcgacggctaacgctacacctgttagtcacatccgctcattaagttgagttgaagatgaacctctatctcaaagacgccagtagtagctactacgtcggcgctattgcatattctgcaaaaatgtatctcggctaccaatttgttggaacgactcatttagctattttcgacaaatgaattggataaaataagaacatctatgttgtggtcgtgcagtaacgtgcttatgttgaatacagtcaatattccgttcgaaaaaagaaaaaagagtaaaccgcataaaagaagcaggaaaaaaaaaagaagaagagtttttttt

SEQ ID NO: 441802 - DNA, 419 bp, Triticum aestivum
tcagagcagtctaatgccgagccaagcgatcgggttgtgtttcttgagaagaagattgcagaacttgagaggcgggctaaagctagaggcgaatctcaagagtaataagctaacaggtaagttttgatcgagcacgtgaatcctatcctaaagaagcactgtttgtaacctctgtctggtggcgaaggggtatctggcaccgacttacccatatagcaccaagatttgacttggactatccaattttgtgagcatgtgtgtgtggcaactgttgtttcgagcgaataaagagggatcctggcagataaaatcgccagtgtttgttgggttaaccgcagtgatgctggtcgagcagaaaccagagggtacttattattcttgtatcacttgcttgacatttgagaatcgaacgatgtaat

SEQ ID NO: 441803 - DNA, 373 bp, Triticum aestivum
ttctcaatagcgaatcttatcactggcactgtaacctcatatcagtagatatttcggatggtgagcaaacaattcagtgctatgttcaagatgaaggctttcttgcattggtacactggtgaacgcatggattacatcgaattcatcgatgcggagatcaacatgaatgacctcgttcttcgactaccatcagtagcagactctactgctgactacgacggcgagtacgatgatgaggattaggaccctgatgacgacatgtaaagtgggatgtccatgtcatgctttgctaggctggggttctgggggcatattttgatctgtttggtgctttgttataaatctgtttatcatcgcaactatcgcttgtaca

SEQ ID NO: 441804 - DNA, 378 bp, Triticum aestivum
gaaagcggcggaggcccgggacggcaagtccgggcgcgcgctggagctgtgggccaaccagccggccatgcagctctacaccggcaactttctgaaccacacccaggggaagggcggcaagctgtacgagcagtacggcgggttctgcctcgagacgcaggcgtacccggacgccgtgaaccaccccgagttcccgtcggtgacggtgaggcccggccaggtgtacaaacacgacatgcgcttcacgttctccttctagctaggctggactatggctgctacggtagtagtagtgctaccattggttaatggatcgtactagatgtgttcactctggatttggaggtggcgcgattcgtggggctgggtactgttatg

SEQ ID NO: 441805 - DNA, 70 bp, Triticum aestivum
gggtcgacggccactccagacacaaaaaggaattgcggccttgaggagcaatgttgatacacggatcgta

SEQ ID NO: 441806 - DNA, 430 bp, Triticum aestivum
aggatgaaaaggtgtggtcccgaagaactcctcctcctccgaacacctcgatcaccgaagaccaggagggaacgtccctcttggacagcgagggaaaggagtccgggccatctggaccccctccgacgaccactcccgagcgtccaaggcccccaacagcacaggttccttccaactgggaggggggcgggagccaatgccagtaccgaacacctccgcatgggcggcggttgactggccggatacgctagaggagttggtgagcaactccgtcatagttgaatggcaccgcacccttatgggtgcagttatgcagagtgttcggtctgtccaatccgtactgaacgacgatgtccaaggccttctaacatgctttgaggtaagtcaagtaatgatatttcctcataatgtggttatagttgtttaattt

SEQ ID NO: 441807 - DNA, 375 bp, Triticum aestivum
cggggatgccctagtgaaacaacatgctaaagttgctgaagaagctgtatcaggttgggagaaagctgaagcggaggcctcggcactgaaggttcagctagaaactgttacattgtctaagctagcagctgaggaaagagctgcccatctggatggtgctctaaaggaatgcatgaagcaagtaagaactgtgaaggaagaaggcgagcagaagctacatgatgtagtttttgcgaaaaccaaacagtgggagaagataaaggccgagttggaagaaaagttgccttgaatttgacatgagctcataagggctggtgctgagaatgatgcactctcaagatcactccaagagcgggcagatttgttgatgaaaat

SEQ ID NO: 441808 - DNA, 88 bp, Triticum aestivum
  unsure (1)..(88): unsure at all n locations
catagttgtatcgcgacctgaatgaatggaataaacgaaataacgctgttgttcaatcgtcaaaaagaaaaaccannancanantcat

SEQ ID NO: 441809 - DNA, 413 bp, Triticum aestivum
ctaacggaagcaagccggtgacacaacggttacccaggttcgggccaccttgcagtgtaaaaccctactcctgcttggttttggattgcaatagcgaaagagaatgagagtacaagggttggggatcaagtggtcgaactcctctacggcggctccctgccatccttttatatctaccttggtcctcttccaccgaaaacattggcgagaagggttggcacacaatggcaattttcacgggggacagggatgtagtctatcgctagaaaaggtggtcttcaccttcaaagacaccgtccatgacgcattggtgggctctggaatgatctctaccctacacgcccatcgtcatggtcatcttgcaccgatcgggcaatatttggggttgctattggaacctgcatgctgccctt

SEQ ID NO: 441810 - DNA, 428 bp, Triticum aestivum
gggtccacggcacccgtgtatataaatttgataatgatgaatcaattagtgacattagtattacattcaagaaaaagtaaaagataacaaatctaaaacaaacaacaacaaaatttgcacacaattttgagacaagttgcacttttttaatatggaagaataagcatataatagtgtaattttcaaaaagaagaagctttttagtaaggaatgaattagtggcatttgtattttccttaaagaataaataaaatgaaataaaaaataaaactaaataaaataaatcaagtttctaaagaaaatgaattagtaacattggtattgccctttaagaagacatgaatatgacaaaatttacacataaattgcactttttataatatgtaaaataaatgtataatagtgaatatttcgtgaaaatgaacttt

SEQ ID NO: 441811 - DNA, 412 bp, Triticum aestivum
ttgctctgcttcgagtatctcagtggcggaagcatcgataagcttatctataagggaagtgggtacgtgctagattggagcggacgctacaagattgtgcaaggaatatgttcaggcctgcactacctacaccacgaactagaccatgagcagaacatcgttcacctggatttgaaagcgagcaacgtactggtcagccgcggcgatgggggagacatcacctgtgtgaagatcgccgactttggcctctcaaagttcttcaaagcggatctaacacactcgtacacggagcaggtcgttggtctattggcgtacatggcaccggaatacgtctgcaagggcagaatttcacccaaggccgatatatacagctttggcattcttattctggagatagtcactgggcgatgcg

SEQ ID NO: 441812 - DNA, 444 bp, Triticum aestivum
cccgggtcgacggggaggcccaattgttatagtttccttttcatcaaggctatccattcttccgtgaggaaactgtaagacttattctacaagttgttcctgatgagtccttcgcgtatcgaaagtctgacatttgcttgaagacaatgtcaatgctatctcgaagcatgtctgtggtaatccaattttcaataagtgcatttgaagcacaatgctaaattttctttagcatttatcctaacaccgttgtatgggtaatatcatgagattcctccccccttacctaaatgattttctactttctatcctgtcatggatatcatgatccgcttgtccttggaaaggatatacccctgaaatatgtgtttaaacacattttcctttccgttgttctgtttaaccttcttgaggtttatatgatctaagcagtaatacgtcactact

SEQ ID NO: 441813 - DNA, 362 bp, Triticum aestivum
gggtcgacgggagtgaggaagccggctggaggtacacgtacgggagagaagcgacggagttaggagttgtaaatatgcattgttgtatcgcgacctgaatgaatggaataaacgaaataacgctgttgttcaaaaaaaaaaaaaaaaaaaaaaaaaacaaaaaaaaacaaaaataaaaaacaaaataaaaaaaaaataaaatgttgaacaaaaggataaatcttcatgatcacttacaccaaacacaatagtacgactacaatcacaacaaacatcaccccatagctaatcgatttacaacttcctaaccgggaaaagatagtagtatccacctgactctccaaacgacacacccctgaaac

SEQ ID NO: 441814 - DNA, 412 bp, Triticum aestivum
gatgctggatccggcacctcacgtggtgccggagaagaaggccacgggaactcgaaggagttcccggcgccaggtgttgtcggactcatcgtccgatgactccgaggcggactcctcccgcgaagacgaggaggaggaaaaagaggcctctcccccggcagggatagagaagaaaaggaaggccgccccaactggggaggccggagggtccaagaagggaaggaccccccccctccgaactactccaccaacgccgacgacggcgaggaggagtggccaccaagggctaagcccttggcgaaatcgtaagcgtccgggtaccagaataactcatggcgtttcatttgttgcacagaatctcctaacgccgaatataaccctgcagcccgcccaaggaccagcttgatgcctc

SEQ ID NO: 441815 - DNA, 149 bp, Triticum aestivum
gggtccacgggatacactaaagggcatacgtttatattttcaaccaatttatatgcactggagcatgtgcctgtagttcaaatttgaattatgcacataaaataaattgaaaactcagttaatgcataaaaatgtccaaacgaaccccg

SEQ ID NO: 441816 - DNA, 170 bp, Triticum aestivum
atacactcacatgaagtcttattaacattacaaccaagggacatgcactggaccatgtccctgtagggcacattataatcatgcacatagaataagttgactactcagttaatgcataacactgtcaagatcatcaccgaataaagggacatcatcttggatttcaacat

SEQ ID NO: 441817 - DNA, 444 bp, Triticum aestivum
  unsure (1)..(444): unsure at all n locations
gggtccacggctgcccatcatggaattgataagcacctgaatatgtggagcatacccacaagatctcttctgatctgtagctgtcctcttgattgtctcaacaatcaagctcatcactttgaacttttgagggacatcaaatatatgtaacaagttgatggagtgtcctgttatcattctgtgatctcctgatttcgggaaaagtgtgtgcctcagaatggtattggtagtagacagccctgccagcaaatgcttcacagagccaaacttgtgagtctcaagatcttcatctggaatctctttgtacatgttgtccatagagttgtgatccttcttcatctttgcatagacatctaggtcatcctcatgagtttctggagcattgatcaatttggcncactcatcaactgtggattggtaccttgtaccctcagacatccatac

SEQ ID NO: 441818 - DNA, 326 bp, Triticum aestivum
ttcacgggtccacggcggatccccaatcgatagacaattcccctaatagagtcccactgcccacgaacgttcacgtctacgtcggctaacgacatgtcacatggcaggtgatgtatcgactatgtgcaatcatctggtggatcgatcagcactgccaatcgtgccttgtccggattgcagcatgaacgtctatacgatacattgctacgtgtgcgtacatcccacgtcagcgttcctccaaatgcccgactcacatcacttcagcgggcgtattctaattcgatcggtactagcaaagccatgtcgcgcatcacgccaatcgccat

SEQ ID NO: 441819 - DNA, 418 bp, Triticum aestivum
  unsure (1)..(418): unsure at all n locations
gggtccacgggacgcataaacaagaaactatatatgaaaatgctggtcctatacaaaacaaaagtcatggtttanaaacccactaacgaccaacatacccactaacatttatgtctacatggttcanaaatccccactcatcgaagaaaaaacatttcctgcattatgcaagcataaaaaacaaaatgcatacataaataaatccacaaatagagatttggcataaaagaggggaaaacagaagaaaaaaatgcaactgaagaaccccgagggacaaagacccctcccttgagacaagtactccgtggtagatatggtgtctacatggcaattgaaaagttcaacaaaaacaatgaaaaatgcctctcacaaccagcacatcacgcatcaataccgaacacgagaaaaanaannanac

SEQ ID NO: 441820 - DNA, 429 bp, Triticum aestivum
gatcccaaattgtcttttttgctgagagctactcagatgttcaatgatttgaaatttgagcgcacctcacgtaccaaattatctagtacttggaaaaaacttggaattttttgattttatttctagtatttgttttgaattgtttttcaacgcgggtgcagatgagtctgggcaccaaatcgctgcactcgttctcacaggatcttccgcctatgactcgcttatagccagatgtatggctgcctcgcccaatccagcatgagactatgccgacccagcgtgtggtaggctataggcctcgaaacactctttttcccctctttttttttgaccttttgtggtcttagttttttagtttttttacttttatttagacttccaaatttttttgtataagaaatgttaatcatgcattcgataaatattaaa

SEQ ID NO: 441821 - DNA, 430 bp, Triticum aestivum
ccgggtcgacgggtaaaactaaatggatgcgactgacgaccagtacacgagtggggctgccgttctcctaccggtgaaatttgaaacttcccttgagagatgctaaagtactatttatttgaccggcttggtgtacattgacctttaccgcctgaatgttatgaattatattcgtggtggatgatatgaatgtcggggaggtgatggagaagtatgacgaggaacttgtgaaggctgagggcatggagaagaatgggagaatctaagtgggaggctgacattggcgaaggagaaggctatatgagtgttggcattggcagacaacgggtcattgcagatggcattcactgaattattcaaggaattgaatctcccaaaatgatcagataaataagatagcaatgagacatagaatgtcgtgttattaatt

SEQ ID NO: 441822 - DNA, 426 bp, Triticum aestivum
ccataaacatgtacccacagtcattcttgaagccgttgcttcaccagacctttggatttggcattctttctttggtttaccaggatctcataatgatataaatgttctccaccgttcacccatgtttgcaaatctagttgaagggcatgctccagaggcgaattataccatcaatggtcacaactacaaacacagtgtattaccttgccgatggcatatatccgcagtgggcaacatttgtgaagacaattccaaatccaaacggtgagaagaacaaaaatttctcccggtttcaagaagcatgtcggaaggatgtcgaacgagcctttggtgttctgcaagctcgttttattattgtacgtggaccggcaaggtattgggatctggagacactcggagaagtgatgacagcttgcatcatcctgc

SEQ ID NO: 441823 - DNA, 90 bp, Triticum aestivum
tccagggtcgacggggaaatccaacgcagtgctcaagaggtagcacctcccgagcttgtcgctccctcgtgactcttctagtcttctccc

SEQ ID NO: 441824 - DNA, 442 bp, Triticum aestivum
gggtcgacggctctatactacttgcattagagtagtgtagcatgttactactttccgttaatactattctgctgcatagcctgtctttgccactactgttgttaccttacctgctatcctaatgcttagtataggatgctagtgttccatcagaggccctacacacttgtccgtctgccatgctatactactgggccatgatcacttcgggaggtgatcacgggcatatgctatatactttatactgttacattactatgatactgttcggagatgggggctgaaggggcaggtggctccatcccggtagaggtgggcctgggttaccgatggtccccgactgttactttgtggtggagcgacatggcaggttgagaccacctacgagagaggtgggcctggccctggtcggcgttcgcggataactaacacatttaacgag

SEQ ID NO: 441825 - DNA, 357 bp, Triticum aestivum
atatgagaacctcctcctggatcttgcacaaattgctaatctgttgatcagacacttcatcacggaaaaccagttccctcctggctgtgtacaagagctgtatgcctcgttgacagaacctctgctgcctgctgttccagtgccttcccctcaggctatacagaaattccttaagttcatgaggaactaccctggactaaagcacccaaggagaacaagcacatttatcagcaaagtatttcaggctgccagagccatgggggcagctcagtatgccagtgtcatgacagcggtatcaagggtacaagtgccgcaagactggatgaatgtgactgaataattgggatatctactgct

SEQ ID NO: 441826 - DNA, 430 bp, Triticum aestivum
tcaaatgatgcgtccgtcgtcaaggctgcggataagggaggtgctacccatgttgatatagcatgtgaccaggacttggtaaagcttgcgctggagcttactaaccttccgatatgtgtatcgtctgtggatccttcagcattccaatctgcggtagaggctggcgcgcaaatgattgagattggaaactacgactccttttacgacgcaggcatcgaattctcttctgagcaaatactgaacctgacaagggagacaaggaagatgcttccagacatcacgttgtcagtaacagttcctcacactctgagcctcccagatcagatgagacttgcagagctacttgaagaggaaggtgccgatatcatccagactgaaggagggaagtgttctagtccgacaaagcctgcggtgcttggcctaattgaaa

SEQ ID NO: 441827 - DNA, 418 bp, Triticum aestivum
atgcacaaatcctatgcttcaggtgagacagccacgatgggaacacgactcatattctaaagttctctatttcgactgagctgtgattagagatgtcagttatatacagaaaaacttgaatggatgtgcgtttggggattatacaatttaaaggcaactttatttttttgcttttagcgtatggacctgcaggttatatctaatagtagtagcttattgacttctgaaagcaatataagcccaatagtctttgcaaaaaaaaaaacccaccaactactggttttatagccagttagaccgtatcatcacacttattttttctcttattggttgaactccaattattctataattgctacattaacaaactgttcttcacattcggttgtgatttggtttcagaagttcatttttacat

SEQ ID NO: 441828 - DNA, 411 bp, Triticum aestivum
cgggtccacatccagggccaatacaaaatctaaggaagcaaggagcatgagaaggactcactggttcacctcgccgaggccatcatcgacccctactacagagacatgaaggattcatgcaacaaggacaagcgtgcctggcacttggcctgtatggagaaactcgacaaagctcacgtcgtgtacgcagccaatgaggagtacacgagctacgacatgtacaagcggatcgttgacatgaggaagtgcctccttccccaaaacatccagggatccagcccgaagcagagcaatggcaagcgtcatcacaacaataactagatgattagatcctcgcttctcctactttagtatgcatgtacatgcttactttggtgtgtggaaatactacgtatgtagtcacttatgtaa

SEQ ID NO: 441829 - DNA, 441 bp, Triticum aestivum
gggtcgacatcctggtacaaacttaactgccgggctactctttccgcttcttcttgctcttcgggaagttctcctgtctgaaggaaacgtacaatctgctgtgcccttgctggagcttgcggctcgacaacaacgactaaaggcacatctgccgctgcgggaacatccgcttctacgtctagaacctgcggctcagccggagcttgatgttccccggcaagtttgcctgagcaaaacttgtcgggaacgtctgcttccacggaacaaagcctaaggcttgccggatcatactgctcctcagcacccttggtgttgatcatgatgaccttcttggctgcggcttcggggagctctgccggaaaatagtcaccataaatcaacttcctcttcatgctctgtccagttgatggcattatagacggttgagtcagcttgagcaca

SEQ ID NO: 441830 - DNA, 87 bp, Triticum aestivum
taaccctgataatccctgtactgtaaaatccgtgtattgtcgatactacgctgtcaattttcaagtcgtggcagcatctgtacgaac

SEQ ID NO: 441831 - DNA, 119 bp, Triticum aestivum
gggtcaccctaaactgagtcttatgaagtctccgtgtaatgtcgctactacgccgtcacttttcaagtccgggcggtatctgctgcagtgctctagctggatcatgctgctcaatgaat

SEQ ID NO: 441832 - DNA, 424 bp, Triticum aestivum
attacatggacaaaggtatacatatagcctttattatcaaaaacattgtttttaaaatcaaaatacatgtcattggaacatgatattctttgagcactgagcctctatgaaacgggcaccttctaagacttcttcaaaatagtgctcgggcgagtcctggcccctgggtggaacactagttgcaatatcggtggcctccatcttcgcccagtatgttttaacatgggcaaggtccatccgcgcaccctctatgcacgctgatcgcttgacagcgtcgatatgcggcacatcacaaataaatcgttgcaccaaaccaaaataactatccagacttggttccttcatccacaggtgatccaagacggccttcatggcaagcccggataacctatggagctcggcccattcagccatttgctcgttc

SEQ ID NO: 441833 - DNA, 351 bp, Triticum aestivum
gggtcgacgggaaaccggagcatcagtcacatacgaagcatattgagctcgatattcacttcctgcacgatcatgttgctcctggccgtgttcgggttctccacgtgctgacgtcgcaacagtttgccgatgtgatgactaccggattgcctagctctgtctacgaggagtttcggtctagtctcagtgtctctggtgacgcatccactgcaatgggtgtttagtatgtatattgtgttgcatgtacattggagttgtggcctacatcctattcttgtatacttgaagtagaggcctagcctttagttaactatacgtgcatcagcatcacatcaatagaacttctactgt

SEQ ID NO: 441834 - DNA, 395 bp, Triticum aestivum
taaaaggcatctggatgcgaagacagtgatcgcatcccgtcgagaatcgtgcacagatcgtccaactgggttaactcgcttctgcattccggtcaggctggaccagcgcctgaccagcacatgccattgtctgaagggtttcttaacaacagcagatgatgccacttatatgtgctcatctgaccaacactgatggtacgaagaagctgcgtggtgttggtacccggagaatcgctgcatatggcagatcaaagctgggaaaacattgattaatttgtaatctatggttatgttttgttagtggtgatgttacagcaatgctcatttgatgttagctcatgcaaactgctaatgtgttgctaacagtagcactctggtgtgtttcgacagattgc

SEQ ID NO: 441835 - DNA, 331 bp, Triticum aestivum
ggaaatctgatggtctgtaatgtgaaagcgaagttctgttctgtcttcacaaaaaaaaataataaaaatgggtaaaaactaaaaaaaaaatcaagtcaagaaaaaaaaaaaaactaaaaaacaaagaacaattatcaaaaaggtatctaaaaaaataaataaatgatgcaacattaaaaatgctcaactaaccaaaaacagatcatacgaagacccctgcctagtgtttgcacttcattaagtgctgcatacggtatagcaaccctgagaatactcccaataatttattatctatgattttttttatgttactggtgatgtgaaaaccctg

SEQ ID NO: 441836 - DNA, 204 bp, Triticum aestivum
gtcagaattacgggtcgacggcgttcggagagggatagagatgtcgctccgtgcttaccaaggagtatgtcggtgtagatatggatgtctgctgtgtccatatcgttttgcaagacttgttgtggtgctcaaatgttgagtgacaactgtgagacgctttagtccatcgaggatctgtgttccatccatgtacgtgaatgtgat

SEQ ID NO: 441837 - DNA, 441 bp, Triticum aestivum
ggtcctacattcacgggtccacggcgaagagccagagcagggagccggcgaggccgggcgacttggcgaggacggcggtcatctccttgaacacgatgtcctccgcctgcgggcacgtcttgttgtacgccccgagctgcgtgtgggcctccgtcgagccacacagggcaaggagcgtcgccgccacagcgacgaccgctagagctgctgacctcggcgccatgtctggcttatgatcgttagcttgagtatatatgcagtacaccacacacgctacctatatgtatataggcttctgaaataatgtcaatacgtctcgacccatttcaatttcaagtactccttgcgcttgtgtacttgcacgcagtgtgtactacgtactacgtactgctctgtactgcgagataggagaatgtcaacggctatctagttgacatatat

SEQ ID NO: 441838 - DNA, 432 bp, Triticum aestivum
aaaaggtaacgtgccacccatgctgcatccctcatcatatattggctcacctgttatctggattggcgttggtgtagcagtatctgcagcattttccatgggttcatcgatggtgaataactatgcaatggaacaagcattcaatgtcgatagatgacgcatgcaccacagtacacatttggtgcgaactcgccattcccattctctatgccaccacaggcaggtcccacggcaccaagtagttacccatactcaggaccaatgaataatacccccaaaggtgcaactgttgatgtttcagctactgaagtggcattcaactggatcttcggacgcagctgatgtggcagaaacatcgaagccttcatagaaatttgccatcgttgatgtttcgcccgaagagttgcaaaagcagtatgagcgtcaatcttc

SEQ ID NO: 441839 - DNA, 372 bp, Triticum aestivum
atacagttcccagtgggacatgaatacacgcatctcaagcagagggtcgcggctaatggccgtgtgggtgtcagtgctgctgtgtactctgcagcaatccgtgagtaccttacgtgccgaggtccttgagctggccggcaacgctagcaaggatctcaaggtcaagcgtatcaaccctcgccacctgcagcatgcgatctgtggacacgacgagctggacaccctcatcaagggcaccatcgctcgtggtggtgtcatctctcagagacacacctcacgcatcaccaataaatccactgactgaataatatgcattaaccggttgttgttgcatgtagtatcttcgagataccatgttatgttgtgctatct

SEQ ID NO: 441840 - DNA, 398 bp, Triticum aestivum
taaatcattaaactgtgatcccctcctaacggtggcactaatcaacaacttgccgacaacgccaagcaatgggaatggatcaccgataacaacgtgcggcgaaagggatcggcatactggttaggctcatattgatacggataagcaaaacttattaactgatcgcacattcagtcaattagggaaccaggactgttctgtctcagtccatgaccacacaaagcaattcagcaggtggaggatacggaaacggaagctacaaaccgatcctaatcaagcatgatctgtcagatttctaacggaaacaaagataggattatttttagagagaattattggactactatatggggcagaagcctatcctaagctagcctgcgagactactgtttctgatg

SEQ ID NO: 441841 - DNA, 391 bp, Triticum aestivum
tcatacataaaaaatactacaatcactggagatttttatgaattaagagaatactgcctcattatgatctgttgtgtataattagaacttcttgtgggtaaaaaaaacaaaggttgggataaggaaaagctgaacttaaaaactgtacgtgagttcatagatagttgtacataccttgatggatagattagatggcaattctttactgttgatcacgccaaggatcaggttcagggccaccgatgctatgtattccactgtagccatgaagagcagacctccaaaggcgctcaatgctctctgcagcgtgctgcatgtgcatcgctaagttcagttaccgccaacaacggcgccgacagatggtggcgaaaggagatcagcaactcaataa

SEQ ID NO: 441842 - DNA, 427 bp, Triticum aestivum
cgggtcgacggcgagcaagagcttcatcggctggtgcaagcaccatggcccatcggcagcgatattggtgtgacagtccttgagcgcacaatcgacatattgcagaagatgtgtgatgagcaatttgccatacaccatgcaaaagatccagacgtgctcgacggcatgatagacgacccacctgaagagccgccatcaccagagctcatcgagagcctgatgccctgcaaggaatgggtagaggacctccgcaatccagtcaagagacaggaagcctgcagcttcatcattgcccgtggtggccgtgtcaacctcgatcccgatgatgtggtggctaggctcgagcacatccttggcggagctgacgtcgccgacgaagtagaacatcgccaacgtgatatcttgaggatgcaggtgatggacggaa

SEQ ID NO: 441843 - DNA, 436 bp, Triticum aestivum
gggtccacggctcttttgaacttgagcttccaactggtgtaatttcttatgaaaaaaatgcagtgttgacaaaagaatgattgtttttcttccacaaatagagcctaattttgattcgcacagggcctctcatttccctagtacggccctgctcataaacttaatatccaataaatttaagcctattctacaagcattgatgccagtttcgaccttctctgctggatatcagatgcaatctagtcgttgtccacacatgtgagaatacgaagaaagaaaatattttggcgccgcgataacttgcggccttttaggatatttcccatagctttatattagactgacactgacacccaagatgacacaagacaataggatgccatccggaatacaactcgaaccccgatttacaacaccttcacacgacatttgactc

SEQ ID NO: 441844 - DNA, 431 bp, Triticum aestivum
aaatatgataccaggtatggtgccagtttgcgtaagcagatcaagaagatggaggtgtctcagcactccaagtacttctgtgaattctgtgggaagtttgctgtgaagaggaaagctgttggaatttggggatgcaaggactgtggcaaggtcaaggctggcggcgcctataccatgaacactgctagtgcagtcaccgtcaggagcacgatccgtcgcttgagggagcagaccgaagcatgattgccctactgttgtcttgaggaatccaggggttctgtagtggagtgaagacttaacaatctctgtattttggctatcgagcgatggatatctgttagtaattttggttctgattttaggatctttgaaacttgaaagtatgtcgctacagctgcctgttatgcgttatgctaacctatttgtatttt

SEQ ID NO: 441845 - DNA, 422 bp, Triticum aestivum
taaagctgaaagaagacgacagaagtgacgggcatgggaaagccataaaacgagtggggtgggcatatctctggtgcattgcaaggctggttactgttgggagcgtctatacccttgctcattgcaaggcatgtgagatgctcgccttaccttaaatgggttgagaccaagtcttcgctcgattagctctcaccttacccattatacagctcaacgtacacacgttttctcttcttttttcccttctttccacctttagtttttatttatttaatattttctattcgtaaacaataatgtttttggcaaaatatgctatttttatgtaatttcgaaaaattcctcctgaagttcaaaaaagtgtttcacgtactttaaaaaatgttcttatttcatgcatctaggaaacagtttatgaaaat

SEQ ID NO: 441846 - DNA, 418 bp, Triticum aestivum
tgggcagagaaacattactcaccgccggctcccgactccactcattggcgcatgcatttcgatgggtccaagatgcgcaccggcttgggagccggtgtcatcctcacctctcccaaaggggacaagctcagatacacgctgcaaattcacattaccgcctccaacaacgtggccgagtacgaggcgctcatacacgggctccggcttgccaaagaactcggcattcgccggatcctatgttatggcgactcggacttggtggtccaacaatcatccggtgactgggatgccaatgacgcaaatatggcaagctatcgcttcctcgttcagcagatcagtgggtattttgaaggatgcgagttcctccacgtaccacgaacccacaacgagccagctgatgccctggctccaataagct

SEQ ID NO: 441847 - DNA, 62 bp, Triticum aestivum
  unsure (1)..(62): unsure at all n locations
ctcanagnctanagncgcccnggtcgangggggnnacnctaaaatgattcatgttatgtttg

SEQ ID NO: 441848 - DNA, 406 bp, Triticum aestivum
  unsure (1)..(406): unsure at all n locations
gggtcgacggcggtatacaactagaatccctttgtatgtttacgccggactcgtctagccatgtccggggtttgaacgacctgtttaggtgctttggctagcanagctggtttagtgtgtggttgtcaaggcaggcgcacagtcctccgcgctcgagaaacactcgatatttccctttaacgagatgatgcctcgtggactgggcattttaagcgtaagggatacataatgcggtattgcgttaaagcgggcgaaagcttcgcgtcncagtagttcttgatagctatttgtaaatggggcgatgtgaaaggttagcttttcgtggcggaatttgtcggggaagccgaacacaacttctagcagccaaaaaaaaaattgagacagaacaaaaaaaagcggccgctct

SEQ ID NO: 441849 - DNA, 420 bp, Triticum aestivum
gggtcgacgggggaacccaaagcaacagcttcccacttcctcctcagacccaccctcgctggctagccgcatctgctgccaagctccagccccgcgctttctgctagctcgtcgagttgaagattgtccaagagcattttgaaggttgacagtaaccttcggttgtcggaagatgtatcgcgccaagagagctgcattgtcaccaaaggtgaagcgccgtgtcggcaagtatgagctcggccgcaccatcggggaagggacctttgcaaaggtcaggttcgcaaagaacactgaaaccatggagcctgttgctatcaaaatcctcgacaaggagaaggttcagaagctcagattggttgaacagattaggcgcgaaatttgtactatgaagttaataaagcatcctaatgttgttcgact

SEQ ID NO: 441850 - DNA, 433 bp, Triticum aestivum
cccgggtcgatgcgacaccctaactggagtcgcgcaaaccggaagcaaacccggagaagttctgggagagtccgaacatccttctggccaatcaacagccaccacgtacccctctctccgctggggatgcgttgttatttgggtttggcggaaggccgccgctgggatgcattgttatttgggtttggcggaagatgattagcatgcttggctatggcggataacatgtctgaagttcgcggaagccacaaatcactttgtttcactttattttcttcatatgctacaagatttgacgaaagtaggctacttggctactagatttggcggaagctacgctagaagcaccaagattagtagcttcctgccaaacaaaaatcgactactaattaatcacgtagtttctttaagggcatcatgtaattggggggat

SEQ ID NO: 441851 - DNA, 424 bp, Triticum aestivum
  unsure (1)..(424): unsure at all n locations
gtgccggtcctagatttacgggtcgacgggcaagagaaaattgtattgagaatcaaaagagagagaggaagccatctagctactaactacggacccgaaggtctacaaaatactactcacacatcatcggagaggcaccaatgaggatgatgaacccctctatgatggtgtctagattggatctggtgtttctggaaatgatataaaacatccaagaatgataatataacaacatggaagaatcaaaattatagatatgttggagacgtatcagcatccgcaagcttaattcctgctcatcctcgagtangtaaatgataaaaacagaatttttgatgtggaatgctgcctaacatgttcatcacatattctttattttatagcatggacatttggacttttatatggttcagagcaatagtct

SEQ ID NO: 441852 - DNA, 107 bp, Triticum aestivum
  unsure (1)..(107): unsure at all n locations
actnccgccgagggncggtncttatctanacgggtcccacggccatgatcanaattaaaacagcattgtcccatgcaaggaaataaaaaaagaggtcaaagaagcca

SEQ ID NO: 441853 - DNA, 68 bp, Triticum aestivum
  unsure (1)..(68): unsure at all n locations
tctatactnngccgacggncngtgcaaagtccanaaantcccgggtcgacggggaacangtaccgcga

SEQ ID NO: 441854 - DNA, 401 bp, Triticum aestivum
caagtcaacacgatctgcgccgagaggttcaggtgcccggaggtgctgttccagccgtcgctgatcggcatggaggctcctgggatccacgagaccacctacaactccatcatgaagtgcgacgtggatatcaggaaggacctctacggcaacattgtgctcagtggagggacgaccatgttccccggcatcgccgacaggatgagcaaggagatcaccgccctcgcgccgagcagcatgaagatcaaggtcgtggcgcctcccgagaggaagtatagtgtctggatcggtggctccatcctcgcctccctcagcacattccagcagatgtggatatccaagggagagtacgacgaatctggcccctccatcgtccaccgcaagtgcttctaagccttggg

SEQ ID NO: 441855 - DNA, 401 bp, Triticum aestivum
ccgggtccacggggaatttaaatgggtaaagtcatgtttaggtcagctaactctgtttaagtgctgaacttgctcgattaaaaaatgtgggtgagctgtaatctccgttacgtacccaaagtaagcaatgtcatggatgaccactgtaaccaaggaaattcacaccaagattcttgacattcagactcatcacacatgggttgggctatcagaaccacttgagatgttcacatatcgtatatcgctctgaacaacggaccgtgtctgaggatacattgcgcgccaactttttcgatgaagcaattccaagttttccgcatctgcggcaatatctatctcactgcctctctccttagcataagccacatttcccctgtttacgccttcctttgcaagttgaa

SEQ ID NO: 441856 - DNA, 410 bp, Triticum aestivum
agggtgtcctcgtgtacgagcgaaggggtatgagcctgggttgattgcgaaatcattggtatacactttttaccggaaagtgctcttctgctctcaagctcaaatgctccctgatgaacagtaaaataaaaatagtaaaaaatacaaaaaaatgtaaatgttttttgtggtaaattttgacgaatgttttatgcgcttgataaatttcagcatgaaaggacattcgtggacaccatggaaaaaaagaatcaacgctccaaaatgctttcaaaactagcatttttggagcatcgtttgttttcacgacttccatgaatgttatttcttgataaatatttgcaagcccacaagacacttgagaatgtttaccacaaaaatattcagatttttttcaatttaagtatcaattt

SEQ ID NO: 441857 - DNA, 387 bp, Triticum aestivum
catacatgatcttagtgcataaactgtatcaagatatctgttggtacttggtactggtagcaatagagactctcccctcccctcctcatagctatttcttcagttatgtttcgaatgcgtaatgtcgtcgtagccactatctgttcaaaaaactagcgcttcttgatgcacaaattaataccttattggtatgcatcgaccgatggtcgtgtgtttgatatggggatcgtgtgttgttggtcggcgatcgaactacatgattttggatcaacaagtaaaccaacactagtcttgtatgtatgtccatgttgctagaaaaaaaacaatataaaaaaaaaatataacaataacaaataaaaaatataaaaccaaaagaatcaatactac

SEQ ID NO: 441858 - DNA, 438 bp, Triticum aestivum
cgggtccacggccccaagaaacttcacggtggcttgcaagtccaaactggcccgttaacctcgtacatgtactgctactacttgtagccgttccctgatttccttctctcttgcctagggattgggcggctgaggccggcttgtaatcagatagatagatgcgtgggtggttgggaggaactcatctttgaattcaaatcgtaactaatttccaagaaaccttagttcatgtgagccacaaccagagagtagctcacaccggcccttgtaaataaaatatactatggtgatcaccttgtactaaactcccaagctcaggatacgtgtggatgacaacacgaatgggatgtggaataggataaggcacgcgaagtcgtccatgcatgcccacgaaggcacgcatcgcatcgctaaaggcctggttgcgcatcccatggt

SEQ ID NO: 441859 - DNA, 383 bp, Triticum aestivum
ggtcgacgggcgaatgcaatcaaagctggatgccggtgacaccaaggtggatgtacacagatagcccctcagccatcttgttcgtcacacatcgttgacactggacgactaccataccctcaacagttatattgatgacttgtgactagaattgtaatggtaagtgctatgatcaagttgataatgtatgatgacaaccaaacatcaagtagtcgcattgtaatgacatccactgaccttctgtactacaaggttcaacccagtctcgtgcaagggaatgggggagcccggcgacggtccaccgactccgtcatcttttgtaatgaatatcccgtgaaggaaccccgtgccaggccccaagttcacctcacacgtcgggtagc

SEQ ID NO: 441860 - DNA, 97 bp, Triticum aestivum
tcccgggtccacgggctaagatgagaagccattaatcatgtactctaaaactcttctcctttattaatgaatgaggcaaatcttttgcctctgtttc

SEQ ID NO: 441861 - DNA, 338 bp, Triticum aestivum
ggtccagggcggacttcaaagttacaagaggcggtggccgactccaacccgccacctcccaccccaactgtcctagtcacagtggccgtgttggcaatagaagaaatcacagctccatcatgggcccagcccatcctcaagtttctagtaaacagagagctgccgactgacgagatctcggcaagacaagtcctacgctgagccggagcctacgcaatagtaaacaaagagctcgttaggcacagcgtgactggagtcttccagcgttgcgttgagccagaaagggcgtagcaatcctcaaagaaattcatcaaggcgagtgtggccaccacgggggc

SEQ ID NO: 441862 - DNA, 321 bp, Triticum aestivum
gagtcgtattatggtggtggtcacggttgattatgggtcatggtcttctcaacctcggccaatgcccatggccattttctgaacatgttatggattagtaaggcttgaaggtttcatggattctaaggtgcaattgaacgtttatccttgtgcacacttccagagatgccaaatgcactacttattcttccacacatcatcaacttatactgctgaatgcatcatttcgtaaagatcaactccaatcaacacacaagctattcacatcatcttgagcctcaataagacgtcagaaatatcatacacttcaactacccacat

SEQ ID NO: 441863 - DNA, 383 bp, Triticum aestivum
  unsure (1)..(383): unsure at all n locations
ggcaattcggggcatttagtcacactgtgactttacattcatacgatcgagatacaatgttaaacccgaataaaataattgcagcgcggtggaggtggcgtgctccgttggtgttgttgtcctccatgacaccattgttcaagtctctaagccagcctagaatgttcttgacatggaaacaaagaccctgtcgtcgcgagatcgacaggcggggcgcgggaggacaacatcttgcggtgttgcgcagtagtggtcgatggcggcatcccacgacactgagagggctgcacgcacgggcacggccgcggtgggtgcaggcaaacacacggggactagtgtcgcggtgggtgcagtggtcaggacggacacangcgggggcactg

SEQ ID NO: 441864 - DNA, 400 bp, Triticum aestivum
tggatttgagggaaaatggtaggggcgatggaggtggttgccctctttatatgatgggacgtttcgggcatgtccatggacacgtgctagcccacgaccacagtcttgcatgcgcccacgtatacgcgaccccactcgtcagctaacggtcaaaggcattgacccaacggcaacgtccgttataacctcttatgagggtttcgggcaagggagtggggaaaagtgagcaaaagttaacagagtggggatgaatgagtagagctaaggaaccaggggcacagaaataaaaatccctagaaaataacgatacccgccgcgagcctcaatgttcattggaccacatacatcagtatgtatgatttccaataaatatgtttctcgctccattgttccggagaac

SEQ ID NO: 441865 - DNA, 357 bp, Triticum aestivum
ggcgtgtcacgagtcgcgtcataaaacggggggtttccgttcgggctctgtcctcatcctcctctcccggcgtttcccgaagcctccgcgcacgacgcgactcgcgccccgagattttgaacgaagaaaggaagttgaaccatggggaagagaaagtcagctgctaagccaccccctatgaagcggatggacgagctcgacacagtcttttcctgcccgttctgcaatcatgggagcagtgtttaatgccgaattgatgtcaagaatctgaatggttaggctaaatgtccaatctggcaggaaagcgtcagcacttccgttaaagcccttactgaacctattgataaactgggccaa

SEQ ID NO: 441866 - DNA, 426 bp, Triticum aestivum
gatgggatatcctacagcagctaatcagccgatccccactgattgaagcggtggacgacactgaatgcatgcgagatccgctgcggcgaatggctgccttgacggttgttggtgtggattaggtgccggcgccggccgcgagtgcagacgcacagatctgctcgagcgtggtgtggttggcagaaggaagaactcgtcgccgccctcgcaggtctccacgggaaggccagcccacatgctccgcggtggttaaagagaacggctgcttcttcagtgcccaggcttgaaagatgttcatgtctatcgatgttgtgatatgttgatcggagcattcataaacgacgtgagccgtggatcaggttctcgatttctgtccggtctgtggctcacaaatgtcgatgactccatggattcaatgcaaggtga

SEQ ID NO: 441867 - DNA, 389 bp, Triticum aestivum
  unsure (1)..(389): unsure at all n locations
cagcacgacggcgtggggacgatcttgatgtactaccgtctcaaggcttcgcctaagcaccgccacaatattatcgaggattatggtggaagggggcaacgcacacggctaagaatatgatcacgtggatcaacttgtgtttatggggtgccccctacccccgtatataaaggagtggaggaggggagggccggccctctctatggcacgccctaagggagtcccactctcaccgggagtaggattccccttttcctagtccaactangagtccttccatgtaataggagtacgagacaatgaaggggaagagggaagagaaggaatgaaggggcgcaacccctcnccctagtccaattcggactaggccttgggggggcgcgtcctgc

SEQ ID NO: 441868 - DNA, 384 bp, Triticum aestivum
gtacagtctagcgggtcgacgggccatactgcaagatccatcgaaccaagggccacgaccttcgagagtactatcaggttgagcagttcgtcaagagacaaagagctgagtgtgagaagcgtgacaaggacaaaggccagaatgccgctgatggcaagggccgaggcggtgaagcaaatcgccctggcaagccctttaggagcaaaggaaaacccgccaggcgtcaggtgaaggaagcgtgtgatcatgagagtgatggaggggatgaagaggaaaccagtgagcaagagtttcagaaggccaatgacgccctatgcattgatgggagtgcatctttgcacaccactacaggaattaggcactttgccgtcagccatggctgac

SEQ ID NO: 441869 - DNA, 406 bp, Triticum aestivum
gatcactgcctttgcttcgcgccgccgcggaattgacgaccgcacgacccggaacagtatccagttgggcgcgtttgacattcgcgggaaaatatgctccgcccaggtagacgtgctctcctctcgtacgtaaacaaagccttgagcaatctttgatcaaacttaaacacctgtctcctactccctccgttcggaattacttgtcgcgaaagtagatatatctaaacatattttaggtcgagatacatccatttccaatacacatgattttcagaggacggagtatttgtgaatgcacggtggagtagcatgtgtataattcataaaggactgaggtaccggggcattttcaaaagctaacatcagcggcaaacggtatcatcgaaattcattggtttcggtttgt

SEQ ID NO: 441870 - DNA, 282 bp, Triticum aestivum
gatggacacatatgaagatgcatatcgcttaccatcagtatctcattttgggtacgcagcaatgcggcatcattgggtacggtgcaggcttacagttccacgctgattacactggttccagtcatttacgtgtgtcttatttagcatgcaagtagcagtctagtgtctgtttctcccagtttagttcaatctagtttgactatcaccggtccttcacgaaggttagaatagcaacacttgatgatcgttgttgtggtttttgcgtacttaacgatcgctctt

SEQ ID NO: 441871 - DNA, 222 bp, Triticum aestivum
agcactgtgtcaagaggtgactcgcaacgatggcaggacgttgcgatcagcttagtgatgcacaacgggatcgatgctgacgtcaacatcactagttcacagcgatatgatacctcggatcacgtaccaggatgcaatctagactgggcaaagcccaccatcgcccgcctgatcgtccaaacgtgcactagcgtcatctgcacacctcaggcaacctcttca

SEQ ID NO: 441872 - DNA, 100 bp, Triticum aestivum
ctatggacaatttcatgagaaaaccttcacacatatgagctatcatgtacatgatttcatagagttcaagtagaggaggtggtgttaccttctgtttttg

SEQ ID NO: 441873 - DNA, 94 bp, Triticum aestivum
ggtccaaaaatccgggtcgacgggcagtcatatcaatgtgtatgcaatatacggcatgcagttcgctccgatgaactgtttgctattacggagg

SEQ ID NO: 441874 - DNA, 421 bp, Triticum aestivum
cgacaaggagacgatccggagaccttggaggcagagcgagctattgcgcgggcgaaggggttcggaggaatttctaaatttttgcccgtgactatatatagcccgaccctgtcggtgtgaccgagtggaacaactcggtggcaccgagatgcataactatgttacaattgtgggaggcctggacactattccaatgagtgtacgacaccctacaaaagaagagaagattctccaagaagaagaagtaaaagagaagaatcaccaccaagagagaggaggagtagagatgatcgttatgaacgaagaccctcacggagaagcaaggattcggaaaggaaggacaagtcatcaaggagctgcacaaaacgaagacatcaagctcatgttggtgaatgggtatccggctccgactccgacaatc

SEQ ID NO: 441875 - DNA, 67 bp, Triticum aestivum
gggtcgacgggcaagtcgggatgaggctccggacgaaaaaaagaggccaaaaaaaagagaaggccct

SEQ ID NO: 441876 - DNA, 413 bp, Triticum aestivum
gggtcgacgcggaagtataacaacagtgtccctgaaggatcccgcattatagagggcctgtgttcaaaggatatcatgtttgaatgaatgtatttgcgattcccaaactttgcaatgacaacaaagcgttcgtataattatttatcctccattgcatccgtttatgaaatctgagagtcgtccagtcgtcggcttcagcccctcacgtaaatactatgggggtgttcggaacagcacaaaagaacatttaacccaataatttggtccttaaaggaggtgttagtgcggcgaaccaggcaatcggaccatgcggctttatcactctcacttagccataggagttttacaataagattgtacgcttagccctggtattgttcctgtatctgaactcgggtgttgtagacacctga

SEQ ID NO: 441877 - DNA, 128 bp, Triticum aestivum
cggtccgaataatccgggtcgacgggctatggagatgaccatcaattgatgtcaatgcgaggagtagggatttccatgcaacggatgcactagagctataaaagaaagagagaaagaaatcagaaaaa

SEQ ID NO: 441878 - DNA, 400 bp, Triticum aestivum
gacttgctaaggaaactccatgaattagctaaagctgaggctgatctctctgaccatgaggacaggctctctgttattgaacagaagatcgctgtgctcctgcctctgcataaaaaatatgctgagttgaaatctcagtttgaactcaaatcatatgatctgtcattatttcaaagcagagttgaacaaaatgaacatcacaagttaggtgaacttgtgaagaaacttgagcaagaactccaggaatcaaaagaagaattgaaggaaaaacaagtggagcataaaaaatgtgtctccactgtttctgatttggaaaagacaattaagacttatggcagtgaacgtgaaggtaggctcaaagctctagaaaaaaagataaagtcactgaaatcggaaatgc

SEQ ID NO: 441879 - DNA, 386 bp, Triticum aestivum
atcgacgcaatgcttcaccagaccggagggtgctttcctcgcccttagaaggagcttgcttgcagcctggctgttctatgtcgtatgctacctttagaactagagtaaaatgtaagaagtgaaagaacttgtgaggctatggttctgtgccataacctgagggggtctggaggtgaaagaacatcggagtactgttgatgtcgtgactgaagtatcatccattgcctaatatatcatgccttgttgtgttcctagtgaaaaaaagaaaaaaaaaggaaaaaaaaaaggcaaaaaaacaaaacaaaaaaagaaagaaaccaaaaaaaaaaaaaagaaaaagcaacggaaagaaaaggatgaagaaaaatgacacagggcataagggg

SEQ ID NO: 441880 - DNA, 426 bp, Triticum aestivum
ctcgacatgaacccttcactaagctcgatgactatctccctgacatggatggatggcacgacatgatggagtgattgtcgatatatgacaatgtgtccgtttagtccatactttcttttatgacaaaactttgagttatgcacggtgaaactttatttgtgatgtaattaaaccgtcctcctcctcgactagcaaaaatcactctagtcaggtcattttgggtacgatgaactttgttatttatgcttatgatatgttgtttctaattttgccaagtctgtctctttctgttgctcaactatatatgttgcatatcatcgactcatgtgatgatgcaggtgcatagatcatagatggcgaagaagtgctacgccaggagtatatatacgacaagtggccgagtgtcaggccctggtgtaccggttt

SEQ ID NO: 441881 - DNA, 420 bp, Triticum aestivum
gggtcgacgggatgtgagaaggatagagctcccagggccgttcctttgagtcatgtaatcaccaataaataaaatgtcaatagagtctcaaaaaaaaaaaaaaaaaaaaaaaaaaaaaaaaaaaaaaaaaaaaaaaaaaaaaaaaaaaaaaaaaaaaaaaaaaaaaaaaaaaaagaaaaaaaaaaaaaaaaaaaaaaaaaaaaaaggggcggctcaaaaggatcaaagttaagttacgcgtgaatgaaaggtaaaagctcttcaaaagggtaaccaaaattaaattaaggggccgtcgtttaaaaaggtcgtaatgggaaaaaccttggggtaaccaaattaaatcgctttgaagaaaatccccttttcgcaaatgggggtaaaaccaaaaaggcccgaaccaattgcccttccaaaaat

SEQ ID NO: 441882 - DNA, 401 bp, Triticum aestivum
cgggtcgacgcgatacactatgagatcacgggtcaccagtacaacaagggacactatctacctgatggtatatatcctcagtagtcaacttttgtgaaggcaatctcgaagccccaaggtgagaagagaaagagatttgcccaaatgcaagagagtgctacaaaggatgtggaacgtgcttttggtgtgcttcaatcccgatggggtatagttcgataccctgcactgtgatgggatgaaagtaagctttgggaggtgatgactgcttgtgtgatcatgcacaacatgatcgtcaaggaagagcgtgatgaaactatcttcgaccaatgatttgattttcaacgtgacaatgttgatcccctgcatcatgaattcggcacgtttgatcagtttgtccagtt

SEQ ID NO: 441883 - DNA, 316 bp, Triticum aestivum
ctcgttgccgcctactcatccccatcgtttggcatcgggtatttcgggagcaatatgaacagcccaaaggtttcaatgcttagggattcaagagcaccatccggctccgtccggcatttcgctacccgtgtgaatttcggtgcaccgtcgagcgaaggatgacgatcagctgcccctgtggttccctttttcttttcctgggaaacttttctgttgtgttgaggggtgaacagattctgtgtgtgccatagatccaaactttgaatatacgtcgtactcgtaactgataacaattcctggctttgatccagtcaaa

SEQ ID NO: 441884 - DNA, 387 bp, Triticum aestivum
gaaggagcacggggacaaggtcccaggcgatgtcaaggagaaggtggaggggaagctcaaggaactccaggtcgccgttgctggtggatcgacacagacgataaaggatgcactagctgcgttgaaccaagaagtgatgcagcttggtcagtccctctaccagcagcaggggtcaggccctacccctggagctgacggcgctgctgactctacaggcccaggcccaggcccatctgagaagacaggcgatggtggtgacgtcatagacgctgattttaccgacagcaattgaatagaacagtaggttaggacatgatgaacaagtgagtatgaatttgttccacatgattgcctagtagtatacggggtgaccgctttctttggatc

SEQ ID NO: 441885 - DNA, 89 bp, Triticum aestivum
cgggtccgccaacggccagccgaatcaacggaaaaggaatggcttcaaccaggggagacttaggatgggagttcggcacaggcaaactg

SEQ ID NO: 441886 - DNA, 360 bp, Triticum aestivum
cgagctcatgtaggaagaagacgacgcgagctctggaggaggaagacgactcaaatttcaaatcgagggattcgttggaagccacacagggcacctgagaaggagaggaggagaatgctctgaagagaagaaatgataggttttattgttttgttttaagagcaagggagttgatatgtagtcccctggcttatttgtattctactatgtgtatggcaaagaaatcatgattttatacacacatatatttttaaacaaaagcctatgtatttttttgctcaaacacagtcatcggaaagcgcacatattttcaatgcgtaaaaaaaaaaaaaaaaaaaaaaagcggccgctcaaaaagct

SEQ ID NO: 441887 - DNA, 248 bp, Triticum aestivum
acggtcctgatttccgggtcgacctcgaagctgcaagcgagagtgaacctgacaaagcttggaacgcccacattatggagatactggaagcacttcaaccttgtgagcatgaacccaactccatcagaggagcagctgttccatggggtccagcagcatttccagtcccagcaattggatgagttgcaggtgatcctggggttcatccagacggcaaagaggctcaagaccctgtacaagaacagctc

SEQ ID NO: 441888 - DNA, 448 bp, Triticum aestivum
gggtcgacgggatcaagttggattgaacttgatgaggcattccatgagttcacggtgggggacagaaaacactcagactcggaccagatatccgagatggttgataggctgagttcacatgttaaggatgttggctgccttccaacagctcatgagctgcttgtgcagtgagtcctttgccaagggtgtgctaaattgctcatgttgcagtcacaaatgtgaaatgctttcgtgaggtgttagcattgcacggtgcaatctatgtaagcaagcaccggctccagtgaatcctgcaatcaagaagatgctgtgacgtggtacagaattacccacgatggactgtaaacccagacatgtgttcaagcatttctcagcatgtgctcttctgccatcaggtttgctctgtcgaaaactgcaactatgttaagacgaaagctggtgatgggat

SEQ ID NO: 441889 - DNA, 416 bp, Triticum aestivum
cgggttcatatatgtaaatctgtattattacttatatcttcagcagtgacactaacttcaaaataagctgatagtttttttttcgaaacggaaagtaagctgatagtttaaatattgtgtcattttcctaagcacctcgagcgtgcctggttaattatctcgttttgaccgcccgcaaaagatcatctcgttttgatacatcttagttcaaatttacttgcaatctttaaatgcaagtttgaaaataaataaatatacttgcagttcatatttagattacactagtaaacatgcccatgcgttgtgacgggaaaaatttgtatattcctagcacaataagcacgactgaagacccctccactggtgcacattatcaatttgaacatggcgccaagtccgtgttgtcacttaacctc

SEQ ID NO: 441890 - DNA, 436 bp, Triticum aestivum
  unsure (1)..(436): unsure at all n locations
actacttgagattctggaacagaagaatgcccgctacgtgccgtttgatggctgggagaagatcgacaccaaagagaaggcggacggcgagctgaaaaacaagcctaaggagaagatcaccagatggaatgagctcctggaagccgcaagggagggttgattgaagggcatcgaacggggctgctggttcaagcgtaaaccgaatcacagaaacagactgcgaggcacaatctgaatactgaaagaacagcctatcacgtacataccgatgagccaatgaaagtcaagtgctaataatgcagtcttagcagtgaatcactcgtacgcatacacagtactgccaatcctggttaaaatccccaanaggctcgaccactgcagccacatgaaacgattgtagtcctgangagtanaactgctatatgaacttttgcac

SEQ ID NO: 441891 - DNA, 429 bp, Triticum aestivum
attcacaaaattttttatggtgtacggcgcagaggcagtactgccatgcgacataatccatgactcacctcgagtgcgcatgtacgaagaaagagaagccgagctcgatcggcaggacagcttggacgcattggaagaggagggcaatgtggcaaaggctcgttccgcattctatcaacagcaggctcgaagatatcaaagcagagaagtatgggccaaaacatataacgttggcgaactagttctacgcctgccggacaagaaaatggataaattaaagcccaaatgggagggccccttcatcatcgaccaagtactgaccggcggagcgtaccgtctacgaggcgcatcggacaaccgactcgagccgaacccatggaatgcagcacgcctacgaaggttctacgcctagcaccggactccgtgttc

SEQ ID NO: 441892 - DNA, 445 bp, Triticum aestivum
cctgagcgtacggtcggatgtccgggtcgacgggggaaacaaacaaggtgttaatgcctccatacatgttttggccccgaaggaaaacttgtaaaggtggtgtccaatctttcctgccacactcgacctttgtcctatgtggagtcttgagcatgctttccgagggaaagagaacggctgtttagactgatcgatagcagtaagagacatggggtcttaattattagtggtgatgttcattttggagaaatcgctcgttttgactgcggtgttcaatatccattgtatgatattacctcgagtggtcctactcagtctgtcgagaattctgtaccagcaatatttcaatctgttatgagacttctggcttggctgacaacaacccccatgccagtcctcagccctaactgccgtcacaaatcatgctcatatggtcagccaaatt

SEQ ID NO: 441893 - DNA, 383 bp, Triticum aestivum
tggatctgatgcttggaagacccctagttggtgtgtggccgcctgataagagtggccatcgcttggtgggcgtggtgctggtagtagagtaggatagtgttcttcgggacatgcttgtaaaattaaggtttttgggtctttttttccgctcctgtacaagtgtatttttggatctgttgttgtaattttctttttctaatgacatgagcatatactttctgtcaaaaaaaaaaaaaaaaaaaaaaaaaaaaaaaaaaaaaaaaaaaaaaaaaaaaaaaaaaaaaaaaaaaaaaaaaaaaaaaaaaaaacaatacgatacaatcaaaagttatcatatcatccaaaataatgtcaaaaatctgctagtcacgtaaatttaattc

SEQ ID NO: 441894 - DNA, 138 bp, Triticum aestivum
gtcgaggaagtgaagctcttcctcactggcgatgatgaagtagcggcggcgctagggtttgagaaactcgagctggcgagagaacgagcggagtaaaagagaagtgaggaaggggagggggtatttatagccatgggc

SEQ ID NO: 441895 - DNA, 72 bp, Triticum aestivum
cggggtccaagaagttaagtcctaccacattggcgatcataatattacggcgccgctatgcttcctcagcct

SEQ ID NO: 441896 - DNA, 436 bp, Triticum aestivum
gggtcgacgcggactcgtatgctgccacttgttaggttttctcatatgacctgcaggaagttgcggaaggtccttgcatgcagtgatctggataatgagcaagcaactaaaagtgtcactgatgcactcctgtacaaagctgatgcaccacatcgacagcgcgcccttgctacagatgtgttgacctctaggaaatatactgaacgagcttacaaatatcgcccacttaaggtggtggaatttgaccgaccgtatcctcaatgcatagcatacttggatctgaagcgcgaggagtgtggccgactattcccatctgggcggatttactcgcaagcattccatcttgctggacagggattcttcctctcagcacattgcaacatggatcagcaaagcgctttccactgctttggtctcttcttggggatgcaagaga

SEQ ID NO: 441897 - DNA, 196 bp, Triticum aestivum
ggagactactacacgaagacagccgtgaacgcgctcgtcgccaaggcaggtctaggcgctcccagtatctatgaatcctgatgaaattgttcgctcagcgacatctcgctgcatgttgccgatatgctatctccgtatcacacagtaactctcgcgacaaatctgcgacctcctgagaatctcagtcgcttgagtc

SEQ ID NO: 441898 - DNA, 428 bp, Triticum aestivum
aagatattaaggatcggtcttgtaaagctctgagaggtcatcaggcagatctcttgatgttccccatgacgctgtctgcctcccttccttgcagatttctctgtagccatgaactttaaactgaatggcatcaacatgttcaaaggcttcagaggctttcacttgctggacgaacaggaactgacttcgggagaatttatatgatgctataagaattctgcaaatgaatgcagactatgagaaccaaaggattctcccacggacatgtacctgtgacagcattaatgtgcgagggaaggggaagaggtcatatgcattcccagaatattttgaagataaatcagtttagaagacattgacctcatcgtgcgaagacattcactcatagataaggagttggttccagatctgtacgaatccagagatca

SEQ ID NO: 441899 - DNA, 396 bp, Triticum aestivum
gggtatcgctaaaataagtcgtcttaaaaaaaaaaaaaaaaaaaaaaaaaaaaaaaaaaaaaaaaaaaaaaaaaaaaaaaaaaaaaaaaaaaaaaaaaaaaaaaaaaaaaaaaaaaaatttaaaaaaaaaaaaaaaaaaaaaaaaaaaaaggggggcccttaaaggttttaattttttttttccttttaatgaaattttaaacctttttaaattttcccccaattttaatttcaggggctttttttttaaaattttttaaggggaaaacccttggttttcccaattttaaccccttttaaaaaattccctttttcccaatttggtttttttccaaaagggccccaactttttccctttccaaaatttttccccccttaattggaaattgtgaaccc

SEQ ID NO: 441900 - DNA, 380 bp, Triticum aestivum
agcatgcactgaggcgggaagtggaaaaggaatacatcgccaagcgaactcaatggtacgatgctggaggtggaagacgtggccaacatggcgctgtatgtcgagtcggacgaggctaggtagctctcaaactgcgcagagtcaagattgatgctatggtaccattaatgattccagctgaagatatttgcaacctgaagtgttacacaagtttactattgtgccaatgtgtcatcatgtgtttccatgatttttgcaaacctttaatatatccccgggttccttttcttctatgctagaattggtttggaaaaactgtatgcaactatggccatgaaattgtattaagaattatgcaaggagtgagtcatcatttcttg

SEQ ID NO: 441901 - DNA, 322 bp, Triticum aestivum
  unsure (1)..(322): unsure at all n locations
gggaatcaagcaaaaaaaagggaatgtgttttccttaccaaggttggggttccggcgctcaagggcaacatttatatggagtagtgggagttgttnagacaagccggccggggtcaaaccgaatgctcgcctcccagtgaacctgcgcatccgactgctcgcatgcctaccaaagtttcacacaactactcgcacgcctcctgatgacactgcgcagcgagcaaccctccgttaaatcacacacctgcacgcacgcctccccgtctgcctgcgcggcggactgctancatgctgatacgtcccaacatatctataatttttg

SEQ ID NO: 441902 - DNA, 425 bp, Triticum aestivum
  unsure (1)..(425): unsure at all n locations
agggtgaaaggaagcaacaaccccggcggcgcaggcggagggatggctccgggcatgggagcgggcagcagcgacgggcggcacgatgacgaggccgtactcactgaattcctcccctccctcaagggctaaaaccccatgattccggacgaactcctggagcactaactccggcgcaacggcttccactgccctgacctacgccttacaaggttggttgctatagctactcaaaagttcatttcagacgtcgcaagtgactcccttcagcattgcaaagccagggttgcagcacctatcanagacaacaagagcaaacaaccgaaggatagacgtcttgtattgacaatggatgatctttcaaaagccctgcgtgagcatggtgttaacctgaaacatccggagtattttgcggacagcccatc

SEQ ID NO: 441903 - DNA, 75 bp, Triticum aestivum
atggcgaaagggtggcctgagaagctgaagcatgagctgcacgagcacgagctcttgctgatccgccgccccagg

SEQ ID NO: 441904 - DNA, 436 bp, Triticum aestivum
aaataggtagggagagagagagagagggagaggggtagagtgctggatgggtgatggagttgcttctcgaagatggtgggagatgcctactagacaaacttagggtagaacttcaatattatcaataagagtggggatgtgtttccgtgtgtgcgtgtgcgtgatagatgtgtcgggacgcatgcatggatgatgaaggggaaccatgtgtttggtaagcaaatctaactagatcggtagatcaattgttgtttatcggaggaaggaagagacataactaataggtagatcgatcgacgcgttgggaaaaacgagttataacgacctagctagccatatgtatagcgggagatcggtcggtgtacatccatttgttagaggcaaacaaggcccagtgagatggatagacagagagaatggagcctagaggtggtgc

SEQ ID NO: 441905 - DNA, 373 bp, Triticum aestivum
gaggctaacaaaggccgccgaatacatttaggccgcctcgatgctccaaggatcacacccaatagaaagtccccgaacgctccgattgggcaatttgaaaaactttaaggttcctttttttgtcagtcacatttccatctcttccaccataattcgggtacataacttgggagacattttatgctggctacctgtagcgtgtactcccaggatccactgtgctgctgttgtcgacaaaagctgtaactggttgctaagtgatttgcctacctggtatggcagtataaagcatatgtatcaatatcaagcgctaccacataagtagaagtttacaatgagtcgtcagacaacactgcgggtgtggtggttaaac

SEQ ID NO: 441906 - DNA, 414 bp, Triticum aestivum
gggtcgacgggacatatgaaatgaagaaggtgctgatacagagcagggagcaactggatctggtgaaggaggagatccgcgtttcgtccttgttcaaccaccccaatctgctaccgcttcttgaccatgccataatagcagttaagagtacacagggagattggagccatgaagcctacttactcttcccagtccatttggatggtactctgttcgacaatgctgcagtcatgcagtcaaggaaagagttttattcggtggtcgatgttttgcgaatattccaacagatttgtgaaggactgaagcacatgcatagtcttgatccaccatatgcccataatgatgtcaagcctggcaatgttcttgtaacctgccgaaaagggcaagcacctcttgcaactttgatggattttg

SEQ ID NO: 441907 - DNA, 65 bp, Triticum aestivum
  unsure (1)..(65): unsure at all n locations
ngggtgggaagtgannttacgcctggctaactaatnangatngacggtngctttncggtgggttg

SEQ ID NO: 441908 - DNA, 427 bp, Triticum aestivum
  unsure (1)..(427): unsure at all n locations
tccatttatctcaattctattttcagacctcgatttcttggagatctccctccttagccaaccaaagctcttgatcttttaagaagcgaaggagaagtgctcgatctacacattcaccaaagcgaaagttgattcttcccttgtttttgtggtgcatcttgttactcttggaggttggagactcctaggcagtangagtgctccggcgaggaatcgaccattgtgatttcccccggaaagtttgtgagggtttggagaccacccaaggtttaccactagtggttgagaaacgccttggtggtgttgtctcaaagagagaatagggtgagccttcgtggcgttggtgccttcgtggtaacatccacctgtctaaatggtgacgtagcttccctccaaggaagtgaacatcgacatacatcctcgtctc

SEQ ID NO: 441909 - DNA, 219 bp, Triticum aestivum
ggggacgccatagcattagcattgctgtagtagggaggggtttcgttgctgtactgtactgtatttgtactactttatacgtacttggtagagtaagaagaagatggattggaggctcaagttcttgagcctacaactataacacttagagtcgcagtgaatggatcaatcacagcctgtgcgttgttgttattgtaataatcagtagcctgtgcactc

SEQ ID NO: 441910 - DNA, 415 bp, Triticum aestivum
  unsure (1)..(415): unsure at all n locations
cacggggccgcacaaaaaataatattttaaattcaacaagcattgcttaaacgacatcgacgacggtttcactgcacatgctgtggacgagcgagtttattcgagagctagatccttagtacattgagacgccacaaggcgggcacccgcaagaacattcttgtaatagttctcgggcttgctatgcgccttggtgtacgaatgggtgggcggatgggatgggagtggggaaacatggcttatggacgcgcttatctgaaatgtggggtaagtcacgaaattacccctaccgatttgagctaggcggttctttcggtttaagggtatcacgggcatttcacgtgtcgagatttcacaggaggtgggagtttttgcgcgcgttgtaattttggaatangaaggtgtgggttgagat

SEQ ID NO: 441911 - DNA, 404 bp, Triticum aestivum
ggggccgcacaaaaaataatattttaaattcaacaagcattgcttaagcgcctatgaacaagttttcagtgcacaggataaaaacgagcgagtttattcaaaaattacatccttggtacattcatccgccacaaggcgggcacccgcaagaacattcctggaataattccccggccttgcaatgctccttccccggcggcggcccgtccttcacaagcttctcaccgtccagcttaccccagtgcacctttgcacgggcaaagggcccgacggcaccttttgatgcagacggagtgcttgatgacctcaagccttggacaggcctccaccagccgccgcaccatcccgaagtagctcccaagcagggcctctccgggccacagctgaactatgaagcctttcat

SEQ ID NO: 441912 - DNA, 279 bp, Triticum aestivum
ccccggggagctccccaagcacgccgtctccaatggtacaaaggccgtcaccaagttcacctccccctagacggatgcgtccgtcgcctctagttggtatctgtatctgtagtgtcgactctgcttgtcactctgcaagtagtgctggtagtctgtgtgctgggtgctcgccaacgcttcgttggctgattggctgtatgaactgaagttgttgcatttggcagactgatatctatctagaactgaacttgtggtggtacttaaaagaaaccccgaatg

SEQ ID NO: 441913 - DNA, 414 bp, Triticum aestivum
  unsure (1)..(414): unsure at all n locations
gttttcttgaagaaatgaggaacaagatgagggagaagcgagggttgggtagagaggaagctgagagagaaaagtgaaatgatggttgcttcgtccgtccaacttactgctggaaaggagggggttctgtgatttgacggctcattggacattactgcggcgcttcgatcggggtagtccgccgtcactctactacggagtaatttaatgcatggctggtggaccccgatgctggctatcccacacgtcggcgaaagtgagtaatttagtgcatggctgaaggaggatccgcacggtanggcgtgtccactgtttttctgaagaaaaaaaatgattacagcaagcgtttccactcttacgacggaggagtgcgaaacacggcagccacttgaacatacacagtgctcctactac

SEQ ID NO: 441914 - DNA, 396 bp, Triticum aestivum
atgtgttaggtcttattatgtgtgatgaatgggaagttcatgtctctgcctacgacgacgacgatgtttcgtcccttttatgcattttcagtgactcgtttaaaaaaaaaaaaaaaaaaaaaaaaaaaaaaaaaaaaggtaaaaaaaaaaaaaaaaaaaaaaaaaaaaaaaaggggcggcccaaaaggatcaaagctaaggtaagcgtgaaggcaacttaaaagatcttcaaaagggtaaccaaaattaaattaacgggccgtcgtttaaaaagttcgtaacgggaaaaaccctggggttaacaaatttaaaccccttagaaaaaaaacccctttccgcaactgggggaataaccaaaaaggccggaacggatggcctttccaaaaatttggaaac

SEQ ID NO: 441915 - DNA, 395 bp, Triticum aestivum
atttcatcgaaaaaatgatatgtcgagaaagatgatagaggtgaggaggagtggggcgtggtggtgactggtggtcggactgggcggaggcatggggatggacggcgccggcagcggccaccatgccagattgttccagagacttccttttgtaattgctcagcaatgaggttgtgggagataaggatgaacgaggcaaggccttatctgtaaatgtggagagaggagcgggtatcttttgtaaatttgtcatagtttgctttctatccgtcagatatagatcggacaatctatattataagatggcaggcgcaccatcatcaccaactcggttttttctctactcctactcctataaaagactcagttggtgatgatggtgtgtctgccatccg

SEQ ID NO: 441916 - DNA, 355 bp, Triticum aestivum
  unsure (1)..(355): unsure at all n locations
ggacatgaaggaattcgcgactcataaataccagtttgaagcgccggatgatgtgagggttggtgctaaaagagttgcagttctccgcaatctttgccaaaaggtcggaataacaattgctgctcgcaaatacgatctgcattctactactccattccaaccttcagatatcttgaatctccaaccagttgttaagcactcagttcctacctgtactgatgcaaggaagcttatggaagctgggaaaatccggatggctgaaggaactctaaatgangcgtatgcactattttctgaagctttttctctacttcaacagatcaatggtcncatgcacaangatgctgcgaactgt

SEQ ID NO: 441917 - DNA, 55 bp, Triticum aestivum
gactatgacatcaactctgtctggaaagctgctgacctggcactgcattgcaagc

SEQ ID NO: 441918 - DNA, 330 bp, Triticum aestivum
gcaggtggaaattcgtccggctatgccggcaccacccccccaggtgcgcattgatgtccatctcctgacacggatatggaggagcctcttaattgccggtagagcagttcctgatatatatcctacatggtagttgccaacttatcagccatttcaaggtataccatatcctgcagacagacgatttgctgctcctgtttgtgcatgcgtacatgtgcgtatgtatggttctctgaacactctgtatgatatcctaatctatctaattgtccagcgtttgcctgtgcaaatctcaagcgttgagttccatcagaatatgcacgtgaattg

SEQ ID NO: 441919 - DNA, 325 bp, Triticum aestivum
  unsure (1)..(325): unsure at all n locations
ttggcgccaaaaggaaatttggtgaaaattgttccaacattgcttatgaaaataaagaaggaataataagagtacttcccccacaaaaagggactacatcttactcaagaaagaaaccaaattttagacaaattgtgtgaattgcaaaaatctattgagcctcttaaaaatgttgttgggaaccttcaccgtatgaatacattgatcactctttgtaataaagcggttggatgctctagatctaaaaatctccgagcatgaagggaaacgtaagaaacctcactgattcgagcacaactccattaanagataagtaccaaaagag

SEQ ID NO: 441920 - DNA, 359 bp, Triticum aestivum
tgccgcaaatgtttggcgcccaacgtgtcggtctgggctcatacgtggtcgtgtcacgtcgtagtgacgttactatcctacgcctatttagagcagtgggaatcgggccgatggattgtccgataaatgggtacacagtcatttccatctccgaaacacttggtttcgggcatccgacgtgggagtggacattttgctgcttctttcgaagtttgggacaatcatcatccacgtttaccctagatactacattcgaatccattttgtattcctatacgactctttatcaatcattctatgtgtatttatatatcttcacaatgatgacagcgatgtactccactgtcatatatgaatat

SEQ ID NO: 441921 - DNA, 399 bp, Triticum aestivum
acaacaccgagcccaaactatgccccggctgcaccagctcccattcctcgccgtcgagctcaccggacaccgcccgaagccaagatgactacttccaggcgccttgctgacaggaagacatcgaagttccagaagaacatcaccaagaggggttcggtgcctgaaaccactgtgaagaaggggaatgactatcctgttggacctatagtgcttggattcttcatctttgtggtcatcggatcatctctgtttcagataatcaggacagcgagcagtggtgggatggcctgaacactgtcatacattaatacagttgcagctaaatctgtttgatgtcgtcatagtttgtcttcttaaaagtacctagtttgaactgatgttgttagaactgttaacaga

SEQ ID NO: 441922 - DNA, 99 bp, Triticum aestivum
cgggtcgaggccgaggggtaagaaattgtaaatatgcattgttgtatcgcgacctgaatgaatgaaataaacgaaataacgctcttgttcaaccgtcac

SEQ ID NO: 441923 - DNA, 391 bp, Triticum aestivum
acgggtcatagaagtagacagagggctccttggaggcatcgaacaagccgtccatgaaacgggagtggttgtacgggacgttccgacagttgaatatatgagcacgttactacgagatttactacaatataaatcatgacggctataacatagattaaactaatcatgcggactagcatagtagatgaacacatcaaatctaggacacagactatacacatgaattctaccacgatttcgaacaggaaggacagacacacataccgtgcaacaggagcagcaccattggcgttgaggttgtcgcccatgccgttgaggaagaggttgccgacgtctgggaagaagtcgtcgttggtgaagtcgtcgctgctagcactcgcaagagtgcact

SEQ ID NO: 441924 - DNA, 385 bp, Triticum aestivum
gaacacaatttctcaaaccagggtcgtggtactgttgtgactggacgtattgaacagggggtaattaaaactggtgacgatgttgaagtcatatgtttgactgagagtggtcctgtgaagactacagttactggtgttgagatgttcataaagatgatggatcatggagatgctggtgacaatgttggtcttcttctccgtggtcttaatcgtagtgatgtcaatcgtggccagatggtttgcaaaaccggtactgtgaagacctacagaaagtttgaagcggaaatttacgtccttaccaaggatgaacgtggtcgccacactgcattcttctcgaattacagcccacagttctacttcacgacagctgatatctgtgggaaaa

SEQ ID NO: 441925 - DNA, 470 bp, Triticum aestivum
ggggggggggcgggtggggggggggggaggggtggggggggtggtggggggggggggggggggggggggggtgggtgggggggggtggggtgggggggggggtggtggggggggggggggggggggggtggtgggggggggggtgggggggggggggggggggggggtggggggggggggggggggggggggtggggtttgggtgggggggtggggggggggggggggggggggggtgggggggggggggggtggggggggggggggtgggtgggggggggggggggggggggggggggggggggggggggggggggtggggggtggggggtgggggggggtgggttgggggggggggggggggggggggggggggggggggggggggtgggcggggggggtggggggggggggggggtgggggggggggggggtggggggggggggggggggggggggggggggggggg

SEQ ID NO: 441926 - DNA, 377 bp, Triticum aestivum
  unsure (1)..(377): unsure at all n locations
atggaccgggagcagcgccccaacgacgagttcagcgagcgtgtcgtgcaggtcagccgagtcaccaaggtcgtcaagggtgggaggcagctctcctaccgcgccctagtcgtggtcggcgacatgaagggacacgttggtgttggcgtcggcaaggccaaagaagtctcagaggccatcaccaaggctgccatgaacggccgccgcaatctcgttacagtgccactaaccaagtactgcaccttcccgcacagagctgaggcgaactatggagcagcgaaggtcatgctgaggcctgcttgccctggatctggtgtcactgcangtggagctgtgagggttgtgctggagatggctggagtaganaatgctcttgg

SEQ ID NO: 441927 - DNA, 209 bp, Triticum aestivum
gtaaaaccgctcattcggtccgttgaaatttggtataaacgttgccggtaaaaataggttttccaagctgaaaagctcaagtagtacaaatgtacgtaccttgtatgacatgctacctgattcttgttcatttaccaagacttgcataagaataaattattaaatattatggaaaaaaaacagaaggtgttgcaaaataaacaaagcaa

SEQ ID NO: 441928 - DNA, 124 bp, Triticum aestivum
gaaaaatagatttactatgttttcattttaatgtttggcatcgcgtcgtatcaaactcagccgctctttcgctgagtaatgtacatttgcctggtcatggtaacttgtgggttctgctgctgcc

SEQ ID NO: 441929 - DNA, 355 bp, Triticum aestivum
cctgttaagactttagcatgttgtaaaacaacacatatgcatataataatatctaaagatgtataaacaatggtagaaaatatatttgattggaagatctgacagatgataaggcacttgagttcgcctatacttatacacacctgaaaccagtatacgcctcgaaactataacttagacaaaactaatatttcatatgattccatactttctaactttcgaccacatgtctgcactgtgatgcctccttatcctcaataatccatcaacggaaccagtgcatacatagtgatgaccaagcataactatcgcctcagaatacataatataatagattgaattacgagtagtgtgt

SEQ ID NO: 441930 - DNA, 375 bp, Triticum aestivum
  unsure (1)..(375): unsure at all n locations
attcncggaccgacttcaacacggagtcacatgaagctgcaaaagacataacagcagagttgctagaatccttgatcgatgaaatggttgctgaccttctatattggtagtttggtcatgcaattattgtgcattttgtttgtcgagaactacaacaggggccctaacctgcccaccatttgatgatagatcagcggctgtcagagccattgtctaccttttttggggaccgtttcggttgtcatgatgcagaaaatagcgaggcattgtaatttttttctttccttactatggcccattgttaatgaaaatagctggtactgtatgttgtacaatgtggcattttagctgtatgaatggtggtctgttctttgc

SEQ ID NO: 441931 - DNA, 363 bp, Triticum aestivum
actactaacgtctcacgcacacaaacaccccccccctggatcgtcttttaggttttaaaaaaataaaaggaaatgataaaagattaaaaaaattcaaaaaaatagatgcccatgtgttatgtgtcctatttgttaggaaaattaacaaacatgaattttgaatttttttgcaaaaggccgcgtgtttcggtaaaatggccgtaacttttgcatacgacctccgatgaaaaagtttttttatatgaaaaatcatctacttgaaaagttacatccaaattcaattagggggacactatgggagatttttagaatcccctaaaacctgacagaataaaagatacggggcttttaagatctggaggc

SEQ ID NO: 441932 - DNA, 432 bp, Triticum aestivum
gaatcagatggtgttgttatgtgcccaccagatggcaacactcgtgattgcgaggaagttgttagtggcagtgatcatgatagttctccagagggccaagtaacttctgtagaaccggccatagacggagaaacaggggaagacaagcttataaaccaagattcactgaagttgatcgatcaagaaatgtctgctcttcctaagtcaccaacaaagcctagtatgtctggatcagagaagtctaagcgtactgttcctcaaccattcacactttcaactcaaagaagggtctctggtggaggaaatggtggtgttgctcatccatccagtaatggagaaaaatctgggcaaggaagtagtgcctctccagcaagcatgataaagaagagtactctggtgacacccaagaagatgtcacaacctggccttaca

SEQ ID NO: 441933 - DNA, 377 bp, Triticum aestivum
gtaataagcactgcagcacgtgcatgtagttcaaatttgaattgttcacctgaaatggctacaatacatttcaatgtcatataatgttcattcatatccggaaaaaatccacttcgtttacgacacacatatagttgcatgttcaccccaaatctaaggtcgagcacttcatacatcatcgattgccgctgtgaccccatgatgtacctcatagattgattagatttcatgctagatctcaacaatttactatcagcatcgtgtgacatgtgttacagtgtatcttggtgcatcatcagtgtatagtacgcatatagcctacgcgagacagtgcgtcggctacattccacattcagcgtgtcaagcacactatctcg

SEQ ID NO: 441934 - DNA, 65 bp, Triticum aestivum
  unsure (1)..(65): unsure at all n locations
gggngnaatttacgccggcctttaccggccanagaattcccgaancgacgggggggagnatgggc

SEQ ID NO: 441935 - DNA, 409 bp, Triticum aestivum
gcagagatgctggtgatggcctacgcaaggtcctataatcttccggtgatcaccacacgaggtaacaatgtgtatgggccaaaccagttccccgagaagctcatccccaaatttgctctcctggcaatgagaggcctgccactcccggtttatgggaatggctcgaatgccaggagctacttgtactgtgaggatgtcgcagaagcctttgatgttgttcttcacagatgagaggttgggcatgtgtataacatcgccgcggctaatgagaggggagtggtggatgtggccagggacatatgtgagattcttggggtggaccctgagaaggccatcaagttcgtggatgacaggccgttcaatgagcataggtactttgtggacggtgagaagatgacgaggctggggt

SEQ ID NO: 441936 - DNA, 364 bp, Triticum aestivum
  unsure (1)..(364): unsure at all n locations
gacacaaaccctagctcactttcctatccacacaacctcttcctccccgcatcaccacagctgccgctgtggagcctcgcggacgcctgctattactcctccctcgtctctgtctggtcgccctctcgtgctccaccatgcagccgcctcttcctcctctattccctcctaccgtggttccggatcgggtgcaggccgtcatactggagagcatgagcgtcaaggtcttaatggtggggtggagatgcangggaggtanggatgtcggatggatctgacgcctgctggctaaagcagcaggagttggcagagcgacggatgcggacgcggtcatcaacaggggttgcaagagaaggagctcaag

SEQ ID NO: 441937 - DNA, 306 bp, Triticum aestivum
gtggcgtcatgggctccaactcgcaggcgaatatcaatgtcaggcacacgctcatcgccatggacgctgcgcagatgattcactaagcctagccctacaagtattgtcacatcagtctccgtttctgtcccccttcactctgtcctgattttgacgaggaatgctcccgctttaatcagtactgttgaatcgttgtgtcggtttctgacattgcggtaccaacgacctcctgggcagtccactctgaccattgtttcggccctccagttggggaaccccgtttccatgtccccagctggctggtca

SEQ ID NO: 441938 - DNA, 389 bp, Triticum aestivum
gggtcgaccgccccatgaggcgcggagatagggggaggcgtttcgctctccatcatctccggaagaagatcccccgaagacgaactctgtcgagaagggctacgattcgagctgcaagacatatgtctcggttattgtcctcggagatgaagcatgatatatttaccaaaagtactcttgttcacttacagctcggtggagggctgacccccttgcgggcagtgcggtaagaacgccctccggggcagggccccctgacgaaggtttcttccctcgtttggaaaccctcgtttccaagtcttcagaggcggtccttttccatccttggggagagggaattttagattcttctccccaattatcctccttcacgaagacactaattcccc

SEQ ID NO: 441939 - DNA, 360 bp, Triticum aestivum
tcctttatttacaggagacgatgaagagaagattctctcctagtttctttagtaagatcgatccttatggtacttttgactggaactggatcccttcgattggcaaggctgggggtctcctctgtgcggtcaagagacaacatctggaagtttttttcgtggtccttggggaaatcttagccttcatgttactatcttcgatgttaaaaaaacagtgtgtttggtctttgcttaatgtgtatggtgcagcccatgatgagtccatacatgaattccttgaggaattggccaactattgtatccacttatcaatgccttacattgtgggtggtgatttcaacatccttagacactagtggg

SEQ ID NO: 441940 - DNA, 65 bp, Triticum aestivum
cgaaacaatgaaataggcaaaaaaacggcaatttgcacggggcctttggttagtaggttagtccc

SEQ ID NO: 441941 - DNA, 391 bp, Triticum aestivum
  unsure (1)..(391): unsure at all n locations
attcgcgagtcgacggggtctgtcagagccgacgaagaatccggtagcatggaccgcgttgcgggggcatccggctcgtcctcatgcttgggaaggacgacgacganggcggcggtcgtcctgcacaccatggcatagctcggggagganggggtggccgcgggtatgccggagccacggttaccgcggcgctcggctccggtccagatcgaaagagaggcgagtgaagggaaagtgggactgctacggttcgaggtagangaagcgggggccatgggttgctcttatccaccaaggaaaacgtcggggaggcgcgggatggctgccatagcgtcatcggtggccatggcaccggtggatcgtttccacgattcctgtgtgtgaacaggga

SEQ ID NO: 441942 - DNA, 375 bp, Triticum aestivum
  unsure (1)..(375): unsure at all n locations
caaatttgacaatgaaaaagatcttgacgccatccgcagtgctgtcctgcgctacaacgttactcatccagttgtaaatgacggtgacatgtacttgtggagagaactgggggtgaactcttggccgacgtttgtggttgtcgcgcccaatggaaaggttctagcacagatatcaggcgaaggccacagaaaggaccttgatgacgtagttggtgcagcacttgagttttatgatgaaaggaaattactacagaataattccctccccttggcgttggagaacgacagggataatcgactaataacttcaccactaaagtttcctgngaaacttgcaattgatgtacagaacaatcgattacttatatcagacag

SEQ ID NO: 441943 - DNA, 400 bp, Triticum aestivum
  unsure (1)..(400): unsure at all n locations
agatggaggtaactcgatctcatgtgaggaattcaatgtgtcgttggacacattgaaaacctccatgacaaccgaggtcaaggacatgtttaaggaattcttagaagggcttaaactttccaccgcgcccgtgaaagtgggtgatcccgccaacacggtgacggatgctaaccccaaaaagggggaagctactagtgagaaagctccgttgtctagtggtaaaaatggcaccggcatctttgcccatgtggaacctccaatttatggagggccgattccctctactcatttaaatcatgctggtcctcctcctaagtatgagaaacatgaagattttgattcttgggtttatcgcttcaagcgtcatttanaacatgtgaatactaacctttggagaatc

SEQ ID NO: 441944 - DNA, 373 bp, Triticum aestivum
aacgatacgtacacgcagtttggagggaaaggcggaaatgcccagggtgacatgaatggaacaaacagctccgacgatggcgtgtccgacatagagtccgtcctcgagcagctgaagaaggagcttgggctcagctgaacggttgcctgtcggctgcatacgacgggggcaactgcggccaccttgatcggtaccaacccggtgttcatatggaggtccgctgttctcccggatcgatggcggtaatggtacgtactaccagatgttgtaatttagctggtatagctttccggtggggcgacggatccagcgttttgcagaatgtttttgttcttggttcgtagggctgcagtttgttatggacagagaagag

SEQ ID NO: 441945 - DNA, 399 bp, Triticum aestivum
acatcttcaccaagccattgcctttgccacagtttgagacttgcaggcgcaatcttacccttctagattcattaaaaagtggctaagattgagggagggtgttagactgtatttacatgtgtatattgtaacgttgtataccacctcattatatatatatgtgataggccacccctagagggttgtgccggttccccccaaagcctattgtcttacactgggcaatgatggtgcctggcgtggacatggaagctgcatatttttctgcctggtcaggcagcctagcatgacaactgtttggttatagcctgaaagctattagtactagaaaaaacaatttgtggggtcatctaccccactgtactttatagcccaggcagccaccaggcgcttgaatac

SEQ ID NO: 441946 - DNA, 424 bp, Triticum aestivum
tatcctaactcgtatcacctttgatgatcttccatcgagaagcgcaacacggttggcaaggagatagcgcggctttaggccgctgagttcatctgagaggtgtaccactccgagtggctcgccaacgtcgtcatggtgcccaaaaagaataactccctccggatatgtattgattttaagcacatcaatcgggcctgcccaaaagatcatttccatcttcctcgcatagatcagatagtagattctactgccgggttagagcggttatcatttttggttgcgtactccgggtaccaccaggtccgaatatatggtcctaatgaaataaaaacagcgtccattcgggtgtttttgttatatcactatgccattcgggttgaaaaatgttggggccatgattcagcctatgattcagaagtaccac

SEQ ID NO: 441947 - DNA, 394 bp, Triticum aestivum
actcgtgagtcgatgggcgcccggacactaaatcaataaacgtgcatattgactaagttgacaaagccctccgtccccgtcaacttagtaggcccacaagtcagcctctcactatactaagtctcagctagcacggggagtattcatttttgtgtgcgtaataaggatgcacttccttgcgtgcgaagatatagctggtgggtccgagctgtcagcggcggtaacatttttttcgcaaaatacagacgccctttcggtgggtcccagatgttacgtggaggaatcattattttgcgcataataatgatgcatgtccttgcatgcagccgtggacccagctgtcagcctctccacgtacagtccacttcagatgcatgtcggtcgttgaccacat

SEQ ID NO: 441948 - DNA, 74 bp, Triticum aestivum
tcgatgggtggcagagtcatcattggtggagtaggatgcagccttgcgaaattgaccatccaatggacgaatcc

SEQ ID NO: 441949 - DNA, 417 bp, Triticum aestivum
gagctaaagtggctgaatcctgacaacaatcatgagctattatgggattatagcatgtgtgctgaaacgagtcgtggggctgcgatccgtgatttgattgccagagccttaaaaggtccacttgtacctgctcaacaggagcaagttgttatagaattggtgaaggactctaagctagtctatcactgtgggatgactccacagaaacttccagaccttgttgagcataatccactcattgctgtagagcttctttcgaagcttatgaactctcctgacattgcaggttattttgatgttcttgtgcacatggagatgagcctgcattcgatggaagttgtaaacagacttactactgcggttgaactcccgacaggatttgtccacgaatacatctcaaattgtattcaatcttgt

SEQ ID NO: 441950 - DNA, 363 bp, Triticum aestivum
ggttgaaaacttcatgaactttatcacaattgagtacggtggtccgaaatcagatgtgctctgcccgtgtagcagttgtatgaattcagttacatgaccccagtcaattgtgcaaagtcatctacacttgtatgggatgtcggtcacatatactaggtgggttcatcatggtgaagctgtgaacgtcaatgttactaactatgtggaagcagcagatcaccatcttgatcagcctgatgctcaggtggaagaggaggaggacgaggaggtgctggcggcagagccagtgagtttgaccaacattgaaacaattcgacgaaatgcttgcacatttcgtgaagtttcacttgcagaaaaacaatg

SEQ ID NO: 441951 - DNA, 232 bp, Triticum aestivum
agggtcgggagcggcctcgagttcaaggtcggacgtggcatctagaggcatgtgtttggctatttagtgaatagatggcatcacatcatacactcacgttgctacattaatcctcaacttgtatcatttattgcattcgtatggaatctgatctcagaattattttgtcactagatgggtatcaatcactgctttataaaaaaattcattcaatactaaaaaaaaataaaat

SEQ ID NO: 441952 - DNA, 350 bp, Triticum aestivum
ggacggaacggactccaccaaggctgcaatgaagcttcgtcggagctgcattgaagctttcggcggagttgcaatgaagcttcgtcgggggcgtcgcggccggtgttgccatggagcagtccctggtggttcccgcagcggttgccggcgggatctgggagttgcgctgcagcgctcgccggcggctccgtccacccgcagcactgatagtgttgcaacgcagcacgacggtggcgagccaccggagacgagggagattccctggcgcgtcccagcgagcacacatcagaagcccttgcaatcagacgcctcgccacagcagtagcggtgttgcaacacagcacggcaac

SEQ ID NO: 441953 - DNA, 280 bp, Triticum aestivum
ttcccgggccgaagggggttgaaagcttcgtgattgtttatcgctgttgggtgcggtggtccgcggtccggtgtgctctgcccgtgtgtcctttgtgtgggttccgtttgttggctccggtcggctgtgccgggtcgtgtcctcttgtctgggatgtcggtgtgatgtgccaggtgggttcatcatggtgaagctgtggtcgtcaatgttactaacgatgtggaagcagcagatcaccatcctgattagcctgatgctcaggtggaagaggaggacgacg

SEQ ID NO: 441954 - DNA, 132 bp, Triticum aestivum
atcgatttcttggtcatttctctccttagccagtcagagctcttgatcttttaagaatcgaaggacaagtgctcgatctacatattcaccatagctaaggttgattcttcccttgcctttgtggtagatctt

SEQ ID NO: 441955 - DNA, 380 bp, Triticum aestivum
gaccgttaagagtcgcacaagaaaagtgtcgcccggctccttggccctcctcctccggcggtgctgccgtcgtgagcgagcatggggaaggtagccaggtctctcctccgtcaagtaggtgtaagattaggtttaggactgagtctaggtttgtctctgtggcgtttgacgtgatgtcgagttggagcttcgtccaggcgtcctcgagcagcgcctggcggctggttctctcccgaggtgagcttccatggtggaagttgacagcgggtggtagatctggtgatagcttccctaataagctcgaatctttccctgatctggaggatctccgtcgccttgttccatttgttcgtcgctgtcgtggagatggggacagaaag

SEQ ID NO: 441956 - DNA, 457 bp, Triticum aestivum
ccgggtcgacgggctatctcatctccaacgacccttctcttctcttctgacagtcggggcaagggctgcctgactggcttggcatcaggtcggacatgtagcttgtgctcggcgaaatccgtcggaacacccagcatgtccttaggagaccatgcaaagatgttccgattctcacggaggaaatcgacgagctcgccttcctatttgctgtcaagatttgcgcctatgacagcgtgcctctctgggtgctccgggtccaagggtaacttatttgcttcttttgccggcttgaacgagccctcagcttccgactccttggggtttggcgacatttccggctgcttgcctgccattgccaccacccggtcaaggagccgcttctctgctgcaatcacgagggactcggctagccggctgctgtctgccgcgcaagcggacgacttcttgtagtctccga

SEQ ID NO: 441957 - DNA, 97 bp, Triticum aestivum
aagtatgggaaataagagacggagttaggagttgtaaatatgcattgttgtatcgcgacctgaatgaatggaataaacgaaataacgctgttgttcg

SEQ ID NO: 441958 - DNA, 366 bp, Triticum aestivum
  unsure (1)..(366): unsure at all n locations
attcccggactcnatcgcggtccaacgggagtgccaggtggctgcgctgggcaagctgggcgtggagaggtgcacggtggtggggttcagctacggcgggatggtggctttcactatggtcgacgtgcacccgggctccgtccgctcgcacatcgtctccggctctctcttcactatcagtcactctatacagtcataaatgctggagaggatcggcgtcaagtcgtcagcggagctgctgctgccggactccgtcaaggtgctcaaggcgctgctctccatcgccggatagacgatactctggttcccggaacccgttcacagggactacctccaggtgatgttcagcattcgcagcgaaagatc

SEQ ID NO: 441959 - DNA, 308 bp, Triticum aestivum
attcccgtcccgacgggcgctctagactgtgcagcggtggatgcttctgaggaagcacgtgcacgggatctaaggttaagtgcgggcgggatggaggatttacacatagtcgacgtgcacccgagctccgtccgctcgcacatcgtctccggctctgtcttcactatcagtcactctatacagtcataaatggtaaaacacgataggtatcaaatttaatctggttgtactacatccaggtttcgtcagctggcgcaacgcacaactcgccagcaccgatcgcacttcgcaacagttcctgaaactga

SEQ ID NO: 441960 - DNA, 392 bp, Triticum aestivum
ttccggaccacgggggtcaaacggagtgccaggtggctgcgctgggcaagctgggcgtggagaggtgcacggtggtggggttcagctacggcgggatggtggccttcaagatggccgaggcgcacccgggcctcgtccggtcgctcgtcgtgtcgggctccgtcgtcgccatgacggactccatcagcgagaccacgctggagaggatcggcgtcaagtcgtcggcggagctgctgctgccggactccgtcaaggggctcaaggcgctgctctccatcgccgctcacaggaaactctggttcccggaacgccttcacagggactacctccaggtgatgttcaccaaccgcaaggaaagagcagagctgctggaaagtttggtggtcagcaac

SEQ ID NO: 441961 - DNA, 374 bp, Triticum aestivum
caatagataaataccacacgtccatcaatttatttactaatttctggaggtccataagtatacgtctgatccatattactacagactgttctgtttttgacagattctgtttttcgtgtgttgtttgcctactttgatgaatctatggctactatcggggggtatgaaccatagagaagttggaatatagtacgtctaacacttacaacttggaatgggttcattacactgcctttaactggtgatttgttttcttagacgtactgagctcatcagattttctgtttaagttttgtgttgtgaagttttcaagtttttgggtaacgacttgacggattttggaatatcaactggcattcaccttaacctgggga

SEQ ID NO: 441962 - DNA, 335 bp, Triticum aestivum
atgaagcagggctactaggccgctggtgttggatgctaattaacgtgaaatccttgctagtttatatctgatgtctgaactgcggtacaaagaaatgaactcatggattgtcgatgagtctgaactcgtagagtatctgcatgtgcgaccgggattgcgtatgaatgtacacttgatgcgcctgctaactgaattgctcgcccttgtgaggttggatagagggtacggaccgagtttgaagcagtccatggattattttgtactgtactacatgaattttacgccaatgtaatgtaaccaacttaaacgggtcggactttatttgcctagcgaaa

SEQ ID NO: 441963 - DNA, 340 bp, Triticum aestivum
aactaagatgctgcagcatgtaaggattgctcgaattgttgctgtgtgacagctggttgaacttgtgatcgttgagatccttggttctagatgaagaaactagtactactatgttgttgcaaaaaacaccaacaccggcacaaaaaaaagacggacccccaaaaggttcaaccttacatacgacttgaagcgaagtccaaacccctccaaaatgtccccgaaaatcaattcaaaggccggacgattacaaaggcctcaatgggaaaaacctgggattacccaaactaagcccctttcaataaatccccccttccccaactggggttataacgaacaaggc

SEQ ID NO: 441964 - DNA, 379 bp, Triticum aestivum
cggatacacttactcatcatgccgcagctcgtagcaagcgccgcacgtgacgccgccatgtcaaggcgctggatgggatgattggctggaaactaattccggatgtctcttggtctgcctgtggtaccgactgttaactgcgccaacaatacgggcgccaagaacctgtacatcatctccttgaatggcatcaagggaaggctcaaccacctgccgtccgcttgcttcagccacatggtcatggccaccatcaataatgggaatcccgacctcacgaataaggtcatgccagcggtcatcgtgctccagcgcaggccatggcaccaaaaggacgatgtcctcatgtacttcgaatataatgctgcgggtgattgtgaat

SEQ ID NO: 441965 - DNA, 324 bp, Triticum aestivum
gacggcccatttcagggttcatcttaccgcagcgctttgcatgcgccccacgggactccgccatgtcgaggcactattacgggattatctgcggggaacagattcccgctgtcgcctggtctgcccgtggcagctaccgtcaactgcgccgacaacactggctccattaacctgttcatcatctccgtgaatggcatcgacggaaggctcaatcacctgcccttgggctgcgtcagtgacatggtcatcgtgaccatcaacaatggcaatcccgacctcacgaaaagggtcatgcccaccatcatcgttctccagccacaagcc

SEQ ID NO: 441966 - DNA, 423 bp, Triticum aestivum
ggtcgacaggacaagaaattgacttacatatcactgatagaaaaggagtcgagaaccccgtagctgataacttgtctaggttagaaaatattcttgacgatccacaacctattaatgatagttttcctgatgagcaattagccgcaattaatgtttctcataacacttgcagcgacccgacctcggacggtcaagtctctgtccttaagtgtcatccctggatcggtatgctgacacacacagtactcgaggatttataacagaggtaaatcacatgtataaactaacgtaaatactattacctcaatccaaatagcggaaataacaacaaggttgtggattcccatcaacaccaacggcaaggttgagtgtggaaatcgtaaccttaatgtatcatttactcgtcataagaatcctgcaaca

SEQ ID NO: 441967 - DNA, 247 bp, Triticum aestivum
cccaggaaagactggcacacagaggttaacgccgttgtaaacttggaacatcgctatgcaaacgtactctttatggaaacagacgaagagctcgatgctcttccttgtcaccatccagcagcatctgtcatatctctcactcatgactatcttcaagacatgtcaaatcctacaactcattaatacctgttgtagcacccatgccataccatgttcaaattcaggataggcaacgtgactctcattc

SEQ ID NO: 441968 - DNA, 402 bp, Triticum aestivum
aatcctgaacacggaggacgtgtacgaggcatggggcacattccgtggaaaatagggttcccccagaacgatgacctgtacggttacagaagccggaagagaaagatggatcgggaagcagatgttgtggcgcggttggcatcggaaatggatgtgatgaagaaaaccgtgagtgtactagtagccgaacgagatgcagctcgggcgcagcatgaagatcatccagcggatctcagaagccagcagcggagaagcagtgtggcttccacggaggccccaccggctggtgcagatgcaccgacgatcgaaattactgcaccggagcctctggtggtcgaaattactgcaccggagcctcctcgctaccccgtggacgatataaaggagatgaaagaatgtcat

SEQ ID NO: 441969 - DNA, 404 bp, Triticum aestivum
gcagatggtgttcgtgggcgggccgaccaagccgctggagctgccggcgttcgccatcgtgccgggagggaagggcatcgccgggaactgcgtcggcggcatgagggactgccaggccatgttggaattcgcggcaaagcacggcatcaccgcggaggtggaggtgatcaagatggactacgtcaacacggcgctcgagcggctcgcgaagaacgacgtccgctaccgcttcgtcatcgacatcgcaggcagcctcggctcaacctcgtgagctggaatagccaccttgttgatggttgcgttagtttgcttcggcgaacgcgtgcagatttagagcttttagtaactgtacccgttgagtaaattgcaaaaaaacattataattggcgaccctaattcaaaaa

SEQ ID NO: 441970 - DNA, 340 bp, Triticum aestivum
ctaatatgaaatacgaaaatatggctgtcaaaattttcaagctactagagtacctcaccttacgttgagagagcgacagcttctttcagcgtctctgccgaatgaaggattttgcttgccttgagaaattgtctgcctatcacaggatcatgcataaggtctatgtgatacttagatgtatttgtcaagtgttctaaaatgctgtccttgtgcctaaattcacgtctgtcacggtcagcatcatcgcaggtctcaatggctaactacgggcatcaagcgaaaccacctgtttgaaggcatcctaagtttacttctgtgaacccttacatatgtacctgtt

SEQ ID NO: 441971 - DNA, 275 bp, Triticum aestivum
agaagggtactagggtacctagggtttatgacgtctcgttgtttttgcaagctagcatgtgactccgggatgcctgttttaagatttcgcttgtgttgaaagatattattatttactgcttgtagcctacctgagataccatcatattttgctgattatggaactacttttatcctgcttaaaacaaaagtattaaaaaaaaagtaacttaaaaatcaaatcaaatccaacaaagcaaaaaacataaaaatcacaaaaaagtaactaagggacgt

SEQ ID NO: 441972 - DNA, 395 bp, Triticum aestivum
gcgggggcggactgcaactcgatccacgagcaggggccgtgctacaaccccaacaacgtcgtctcgcactgctcctgggcggccaccagctacttccagaagaagagggccatgggcgccacctgcgacttcggcggcaccgccctcgtcgtctccaccgacccaagttcttcaggctgctcctacccctcaagtgcaagtgctgctggaacatcaacgaccccgaccgggactgggactgggatcggaggcacaacagggggaaccccaggcaccttcacgcccggtgccggcactagcaccggtggcatgggaggaaccggcacggggacggacaccaccaccgggttcggcggcctgggtccaacaggcacgagcaacatggacacggcagc

SEQ ID NO: 441973 - DNA, 410 bp, Triticum aestivum
ccataagatttacttgataggtgagtgaacaagtatggtaccaattccactattctttcatttcacattgagtgaaaagggatacatcctcaactttgggaaaatgtaacttggtattgtttatctcatttcctactcatctttgctcgagtcttgtgatggatagacaaagcacacctccttcggtctacaacaacaacgacaagttcgatgccatgaaatacaacttggacgccaaaatggatgctcaattggaggagatcaaagccctcatcaaggcctacaagcggtcttcctcatcttcgagaagacgctcaagtgcacatacttccgagctaccatctctggctagatcacattggcattaacaccaccaccgacaagaacatgaaggtcaacagctcaacagc

SEQ ID NO: 441974 - DNA, 392 bp, Triticum aestivum
gggtcgacggctacggttgagacggggacactccggtttcgccgggaaagaaaggaaatgacaacgcgcaaagcatttccaataccaaggtgaatgcttctaaagttgagcaataggaaaccggttctgatcatgaatgcaagccaaaatctcataagacaagtccatctgccgccaaacccaagatttccaagagttaagaaaccaaacgatgaatatcatacaaacgacgaaaggaacataaggaatgaacttgatatcaacaaagatgaataaaaggctgctgtggtgaaggggggctattgtggtgaagaaggatagaaagttctattaaatgccatagcagttacatgatcctcatcctgaaacggatccagtgaagatattttatg

SEQ ID NO: 441975 - DNA, 415 bp, Triticum aestivum
ttgagcaaaaacatgattagatcatgtttattgcaatatggttattcatttaagtaagagaataatgcttattctgtttacataattaacaccttctatggtcatgcacccaatatgaatggtttattgaatctcggttgtagtgatacacatgttcataacgttgatgccaaaagatgaagagttgataatgatagtaccactttcttgtggcactgccgcttaggtcatattggtgtaaagcgcatgaggaatctccatgccgatggacttttgaagtcgcttgattttgaatcgcttgacacatgcgaaccatgcctcattggcaagatgactaaaaccccattctttggaacaatggaacgggcaagtgacttgttggaaatcatacatgctggtgtgtgcttgtcctgtg

SEQ ID NO: 441976 - DNA, 423 bp, Triticum aestivum
ttctagataagttggttattgtacgtacacagatatatggccctatcgagatgatccagatattagctattagagcacaagtggaggagattgaaattgatgaggacagtcttgcatttctaggggaggttgggcagcagacatctttgagacatgctattcagctgctgtcgcctgctagcgtagttgccaaggctaatgggagggagaagatctgcaaggctgatctcgaagaagtccgtggtctgtatttggacgcaaagtcctctgctcgtttgcttcaggaccagcaaggaagctacatcacctaaactaactcctgcacaagaattcccagctgtcggctcaagtgattggactgtcttcccctagcagatttggtaagcagccgcatagacttcatcaagtgtacaattggggcat

SEQ ID NO: 441977 - DNA, 439 bp, Triticum aestivum
cgggtcgacgggcataccgaagccatcatgcttgttgtgagaagctccggtttgtgagaagtatatacccattaatgggacaaagaatttaccacggcattttgatgccgctccatgagatcatgccaagtttcatgaatttcagacgagttttgaattcaccagaatgtaaaaactaggcattccaatgttttgctggcaatcaacggtaccctggtgttggagattcattcccagttcttgcagttgatgtcaacatggatgaaaggaaaggtggttgggttgttcgggcgatttttgtgaaggaaggagagaagttgttttaattgccagggcagaaacattattctcctcctgaaagggatccattgaggatattttatgaatcgctctatgagcaagtgtccaatagtgaaattggtgcattttgggttgaggg

SEQ ID NO: 441978 - DNA, 422 bp, Triticum aestivum
gaaaagaaactgaaaacattgaacaacaaagaggacagtcgatgctaaccgacgtaaaacacaatagccgcagagcaaaggataagacgatcgacggaggagaggaggtggagaaacaacatccggacatgaagccaggaccgacacgaggggcggcgccggatgaaacaagacagacggtgatggcgcgaggggggaggggaggaagacagaccgggggaacaaaagaaaagatacattataaaacctgaaatgtttaaggactaaagtgtaaaaggaaaaataataaacagagaaaatttggtttaggcaaataaacagagaaagttttttttttgagacaaataaacagagaaagtgaaaactttttttttgaagctaagaaactgagaactggaaacaggaaaacacgcggccgctct

SEQ ID NO: 441979 - DNA, 71 bp, Triticum aestivum
ccacattaaatgcaagggcttaccggcttatgctggatcagagtgcgtcaaacgatgtcttgaagaggagg

SEQ ID NO: 441980 - DNA, 284 bp, Triticum aestivum
cgtagtggatgtggattggatagacacttgtgtcgaggtttgcatgtctcgtagcattcacgtatgatgaccgttgtgtggcaaatttgaagcatggggtgtttcgctcaatgacatccatactaatgtacgtctgcgaccaacgatagacctcttctatcaagtccatcacctaagggcatgcgtagtagtacttttcttccatggctaagaaaattttgcaattactaaacgaattctttatgacaaatatgactctatcggtaactggcatatttaccatt

SEQ ID NO: 441981 - DNA, 444 bp, Triticum aestivum
cgggtcgacggggatcaagagaccgcgtgggaggccgagaaaggagagaccgccagaagaaatgtctacagaaactggagatgcaatgcctgctcctgaaactggagatgcagcgcctgatgaaaatggagcagcaatgcctggtgaagctggagatgcttctccaactggattcaagaaactgcgtgggaggccgagaaaggagagaccaccagcatcaatctctgctgaaactgaagatgcaacccctgctgaggctggtgatgcaaggcctgctgaaactggagcagcaacgcctgctgaagctggaaatgctgcatcgacaggtatcaagagaccgcttggaaggcctagaaaggtgaagaagcttgggaagccaagaaaggagaagccggaagcagcaatatctggtgaaaacggagatgatgctgcagcagctatatt

SEQ ID NO: 441982 - DNA, 401 bp, Triticum aestivum
  unsure (1)..(401): unsure at all n locations
cgggccnacgggccggaccaccatgaggtctatcgtggatcatctgtggccggaaaggccaaagtcgaacaactattttagccttggtgcaacagttccttggtgtggtgccacgttttaatgcgaagaagaggtcggcgtgcatagaaggctcgcggatggcccttgcccgtgtcaaaacatactgggtggagatggatgccaccactgtcgcggtgtanggttcgaccataggccgagtggcagccgagcactattttgaagaagttcttgaaggcgctccttcgatagaggcccaatgctcgaagaatgttatgtttgagtgacatgtaatcccattgtaacgttttagtgaatttatcaaagctgtatttatactttttcccgaaagtattgtgatg

SEQ ID NO: 441983 - DNA, 310 bp, Triticum aestivum
cgggaatgatgaatacggtagcaatagcacttgcaagaatacatgctgggaagctggcaaggcggcaagggagaagttaaagaagaaagtagctacatataaaagtggtgtcgttattcggaatcaggaagttgacaaggccaaattggcaattgctaaagatgaagcagagttaacaaaactaaagggtgaagagaagatactccaggggcttgtcgacaagctcaaagagcaaaagagattaatagaaaaggcagaggaagaggagcgcctaataaaagaaagacacagagatggaaatgaaacaaaa

SEQ ID NO: 441984 - DNA, 176 bp, Triticum aestivum
tccgggtcgacgggtaatcaaaaaaagtgtgatgatcatcattattagagcattgcccaaataaaaaaacaacgaaaggccaaaagaaaaaagaaaggcccaaagcaaagaatcataaaagataatagagataaatgaaaagaaagaaaaataaatattaaaaagtacaatctaaa

SEQ ID NO: 441985 - DNA, 393 bp, Triticum aestivum
gtttgccagcaggcggcgagctaagtggttaccaccacaataggcggtgccatgcatagacgcggaggagcttgtgtaggtgtgaatggggaccggaggggtggcgggcggggtgagggtttttatgatgtggggatggtgagagttttctttttttctttttgaattgggtggtgagggttttctgtcccacaaagaatttcagaggcaacaatttgctagagccaaccatgtgtggttgacgtaacaggcaaaatgaaagtcattgcacatagttccaattttgggaatcgtgtgtgattgacgtactaccttcgtcctggtttattggtcccctttgtaatttgtagcagattttgaccaaatatttaactaagagatgtttatgcatgt

SEQ ID NO: 441986 - DNA, 110 bp, Triticum aestivum
  unsure (1)..(110): unsure at all n locations
ggnnnnnnngnaactgttacgcttgccggtgccggtccaagaattcacgggtcgacgggtacggctgcgagaagacgacagaagtcggcaaaacggatccgtaacttcgg

SEQ ID NO: 441987 - DNA, 297 bp, Triticum aestivum
ccaggtgacatgtgatctgctgaataatgaagttttgttctttttctgaggaagagagataagttagtgtcagggtgagttctttgcttgtagtaggaagtaaggtctgttcttgcagagcttgaagctggttgaatagatgaaagctgagctcctagtgttagcaaggaatgttttggcaaggctttgtgtcagagtcaatttgtttccatgtaacactttgttgttcaatcggttaccttaagtgggaatggattattgtgtcaagaaagtggtgaagagaatattgggtaccca

SEQ ID NO: 441988 - DNA, 373 bp, Triticum aestivum
aggagggcaaggagcccaagtctcccaagaaggccgccaagtcccccaagaaggccaccaaggcttagaaacacgcatatgttgctgtaggctgtttaatgcttcgtaactgtggtcgttgttctgctaatggtgtcgatgtaatctttgttgctaagagaaatgtcagaaatctctctgattaaaaaaaaaaaaaaaaaaaaaaaaaaaaaaaaaaaaaaaaaaaaaaaaaaaaaaaaaaaaaaaaaaaaaaaaaaaaaagaaaaaaaaaaaaaaaaaaaaaaaaaaaaaaggggccgctcaaaaggttcaaaccttacttacccttgaatgcaatttcaaaccccttcaaaagggtcaccaaaattcaatt

SEQ ID NO: 441989 - DNA, 338 bp, Triticum aestivum
gagatgcaaccgcttcacttctcccagatagatgaaaggttcgcccatggctccatcacagcccaactctggcctcttcgggggcatcaacatcggctcacgtcggcaccatagcgcgagctgccgccgcgcccgtccgaccgcatagcgaaaggtaccaaaacggtgcatttcgtcatgaacttgatcaggtaggtatctgggattgctccgtatgataatcctatcactgatcttctcaacgttggcaatgacaatcctgccctgacagtggcgaagcgattattgggtaaccacaagatggcgatcaagaagagataggagatgatcagtgtcct

SEQ ID NO: 441990 - DNA, 438 bp, Triticum aestivum
gggccgacgggctggcatgatcgctgcctccttctcctgcgaaccggccttctgtccaccacgacgcgacggcttgcgctccgcagccttggaaaaccccttctctccaccacgacgcgtcggcatggtcgccgccacctcctccgacgaaccggccgagaaagaaggcccctttcgaaccctagcttccgactcggggcgattcagactggggaggagacgacgccgcgtcttccatctatagggagcgaagcctagtcggtgtcggctcgctcttgggctccaactaggcttctcgtgccacgccggccaggtaagcgcccgatgcggcccggccagcccagcacccagacgcacgattccatcctctcgcctgaagagacgttgtaatgggccagcccagtagcactttttgttcagctcattttttttgtccgc

SEQ ID NO: 441991 - DNA, 418 bp, Triticum aestivum
gggctcttatcctactcaggggtgtctgcagatgatcaacacggcgatatccgcggccatggaggcgtggatgtgcgccacagtgcgcccctagggaaggcctcaaggtgggctggcccatgtactgtatcactctcagcccatgcgcccagtaggatttagtattttcacttttcttttctattttcttttctagcctctgttttgcgtttagttggggtactaaatgaatttttccaggggtggaacttggcacataattccattgcagtattttggtgttgtacaaaaagtctcagagcatttggagttgtataagcattttcaaaaattgaaattgttggttaaaatggttgctgatccactgtttaatttttaagggcactttaacaacttaaataatgttgggttcttcata

SEQ ID NO: 441992 - DNA, 438 bp, Triticum aestivum
ggtcgacggcacatcatgtgacagagaacaaagttaatcttgtcgagaaagtgaatcccaaagttgagctatttgctcaagcacgtgattgccttctcccaatgggccttacctccgagaatgttgcacagcggtttggcataacacgcatggagcaagatcaagctgctgttgagtctcacaggaaggcagcggcggcagttgctgctggtaaatttaaagaagaaatagttccagttaatacaaagatcgtggatccaaaaactggtgaagaaaaggagattgtggtctcagcagatgatggaatccggtcgaataccacactggcagtcctgtcaaaacttaaaccagcattttccaaggacgggaccactactgctggaaatgctagccaagtaagtgatggagctggatctgtcccactaatgaggcgagatg

SEQ ID NO: 441993 - DNA, 395 bp, Triticum aestivum
gacgacgtggagtccagcgcggggcccgagagcgaccaccccgacgccctatagcgcttgctgcgcttcgccttgagcgggactacggcttcaccaaactcacggccttcagccacgcctcgcttctcttcgagtacaagatgaccagtgatggcgaagtgtatgacaacttcaccatccacagggactaccgcgacgtgctcggctgcgtgcacgacagttgcttccccaccacactcgctacgtgactgtcgagccgccatggagccaaccagcggctaataaagggagttggccctgtattttcatgtagtttcatggtgtgcgcatgttgtggtctctgttcttcgcagtctgttgcgctagactgtggaggttttctgtcactgttgctg

SEQ ID NO: 441994 - DNA, 413 bp, Triticum aestivum
gtcgacggcacatcatatatttaaagaacgtcgaacgtgtatctgaaaaatgtttgacgtctgctctaaaaatgcatattttataccgagaaatagtgataaaacagcacacctatatcaacaaacgatccaatcagataaccagagaaacaaacagtaaggaaacaaggataatcaaagtatagcatacagaagatgaaaacaaatgttcacatcgattaaattgatttgtagttccattaaaatttgcatgtgacatttttggaaacaatcacatgtttccaaacaaatccatgaagaaattcaagtagattttcacaaagaatacaaatgttcctgtagtttttgtcttaaagattgattacttccattagcatataaaacttatgtttgggaaatgttgccatgtatgc

SEQ ID NO: 441995 - DNA, 72 bp, Triticum aestivum
cagatcacaaacggaagggacttggggaaaaggcctacggattttgacacaacagctctagaaatgcatact

SEQ ID NO: 441996 - DNA, 399 bp, Triticum aestivum
  unsure (1)..(399): unsure at all n locations
ggtcgacatgaagaacatcagcaggacatggccaagctgagcgaggacatgaagaagctgaaatccgagtccgaagatcaccagaggaaagcgtccgatgcagaggcccatgtcaatgccctgcagaagcaatctgaagagctgctcctcgagtacgaccggctgctggaggacaaccagatcctgcagtcccagcttcactacaaaggctgaactggttgacccgcggcatgtagctatctcgaactcgaagcgctcatcgccaaggctcttgatgtggtccttggctttcattcccctctctaacttatggtgatatggatggatgtactctgtgctctgtantttgttttgaagcactgaaaagtcagggatggtgagatggatatgggagaaaga

SEQ ID NO: 441997 - DNA, 426 bp, Triticum aestivum
tccgggtcgacgggacccaatattagttttgttctttactttttgttcttgtttagtaataaataatttatctaccctatgttattattgtgtttttatgttttaattagtgtttgtgccaagtaaagcctttaggatcttcttgggtgattattgtttgatcttgctgataaaaacagaaagtatgcgctctcaaaaataattttcattttttaccagagagcgataaaataccaattccaactgcagtagatcaatatacaaattatttaggtccttctaatttttttataatttttggagttacagaagtattcgaaacctccagatttctacagactattatgttttgacagattctgtttttcgtgtgttgtttatttattttgatgaatctataagtagtatctggggtatgaaacatag

SEQ ID NO: 441998 - DNA, 427 bp, Triticum aestivum
ctcgcgcgtcgacacacgcatctagttcgttcagaataaaaatcagaatgaagctgttcatccttgccgctgcccttattgtggccacaagtgccaatctaggtgccttcgaaaaatggaccagttttaaggcaacccataacaaatcttacaacgttattgaagacaaacttcgtttcgctgttttccaagacaacctcaaaaaaatcgaggaacacaatgctaaatacgaaagtggagaagaaacctactacttggctgttaacaaattcgccgattggtccagcgctgaattccaagctatgttggcccgtcagatggctaacaagcccaaacaatcctttattgcaaaacacgtagccgatcccaatgtccaagctgtagaagaagttgattggagagatagtgccgttttgggagtcaaaga

SEQ ID NO: 441999 - DNA, 328 bp, Triticum aestivum
acgaatctacccagacttctgccaacgcgtccgcccacgcgtccgcccacgcgtccgtgtgcgtgtcatccagcgtgcggggagctgatctgactcttaccctgttttatgaaggaaggtgccctgcttgtcatgaatttattctaacacagctatatccttcatacgctaaattaacagatagcttaaaattggacctagtgccctttggatggagtgaatcttcacgtagcgcaaatggaagagtatcatttacttgccagcatggtgatgaggaatgttatattaacagaatacatgcttgtgttcttgatcaaaatccaacctc

SEQ ID NO: 442000 - DNA, 428 bp, Triticum aestivum
acacatcaaaagtactccagtgtatagagccttgcctccttgcctctaaggtaggccccacatggtttgcctccttttttaatttaacataacgcgtcaagtcacaatttgtttgttcacccgtggtagacaatcctccctccaccaagtggacaaccagtacacgtgcgaaattaccacgtgggctgcctttttcgtacagaaatgagctccaccgtgtacacgcgcgggtgtggttgggaaagaaacgggtgtacgtgtgccgtgcgtgcacctcttctcttcgtgcacgtcccccatctacgtgggtgtgtgtgagagagatacaaacctagacataatgcgccgtccatccccatgcctccgcccagtccgaccaccagtcaccaccacgccccactcctcctcaccttatctctcatctttct

SEQ ID NO: 442001 - DNA, 329 bp, Triticum aestivum
caaagattattaattcgaatgtgaagtctgaggccctttaccgttgatttgctcttgcaattaaattggatctgccatttcccctgttttgctcgactagccgacaaataagcaaacctgtatcataacctgaaagccaggtgccatgtttttgtgcctgtgctccatctgttgtactagcatgctccagggtaaaggtttacggcatgtttttgcgattattaaaatgttttcgactctgatggcatcgtgaacataatactggctgtggagttacaatttccctgtcaatacaaaaactcctgggtatgtgtaacacagatacaaac

SEQ ID NO: 442002 - DNA, 420 bp, Triticum aestivum
gggtccgacgggatcatccaaaagtatcggtacagacacctctgaagtatattggaattgacgtttggcaggtaaaatccggctcagtatttgacaacattctcatttgctatgacccggaatatgcataacacgttgccgatgaaacatggtgtgcaaataaggaagctgaaaacgaagcttttgaagaagctgaaaaggatacgaaagctagagaagataaggaagctcaacaagcaagggatgaacgatagcgacggacgagagagaggggtgatcgacaccgtggtatggaccattacaaggacagatacaaaatacgcaacagagatcactgggatgactaccatgatgagctttgaagccccccaaaatcttcaattcttccaaggagaaactgggttttgacacagacattgt

SEQ ID NO: 442003 - DNA, 390 bp, Triticum aestivum
caaagattattaattctattgtctaacttcatttcgttttagactaagttctaaattagaactgagccaaaagacaaagtgcacgtgagggtgcacatataccaggtcatgtcaacttgctttggttttgggggtcgtcaggtcaacttgctaacttagacggcttgcctaccttcctatttttatcttctgagtatctacctaatcctgtttgaaggcgattaattagaagcctctatttatttaaggacaccaatatcaatctgacatcagatttaggaggggactccttaaaattaggctttcacctcattttataaataaatcaatcatcaggtacaggatcaccgagataaccaaatctgctagggcatcagcacaagcacaccc

SEQ ID NO: 442004 - DNA, 426 bp, Triticum aestivum
gtgtgatgatctaactgtggaaattgagcatgtggatgctgtggcacttgagaagcttgaaaaacagggtgttgtttgtgaacccaaagcctctaccatcgcgattattcaggacaagtacaggcagaaaggccatttctcaaaatttggaattccgatagctgactttgttgaagttgatactttaagtagcatagagaatgctggggaaatgtttggctatcccttaatggttaaaagcaaaagattggcatatgatggtcgtgggaatgctgttgcccaaaataaagaagagctatcctccggtgtttcttcactgggtggattttagcatggcctgtatgttgagcggtggacaccttttgcgaaggagctatctgtaattgtggcaaggagcagagatggttgtacagtctgttatcctgt

SEQ ID NO: 442005 - DNA, 410 bp, Triticum aestivum
cgccggtcgacgctccttactgcggagatgctccatgatgacgaatctacagaagctgtcaaggatggatcaggcagtgttgagttttccgtccttgttgcggatggttcaggttgtcatccttccgttgaggatgttcaagatgagagaatcacagtgactgatgatgtacgaggggatgtagagttgatcccactgatgaatacgaacagaacagttgggtgatcatctttttcgtaagagggttgattcatgattcatttacgccacgatcatctgattatacgcgtcggtagctgttgctaggaatgtacataagttcttaccgcctgtttagctgtagtttgtagacgttaaatcaactgattagcaactgaagcatacattttcttcgttctttcgtttttgcg

SEQ ID NO: 442006 - DNA, 348 bp, Triticum aestivum
agagcgatatataacttgccaaatttcgattcccagactccagatctagcctcatggtttgttctgctgctcctgaaatcgatggcggtccgcctctccgacatcctcctccacggagagccgcccaagcaacgtgatgcattttcttctcccatgaacgcttcaccaagtagcagcacatggagttggtcgcattaagaggaggagcaagattgggatgactcgggcgactatttcctcccctgatctctaatgtctagggcccagatacgcggttgttcatcccacatcttgatgccatttgctttcctgcgaatcttcaagtgtcactgttagattttgatgggt

SEQ ID NO: 442007 - DNA, 414 bp, Triticum aestivum
  unsure (1)..(414): unsure at all n locations
gggtcgacgcgacacatgtgctgactgaggaatcagaaagggaggcgatgtgcgaggatgacggaaagaaaaaagttgagccggatgattgggaggatgcagcagacatgtctactccaaagctggaaagttcggactctggaaaccaggctagtgcagttcaactgccagattctgatatgactgaagctaatggccgaaagaaatattctcgtgattttctgctaacttttgcacatcagtattctagtcttcctgttggcatccagatggatactgtcactagtacgctattcaaagatttggcaggaaaatcctatgttattgatcgggaacctcacccaagttctgcaaggggatctgatnagacaacatctcgtggtgatcgccgtggtcctgctatggatgatgata

SEQ ID NO: 442008 - DNA, 438 bp, Triticum aestivum
ggcagatgcaataaactggcgaatgaagaaatcctgagtattgaagcttttgccattgagaatgtggaagaccaatgtcttcattgcaccgtcgagctttgctgatgaggaatgccctttgatgggcactagagttcgccttatgatatgatagatggtgcggggtagatactctaggtcttcaacaaagaattcctttggatattcagcgtcacgtggcagtggcttcatcatgctcagtatttggctcatgttgagctcagccttctgaaagatgctttccacaacatcgcggtgaagctgacaaccaggttcgtacagttcgcctggagtggatatgccggtaagctcaatgagatcaaaggctttggcttcatgatgaacattgcctgtgatccactcaaggacccatgtcgttgtatccctattgtagccgcg

SEQ ID NO: 442009 - DNA, 376 bp, Triticum aestivum
ggaaagggcaaaaattataaaaacaactgaataccacaagattataacacaggaaccaaattacaatttaccgaattccggtttcgggaaacacaatatcatccaggcaaaaaatttaacgcaaagtttgcgatgtaacgcaccaaagtcaggagcggctaccataagaagcatatataccatgtctggttcatacttcagcacatctaaaatacttccactcgccacacgcattgtgcagcagatgcaatgcctggttcctacttcatcaaatccaataaacttcgactgctccggagtgaataagctgctctccactatcgaaaaacggtcctcgcatgacaaatcacttccttgtttaaaactccatgctttg

SEQ ID NO: 442010 - DNA, 428 bp, Triticum aestivum
ttccacccaagagatatccatcatctcatcgaaagatgggacagctttgcctctatcaagtggtatcagatttccaggttgctcggtgagattttacagtttttcgtagtttagatcgagtctgttcttcatacctatagtccacgaaaaagccaaaataaaattagggttagttcatcccatccgaaccaatctgagccttgcataatcttttctgtatttgctttgtcgaatttgcggttgcatcgtcgtgtccagttgctggtcttagcgtctagtcttttagagtttcgagttctgttcacaggttgtcacgtcgccgctaccatataccaccaccacatattcaccgccaatccgaatccatatacgccaccacatatccgccgccatcacgccaatccgagttcacctgcaacatatatccg

SEQ ID NO: 442011 - DNA, 478 bp, Triticum aestivum
  unsure (1)..(478): unsure at all n locations
cttntctgccnggncggcnnaaacaaaacatcccgggccgacccacgcgtccnatttattttaaaataataaaatattttttagtaaaagtaaagaaaaattttatttaatgatagttaattagtattgtgagagaatattttatttttataaaagaaaaatttattttttgtaccttgtgtatcagggattattaattaataattatatatttattattttcgaatttaaaagagctaaaaaattaaaatttttattgtaaaataaatattttaaataatttttttgtaatgaaatgttattcgtttttaaatatatctaattttttaagaaataaattaaatttatttattaacaatatatttataattaaatatttttatattattaatattaaatatttttagggatgagcttaaaaataaaattttattaaaatttaanttttaaataaaaattntgngtanaaatttccnat

SEQ ID NO: 442012 - DNA, 405 bp, Triticum aestivum
  unsure (1)..(405): unsure at all n locations
cnaaaccntgnactcgcgggccgacncacgcntcnaatcantnnctanntattagaccatgacctttattaggagcttttagagcaatattaacaatattaggaataattaaatgatttcatttatataataataatttactaataattggattattaattacaagattaattatagatcaatgatgacgagatattgtacgagaaggaacttatcaaggccttcatactttagtagttactaaaggtttacgttgaggaataattttatttattacttcagaagtattattttttatatcatttttttgaggattttttcatagatcattagcaccaactattgaattaggaatactttgacctccnaaaggggatcnagccnttncccnntntgnancccctt

SEQ ID NO: 442013 - DNA, 392 bp, Triticum aestivum
ctcgcgggtcgatacacgcgtctatacagacaccactgaccctgtgaagtacccttcgattatggccgagggacaactattgctgtcagatataattgacgaatcaaacgaaataattaaatcagaaaatgttatgtcgatggaaaggttacctataaataacaattctggtcaaagttacggctatattgtctatagacagtataatctgtatctggcagccaattctgtactaacaatatctggatacgtgagagatacagtacttgttttattaaatggagagctggtatcacctgcacctgtcaacgaaaagagcatcgaaggattcggcttctggaagctctacaactctaccctaagtctacgcaataaagaacttcaaaacgcta

SEQ ID NO: 442014 - DNA, 417 bp, Triticum aestivum
ggtgcatcggaggataagtcgcgttgcggtggaagagaaggtcgcctgagcggccccggcatagaggacgacggctctgatgaagcatgagtacatgatgcaatgctattggtccgtcggcgtaggtgatagacgtcgatctctatcagtggacgacgcgagtcttggtaggtgctcccgtatgctggaagacagtggtcatggatgtagtataagactgttgctatcggtgatgtgtctagtgaaggctggtgtcaccatcgagtgttctaacactgactgtgtacgaatgggaaaatggacggagatgtctggggaaccatgtttttgggacgccactgtcagagatatgggaaagttacgaacttatacgccgtctataatttgggcatcacgtcggttgtggctcgcatcatg

SEQ ID NO: 442015 - DNA, 411 bp, Triticum aestivum
accggtctatcacattcagagccgtatgtattttgcaaaattttctatgtctacaattctctgtacggagctactctagctaattgctcccactttcaatatgtatccagattgagacttacagtcatctggatctgtgtcaaaacttgtatcgacgtaaccctttacgacgaacctcttgtcacctccataatcgagaaacatatccttattctactaaggatatttttgaccaatgcccagtgatctactcctagatcactattggtagagtatacaataggtctggtccatagcatggcatccatggatcctatctcagatttcatggcctctagccatttcgcggaatctgggctcatcatagcttcttcatagttcgtaggtttatcatggtctagtaacatgact

SEQ ID NO: 442016 - DNA, 75 bp, Triticum aestivum
atggcgaaggggtggcctgagaagctgaagcatgagctgcacgagcacgagctcttgctgatccgccgccccagg

SEQ ID NO: 442017 - DNA, 409 bp, Triticum aestivum
  unsure (1)..(409): unsure at all n locations
gatagggagccttgatgcatacagttgtccctctataaccgtttccgataactcgaatatcgcaaacgcttcatccttgctactcatttgtgctcgcattgccatcgcagtcagagttttctggttctgcctaaaaccaggcagattctaggcacgggagctttccaggcagattctaggcagattccaggcatggaagatttacgatgtctggcacatcacaaacagttcatgattataaaccgtatacgataggtagacaatcacacacatttagttttcccgcaccgtatgtgatagtgtctgacatcacacacgctttgcgaacggcaactgtgtgcatgcttgcacacgtttcctctctgtgaaccgtctcggattatgggtgtatacgcanaaattttgtgtt

SEQ ID NO: 442018 - DNA, 428 bp, Triticum aestivum
  unsure (1)..(428): unsure at all n locations
gnnnctngggcgnaatctttattatcganttgaactctccaataaaattacgctgttatccctaaggtaatttattcttataatcaaaaaaattggatcaaaaaattattaattaatataatantatanaaaaagttaaatttattttttaatcaccccaattaantaaatttattatataaataaatttaatactaaaaanacttattaataattttanaaaactctatagggtcttctcgtcttttaaaaaaatttaagctttttaacttaaaaataaaattctttataaattaaataaagacagtttttttttcatccaacccttcattccagctttcaataaaaaaactaatgattatgcnaccttagcacgggncaaaataccgcggncattcacnttnatcantgggnagggggganttttt

SEQ ID NO: 442019 - DNA, 428 bp, Triticum aestivum
acaagagtctacactgacgtcgtactagcgcctggtgttacatcccaagtagtgttccttttattctaagtttaatttcgaacagttgcatttactttatttccaaacaatcaaaatgggtaaagaaaagattcatattaacatcgttgtcattggacacgtagattctggtaaatctactactactggacatttaatttacaaatgtggtggtatcgacaaacgtaccatcgaaaagttcgaaaaagaagcccaagaaatgggtaaaggttcattcaaatatgcctgggtactcgacaaacttaaggccgagagagaacgtggtattaccattgatattgctttgtggaaattcgaaacagctaaatactatgtaaccatcattgatgcccctggacacagagatttcattaagaacatgatcactg

SEQ ID NO: 442020 - DNA, 433 bp, Triticum aestivum
gggtcgacgggtactactcattattccttcatccatcgtaagataacccaaaacttgaaaacttcaatcacataaaactcaacaaaaccttcgtgagatccattagtataagaaaataaatcactactataagtgttgtatcataccaattcatattttattcttgcattatatcaactgtattccaacttttctatggcaaaaactcatcaaagaaaaccatagagccatcaaaacatgcacacaacgcaaataaaacatgtcaaaaacagaacagtctgtagtaatctgggtgtttctaatacttatgtaactccaacaactctgaaaatttaggacggcctgagcaatttgcatattgatctactgcaaaatgaatggttattttatcgctctctggttaaaaatgagaattattttcatgaacataaaa

SEQ ID NO: 442021 - DNA, 313 bp, Triticum aestivum
cggtcgactatccgggtccgacggccgtttcaaggattttatgaagggaactatttggggtcgcgcggaagcaaaattacctagggttaattaatgctgctctatttccgcttgcaattcctttcgcttgttcgtttgtttctttaaggattttattatcaaggttgtaaggctgggaatgtgcagctaccttcaaattcaagcctgccgtctcccctgcttgtaaattgtaaaacaaaacgctgctctccagtgactgaaatattataagcagctactgtagtagtatttggcacaaaaaagtgaccgctac

SEQ ID NO: 442022 - DNA, 374 bp, Triticum aestivum
tcgcgcgtcgacgggacacaccgacgccgctgacaagaagaccgccgccgccgacaagaaggctgccgccgacgccgaggaggaggccgccgccgacgagtagacagggccaacttgcgtcgcgtagttctgcatctgagaggggagagaaagagagagagcatgggatcctgtatgtaatgcctggtctggagtccgaactggtggtagtctgtagcgtcgattgatcttgaatcaccgctgaattgaagctggaaaaaacaatgtaaagtcagccatgcctttatggatatgtgcatgcatgtggcttcaaaaagccgtgtgatctgctgttatgttagctacctcttccatggataggcacatcatagttc

SEQ ID NO: 442023 - DNA, 385 bp, Triticum aestivum
tcgacattcgccagcgggaaagcaacgagcgcgctttcctatttggggtcaatagtggcgcttatggtgaaggtaccaccagtgccatcctccttggcggacaccttcttagtctcaggtggagctgccattgccttcttacacttgccggtggagctcgatggtgcgtcctcgacggtagcgcagcactccaaggaggtgcgcttgccggagtaggcatcagggctcttaccggacttggtcttcttcttcccaagtgtcctccgttctgctgcagctgctgcttcccggtagatcttgtcggcacaaataagagcatccttcttgtcgccaaggacagatatgacacttattggccctggcattttcagtacgttgtacgcat

SEQ ID NO: 442024 - DNA, 433 bp, Triticum aestivum
  unsure (1)..(433): unsure at all n locations
gnatntcnaccgngaggcacnagtccncggactcgcgggccganncacgcntctacacatgangtcgnataatgttttattagttttgttcgctgcttgtttgtcacaagccaaaataaatcaagatatacatttcgattgggtgcagtataccggagaaataccagagaatgctataataggcggatcaactgctgatggtgatccaacgtatgtagcccgttcgttcctcagtgcagatgaagatgatgaaaattactctggaagtgactacaatggttatgtagctggtggtgtgttacctggaaaattgtcgatcgacctttgtactccgcagagtatatacacgctcacaaagaacattgagatactgactgtggncnangggacaaaaatccnatgggntaaancttatcancacacanttttnggg

SEQ ID NO: 442025 - DNA, 424 bp, Triticum aestivum
tacacgaatctacagtgattcgtgcaagtcttgttggaggattaggtcttactccttctggtaacatcggccttaacggtgctctatttgagtcggtgcatggtacagctcccgacatagctggtcaagacaaagccaaccccaccgccttgctcctttcagccgtcatgatgctgaggtatatgggccttaacaaccacgcgaccaaaatcgaaaacgcctgcttcgagaccatcaaggaagccaaatacctaacaggcgatcttggaggcaaagccaaatgttcagagttcacgaacagcatctgcgagaaaatagcataagtccctaaaggaaaaaacgtcgcagtgaccctcgttaaagaagatagacgttattgtgttgagtttaataatatttgtacataataagcacaacatttttt

SEQ ID NO: 442026 - DNA, 334 bp, Triticum aestivum
gagtcatattacggtagggttcatgaatgtggtgatggaagagaaactactagaattcccgaacataatttgtgtcgatgggacacatgggacaaataaaaaaggactggatttgacgattttgctggtgaaagacgatagaaatgctggattccctgttgcgttccttctgtcaaatagattggaccaacgaattcaagaagtttttttagatgccctcaagaataagatacagacagaagttaatgcggaatatttcatgagtgatgatgatcctaaatattataatgcatggaagaagataatgagacatgaaccaaagagactattatgt

SEQ ID NO: 442027 - DNA, 425 bp, Triticum aestivum
gggtcgacgggtatgtggaagagagagtaggagacaaacctacgagacacacacacacacagagagagagagagacagagagaggaagaagttaggtctgtcagaaagatggagacatgtaatatacgtgattctgtatacgtggaaggagaagagacaacatgtttgatgagagagctggaaaaacatggacgagaggggaaggatctcatgggttgagggattgacaattttgtgcggggggagagagggattggtaattttgtgcaagagagagagggtggggggaggagtcagtcagccatcgtcacatcaccctgcttccaaatgaccccgcattctctagcgcggtgtggtcgccgtctttgatctgctcgatgccctctttgaagattgatgtgttgtgcatgttgggggtcaaagaa

SEQ ID NO: 442028 - DNA, 393 bp, Triticum aestivum
cggatacttgcattattgaagggctagaggaggtcaccattcggatagatggaaacaactgtggctgtaataatacaactcagaaaaaaatgaattggaaagaaatacatcgcttatggaaacagattcgagttgcacgaagcggattgagcgttgacgcgcgcgctcgtgaaagagtcctttcgttagttttaacaaggatgacgggcaccaactaacagggagcagcacaaacgaccaatcagaactcgccaaatgaaccaacgctcgacctgcgtttcgaccttaatgggtttatagcctgaattatagcaatactgagttcgccgttgctcatttcagcctccatatttttccaccattgtgctcataacgattttggtggtccaaaat

SEQ ID NO: 442029 - DNA, 82 bp, Triticum aestivum
ctcgcgggtcgacgggggacgcgaaaatgagtcgtcagactgcaagaagcgtcctcgccaagatgatgtcgcggggccatcc

SEQ ID NO: 442030 - DNA, 433 bp, Triticum aestivum
attgaggaataaaaagaatcctactctccgatatatataatcctaagactcaaaaacattttgttctagactcaacaacgtcagcgattcgatcaagtagggggctcctaagtcagggatagctgtgataccaacttgtaacgcccacaatgcggctatatctcccatgtgtcggggcacagcttagaggcatagccacatggtagttttgtcgcaagaggggtaatattcacacaatcccatgtcctgaataagaaagggataaagagttggcttacaatcgccacttcacacaaatacaagttaaacatccatcatccagaatacaatcaagttccgactacggatccaaagtaaaagaagacaaccccaaatgctagattcctgatcgtcccaactgggctccactactgatcatcgggaaaagaaacat

SEQ ID NO: 442031 - DNA, 416 bp, Triticum aestivum
  unsure (1)..(416): unsure at all n locations
tactatttaaatagtacaaaacatttttaattacatcaatatttgttttacgttctataccatttttctaaaatgtcgcgtacattattttggaacacatgcacatttcttaatgtcatgatttttttggactgctaccaacatcatttataaattacacctttttttacactgttaaaaattcatgacgttttttaaagaagtaagtaaattattttttgtaatatatttatttataatattttcaaaagtaaaaaaataaagaggccaaaagttactggtgcatgtgtacctgcatgatcatgggcgcccatttanggcatccttgaggtgagacgtgctattgttactgttttttgagataccttaccaggcttgatgccgggagcacctatgtgccgcttactgcagaaatc

SEQ ID NO: 442032 - DNA, 453 bp, Triticum aestivum
  unsure (1)..(453): unsure at all n locations
acctacgnctcactctgggnncncgcgggcccntncacgnctcnaanagtnactcgnggtaatcctgctcagtacgtgaggaaccgcaggttcggacatttggttgacgcacttactcgagcgggtaatggtgcgaagctaccatccgtgggattatgcctgaacgcctctaaggccgtatcctttctagtcaaaggtggcaacgatatctcttggagttccgagagtcgaaaggctcaaaacaatgtgactttactaggcaatcgtagttcgctacgactgtcgcacgagcccttatttccgttgagattatcggtttacggtgggatcgatccttgccagtagaccagatctttagacggacgaacatgggtattataatcttttcgatgttggnactcggnantgtccgtngacgacttnngtncctggcaaggggttgttcccnngnga

SEQ ID NO: 442033 - DNA, 376 bp, Triticum aestivum
atacaagaatctataatggtgtcgtagtatcggagaaggtcctaacagtttagaataatgaaatatcttgcagtttttgtgatttttgcgtatttatacgcagctcatgctagtgtttatttagaagagaaattcagtgatgattcctgggaaaagaattggatatacagcatacacccagataaagaatttgggaaatttgttaggacagctggaaaattctttaatgatgacgaagaagataaaggtcttcagacatctgaagatgcacgtttctatgccttaagtagaaaattcaaatccttctccacagaaggtaaagatctagttatccaatttactgtgaaacacgaacaaaacattgtttgtggaggtg

SEQ ID NO: 442034 - DNA, 246 bp, Triticum aestivum
gagtcgtattaaaccgtcggttgcttctcatagattactattcatctgtttgaaattagtatgacattgaacttggaaatcatcatattctccatcacgtggagggtcggtgttaatatctagtgtaacaggtaattcataattcagtcgttttctgccgcattacagtcacaacatgagatcaatgtgtctcaggtgcccataaatcgccaagtgtaagtctccatagatcttccaggccgtttg

SEQ ID NO: 442035 - DNA, 74 bp, Triticum aestivum
aaggagatgatgactaagcttggctaagataaatgcgcctttgtgaattgaaaactgtaagcgtagtttaaact

SEQ ID NO: 442036 - DNA, 434 bp, Triticum aestivum
  unsure (1)..(434): unsure at all n locations
aaatatttatcaaagcaaatttcaagcaaagggaatgataaaaccatttgcaaaaagaggctattgatccgatcaaatggcgttaccatggtcggacacgaccaagcccccgataggcgtagctatggttcaagtcagccaggtccccaaatgaaacaatggcattatgccgatcaaaaggcgtgacaatggttcgggttcgaccaagcccccaagtgattctgtggccttaggccgatcaagaggcgtgactatggttcagacgtgaccacaagtccccaagtgatgcattggcattacgccgatcaagaggtgtagcaatggttcgggttcgaccanagcccccaagtgatgctgtggcactaagccgatcaagaagtgtgactatggttcagacgtgaccacaagtccccaagtgatgttgtggctttccg

SEQ ID NO: 442037 - DNA, 499 bp, Triticum aestivum
  unsure (1)..(499): unsure at all n locations
ggcgggcatctcntccgcgacgcaccgntcngtaactcgcgggccgacccacgcgtccaaaanntagtctaataacatattttaaaatattattatttttattttttataaattttttattaaaatataaatttaaattatttaaatttagtaatgatgataatattagtattaaaaaattgtatatttagtaaaaatatataggtttaataaaggaattcggcaacatttttttcacctgtttattaaaaacatgtctttttgtattaaatataaagtctcgcctgcccactgattaatttgaatggccgcggtattttgaccgtgctaaggtagcataatcattagtttttttattgaaagctggaatgaagggttggatgaaaaaaaaactgtccttaattaatttataaagaattttatttttaagttnaaaagccnnaaantttttntaaanacgcngagancccccnnagggtttttnaaannatttataaat

SEQ ID NO: 442038 - DNA, 253 bp, Triticum aestivum
gggtcgacggggtgactaaataaatcattctcacacacctcactacaagaattgtatgccatctaaactatgagaaccgattgtcgtgtcatctatttcatgtgacgcgcctgccactgcacagtggcgcggtccctcatctggggcaggaataacatgcttcatcatgtcaatgatccgcgtatccatctcgtaacttgtgtaggcgtccttggacgcacacttgacatgttgtttatccagtctctcatgc

SEQ ID NO: 442039 - DNA, 496 bp, Triticum aestivum
  unsure (1)..(496): unsure at all n locations
ggtcntcccgnaccgacgcgncnnncngnagcgggtccggcccacccacgcgtccaatttnaanctaataaaatattttttagtaaaagtaaagaaaaattttatttaatgatagttaattagtattgtgagagaatattttatttttataaaagaaaaatttattttttgtaccttgtgtatcagggattattaattaataattatatatttattattttcgaatttaaaagagctaaaaaattaaaatttttattgtaaaataaatattttaaataatttttttgtaatgaaatgttattcgtttttaaatatatctaattttttaagaaataaattaaatttatttattaacaatatatttataattaaatatttttatattattaatattaaatatttttagggatgagcttaaaaataaaattttattaaaatttaatttttaaataaaaattagggggtaaaaatttcncaattttaaanaagttnttat

SEQ ID NO: 442040 - DNA, 412 bp, Triticum aestivum
atacacgaatctagaaatcgtcgcagtaatagtaaaaaacaagcacaatggctcccaaacgtaataatatgattccaaatggccatttccacaaggattggcaacgattcgtcaagacttggtttaaccagcctgcccgtaaaattcgcagaaggaataatcgtattaagaaggctcgtgctattgcccctaggcctgctgctggacctttaaggcctgtcgtaaggtgtccatcaatcaggtaccatactaaagtacgcgctggacgtggatttaccctccaggaattaaaagctgcaggtcttaaccccagatttgcaaggactgttggtattgctgtagatcacagacgaagaaacaaatcagtagaatcaatccaactgaacgctcaacgtcttaaagaatacaaatc

SEQ ID NO: 442041 - DNA, 210 bp, Triticum aestivum
ccctcatctggggcaggacgaactcactacgttatgtcagcgatcttcgtatatatcccataacttgtataggagtccttggacgcacacttgacatgtggtttatccagtctctcatgcgatatattgtgacaagcattcttgtccttcgtgctcgtctacgctatcttcatgtctaaggggtagattatggtcgtagtcatgtccacc

SEQ ID NO: 442042 - DNA, 404 bp, Triticum aestivum
gggtcgaccggtcagaacgatgatgaagaagcctctctgctcaccattggcgctttccgtgggaagtgatagcaatggaagcggagctgtagctcttctgaaaattgcaaggatcttttcacaaatctattcaagccttaagaccagaagcaagtttaatcttctctttggattaacatctggctgaccctacaattaaaatggaactagcaagttcctagagcaatgatctctggatgcatgtatcaaagcctccagagaagccttacatcaagcaaatctttgaggatttttcggatgtctccaaggaaatgggcatttcagtcgcacaagattaatgtgtcaaattctagaaatttgtgtgctatagttgtatctacgaatcgcagactacatgctgaaca

SEQ ID NO: 442043 - DNA, 409 bp, Triticum aestivum
gtaggttgatgaagggatggcgaagcccctggtccagacgaggtgacggagcaggtcggtaaggagacgttgcaacttccatgtcagtcgaggtgttgaagtagttcggcgtgatggacatcggctcgaagaagcaatggtgcggccatgccgatgcaggtcacaactcgtgacgtggtcaatgccggcttgatgaagtgaccgtgcggcgatgccgatgtgcccgctccgtgtaatccgtggggcggcgaggttggtgatgatttatccttcgcgatgctaaaatcttgtttggcttgccgggatgatgatccgaagaagttgagctcggctcaacaaagcgacgatgtgtctagcgcaggtcggcagccgtggagcaacgttgtcgagctggtttgacaccggcgcg

SEQ ID NO: 442044 - DNA, 291 bp, Triticum aestivum
attcgcgcggtcgacgggtctgatgggattgtccgggtggaaagtccgcttgacatgaaaatagtagacctggtgattttgggtaaactagcaacgtgagatagctgttcacctgttaggtgttatctgaactgtcctaggccgcaaaattagaaggaaaaatacatgtttttggtcaacttagcaattttagatcgctctaaccggtcagattggttgttcttaatcccacttgctcagtatcatgtgaattattggaccatgatgtagatattcccagatgctgcccgg

SEQ ID NO: 442045 - DNA, 423 bp, Triticum aestivum
gtcgacgggccctagggcggctgccctggccgaactctccccttccatatttgtgtaggcctgtttgcaaatttttagaatcctcaaattctgaaaggaaaaaaagatatactaaatttccagttttttgacttttcattaaatcaggtcaaactgtctttaaactacttattcaagaaatattagcgttaatagataattattttagttcttttggcttttggttaaactgtggtcaaactatgttcaaatctggtcaaactgtggtcaaactatgttcaaactacttattcaagaaatattagtgttaataactaattatttaagtttttttgacttttggtcaaactgtggtcaaactatggtcaaatctggtcaaactatggtcaaactgtgctcaaactatggtcaaactacttattc

SEQ ID NO: 442046 - DNA, 348 bp, Triticum aestivum
tcgcgggtcgatacacgcgtctagatcactccataccatatcccacttttgctacgaacgaagctatacatatgacggaaatctatgagtatgcttgtggactgaatgattcggcattcgttcttcctcatttccaggtgtataaatatctcatagcgactaagctggttgatcgaggacttgtggaaaaatctttagcgtatttggaaaacattgcttctgttattgttgcgaatccttccctggttgaaatatcattcgtggataatgtatataacctagccgatcgactgaaatactacgatcttgtcggcgaagttgaagatgagtcccaatttggtggaatgt

SEQ ID NO: 442047 - DNA, 432 bp, Triticum aestivum
cgggtcgacggggaattctcacaacacaatcggcatacaattcaagattttggggccgtcaaaccacacaccggcagcacagttcacatggaagtcccgagcggcgctgagatgcagattctttgcatggcttgccctacgtaacagatgctggacatctgacagattagcacggcatggactagaccaccaagaagcctgcccgttctgcgaccaagcggaggagaccatagatcatatcctcgcccaatgtgtctttgcaagggaggtatggtatggacctggacctgcacggcaatgaacaaacaagagtggataccaactggggatacacggcttatagagtggtgcccaaataagggtggaaacaatggagacggaaaagatgtccgtgccctcgtcctacttgttaagtgggaattatggaaacat

SEQ ID NO: 442048 - DNA, 492 bp, Triticum aestivum
  unsure (1)..(492): unsure at all n locations
tccantgcgaccnncgcacngncngcnccncccgggcccgtcatntaacacnaangacgcgngggtttattttaaaataataaaatattttttagtaaaagtaaagaaaaattttatttaatgatagttaattagtattgtgagagaatattttatttttanaaaagaaaaatttattttttgtaccttgtgtatcagggattattaattaataattatatatttattattttcgaatttaaaagagctaaaaaattaaaatttttattgtaaaataaatattttaaataatttttttgtaatgaaatgttattccgttttaaatatatccaattttttaaagaaataaattaaatttaattaataaccatatattaanaattaaataattttaaaataataanaattaaataattttaaggganagccttaaaantaaatttnttnaaaatttaatttttaanaaaaantttggggnnaaaattncccctt

SEQ ID NO: 442049 - DNA, 323 bp, Triticum aestivum
aaacatatccaattcaaagttctagcttacaactatacaaatttggaggaataaaagatccgccacaagattatggatttactataagagcagggaagacagactatcaaattcaagtaaaagttaccgatacttctcaagtttcgacagaggaaagcagaaacattacaacttactttcaaacaaataccgttgaagtgaatggaataaacggctggggtatatctaaatggttataccaaaatattgaataaccaacactcacattagaagcaaaacataggcaattttactattaaggaattgaataaaaaaattacttg

SEQ ID NO: 442050 - DNA, 478 bp, Triticum aestivum
  unsure (1)..(478): unsure at all n locations
ccccccngnncngnnnggccggcccgaacacgnntccanttantttnaaataataaaatattttttagtaaaagtaaagaaaaattttatttaatgatagttaattagtattgtgagagaatattttatttttataaaagaaaaatttattttttgtaccttgtgtatcagggattattaattaataattatatatttattattttcgaatttaaaagagctaaaaaattaaaatttttattgtaaaataaatattttaaataatttttttgtaatgaaatgttattcgtttttaaatatatcnaattttttaagaaataaattaaatttatttattaacnatatatttataattaaatatttttanattantaatattaaatatttttatggnggagccncaaaataaaaattttttanaaatttnaatttttaaaaaaaatttggggggtnaaaattctnccattttttaaaangg

SEQ ID NO: 442051 - DNA, 405 bp, Triticum aestivum
attggataaactcttgatgatcttaagggcattagtcccactctatgtaagcacaagatcaaattggagaaatatgctaaaccggttgttgatcaccaacgacggttaaatcctaagatgaaagaagtggtaagaaaagaaatactaaagcttccggaggtaggtataatttatcccgttgatgatagtcagtaggtaagtcctgtccattgtgtccctaagaagggaggtattactgttgttcctaatgataaagatgaattgatcccacaaagaattattaccggttatagaatggtaattgatttccgcaaattaaataaagctactaaaaaggaacattaccctttaccttttattgatcaaatgctagaaagattatccaaacatacacatttttgcttt

SEQ ID NO: 442052 - DNA, 270 bp, Triticum aestivum
ggccaacttgcgtcgcgtagttctgcatctgagaggggagagacagagagagagcatgggatcctgtatgtaatgcccggtctggagtccgaactggtggtagtctgtaacgtcaattgatcttgaatcaccgctgaattgaagctggaaacttgatcggttagccaaaataatcccgttgataatacacaatacgtaaatcctgtcaactgtgtcactcagaaccggacatactactgttgttcctaatgataaagataaattgatccc

SEQ ID NO: 442053 - DNA, 54 bp, Triticum aestivum; identical to SEQ ID NO: 96262

SEQ ID NO: 442054 - DNA, 400 bp, Triticum aestivum
  unsure (1)..(400): unsure at all n locations
cgggtcgacggcgatatctatgtgaacaagcaaacacccaaggttaccaatagaactcctggtactgcattaacagacagggactatanggactcaccagctgtttacaaaggtgtcgatggtgagactaccgttgtagatcgtgtaatgctttgttcggatacaaatgacaaattgaccattaagtgtattatccgtcacactaagaggccggaggttggtgacaagtttagtagcagacatggacaaaaaggtgtttgtggcaccattgttcagcangaagacttccccttctctgagaaaggaatatgccctgatttaattatgaatccccatggatttccaagtcgtatgacaatcggtaaaatgattgaacttcttgggggaaaggctggtgttt

SEQ ID NO: 442055 - DNA, 399 bp, Triticum aestivum
acggtggcattaaagttgtcttgatgggagaattatcccttgacgtacgagcggataaaatatgctgccctcgatgcccgtgtgagtttcgagaaagctgcaaggtccaaagagcttgctgcgaagccgtctcgcacagagaatgagaacaagaagaagaagaagaagaagaagaagaaaacgctgcaccagcaggagggcattatggatggatgaactatttcctctcttgtaaaaaaaattattccctctcggtgtatattgatatagatggactatttcgatggtgtgcatgtctttggaacagagtagtagcgtgggtcctcttgactataagaaactacttatccacatatatagctttctctgctactccttccagtgatcggtatgcagtgc

SEQ ID NO: 442056 - DNA, 360 bp, Triticum aestivum
ttgttgctcaagagatgttacacaaggataaagaggaacttcgcaacaaatcaagtggtgcttacaaagcctcatgtgaagcccccacatcatcgagtgagaaacaaaccttcaatgaagaattgatcttaatggtgaagaactttaacaagttctacaagagtagaagcaaagagagaagctccaagtcaaaggcctacaatgacagaagatcttctactccacagtgaaactgctacaattgtggaaggcccggacactaatccaatgactgtaccgacccctagaagataatagaagaatctcccatgagatgaattatcatagatgaatcaccatctatagaaagaaagagtacag

SEQ ID NO: 442057 - DNA, 301 bp, Triticum aestivum
gatacttaacacgatggtgctccatagcctgatgatattagcactacagaacacgggaggctttgcagcacgcatgatcttgccagttcgacgcgctgagcacgactcagtccttgttacccttgggatctacggctgggcacatcaacactctcaacggtgggcatttcagtggcagactttctacacatcggtgtggtaatagccagacggtatcatgctactcgccttgaagaaggttgccctttcgccaactgtctgatcaccgacgaggggcggaccgatagcacgatcacaatga

SEQ ID NO: 442058 - DNA, 416 bp, Triticum aestivum
aagtttgcactgcttctttcaggtgtgttagaataactatgagttagtgctgctcctcacatgagttgtaacgttgagcaattagagcttagtgctagaatatagaaggtctagagttctctctttattatccatgatcatgtgtttgtaactgctactgtaactcaacctgggtgttctgtatataaagagaagacagccggtgaggttcatcacggcttaacacagcaatacttctgtttacatggtatcagacgccatctgaccaatgtcaacctcttcctcctctctcatggcttccgtgccggcggctaccaccgtcgtcaccgtgcgtctctctcgcgacaaccatctcatgtggaaggcacagttcctcgcattcctgcgcacctacaatctccttggcatcgcatctg

SEQ ID NO: 442059 - DNA, 278 bp, Triticum aestivum
aaaaaaaaaagggggcccccccaaaggttcccccttttcacaccccctaggccaggttcaaaccccccccaaggcgcccccaaaattcatttccggggcctttttttaaaaccccctgtgcgggaaacccccggggcttccccacttataccccctggaaaaaaacccccttttcccccggggtgctagacgcaaaagcgcccccaatgttttccctccccaaaatttccccccccccaattgtgcaagggcccccccccttttggggccattaaacc

SEQ ID NO: 442060 - DNA, 94 bp, Triticum aestivum
  unsure (1)..(94): unsure at all n locations
aacgttagnttccggtgccgnccaaaattcangggtcgacgggttgtgcggnagttgaattgccgaacgggtcgtccgaagtatggagtcctga

SEQ ID NO: 442061 - DNA, 81 bp, Triticum aestivum
  unsure (1)..(81): unsure at all n locations
aactgtttacgcttgccngtaccggtccaaanattaacgggtcgacgggaaatgatcacgacggtgatgctatacacaggc

SEQ ID NO: 442062 - DNA, 342 bp, Triticum aestivum
gtagtcacaatcatgcttatccgcaatatgcaaactggtcaatcaatgggatatagatttgcaaacatcattacccatacctcaacagacacatctcttcaaaattttaacgggcatgtgaatctcacaactgatccaacccttatcatttactggacgacctaaaccaagcagtgcacatcatcatcagtcgtctctcatgacgcaactcttggtggccatttaactgcagatgttactcatcatatgataatcgagctttttgccaacatgtcactctccgtaaacggacctcatattaacagtcacacgaacacaggctgttcaaagggccatggactt

SEQ ID NO: 442063 - DNA, 407 bp, Triticum aestivum
ggaggtcaccaagtacaaggttggcgctcctgctcgtgttgggctagttgcacctgttgatgtggtggttccccctggcaacactggtctggatccctcccagacgtccttcttccaggtgcttaacattcccaccaagattaacaagggtactgtggaaattactatcccagtggagctgatcaagaagggtgacaaggtgggctcctctgagtctgccctgcttgccaagcttggtatccgccccttctcatatggactggtcatctgcaatgtctatgacagtgggtctgtcttcagccctgaggttcttgaccttactgaggaagacctgatggacaagtttgcttctggtgtttccatggttgcctcactgtccctggcgatctcataccccaacatggctg

SEQ ID NO: 442064 - DNA, 151 bp, Triticum aestivum
ggtcgacggcgatctattctttcaacttcttcttcttcttgattatttttccttcacttaccgaataattcaccgttgtaaatagctcgcccgtgctacggcgattcggccgacattgcaagtgaattcaagtgaaacatttctactcaag

SEQ ID NO: 442065 - DNA, 388 bp, Triticum aestivum
ggctgcaggcgcgtcttcgaggtcgccgtcgagctgtccaggaacatgggctgcagcttcatctcccccgagcacctcgccatcgcgctcttcacgctcgacgatcccaccaccaacaatctcctcagaagcttgggagcggatccgagtcagctagcgtcagttgcagtcacccgactccatgaagagcttgcaaaagatggcagagatctcgcaggagcatcttctctcaaagtgcccgagaaagcacccgctggagctggagctggaagatctgccttcagcaaatccttaagcaaaaagaaagataaaggcgcgctagatcagttttgtctagatttgaccacacaagccagtggagggtttattgaccccattattggccgcg

SEQ ID NO: 442066 - DNA, 369 bp, Triticum aestivum
aaaatgttaatagagcatttgagaaatgctaaaaatgtgtatagaaaaaatgttgaccttgtactaaaaatatttaattttgtattgaaaaaatattaaacatgtattagataaatatcattgccatataaaatatatatatatagaaaaccaaaaaaaaaaaaaaaaaaaaaaaaaaaaaaaaaaaaaaaaaaaaaaaaaaaaaaaaaaaaaaaaaaaaaaaaggacaacaaaaaaaaaaaaaaaaaaaaaaaaacggggcccccaaaaggttcaaaccttacttacccttgaatggaagttaaaacccctccaaaagtttcaccaaatttcatttaacggggcgtcttttaaaaactccgtaacggg

SEQ ID NO: 442067 - DNA, 121 bp, Triticum aestivum
ggtcgacggcgatgagttacgtcaacacaatggcgtggtgacgatgatgatgttctaccaacgcagggcttcgcctaagcaccgcaacgatatgaccgaggtagaatatggtggaggggag

SEQ ID NO: 442068 - DNA, 394 bp, Triticum aestivum
gggcgtaaaaaaagttgtactattggcggaagaaatcttcagggcggtgctgggatggagagccgttcacaggactgcggcgacgtgatcttctgaagtttcttcacactggtgaaagcctttgggagatttattctgtcatcgatctatacatgtagctcctgtcttatttctccagtctgaactgttgggggttatgctactagttatcgtttgttctgaacttgatgttctggttgtttttgcttgagtcgtcctggagagcccggcttgtgagatttctcagggctgtgctgggtggttgcgttttgcgtttgtgaaacctagtcagtttcttagattgggtaaaaatctgcacttcaaaggagggaggctgtgggatttgctctttttc

SEQ ID NO: 442069 - DNA, 162 bp, Triticum aestivum
aacttcatcggaggggctatggtgatgatgtataagccctccgtgattgatgccccctccggctgagctccggatcacgccacacgatgggatctcctgagtacacaacgttgcggcggtgaaagtacgtttttggcctcgtatctgatcgtttgggggtac

SEQ ID NO: 442070 - DNA, 352 bp, Triticum aestivum
cgggtcgacattagactcgaaatcgagtagtctcacattaatatgcctccaatcacaaaacccatcattcctcattgcattcgtgcatttatcagaattgaaaagattacaggaaaagaaacactctttttgcgtgttttgaaaaaacgaaccatttcctatcacgcacctctccgttgctcatctttgttgagtaatgacgatatgaaaaatgttttgaattttcattcagaggatattcagtattttcttcgtcccttttagtcgcctttttcacgaatatgtccctcgctttgttagcaagattagcccagttgcgtgagttatgaataccgacagtaaccggttagtg

SEQ ID NO: 442071 - DNA, 419 bp, Triticum aestivum
ggtcgacggcagggggaaaggccaaagctatgcgacgttctggacgcggccattgcacgccaaagcaatggtcaccgtgtagactggcagtaagaagagccaaatggctggcaattgttttctaaggtgaagttcttctaggggaggtttcaactgcggtggtagctcggttaaagactctgtggttaaatggtaagtgagctctgaagtttactgcatcaaactgaatcattatgcagtgatcaacaaagtgaggttaagaggcaaactagatgtcaggggagtttatgttaggaagaactatagtcctgttaattttgagatgattaggaaaagtattttatacagttgctttacaactagataaactggtctagagacataaccaagaagaagcactcacatagtgtgatggatta

SEQ ID NO: 442072 - DNA, 393 bp, Triticum aestivum
ctgatgaagaccacactacacatgaacaacttgaggtgtatatgcagacccacagtctcgttagggatgattccttgtagcagcttcatgttgctgtcataaaagccatcacagcacatgtctgccatatagtgcttcatgaccccttgggtagtaatgcagaccagcgtcttcgtgccaaatgactgagatctttacggaaaactttctatggtgttaaactcaccattggcgatggggaagggtctcacatgaagaatatagataacatcgatgacactgccggtagctcccctgattcgtcatcaaaacgggagtcatcattcactcccattcctaaccctcctcttacccagagtctatatttggacgctccccactttggcggcacct

SEQ ID NO: 442073 - DNA, 174 bp, Triticum aestivum
aacgagcaaatctgagcatgggtgtcggtgtcaacaccagttgatctcgggtagggggtcgctaactatgcgtctatgacggatggtaacatgaggcaagggacatgaacttttacccatattcgggccctctcgatggagggtaaattcaatacaaaatatatcctaagttca

SEQ ID NO: 442074 - DNA, 201 bp, Triticum aestivum
acggcatcgaagcaaactgcggcgacagcttcgggcgtgacggggaccgacgctagaaggggcgagggagctagctaacacagggaaaagagatggggctcacgtatgaggcacaagggggcctggcggaagcttactagcagcagggcagccggagtcggaggagacactacgtgtctcgcaaatcgataggaaaaagct

SEQ ID NO: 442075 - DNA, 384 bp, Triticum aestivum
gcagatcaacgaacgctcctggagagctccggattcgggtaagtaatagataattttctttcacatgcctgctttgcataaagaatgccttatccgccgctattttctttatcgcctcgatctcctggagggccttctgggcttcggccttagcgtttttggtactcacaagagccaaggcgagctcggacgctcgagtcttcgagtcacgctccaaactctcgtgtttttccatcagagcctgcagctcttgccgcacctccgccatacgtgcctccggcacgtctcgcacggtgcgctccaatgccccactgttctcggacttggatacagcctccttcagggccgccaccttgggacgaggcccctgcaacatttacgttg

SEQ ID NO: 442076 - DNA, 381 bp, Triticum aestivum
cgggtcgacgccgtgcacgaatgcaagtcgcggcacgaggtgcgaggttcagcagaagggcaacagccatggcgaggaggcctggcatgaggagttggagctgggcgtccatggcgaactgaaggaggcaacgaccctggctcctgcagatgacagacgcggtgggcatgaggttcaacgagacagagatggccggatcctgcgagcaggcgtcggagagggccggatttggtgtccggaggcgtctgggagctccggcgtcaaaggagaactacaggacgccggtgctcgctggaggcgtccattgcatgggcgtgcttcttcctacacaattaggagaccgggaggaatgagagggaccagggtggtagggagaggagg

SEQ ID NO: 442077 - DNA, 380 bp, Triticum aestivum
aacgctcagtgaaaccatcctcttcaagtttagcttcagtacatatcattgagagccctttccatgtacgacagcaggtttcatgtgtaacgaaggcattcttggtggcaaggtttcgaagacgattgacatccaccaagaggctcttcatctgacgttttagccagtcgtgatgcctatcttgcttctggtgaagggccacaagaagctctcgatcagtgaggacacgagcacgcttcttgggtcttggagcatttgtgctgtctgtggcttcagtagatgctggtgcacgtgtagtgccagccaacggatataccctggatatggcttcaacaccttcaacattctgcgtgaagctctggtgttctgcattctgaaga

SEQ ID NO: 442078 - DNA, 432 bp, Triticum aestivum
  unsure (1)..(432): unsure at all n locations
cgggtcgactcattacacaaaacattttgttggcatatgagagcattcatacaataaaaaataagaagaaaggcaagtgtggctattgcacggttaaactggatatgcacaaggcctatgatanggtggaatggaatattttgaggagaatgatgacacgcttgggctttcatgtagagtttgtaaatctgttgatggcatgtgtccggtcagttaaatagaaggttagattcaataatcaagaaacggattattttattcctgaaaggggactccaacagtgagaccccctatctccatatatgtttttgatttgtgcagaagggctttctagtcttatggctcatagagaggaggttcctggcattgaaggtgtcacggtttgcagaaatgcaccaacaatttcacactttttttttgctgatgaactgc

SEQ ID NO: 442079 - DNA, 414 bp, Triticum aestivum
ttttgggcatgatgttgagacatatcgtgatgagagaggaagggttagagtaagtagggtcagaggaatgggaattcgtatgactcgtgatattcaaaggaatttggattttatcaaagagcatgagcagtcaaaaagcatgggacaggccaacattggcaaaggatcaactagcaatgaagaacctccagattttccggaacatctttttgaaaatgatgggctgcaaagctctgttgatctcagtgaagattttgctgaaactatcggtgacaaccatcacacgtcgtcacttgtaggaggatctgatgatatttctgagggttcctgccatggaagcaaagagacaatagagatatcctttgtggatgatcaaattggagtgaaggacaatgatgacaagctgtttttgca

SEQ ID NO: 442080 - DNA, 409 bp, Triticum aestivum
acatgttacgaacgaatcctttgatgatcccattcatcctctcaaacggcatcatgttgtgcaggaatgacggccccaggtctattatgtcatccacaatatggacacacagatgcaccatcacgtcaaagaacgcgggcgggaagtacatctcaagctcattcagtatcacaacgatctcttcctgtagccttcggagctgcttcacactgatcgactttcgagagatgacgtcgaaaaagttgcagagaccaataagcgtgtcacagacgtgcttgtccattatccctctaagggcaacaggtaatatctgcgtcatcatcacatgacagtcatgagacttcatcccgctgaaccttttcttgtccgtgtctagatatctacttatcttgccacagtaatcgggact

SEQ ID NO: 442081 - DNA, 94 bp, Triticum aestivum
cgcgcgggtcgatggggatcgctaaaatgagtactggcaatatgtataacaaacaacatacgggtaagataattatacgagtaactatatatcc

SEQ ID NO: 442082 - DNA, 405 bp, Triticum aestivum
tccctggaccggtgctggacggccgagcgccgcgcacgccagggcctcacgcacaacaccgtttgcatcctatgccatcaggagatggaatccatcgaccacctcttagctggatgcgttttcgctcgggatacctggcacgaaatcctggcctggtgccggctcatctccccgcccatggatagcacgacgaccttcttcgcttggtgggtgctcgcggccgacacctcgccgagcggcctgcgcaaagggctcaactccgtcatcactctgaccgcttgggccatctggaagcatcgcaacatcgtcatcttcgacggccttcacccctccacctatggtcttgtgctttccctccaggatgacgctcgcctatgggctaatgccagcgccaagggactagcc

SEQ ID NO: 442083 - DNA, 116 bp, Triticum aestivum
ttcccatgtgaggaaaggatgatgaagactatgattccccaacaagtcgggatgagactccggacgaaaaataaaaaagaaagaaagaaaagaggccaaaaaaagaaagaatgccc

SEQ ID NO: 442084 - DNA, 414 bp, Triticum aestivum
gggtcgaggcgtgagaaatatagaaatattgaggctatatccaatcggcatcagctgcacaataagaagaacacagttgataagttatctaataataggaagcccatgataaatgcaagccgagagaaagttgttacacttctctccagttgcttccatactgaggattacaaagatgagttgaggcctctttgtaattctatgttgagtggaacaataaattcctttaggaccagaatactgaactttgttgtggccaaccgcccataccaaggtcctacaaagctgttccggatcattttcaaggataagcctgatgggacagtgggaatgcaatatggagacccagaagatttcgacaatcggaactcacatgaatgtacactcatattacccaccaagttacatgccgac

SEQ ID NO: 442085 - DNA, 422 bp, Triticum aestivum
cgaccgacagcgcaagtgttgctgataagtggaaccccgggaggctgagttaagcaccatggctgaaggagttgtaaggaggaattacaccacatgggatgatgagatggatggtgcactgcttgaggtgcttgttgatcatcacaacaatggcgaccattcacaaaatggatggaaaccacatgtgtattgtgcagccataaggaatgtgaaggagaagtgcaacaagaatatcacaaaggacaacattttgggaaggcttagaactttcgacaggtactatgaagtcattaccaagatactttcccaaagtggttttgggtgggattgggtgaatcataagctatcaatggatagtgatgatgtctggatcaaatatgtggaggctaataagaaagagaaaggattaacttcctacaaga

SEQ ID NO: 442086 - DNA, 404 bp, Triticum aestivum
aatacgaaaaaaggggcaaatccgggttaggcctccagtaaggaagctagtcctcctcctgaagcagcagtggacaacgctactggattctatcaaagcgacttgatagaacaccatctgccagacagcccctatgcatctctcagacacataacagacgctgcagcaggatcatcttcagcacagccacacctcactaggttgatcatgaacactctcagcatcccacatctggtgccctcgacattgttccctcctaccccatctgcccatgagcttgctccttacaatacatgcgatcgtccaagtgcacaattatcccacctgaccatagatccatcaagcatataaatatttcgcataaaatacgagtcaccttttctcctacacagaggatatccatg

SEQ ID NO: 442087 - DNA, 401 bp, Triticum aestivum
aaagcctaatctggcctccggcggctagcggctctacttagcatgcatcgctgcgaagtgctaccccaccgccggccaggccacacttccacacctcttgttattctccaccgactacagccccacgccacaccagaaccacttataacccttgtactcctctcaatctgcgactccactgccgcatcttcccatctccgggtcgttcctgtccggggcctcgccgacgtccacggcctcgccgcgctcgacgtggcgtggtcaacaaacaaggtcatcggaagaggactatacgtggagagcctgatggctgggacccacaaggtccatggttgcacgcaaggaaagttcctccttattaaccctagaagatgtttcctccccctgacagttgggaccca

SEQ ID NO: 442088 - DNA, 269 bp, Triticum aestivum
cggatctccttccggagatcacggaaagctacacgccccctacctctgtcacgcctagcaaggcggcctacaccgaggtgtcgtcacacaggacatcgcccaatctgccacaagcacaaggtggtcacatgacccctccgggttctccataccccgccttcgaacagggccatgtggacgagtccggcgccgactggtgttcggccggaggagtctgacgttttggcatgccgaccctctatctcagaagagcatcacgtgttaatgca

SEQ ID NO: 442089 - DNA, 242 bp, Triticum aestivum
gacgcacgagggcttaatttccgtcgctagctagcaattgattagtatcaataagatctaaggtgcactggtagttggattttggcttcaattgactcaactgcccgatcgatatgccagcgcgtgggctttacttgcgttggctgatccgttcatctcgtgtgcatttctctgcatgtattgctgtgtgcactggttggcctggatgcccggaccggagcacacgcgacctgcctatgatt

SEQ ID NO: 442090 - DNA, 150 bp, Triticum aestivum
  unsure (1)..(150): unsure at all n locations
agntggtggggagtttgtggattagcgcgccagcgaggaggctcggagtcgccgccgcggggtcgcgctgtcttgtggcgagaggcggtgtccaggcccaggctgtatgagggtgaggcagattggcgttagtggtgcaggaattatggg

SEQ ID NO: 442091 - DNA, 384 bp, Triticum aestivum
taggcaacacaaaagaaacggtcatccagatcaaggtgtgtgcgatatacgacatgcggttcactcggatgaactatttgcattgatacaagagaacagaaacggttcaatataacaaataccataaatattgcaaggttcaaattcaaagattacaatgcccaaatttctgtaaaggggtcagctgttgacaagtcatgtatgggtttgccacaatgacttccaattactctgtcatatgctcttccaatacgaagtttagcttttttggagcctcttccattctacagtacctgccagctctgatcaacataccattcatctttcctaattaaatgtgtgttcaacctcagtaccctcaacaccctttctctggcaagaaag

SEQ ID NO: 442092 - DNA, 401 bp, Triticum aestivum
cggcgttttgccccgcttaggagcccttacctcccaattctcggaggcggcccttttcttaccatgggaagaagggatgtcagcttctccttcccttttgtcttcggaagagggagccctagtctccccggacacagtgtgtgatttgcctccaggatggaggccgccttcggctccaccgctcttctcattctcctcctccaccggcacctggtatggcgccgggaccagcatccatgctagtatgggactagctgagtcctcaacaagaggagccgaacacctgatttgctcagccttctttatccagccctggaaaaagatggttttctcagcatcttatcatgagatgtgtatctaacttgtgtttgagaattgagtgcttaccgaggtatccggat

SEQ ID NO: 442093 - DNA, 373 bp, Triticum aestivum
gaagaactgccttgtgccaatgagtgatgtagagatgcttcttcctatcacggtaggagactacacggatttcttttgttctgtgcaccacgcaaggaactgtggattcatcttccgtggaccacagactccagtcaatccgaattggtttcacttaccagttggttaccatggacgggcatcatctgtaatcatatctggaacagacattattcgacccagaggacaaggtcatccaacaggaagcgctcaaccttatttcggtccttctcaaaagcttgattttgaacttgagatggctgccattgttggaccagggaatgaactgggcaaacctattgatattgctgacgctgaggatcatatatttggc

SEQ ID NO: 442094 - DNA, 370 bp, Triticum aestivum
aagtatagcaaggcccgtttcgaagaaagttatacctgatggtcgccgagatgtcgctaggtgggcgacgggaggccggatctgcccacactacgacagcgaggaataagaggtcggaggccctccctcgccagcggtgcttgggaaagaacgacaaggaaggctgatcgggacgcgcccagcagtgggtaagagccgtcgccgaggacgaccgcatgaacgttgcaccttctcaccttccctggcagagaggatccggatggatctgtgacaagcggtgagaagagagagagagagtgtgtggccaccgctgtcgtgtttagatctggagaggccgagacaggtgtgaagagagcaacactagcaacca

SEQ ID NO: 442095 - DNA, 390 bp, Triticum aestivum
tggcgcactaactgaagcacttcagagaatatttcctcctgattggaattcattagaagttctaggagaggtttctgattctgtaagcactggggactcagattattccagtgattctgattttagcgatggtgacgagaatcaagaagctgatgacaactgacaatctgtaaacaactttcgacggtatgcactcccaagctgcttttgcgtgagctgtgccagagtttacctaacaaggtcggcagtttgtggacgacccaaaagttgggtttggaatcttacagtgcagtaagcatgggctgtctgtcttctgctgtatttttttaagagctgccgacagtcagcaacagttctactggcgctaaggactcagtctgtcattgcaag

SEQ ID NO: 442096 - DNA, 429 bp, Triticum aestivum
ctgcaggacggtcgaaattacgggtcgacggggccatcatacagcttgggagcttcacacccaaggggccaaagagagatctgttgctactagcacgactcaaacataggcacccattgagcacagctcacaaagttacttgggggctctttgtgtaaagtaacaaagagtttgaaaggacccttgtaaccgggtatcaacccatggcttggaagcctggtgtattcacctaaaaccccgggttaacctgccttcatcaagtaagccactcctatccaggtaatcctggcatgacccgccgaacgtttgacagttactctcattgagaccctgaacttgtcaaagttaaaacgatgattggttagttcgaggcccatcttaaaaggctttgtcaaatggtttaactcagcgggctggcagcacacgaaa

SEQ ID NO: 442097 - DNA, 413 bp, Triticum aestivum
  unsure (1)..(413): unsure at all n locations
tgattcctaatacactggaggtgcctactactacgtgcaggatgctgacgacgcccaggagtagtttaggaggatcccangcangaggcctgtgcctctttcgatctgtatcccagtttgtgctagccttcttaaggcaaacttgtttaacttatgtctgtactcagatattgttgcttccgctgactcgtctatgaccgagcacttgtattcaagccctcgaggcccctggcttgtattatgatgcttgtatgacttatttatgttttagagttgtgttgtgatatcttcccgtgagtccctgatcttgatcgtacacatttgcgtgcatgattagtgtacgattgaatcgggggcgtcacacgatgcgcctccccacttgcctggtaaaatcgctttttccccaagcgccg

SEQ ID NO: 442098 - DNA, 401 bp, Triticum aestivum
gataggccatcctggcacacaggttggggcaaaatgagctcgtgtgcgatcttgcgaggcatcaaaacccaatcattttcgttcgtatgtacatcccacatggtgaatcccagaaaaacatttatgtttgtatgtatatcaaacacagttttttgtgttgaaacgtttatgcaaggtggcctaatgcaaacagttatctgccagaagttgtgtgtgattgttatttgatcgaacacgactactttctagaaaccatgtcggttgtttgagttcatcgctcatggtgctatctgagtaaccgtatgcaatagcaaaccccaataagtagggtaattagcttattattgataatccatgtagtaatcaaattgacatttcttatataacacaccagatatttc

SEQ ID NO: 442099 - DNA, 389 bp, Triticum aestivum
ttcttttgagttttgtgtgctgaagttttcaagttttgagtgagatcgtgatggatgaaggaataaggagtggaaaaacctaaacttgaggatgcccgaggcaccccaaggtaatattcaaggagacccaagtgccccggatggcatccccctctttcttctaccaaccatcggtaaattacttggagttatatttttattcatcacatgatatgagttttgcttggagcatcatgtattatatgattctttgctttaattgatttttagtttgccaaaatcatatttgttggacacacctttttgagtgggacacacattattcatgatttgttaaaatactccttatgctacacctatatcttttgagctaggcagttgctctagta

SEQ ID NO: 442100 - DNA, 340 bp, Triticum aestivum
gggtcgagggcggagtcaacagtaacgtctccacgaagtccatagttatcatctcagcgcaggatcgggacactccgcctcaatcaagtggtattaggtttcaggttgctcggtgagagtttctagttttcggagattagatatattttcttacctagtagccaagaataagccatacaacaaagagttatatccgttcatcctttatcgaagcgagtctgagcctttgcaattttctaatcattgcttgcatagtgtgaattatcggttgcatccacctgtaagttgctggtcttatcctcgaggatctttaaagtttcgagttctgttcacattagtc

SEQ ID NO: 442101 - DNA, 344 bp, Triticum aestivum
cctggttggggatgcgtcctccgtttggcgctgctcggccatggagcttcttagcctaccatgaacgatgaatgactatgatttaccctacggcacgaaggaatgtaggaaggaggaaaacgccaccggcgatggataaatcccccataatcggcagctcctccacgtcccaagggatggatgacgtccatcattatctaattgataaatgagccccttggtggggtactaagatcacacttacctcaatgacgatcaggaattacgatggcaagaacgccgaggcggcccaagagttcaggaactgccgtgcgttcacatgcgagagaccatctgtgtttatc

SEQ ID NO: 442102 - DNA, 75 bp, Triticum aestivum
tcgacggggcctatgtatatgtgatgacaatgggatgttacccgaattttagcaaatcttaccgatgttggcaag

SEQ ID NO: 442103 - DNA, 385 bp, Triticum aestivum
aagctgatggggtggtggcgtaatcatgccttctgaagcacagcctgaagaggaacttatcatctctgcaccaaatcaacctgaagacaatgctcagaccgaagacaatcctcccaatgatgacaatgatcagcaagagcaaagtcttcatcctgttcatcctcgtgttgcaaatgaagtacaaatcgagaagataattgacagcatcaatgcgtctggtccgcttactcgctcaagagcaacacagctagcaaacttctatgggcacttttcatttgtgtcaatatcagaacccaagaaagttgctgaagcttttatggaacctgaatggattcaagccatgcaagaagaacttcaacagttcaagctgaacaatgttccggaa

SEQ ID NO: 442104 - DNA, 372 bp, Triticum aestivum
gggtcgacggggaatttggttcccatctgatgggggtcgggctgtccaagtttgtgccgtgggaggtaatgcacgagcggaccgtcaaggcggcaacatacggataccttgcccccgagttcatttacaggaacgagctgacaacaaagagcgatgtctacagcttcggcgtgctgcttctagaaatcatcagtggccgtcgcccaacgcagtcggttgaatctgctggatggcagacaatattcgaatgggcgacgccgctggtccaatcacaccggcatctggagctgctggacccgctcatcaacgacatgccggagataggagtgatccagaaggtcgtggacctcgtctacgcctgcacccagcatg

SEQ ID NO: 442105 - DNA, 386 bp, Triticum aestivum
cagcaaggagtccacggtagtggatggggcgtcaaggaggtcagcgtggatgcagaggcggcggcagggcccttggtgggaagaaatgatgcgtgataaggcaccaacgagctcatccccatgattgaggccgcggcagtcgaggttgagaggggcggaacgccagaggtggcgccaccgggacgcgaggatctgggtgcgggcgccgtccttggtggggaggagcgagatgatctcgccgaggacggcgtcggggaggttgctgatggtgtcttgagccggcggttcagattccgccaactttcttcttcgggtaatagggccgccggccggcggcagtagcggaagaggctcgcgccgcctcatatctcagatgcgcaccgcaa

SEQ ID NO: 442106 - DNA, 407 bp, Triticum aestivum
cttttgaaatcactaggttatgaatcacttggtacttgcgaaccatgcctcatgggaaagatgactaaaacgccgttctccggaactatggagcgagcaactgatttgttggaaatcatacatactgatgtttgtggtccaatgaatgttgaggctcgcggcgggtatcgttattttctcacattcatagatgatttgagcagatatgggtatatctacttaatgaaacacaagtctgaaacatttgaaaagttcaaagaatttcagagtgaagtggaaaatcatcataacaagaaaataaaatttctacgatctgatcgtggaggagaatatttgagttacgagtttggtttacatttgaaacaatgcgggataatttcgcaactcaggccaatccggacaacaaa

SEQ ID NO: 442107 - DNA, 412 bp, Triticum aestivum
catacaaagctaggaaaaaaattagggccatttcaaggatgttgagaactaatgtgctctcagacggagccttctgaacttcccaaacacccttcattcaacatggtctatttttaaaatccttgaaatttgcaagtaggtgggcatgcccatggtaggcctccatgtcagatttgaacgatttctacaccgtgtgcaagttgcgacacgtccaaccatttatctgctttttttatcaagaaaactctagaaaatacaaaaattaccaaaaatagaaacaaggcatgatgccttaaattgatcatacaaggccatggggagaaatggggccattttaaagatgtcaaagaacaacgaactctaggacagagccttctcgccttttgacaccatttgcaagttgcgacacatt

SEQ ID NO: 442108 - DNA, 399 bp, Triticum aestivum
  unsure (1)..(399): unsure at all n locations
agcaggtgcacaaggtggtcatggccgcgaacagggcagccacggcggcgcgggtggcggcgatcaaggcggtccagaacaggatggacgggaaattctgcgatacctatgtgtgaagcgtgtgtgttcaagaaaacatgcccctttcctctaactgtacattagggtagtggaggccaataacactaatcggtgagagtttcagacgacggcgacgacgacgaccggggcggcacaaccgcgtgctccgagtccgtgagagagaccagcaacaaggcgggagcctccgaggagcggagctgacaagttttgcatttcaaaaacagctcagatcctgcgacgatcgcgatcgcgatcatcggcggtcncttccttcgcccccttccttccagcaagctg

SEQ ID NO: 442109 - DNA, 124 bp, Triticum aestivum
cgaagataacgtcagcacgacagcatggtgacgatcttgatgtactacagcagcacggctttgcgtaaactccgctacaatattatcgaggaggaaaaagagaacaaaaaagatgaaaacaaaa

SEQ ID NO: 442110 - DNA, 74 bp, Triticum aestivum
ggtcaagaattcacgggccgacgggttgtgtaattttggacgctatgtatgtatagcttggatcttgacatccc

SEQ ID NO: 442111 - DNA, 96 bp, Triticum aestivum
ggtcgacggcggaggtatactcagctttactcagccgccccttgttgtcttgaaattttcgatttactcccttatggccgaccaaacccatcccct

SEQ ID NO: 442112 - DNA, 403 bp, Triticum aestivum
cgggccgactcgagtggcaccgtcttgaatatgatgacgaggtagaggagcggttgaccatcatagctcagatgtcctccttgagagatgccatggatgtgtcgaagtagtcttttgtacgttgctcggattgtcacaagtcggaagcaagtaggtccatgtggttgcccaatgcttcattgccttgatgtaaagctctttgcgggccaagaggtggttcttagtgacgtagttgttcgggtcctcatcttgctcgatgaagagtgggttggtagaagtacttggcctatccatcattccaagtaaagtgtgagtgggagaaagagaagaactatacaaaatgtaccttgaccgatgtttagtatggatcaaagatcactcaatgatgttgcaagggaattac

SEQ ID NO: 442113 - DNA, 399 bp, Triticum aestivum
gggccgacgggactacggagaaaaagacgtatcgagtgtgtatgagcgaggcacaaagacacaatgtttgagagataaaccaattgacagattaatattagatcgagttgtcacccttctgttgtcattgttagggttggggggtggagggagagaaagacatatcgagagtgtgcgcggtaggcacagacgcacaactagcgagtgtgtgtatgtgggtgtgtttgaaagaggagtagatagattacgatcaagatcgaggtgccatccctacgccatcggtgtcaggtactgtgtgtgtgtgtgtgcatgtgtgttagagagaatcgactcgatagaggactatcaggatcgaggtgtcacccgactcgttcggtgtccggaagtgtgtgttcggtg

SEQ ID NO: 442114 - DNA, 368 bp, Triticum aestivum
cgtcgagatcaaggagcccgtctggttcaaggccggctcgcagatcttctccgagggcggcctcgattaccttggaaaccccaacctcgtccacgcgcagagcatccttgccgtgctgggcttccaggtccttctcatgggtctggttgaagggttccgcatcaatggtctcgacggtgtcggcgagggcaacgacctctaccccggcggccagtacttcgacccgctcggccttgccgacgaccctgtcaccttcgctgagctcaaggtgaaggagatcaagaatggccgtctcgccatattctctatgtttgggttcttcgtccaagctatcgtcaccggtaagggcccattggagaacctgttcg

SEQ ID NO: 442115 - DNA, 389 bp, Triticum aestivum
gggccgacggggaagagaaggcagcaccaagtcgcctctatctccccctcacccaaagctccgacctttcgctcacccttctcctccgccttcccaattccccaattcggagcgcccgaggaattcggcgtcgatccgacgcgaccgaattcgtcccgattcagctgctgctcttggttcgtccgtcctgcgggccggcctctttgtctgtctcaactcgatccacgccgttgcggcacgcttcctccctgcggggtttggcctgcactgatctggcctggaaatactcctactctagtttcgcggatttttgtgttcggtaccatttctcggttttcccagtggttcgtgctgatctctgtctctgtgtactatcttctcctggcccg

SEQ ID NO: 442116 - DNA, 417 bp, Triticum aestivum
gggtgaaaatgcaatctcatatcataatctttaatgagctccaaccatctcctctgtctgagatttaactccttctgcgtgaaaatgtacttcaaactcttgtgatccgtgtacacctcacaatggtttccgatgagaaaatgtctccatgtcttcaatgcatgcaccacggctgctaattccaaatcatacgtagcataattcttctcatggggtttaagttgtcgtgaagcatacgacacaacttttccttcctgcataagcactgctccaagtcctcgacgtgaagcgtcgcaataaacttcataatccttgcgttgatctggcagaatcaacactggtgatgtaaccaatcgtttcttcaactcttggaaactagcttcacattcctcagtcgaattgaatttggtgtccttc

SEQ ID NO: 442117 - DNA, 375 bp, Triticum aestivum
gtggagggtcatgagcaccagcaggcgcgtcgaggggcaccatggtcactgtgggagcacgccaaaccgaaggccatcaccagccactggataggtgagcaaatccattctcctatcagattcagatatctttgggtagtcaaggtaaatcctttatgcttgagggtaccataaataggctattgattgaatgaaacttgtggttggctgctattgtgttgtttgatgtttggttcagaggaaaaattgcatttatttatatagaaggtacttagtaaaattcagtctgatttaatcatcacttcagggttatgtatctctgtacgtatagatttccatgtttagagaaaaaactgtatgttaaaacaagatgct

SEQ ID NO: 442118 - DNA, 420 bp, Triticum aestivum
tatcaagaacatgatacaccagcttagtgtattcacgggaataagttcatctccaacaatgatcatcagaacggacaccttcaactgtccacgggcatctggccagatgccggtcatccaatgctaacgttcaggatttctcctgttgaacctattagctagtaggtttttcgaatgggcgattgcctaactttatcatatagatagaagagaggtacagtctggttatcagtctaagcgtactagatctgattactgtctaaagcagccatttacagccttacaataggaattatacatgtacttccggtgctctcacactatgctccgagctctacatgtcaaccggccgcactccaaatagcaatatcttcacagacgaaatccagcaccctgtcggagctgcttgccatctgatca

SEQ ID NO: 442119 - DNA, 390 bp, Triticum aestivum
gagtttaagcaaaagtcaaccataccaagtacccatcacaatccctatctctcgcattacattatttgcctcttgttttcctctcccccacttcacccttgccgttttattcgccctctctttcccaatctcatcctctctttctcttttgcctttttctcgtttgtctttttgttgcttgtgtgttggattacttgttaccatggccgaatcaaaaggaactaagggatttctcccgagttctagtgccttggataacctttctatcctttctaagctcataaacaatgatgctacagagagacccaccgggatcaccaataagaatttagatgattttgatgatgatgactccggaatctttcgctatttacttgatgaatccttaaa

SEQ ID NO: 442120 - DNA, 256 bp, Triticum aestivum
gaagagtaccgtcagcacgacggcgtggtgacgatcttgatgttctaccgtcgcagggcttcgcttaagcaccgctacaatattatcgaggagtatggtggaagggggcaccgcacacggctaagaaaacgatcacaaggatcaacttgtgtgtctaggggtgcccctgcccccgtatatagaggagcaaggggaggaggccggccggctctattggcatgccaaggaggagtcctcctcctagtaggagtaggcc

SEQ ID NO: 442121 - DNA, 252 bp, Triticum aestivum
actggacgtgggtttcagggatttttgcagtgggatttgtacggtactatgccgcactgtgtttgggatgttgaataagacgatgggagatgtgccacgctcttatatgccaacgggacgttgacgcggaaaaacatgctgctggacaggaagaagtcagtgaaaattgccgactttggcgtggcccctgtgcaggcgctcgacgacgacaacattatgggggacacgggcactctggggtatatggccccc

SEQ ID NO: 442122 - DNA, 375 bp, Triticum aestivum
gaagttgaatatgctaaaaatatatgtgcatttgtacgtgacatttatagggaactgacccttcttgtgccactgatggatgacaataatgagatgaagaagaaaatggaggttatgcttcaaagtgtagtgaaaattgagaatgcttgcttcagtgttcatgtgagaggatctgaatacatccctatgctgggaacatctggcgagtcagactacgccttcttcggtgccgccgattatgaccaatgaagccagactgcctaacaggcatgtttctgggacctatctcaaaaaagaagctttgaacacgactattatttgttgcttgtgcacatcacaccgtagaacatgtaatcccggccctcagctacctgt

SEQ ID NO: 442123 - DNA, 380 bp, Triticum aestivum
aatggtgtgggcgacaccgacaatggtgatggtgatgctggcgatgatgatggtgatgccagagatggtgacgacgacaccagcgacacgtgtgagggcgacccggaggacacggtgagcgatatgtccgattgagctcgtgcttccttgtcgttgaccctacatgtgaaagctcgggcacggccctgaaagttgtaagagcattttgggagggggagcccctcatgtaaatagattactgcctctattccttaagccaagctggagatttatttttatgatcccgcgagtctcgctgcgagcttactactgcaatttaccttattcagggccagttcccgactggctcatgacgtcgtgagctttttaggggcctgctg

SEQ ID NO: 442124 - DNA, 270 bp, Triticum aestivum
gacaagcacatctccaatatcgccgacacgaatatcaacgccgccggcagcgctgtcatgcactttgcctacggttctgttctcgactgtgccttgagatctaacagatcgttactaatacttgtttctcgtaacaccacattgtgttgaacaacacatcgatagtttgttatccttgttcctgtgtggtacaccaccatcttatgataattttgcgatatgttatgccattttataacaaaaaacattaaaacccataattgtaaaaac

SEQ ID NO: 442125 - DNA, 361 bp, Triticum aestivum
caatcaagggaccgctcgagaccccaagatcatattatgcattgtctggtggagctggaaaagccgtgtcaacaggaagcaagattgcgctggagagtccaaggacggcggagaagccatcggcaggcgacatcgtgtcgatggtgatgaagaggaggcgtgcgatgccaaggagcgaccagccctctgaagctgggcgcgtaaaagcttctggtgggatttttggatacgtgcgagaatccagtggtaaacaagagaaggagaaggagggcctggcatcatctggggagggggagaaaacacagagcaaaggtgtggtggtggctgcttcaaggggtgctgcagatgcgccggtttctgc

SEQ ID NO: 442126 - DNA, 401 bp, Triticum aestivum
gggattgctgatctgcggcagaatgtccttgttgtccatgacagatgggcctttgtaattctgtctgggaagttccgcaggagtctgccagcaatcatggcctccttcctggacttcttacagcgccttcctgtctttattggtgatgacgacgaatgccagccgtccgtcagaacatggatctcaatctaggcgcttagtcgcttctggagggatttatgtggacttccaatcatccagtggttgacattacagagatctcgtgggacttgcatcatcgttggatctggagactgcacatatccagtgtgtactgctgacagcttcacgtggtgctgcagatgcgccggtttctgcagaccaggcaaaagcgggtggtgctgctgttgttgtggaaaccg

SEQ ID NO: 442127 - DNA, 398 bp, Triticum aestivum
aatcaaagtagcgcacgagatccaacgattacattacgcatggtctggcgtttcagttttagccgtgtcaacaggaaataatattgctctgagagagtcctaggatagagtgagtttccacctgtatgatatatcgagtctattgggaataaatatgaggcttcgaatttaattgagcgatcactccgctaattctgggctcgtcatagcttctggagagaatttcggataagtgctataatccactggaaaacactagaaggagaaggaagatctgacatcaactatcgagagggagaaaatagagagcatttgtgtcgtgctagttgcttaacagtttccaggagattcactagtttcagcagagcatgcgttcacagtttgttctgcaaatattt

SEQ ID NO: 442128 - DNA, 428 bp, Triticum aestivum
  unsure (1)..(428): unsure at all n locations
caataactctaaaagattataatgactcatatcaatgacataatcaactagcgagcaataataagatgtctcaaacggcaacacattgtcaaaacaaccatgatataatatgacaataatggtatctcgctagccctttctgagacggcaaaacataaatgtagaggacctccaaagttcaagtagcgactaaacattgtaattcattgtagaaaagatccagtcatgatgcacccaacattagctacacacaatgcataaatcatgaccgctgtgctctactcagtttctggcgcttgttttagaatgtgatgacacaacataaaactaaatagatagtcccttcgctagagggaagcagtgatttgcagaggtgctagagatcaatttttanaacagagataaatgtaattttaagacatgcacct

SEQ ID NO: 442129 - DNA, 367 bp, Triticum aestivum
ggatagctatcgtcaaggagggggatcaaagatctactagtcctcatgcaatactcatatactttttcagtatggaacataagacaatgtcatcgatttcttaaactattcagcacattctaaaaggtgcccatgtatatcaatcttcatgacatctgctgtatgttgtcagtgtccattgcaacattaccctactcctgacgcactatgcaatcgtgcaccagtagcatttttggcaaatattcaatggaatataccagtgggtcacttttgcaagcagcaccattatcagcttagactagtcatagctcactaataggtagtccaccattaatagttttgcggagttgatctacaagaagagtta

SEQ ID NO: 442130 - DNA, 402 bp, Triticum aestivum
ataagcaaatttcaaagtgtctggcaattgttttaattcaaaaacaggatcacctttaggtggaggaggacctcctagagtttcaatacgcaaattgtgtttaagtagaggacgttgttcaaagaaaatattatctatttcatttctttcatgcatatgtaaatcatcttcatgatcattttcaaggtgtgataaaagttatcttctccagatcctcaaccaccatcttaatctgatgataactagaataagtatccaggaaacatagcctctcacaacccgtcgttacatcaataatctggtcgatacagggaagagaaaaaggatcagctagacacgccttattgagatctgtgtaatcaacacacatacgccacgtgccattcttttttagcacaagca

SEQ ID NO: 442131 - DNA, 446 bp, Triticum aestivum
taaggtctaaaattcccgggccgacttgtcatgcgacccgctgcaccatgcgtcgttgaagaatagccgtcggcacctggaattgtagcagatcttcatccagcgttggcagctctagcatgatcattgttgaaggggggactgccgcccgcagctgagagacatgaatgaccggatggatccgagcttgctccggcaatgccagtctgtatgccacctcgcctacccattggagtacctgaaacggtccaaagtaacgaaaggctagtttatgattagctcttgccgccaccgaggacagtgcatacggctgcagcttcaaatacacccaatcatggactgcaaaagccctgtccgagcgatgttgatcagccttctctttcatactttgtcgtgccctgttgagatgctaccgtaacagagccaccatggctgccctgtcccga

SEQ ID NO: 442132 - DNA, 377 bp, Triticum aestivum
ttcgcgggccgacggggaacactaagctctgttaagcggggccccaatcttcacagttccgtttaattctctccagtagttcccatgtgagatcaatagacctcagcatagaggtactaccacaggtggtatcaagcatgttgcgattaccatcagatggccgttcatcgtaattgcgactaagcaattctgtgagagagctcatgattggggcatgattcagcacattgagttaagcctgatccacgcttgggcatgcattctcctgcgcgatgccaatacttatatatgtaattacgatcacgatgaacaggatgcataagctagatcttcagttgagattctaacttcaatagcttagcattctaagatctcgt

SEQ ID NO: 442133 - DNA, 412 bp, Triticum aestivum
catgtacggatgtgtgaactacataagggagaagtacaacaacccgacgatcatcatatccgaaaacggaatggaccaacccgcgaacctgacccgcgaggagttcctgcacgacgcctccagggtcgagttctacaagacgtacctcgcggagctgaagaaggcgatcgacgacggcgcgaacgtggtcggctactttgcgtggtcgctcctcgacaacttcgagtggctgtcgggctacacctccaagttcggcatcgtgtacgtcgacttcaccaccctcaagcggtaccccaaggactcggcctactggttcaagaagatgctgcaggcgtcggggcccggctcctcgaaagacggcacggttacttccggcggcactcaggctggctccggcgtgtcaggcagcaac

SEQ ID NO: 442134 - DNA, 434 bp, Triticum aestivum
gacgaataaaacgaaaatctaagagacaagctaaaggaagcatcgaacaccatacaagagttgctgctggagaaatcaaacgctggcaggaaaggtcaaaaggtgtgagaaactcaccatgttgctaccgcctcactaaccagagtgactccagtttcacgttttcacgccctgggacatggcatcacagttgcttttgcaactctagcttgtctacagccattgtttagccccgccccacctttgtttagagttgagtggtagttgaatcatctcgtccagggtaagcttggagcgctttgtgcatagccatgaatgagatgaccaataagttgattcaatgtaaagtagaataaccacttgttcgtacggccgttggcgattccatgtttagcccgtcctacctttgtttaaagttgaatggtatttgcaac

SEQ ID NO: 442135 - DNA, 433 bp, Triticum aestivum
ccaacacatgcatatttctgcctagagggattttttttttattcggaagaatggaagcattagttctgacgttgtaggctgtacctaagatgctcatctcttcacatgtagacaattagacaaacactgtagctctagcatttgcttgtttgtttagggcttagctgccttcataattatttgattgatgtttttattggatattcatattttattttggagaagctgcatatggtgcttgatcaaactccatgaattagataaactttccaatttgatagagtaaatccatccagtttattacagcccttcccattcaattactcctgtatgctaagtggtaattgatcacaatatagcgtcttgcgcgtgtacatcgaaatggcgtcttcagtgttgctgctgctttggctcctacacaaataattgggtt

SEQ ID NO: 442136 - DNA, 437 bp, Triticum aestivum
  unsure (1)..(437): unsure at all n locations
tcccgggccgacggggtgggggtcgcttctcctttgttctctttgtgctagacctttgttatgcactagggaaagaaggagttgcgaccatcatcgatggttgaaaaatgggtgagggagtgtccaccatatatgagagaagaagaatgccgactgttgttgtgggggtcgcttctccttcttttccttgtgctagatatttgtaacgcactagggaaaggaggagtagcgaccatcaccgacggtcgcaatatcagagagggagtgccaccatatacgtgagatgagagtttaggaaggaagactcgacagacctaaagtcaacccgttgcttattgagtaatagtgatctgtgtgttgagtttcttgcttgttgcctttgattgattttcaattaatgtttcaactatgaacatangaaatgcctgacgatgaaa

SEQ ID NO: 442137 - DNA, 417 bp, Triticum aestivum
  unsure (1)..(417): unsure at all n locations
gtcgacggccatggggtcgtgaaaagaacaggtttagggagcaagcacatggatcgtttacctaggttcgggccgcgaggatgcgtaaaaccctagtcctgctttggtggatgtattgagtgttcttgagctttctaaactagctacgggggctgtcctgttccaaatagcggaatccttctcctggtcgcctcgggcctccttttataggaaaaaggggctgccacagtggcacacaggaggtggaaaggcctacagtgtgcgagcttatcgcacggcattacgggacaaagtgcatcaaatgtgctacgtangtgtccattagctttatcgggggcgggaatgaggcccgtcncatctgtcaccgcttcgcctcgcttcgacacgcgcctaagatggcgatgcatgcagcgccat

SEQ ID NO: 442138 - DNA, 405 bp, Triticum aestivum
ggtgatgatgaagatgatgacgatttggatttggaagattttgagtctgatgatgaagagggtgcggggaaatccggcggagatataaggtatgaggatttttttgaggaaagctgtaagcaacaagtcaagaagagaaatggtttcacaaagaaagtccacttcaaggatgaattgcatgaaatggaagtggataacattgagaaggatgatgtaaatgatggtccagcactagaggatgaacaaggtctttcaactcatgaaaaggggctcttgaagatgcgtaaccaaatagacataatggagaaagctagtcttgaacccagtaaatggatcatgcagggagaggttgatgcttccaggaggcccaaaaatagtgccctggaagtggatcttgattttgag

SEQ ID NO: 442139 - DNA, 377 bp, Triticum aestivum
gagcgccacgacgtcgagtggagcctcgtggagccaagcggagtcgtcggcgatgaagacaagcgcgccgagacggatctcgcggccttcagccaatcctccaccggaaactatgatgatgggaatcggaagaatcacaacttctgcaataaactgctaagacacctgccccaaggtgggcgccaactgtcgtggttctaagactgacagtagaatggggggtaggtatgaagaggcaagatcctagctatggagtagttgtacacacgagttttacgagttcaggcccttctcagaagaagcaacaaccctacgtctcggtgccctgaggcggccgattggattatatgtgtgtgtgagtttacaaaagatgcgaa

SEQ ID NO: 442140 - DNA, 396 bp, Triticum aestivum
cgttcaggcaaaagtataaacatagcctttataatttaataagcattgttcttacaattgagatacatgtcactagaacatgatatgcttcgagcactgagcctctattacatgagcgccttctaagacttcctcaaaatagtgctcggccgatacccggcctaccgccgaactctgggatgcaatagtggtggcttccatctctgcccagtatgtcttgacacgggcaagagccatccgtgcaccctctatgcacgccgacctcttcacagcgtcgatatgcggcacaacaccaatgaattgttgcactatgccaaaataactattcggcattggtccctccggccaaaggtgatccccgatgaacctcatatcaagtccggacaacctatggag

SEQ ID NO: 442141 - DNA, 302 bp, Triticum aestivum
ggtcgacggctcctccccggcaacggtgccagaaattcgttttgattaggaacctggtatttcctcaaagaggaagggatgatgcagcatagcggcggtaggtatttccctcagatatgaaaccaaggttatcgaaccagtaggagaaccaagcaacacaacgtaaacagcccctgctcacagataacaaatccttgcaacccgacgtgttaaaggggttgtcaatccctttcggggtacggcacctcaagataggcaaacaaacgtgagataaattgtagttgattgatagatcgaactcc

SEQ ID NO: 442142 - DNA, 175 bp, Triticum aestivum
gcattcttctccagagacggcaggcggcggagctcatcggagttgatgattccggcgcgaatccgacgaaccaacggcaccgtcgtgctcaggagatcaacacgaacatgcctgagggagtgggcaaaggcggggagcatcagagcaggagatcgaccatgggggatccatggcc

SEQ ID NO: 442143 - DNA, 391 bp, Triticum aestivum
tttacaacatacatccaaatcacaaaccgttttcgctgttgggtttatcacttcaagatctttgaaactggatcccatattaataggtttgactgagctttttttcacgaagaaaccaaaaaagatccagaaaacaaaaaaaacaaaaactaaaaaaaggaaaccgaaaacacggaaacttgtgcatatttgtgcttttcactctttttcggaagcacacttgtgctttttcacttttagagaagtacatatgtgcgtcaccatgaagcacatatgtgcttttcacttttcggaaagcacagttgttgaaagcataactatgtttttttgactaacgggaagcacaattgctcttcacgcagaagcttttcacacgtgcttcacgtgagaa

SEQ ID NO: 442144 - DNA, 376 bp, Triticum aestivum
cgtacaaagtttaccggagatcggggtgatatacattgttaggtccgcagtttgccactttgtaatgttcctccctacatagcgctgtcatgccatgtgtcatgtgtgccttgctctcagcagggaagttgagttgttgtatgttgtgtaacagaacgatgctttctgcctgtggatgtaaaacataagattgtctatgtgtcacgactcaaatggtattgtcatctactcatctctattatggcaatggcactttttgctagaaacacatatgtgcttttcacttttcggaaagcacagttgttgaaagcataactatgtttttttgacgaacgggaagctcaattgctcatcaggcagaagcctttcaaaacgt

SEQ ID NO: 442145 - DNA, 412 bp, Triticum aestivum
tgtgataatgatgtgtacgtgtgattccacccaagtcttaccaaaatggatcccctcttgatagtacgatgactcctacgaagctagtccaccaacaatgaaaggaaggagctacaccgtcttgaattacaacaccgaggggaggaaatcgtctcgtgccaatggatgaatctctgaaagaactaacgcacacgattagtctgcacaagcattgtcatcaatcaccaaaacatattgggaataaatatgcccttacaacgtgaatgtatttgactttttgagccttggaataattgagtgcgagagagaaaatttctcgactctagtggggaagaacataatggtcgggctccggtgagatttggatttaggaaggaggagcttgcatccccaagtccttccatctgccccg

SEQ ID NO: 442146 - DNA, 423 bp, Triticum aestivum
atcatcaacatcaccatcactccgatcagcaggtacagggaagaactcggggaactcagtggcagaaggaaaatcgacctccagaagaggaagtcgagcgggaataggctcatcaggctcaacaggactgccaggacgcgcacgaagatgagccctaagggcatttgcctcagagatgcggcgaacctcctcggtagcaatgtgagtagcagtgtagcggcaggtgtcaaagatggctttatgggacttcccaataaagcgagcaaggcggtcaaatggcttgacgaaaggtttggtgtggcaagaagagctctcaccacacgacggagcaggagccttgcccctagaagtgtcatcacgcggagtccacatggattgaatgttgttcttgttgatggggcaagtgaagatagaatcaatgac

SEQ ID NO: 442147 - DNA, 327 bp, Triticum aestivum
ggtcgacggcatggaaaaggagcatgcggcgttcgcatctgggtgaggatgaaatgaagatgcaagtagctgaagggtctgttttgcactcatgcccatatgtttgcgagttaaggatggtgatcttagagtcatgctagcgggtacttgtggattgtagaagtacttgtgttgaagttcgtcattcccgtctcatgcacgtccggtgcagcgtcacgttacgaagtcggtacaatagttaattattgattgtcctgctcatcagagccctgtatctactatttgaggacgaatctttgcgtgacacaccccaaaaaccatacacgt

SEQ ID NO: 442148 - DNA, 419 bp, Triticum aestivum
  unsure (1)..(419): unsure at all n locations
ggctccgagtcggctcccactgatcgcttctagaagcttccagaaagctccggcccgccgccatggccgcgcccttcttctccacccccttccagccctacgtctaccagagccaacagggatctgtgacggcgtttcagatatccggtggggatgtgcaggtcctgcaggtgatggtgaagtcgcaggacaagttgactgcgaaaccaggtacaatgtgttacatgtccgggaacattcagatggacaacaattacttgcctgaaaacgatggaggcgtgtggcagtggatatttggaaaaagcataaccagcactgttttcttcaatcctggccctgatgatggatatgtggggatttctgcgccatttcctgngaggatactgcctatagatctagcgaactttggtggagaacta

SEQ ID NO: 442149 - DNA, 345 bp, Triticum aestivum
cggtgataattgataatgatcttgctgaaaaacagaaactttttcactcaggaaaataattctcacttgtagcggatgcataataagacattgactcctctttgagaaagatcaatggttaaatttcctaggtcgtgcgaatgtttcggatgataccggagtgagtcaagtataccgactagcaagattgctacagacggttcggtctttgatatattcaggtttctaagtgttgtctgcttaatttgacaaatctatgggtagtatcggggggtatgaaccatgcaggagttgaaatacaatagagatcacacatattaaaaggaagaatgagttcacaacagt

SEQ ID NO: 442150 - DNA, 441 bp, Triticum aestivum
cacgatttagctctgcagctagacagtaccctggaggccgcactcgagcccgctccaatcttcaattcagagccggctgcgcagatcgaggacggatggctagacaccgcctcgggggctgcaacctctacggagatagagccgaacactgaccttgtccctcatgaagcttgtgacttcgaggtaccggactccgaatctcccacgccccctccaatcgaatccgattgggtgccggtcatggagttcaccgcagcggacatctttcaacactcaccttttggcgacatcttgagttcgctaaagtatctctcgttatcaggagaaccctggccggactgcgctcaggacggttgggatgcggatgacgaagaaattcaaagaccaaccaccaatccattccccaccagcaccttccggcgaaccaccgcaactcccccg

SEQ ID NO: 442151 - DNA, 390 bp, Triticum aestivum
ctaacacaaaaccctactttgtttgcatgtgcagctagaaccctagcagcactgtgtgcaagtcatgcatgaaaaaacctactgtccgcgaggctctggtatatagtgcgtgcgtgcaaacagtagtacatacaaggtgacaatggaatgtccaagaaacagaatgcttccaagcatgcatcatgtggacgtggtaagagtaatactagtactactatacataccgctacaggttggcatgcatgcatatggttttaatatatttgcaaagcttgattggcatcgaactaaaccatatgcatagtataccatataaacacacgagcggcgatcccatgttcctcacctctgcggttcatctcccctcgctgccgcctccaaggaaaatat

SEQ ID NO: 442152 - DNA, 396 bp, Triticum aestivum
tcggatcatgtgggtaaagtgtgcaacctctgcagagtgtcaaactattcgaataggcgtgtccacggtcaaggacagttggataaccgctcttgggatacgcccattgtttacaagagctggtgcgtgtgtttgtgtgggtgaaagctacttgagtcgagtttaatgacttgaatgttgattaagctggagttgatccaaactctgtttatgttgatacctataacctattcacatggagatctaaatacttatgatgcatgctttacaaagttgttaggacatgtcattgcactcaaaactagctttatgcaaaattatctacttagtgctatatcatgcattgttgtaccttgtttcaaaacatgggttgcttgtgagtacattaaaattact

SEQ ID NO: 442153 - DNA, 407 bp, Triticum aestivum
gtgcttaatggtatgctccaaataccctcaattgctttcccacttccacacatatgtcctaaacctaaagtcaaactcggccccactaattctttctatctggcgccaccgagtttggatgtcttagccactgccacaaaccctaggcaaatcagtctcaccgatagggatctcggtctcaccgagatgggattgtaatctctctgtgtatgtccattatcaaaatcggtctcaccaagtttgagcaatcggtactaccgtgattacaatgcaaactctctggttaacttattatcaaaatcggtcccaccgagtttgataatcggtccaaccgagtttgcctgaccgacactctggttagctaattaccaaaatcggtcctaccgagtttgtgtaatcggtctcac

SEQ ID NO: 442154 - DNA, 405 bp, Triticum aestivum
ctccctgaaggatagtctcgcatgtaaggtagtcattgccggagcccttgaatggcctcgactgaggcctctggcttcagcaagatcgccttggcactgtttcatggcagtcagaaaatagagatgaacacatgcattaaatatcattcttacctaaaggaaggttatggcgccaatatggatgatgaggattggaacacagatctccctttgtgcagttccaccaaaatgaaccaactgttccattctgacattccagttaaacaacacaaaagtcacttcttttaagaagagttttgtgcagtgcaccaaaaggtcacaacagcaggtgaattggatatccctgtttgcacaaaaaggcacaaaggaaacagtcagagtctcaaacaattataggcaaaaaca

SEQ ID NO: 442155 - DNA, 373 bp, Triticum aestivum
  unsure (1)..(373): unsure at all n locations
ggccgaggcgggtccaattcgatccccaaatcgcaagacgaaaccctagactcgccccacagtttcttctaggtcgcaccaaattggagcagatagatccctaggtatcgaagatggcggatccagctgctctgccaatcgtgccttgtccggattgcggcaggaacgtggtgacctacgttgctaggcgcgggcagaacgccggtcggtgtttctacaagtgccggaatcacaacccttcatcgggcggatgcaatttctacaggtggcaggaaggctatgcagcgcgtctggccaatcttgaaggaggagaagctgctgtgggtcaaatcggtccgggtcagatgcanggtgggcaagctgtcgaagctca

SEQ ID NO: 442156 - DNA, 408 bp, Triticum aestivum
ggccgagggggtcacgaagaactagagccgttgcgccatgggccccaagacgcacgccacgaccagggacacggagcagctcatcgcaacagacgctgcgcacaggttaagctaaacctagcctgagatgtgagagcatatgggatgtagtttcgctttcagtgtgtcatggttttgaagatgaacgcgagaccttttagcaccagtgtggcatcctattgtggctttcagagtcgctgtccacattcgcgatacgtaagcatttatgagatcatgtttacccatgtctggattcgcacagcagtaatatcggttgtacaatgaaaggatccccgttaggatgcatgcccaagaaactgttgctgttatgtcagagttcatccaaactggaggcataataccatttgg

SEQ ID NO: 442157 - DNA, 56 bp, Triticum aestivum
gtgatgatcatcattcatagagcattgtcccaaacgaaaaaaaagacacaagaagt

SEQ ID NO: 442158 - DNA, 286 bp, Triticum aestivum
tcggggaaagcccccgcgatacgtaaatcgatctggacagacctgctcgactgaacatctcctgtcgcacgtcgaatgtaagtcaccgagctagtttcattttgccttaaggatgaggtaatgcataactggagttcagacatgaattgacacattgactcagacacatcatggtctatcatgacgactacatactgagggaacatgatcgaacagaccaaaataaacaatctgtgtgagaaagtataaactgtgtctctagaggatcgaacattaagatatatca

SEQ ID NO: 442159 - DNA, 53 bp, Triticum aestivum
atgagtctgtcgtcgcagccgggccggcacttctgcagtgcgaggtcgtcatg

SEQ ID NO: 442160 - DNA, 313 bp, Triticum aestivum
ggtcttgcagctgatggagaatgcatagatgcttacgatttcgctagcttctaattccgcaagttgtattgtacgctgatggagaatattcagttgtagtggatgatattttgtaccaggcataaatggaatcttgatccataaattcagctggacggctctgtatggtatctgttccatttctgagcttctttcggatgtgaaacggagggaagttatgttatctgtaatcccgcagtgctgttgccgaggaatacgtgctgtgggctttcttattggaccctgataaatcctgaacgtttggattttaggc

SEQ ID NO: 442161 - DNA, 431 bp, Triticum aestivum
ccacccaacgtgatccccaggacttccctccgaccactatctttaaccgacgagcgtccaaagtccaaatctgggggaaggacgataacacacaaactgcaactggcctctttcgagaaggtgcctagccaacagagaaccagagcaccacacctccaatcatcggctcctcgccgatcatgcaggccgaaagagtcgattgaaacactgacaacaagccccatcaaaaggacgttcctgtcgtcgccacctggggccgccacctcgactttcgagcccccccccccccacatgagtttccctggccgaatccacatgtgaagccaccatgagtgtcgctgtctctaggacggtcagatttgagtcaacaaactttcccacccccggagctgggtgtgccatccacttcctaacaaaccgcaatgggaaaa

SEQ ID NO: 442162 - DNA, 142 bp, Triticum aestivum
cggtgttgaaatatattttgaataaaagatgcatgccatgcatataggccatgcttttagagaataaacagacagacagacaaactgggtcttattgtaaacttatattgtcacgtgaaggaggatcattctgagttgtgcc

SEQ ID NO: 442163 - DNA, 289 bp, Triticum aestivum
ctctccacggtgaagatgaatccacatgcccctggatggaacaagaggtaagcctgatgcttgttagttcattccaccgtaggacataggaggcgaattcagtatggcaggcaggtggaatgatttagcgtagtaatggatgtgcaaaaagaatttaggtatggccaggtaggtgttgaaaaaccatcatgtggaatggaaaggaagtttgtgtgggctgtagtatggtgaagcacatgccagtttctgggctgaaaaaattgtacagatttagatgcaaaataaaaga

SEQ ID NO: 442164 - DNA, 371 bp, Triticum aestivum
tgatggaataaatgatgctccagctctaaagaaagcagatattggtattgctgttgctgatgccactgatgcagccaggagtgcttcagatattgtcctcacagaaccaggcctcagcgtgatcatcagtgctgtgcttaccagtcgtgcaattttccagcgtatgaagaactacactatctatgctgtctccatcacaattcgtattgtgcttggatttatgctacttgccctcatctggaagttcgactttccaccgttcatggtcctgatcatagcgaatccaaatgatgggaccatcatgactatatcaaacgatcgggtaaaaccatctccactacccgacagctgggagctgggctgagattttc

SEQ ID NO: 442165 - DNA, 350 bp, Triticum aestivum
tcagtacaagctcatttcatctgcacaatgatccatgtaagaatatgggtcataattaggatggttcttcaatgtattcaaagggatgcattggagattttcgatgttgctagaaagacattttcacgagaaatgtcaccgatatattatggaatagtctaggaagaacggaagtgtgctaacttagggtggattcatgacgagtggtcacagtctttgagtatctgccaaacaagccactgaatcatgtatgaggaagagaaaacatgtgtgattatagaaagacgagtcagcgatgaagcatattacagcacgcgtcatatcaagtagaacgtgcagaatcacctcac

SEQ ID NO: 442166 - DNA, 153 bp, Triticum aestivum
gagagacacacaactttgcttcttggaagaccaacacattaaagagcaaccaagaaattggcaccctccggaagtggacttcctatccactttgtctcccgcccaatcggaatccataaatccttcaagcttgaaatttgctcctcttggggc

SEQ ID NO: 442167 - DNA, 424 bp, Triticum aestivum
attgaagcaaccatgtattccattcatttttttcacgatattttactttctcaagatccaatccatacctagttcaatcttgttactggccatatctctttacatgttctataatacaatatccgcataaccaaacacatttatcacatggttgcaagctacttaggatgttgtattaccgagagggcccagagatatctcttcgtcacatgaagtgaaaaatcccaatctttatccatgcaacccaactaataccttctgagatgcttgaagagtaccattatgatcacacagttatgaaattttggttgatacccacaaagcattcttccggttttagagagtgtcatgatctcatagtctaaggaatatatacttgacattaagaatatgtagcacataaactaagtgatacgatcatatg

SEQ ID NO: 442168 - DNA, 419 bp, Triticum aestivum
gggccgacgggaggggacacgatgtttacccaggttcgggccctctctatggaggtaataccctacttcctgcttgattgatcttgatgatatgagtattacaagagttgatctaccacgggatcgtagaggctaaaccctagaagctagcctatgattatgattgttgtgtcctacggactaaaccctgcggtttatatagacacccgagggggctagggttacacagagtcggttacagagaaggagatctatcatccgaatcgccaagcttgccttccacgcaaaggagagtcccatccggacacgggacgaagtcttcaatcttgtatcttcatagtccaacagtccggctgtccggatacccccttatccaggactccctcagataccaccactgaacgtagctgacacgaaag

SEQ ID NO: 442169 - DNA, 423 bp, Triticum aestivum
gacggggagttccagacggacggactcatccgcatcaaggtcgggctcagcgggatcctgatggtgaagggcacgccctactcccacatgaaccaggtccggcgaaacgaggagatgcacgggaccctcctctctgagaacgtcatcggcgtcatccacgaccattacgtcaccttccgccttgacatggacgttgatggcgccgacaactccttcgtccgcgtcgatatggcccgccaggacaccgcgcccggcgagtccccccggaggagctacctcaaggccacacgccacgtcgcgagcacggagaaggacgcccgggtccggctgaagctctacgagccggccgagttccacgtcatcaacccgacgaagaagacgcgggtcgggaacccggtgggctacaaggttgtccccgccggc

SEQ ID NO: 442170 - DNA, 65 bp, Triticum aestivum
  unsure (1)..(65): unsure at all n locations
aaggggtcccaaaaaccttngaaaatttttttggaaacccccccgccaaggtttcnaaaaggggc

SEQ ID NO: 442171 - DNA, 62 bp, Triticum aestivum
acattgtaagaacattgtcccatgtgaggttatcaaaataaaagtggccaaagaagccccac

SEQ ID NO: 442172 - DNA, 377 bp, Triticum aestivum
  unsure (1)..(377): unsure at all n locations
gtcgaacaggtcaggatatgctcattcctgtgaaaagcccgacccagttaaaattagcaggccagcccatataaggcctacttgtgtcaggtccatttaagcccacggcccatacgagatgagccaattcggcccgtcaacggcccgttaaagatttgacaccattgcagcccatcgtcagttcgaccccgttaacagcctgctatatatttgggctcaatatcggcccgatgagatttcggcctgttaacggcccgtttaatggatgggccaattttcaagatgtacatctttcggccttttagcgacccatttaaatgtanggctagtttccggcccggtgtgtctttcatcctgttgacgacccataaatctga

SEQ ID NO: 442173 - DNA, 417 bp, Triticum aestivum
cccacggtacatgtgagccggagacaggagcggcacgctgttgatcactgaccgttgccggtgcatgtacattttacatctggagaatggcgccatggaggaggtgacggaccacctccgtggcctccgcgactacaagaccgccatggccgtcgagatagattggccggccttcttcgtctgtcggcttcttggtggaaaggcacatgtttaatttggagcgaacatttctatctcatcggcgtaaactggccgacctgtgtattaagtcgtgttaattatgttcaagatcgcaactacctttgtgcgaccggaacaaaaacctcaacatctatttctgtactccctcccggaacgttttttttgttttaaaagaagacccgttgccaaaaaaaaacaaaagtttaagaaataaaa

SEQ ID NO: 442174 - DNA, 399 bp, Triticum aestivum
  unsure (1)..(399): unsure at all n locations
gggtcgaccgggaangacaactcaccgctcaaggccatcgatttcggcctctccattttcttcaagcccggtgaaaagctttcaggaattgttggaagcacctattacatggctcacgaagtattgaatagatactatggaccggtaatagacatatggaatgccggggttatcttatacattttactatgtggagttcctccgttttgggctgagaccgaacaatgggtagcacaagctattcttcgtgggaatatcgattttaagcgagaaccctggcctaatgtatcagaaaatgctaaagatttggttcgacctatgttggaaccagatccaaagctcaggttaactgcaaagcaggttcttgagcaccattggcttcaaaatgctaagaaagct

SEQ ID NO: 442175 - DNA, 354 bp, Triticum aestivum
  unsure (1)..(354): unsure at all n locations
gcgagcatgatcctctcggcctccagtctcccaccctctctggcgttcggcggcggcggttgaacggcggctggcagcggcgtatctgcagttttctgaagaattgcgtctgtccgcccttgttgcagagcaatccgagaatggcctggggtcagggtgctagaaggcccatactanggcttctgtctcgtgctcaacgacaagctgctcgagggtatacttctgcaacgttcgaaactcacctgtcgagcaatcattttgccccaaatggcatgatttgtaggagatttagctctgaggtgcctgcttcggagcaaatgaatcttattaaacgactacgcgaaagaacatgtg

SEQ ID NO: 442176 - DNA, 292 bp, Triticum aestivum
actgtgtcagaactcagcgagcttccgatcgttctggccgcacatattatggacatccagttttggccactgtgggagagactacgacagacagcgatgttcacagtgatgatgtcagtctaagggccgactatacgattcctccgacatgcgtagccgatcgacttcatggtatccccgcggatgctactcttgtggcgaacctttcttgcgctctatgctcgaacgacttggaatgggtactcgctattatatcgcatttgctcgatcagttacctccttatgctatcag

SEQ ID NO: 442177 - DNA, 387 bp, Triticum aestivum
ttttgaaattgaagtcatcacaagcgcctcactatcgacgagaacgtcattttcaattgaaaatattgttccttaatgagacaccaaagtgtcagacgtcgggtttaatccctgtttgcattggggtaccactgccctattaatcatccaatcagatgttggttgtcatgattaaggcgaaactaccgattgaagtaaccttccttatttattcagtagccacgcatccatgccctgtagtaatggacaataaaggatgatttgtgtttcttctattcctcggcatgcgcttccctaccccatcgtgctgcactgatggatgttttggcagacatctcaattttctcttttgttgcaacgcacagccatatgtgccatctatcccta

SEQ ID NO: 442178 - DNA, 400 bp, Triticum aestivum
gggtcgaggcggaaagtttagaatggagtttggcagcagcagcaggttctcaagccctccaacgctgtccatgcggaagtcaaggaacaatatctcgtctccgcagcagaggttgaggatgcagtcaggctctggaaatgccagcaagctatgcttcagtatccagaagagagtagctcttggttcacctgctccagcaagaacgacttccatgacgtctggtactggcatctttgatccagctctgcgcgagcagataatggcagggagattcggcaatgcgcagagggtgttcaacggcaagaggagaatgtccgtcctctaaggtgaagaagatcggttcggaatgttgagacagcggtgcggaaccgggatgctgaaggaatgtggtggtactttt

SEQ ID NO: 442179 - DNA, 419 bp, Triticum aestivum
ggtcgacgggagctgtggggagggctggctgccctggccctccaaacggccggcttcatgaggctcacattctgggagctctcctgggacgtcatggagcccatctgcttcttcgtgacgtcgacgtacttcatggccggctacgccttcttcctccggaccaagagggagccgtcgttcgagggcttcttccagagccgttttgtggtgaagcagaagcgtctgatgaaagcccgggattttgacgtccgccggtacagcgagctccggctagcctgtggcctcccggcgctacaccctcagagcccctgcgcgtcctcgcaggagagccaccaccattgccattctcactgccattgtcattgatgtgttgcttggaattttttatgcccatttgatgtggctgctgctgctgcttc

SEQ ID NO: 442180 - DNA, 73 bp, Triticum aestivum
gttagaaattgtaaatatgcattgttgtatcgcgacctgaatgaatgaaataaacgaaataacgctcttgttc

SEQ ID NO: 442181 - DNA, 225 bp, Triticum aestivum
ccgggtcgaccggtacagctacgaaaagactacagaagtcgacggagaatacgcgacactggatgcccatgctaacaggagtgcgagggttgactggctccgctgcaatgtgaggctgtcatcgactcaggatcacaagggttgtgcgtgcttagagggattgtctgcctaaaagttggactagggtcaggccatcaaacaagaactaattccatgacgtcaaat

SEQ ID NO: 442182 - DNA, 397 bp, Triticum aestivum
gggtcgacggggggttctacacctcactcggcaagctaatcggaggagcaaaatcatccgttgcagagatcgtcggtgcagcattttccaggaagaagcgcccaaacgtccaccaataccagcagggcagagcaagcccctggccagtgcaagaaagctacgccatcccgcgtgatgagacgcctccggtggtggacacgaggacaccgacccctcgcaagaactacgctttcatgtccaaggagccggagaagatccaccacatccggcagggccgggccccatacaacggctggaacaacggagaatcgcctcagcagcagcaacagcagcaacagcaggtgcatcaccggcagtacctgcagcacaacaggcagtactccctggggccgcagac

SEQ ID NO: 442183 - DNA, 368 bp, Triticum aestivum
cccgggccgaccggtttggtgttgtgcacagactccattggacggcgggtaacttgtcgagccaactgccgggtgagcggacgagtggctcgatgagtcgcggcttgatgccggacaggatgagtctgttggcccgctcgacctgcccgttggactgcggatgtgccacggaggccaggtcgaggcggatgccggagacggagcagtattgctcgagcgcgcccttggcaaagttggtgccgttgtctgtgctgatgttgttcggcatgtcgtagcgcacctctatgtccttgatgaatcggacgactgttggcccatccaatttcttgattggtcttgactcaatccatttggtgaacatgtccaat

SEQ ID NO: 442184 - DNA, 147 bp, Triticum aestivum
atcatcaatattagagcattgccccactgaggaaaggatgatggagactatgattcccccacaagtcgggatgagtctccggactttatgaaaaataaaagaggccaaagaagcccaaataaaaaagagaggccaaagaagcccacc

SEQ ID NO: 442185 - DNA, 410 bp, Triticum aestivum
ggtcgacgggatagcaaaacccaatagacctgatatcatcacgggaatcggtatatgggagcttgacaagacacaatggtaagaggtgagtcggatgcctcacaaattcttccaaggatttggtgagctggatgatgttttttgtagcggcggtgccgacgaccttgtctacatccaaagctatggtgcaactgctttgcttggatttgacatgaagcagaggcaatggaagtggtcggcaaaatgccctgtgcgcaaaaagtttcctctccagctgttcactggcttttgctttgagcctcggctggatattaccacctaatacttgtaccggtctgtaccgttgatttgctcggaatcaaacaaaaccagtgatcctcgtcttttgtggaagatggatgataaactct

SEQ ID NO: 442186 - DNA, 409 bp, Triticum aestivum
gtcgacggggaacattaacaacgtctcctgtgagcgatacttcggtttcgggtgtgagattgatgaggaaacatccaacaaactggaaggcattcctggtgttctgtttgtgcttcctgattcttatgttgatcccgagcacaaggactatggagctgagctatttgtgaatggagagattgttcagaggtctccggagaggcagagaagggtggagcctgtgccgcagagagcatcagataggcctaggtacaatgacagaacccgctaccaacgcaggagggagaaccagcagcggtgatgagccaaggtgctcaattgaagatcaaaaaataacaatccctggtggcttccgccgggtaaactgaaaggataaatatcatctacggaatagaagaactgcatgttc

SEQ ID NO: 442187 - DNA, 96 bp, Triticum aestivum
gggtcgaccggagaagttattttaggaaggaaagctaccgaatggacttggaccccacctcaggagccaagggaggtgctcacaagggtgggggac

SEQ ID NO: 442188 - DNA, 321 bp, Triticum aestivum
atctttttataagtgggggagaggaaaatgagaggtgaatggcgaataatgtaatgcaagagatgagagtttatgatgggtacttggtacgtcttgacttggcatagatctcctcggcaacgacgccagaaattcttcccgctacttcttgagcttgcgttggtttttcccttgaagaggaaagggtgatgcaacaaagtaaagataagattttccatcagtttgagaaccaaggtatcaatccagtaggagacaacgcatagatcaccgagtacacacgtaagcagacaaacttgcaccaaacgcgatagaggggttgtc

SEQ ID NO: 442189 - DNA, 374 bp, Triticum aestivum
acgggcatttaaatttctaatatgtgaaagcacatggccattgatagcagaagagagattaagcatgttgcgaaaattcatatctaaactagccttcatctctttaatttttttcattttgataaaagtacataagagtagttgattcaacattttctcccttggggtgcccaaatatggtcttcatcttctcataagtctcaacggcatccccttcaagaaaaccattttcaaaaatagagtctgaaacttgcttgaaggaagaaggtaaaccaagataaaaacttttcaggtatatctctagttgatattggggcacatagctagctcgaattctcaacaacctatccgaagcatctttcaaagattcatca

SEQ ID NO: 442190 - DNA, 390 bp, Triticum aestivum
gggtcgacggcatagaaagcgtgaagatagggatgtctcatcaagcaaggtagacgacagggatagggacaaagttaatactgtgaaagaagatagtgatcctaatagtgcatccaaacggcggaaggttaaaagagaacagtctgctttggaagctggggaatacgcgccttctgctccacagcctccgagcgttggacctggtaactcacagtttgaaatacgagagagagaaagaaagggtgctatttcacagcatcggccatcacatgctgatgaccttcctaggatgcatgccaaggattcaacaagcaagacaagtcgtaaagaggctgaccaaacacatcatagagactgggaagaggagaagaggcaaggactgaagcaaaa

SEQ ID NO: 442191 - DNA, 390 bp, Triticum aestivum
gtgcatgagcccccaatgactagtgtcgaggctctccttcagcagctccaccaagccgtcaatgaactcctcctgcttattgagctgatcgggcatgttgttgagggataacgactccagcgccgccagctcggcatgtttacctccgcggctagggcgctcctgggagccctcgccttcccgtgagagatctttcgaggtctctgccaggcggtgagccctctcatttttttccgcatccttggttgctgctcccttgttacgagtagttctcgacctagagctctgcacaccgtccatggctagttcccctttttataacctagtactagcaccagtactaaaacctgcatagtgggaacacattcagatttgatacgtactaggtgt

SEQ ID NO: 442192 - DNA, 319 bp, Triticum aestivum
gggtcgactaagccttccagctttcccgtctcaagagctcgactaagcaatggtctagcccactcaacaaggctctcatcgcccaatggtctggatgaatcaacaggctttcgaccagtcataagctctaagagtacaacaccaaagagagaacacatcagatttctcagtcagtttgccactcgatgcatactctggagccatgtatccaaatgtccccataacccgggtagttacatgtgttacagcatcgaaagccaatcttgcaagtccaaaatcagccaccagtgcgtcaaagttattatccaacaaaatgttt

SEQ ID NO: 442193 - DNA, 367 bp, Triticum aestivum
ttagccatcggcgaccacccggcggtcatcaccaccgacagtttcatggggaatatgcccaccgcgcaggtcaagcgcatcgccgaggacctgcaagaccaaacggaggagtcagctcttgtgatctccggcatcacggggaggattaacagggccgtgtgggggcccggcaaccggaccatcatcaccgccggtgaggatgccaccatccgcatctgggactctgagaccggaaagctgctgaaggagtcagacaaggaggttggacatcagaaggcaattagctcactgtcaaaatccttagattggtctcatttcctcacaggttccttggataaatctgctaagctatgggatgcaagaacac

SEQ ID NO: 442194 - DNA, 297 bp, Triticum aestivum
aaaagttctgtcagcacgacagcgtggtgacgatcctgatgtactattgtcgcaggggttcccctaagcaacgccaaaatattaaccaaggaataatgtgcaaggggggcaacgcacaccgctaaaaacatgattacattgattaaccttgtgtctccaatgggtgccccctgcccccgtttatcaatgaataatagacgggatgggccggccctccccaaagccccccctatgggagtcccactcccaaccggaataaggatccccccttccaaattcaagataagagtccttcca

SEQ ID NO: 442195 - DNA, 331 bp, Triticum aestivum
gttgttccatggctacttccttccccgtagaaaacaaagattagtgacaaagagaagaaggagaaggaaaaagcctagagagagaaggacaaaggggcggcgacagctgctgggatggcctgctcgtggcatagctagagctcctctccaagcgcggtcggaggcaggaaggccgggctgctggagtgggaagaaggggggatttgcgtggttttgctgtaaaagtaggtttattatcagaataaatagtatctcctcgctcatttgtaatcaataggatcaatttatatacaccagctgcttgaggcatctacaagcagaggaagggaat

SEQ ID NO: 442196 - DNA, 381 bp, Triticum aestivum
cgataaactcgagcttgtggaccaagatgaggaagggcactgtaactcggaatgcaagaccattgagcgtgcatgccaggaggtgatgggttatgctgataccgatgttgctgagtttgtctacacaaataagccttcagttgatcagctgataaagtttgtctgcaaagatattaccaaagcatgtgctgcagatccaccaccagttccaaaagaccgggtccctggagaaccctttgcagcaaagccctcaaaggatgctgagatggagaagataatgagatcaatggagggcatgccaggagccccaaacatgaagatgtactccagagacgatctgatgaagaacaactttggcgttgaaggtgatgaggatgatga

SEQ ID NO: 442197 - DNA, 325 bp, Triticum aestivum
gactgtacttttacaattagataactcgttcacccattatcttcatctctcgagcagggccgtatctgagaatttgggggccagtgcaaaatcaaagttcaggtccagatcttacgaaatcgttatggaaagaagtttttttaagttaccatatgcgcaacatactttttccaagagctatatggtgcaaataaagatgaattaataaccatgaatcggtattttagcttgaaggaacaatcatttccaggaagttttaccacaacgtcttaccgtgaatacaacacagactcactggttaacttattatcaaaatcggtcttag

SEQ ID NO: 442198 - DNA, 131 bp, Triticum aestivum
gggtcgaggcgttcacatattcaaatgatccaatctgcatcttatctagtttgttttggaaagagggagagagaaaaaaaagagacagagaagagaaagagaaaaaaaaaaaaaaaaaaaaaaaaaaggaa

SEQ ID NO: 442199 - DNA, 96 bp, Triticum aestivum
atgagtgacccggggtacttttctactgcaagtatgccatctttgtcgtcggcgataatgacgaccgcatatatctttgcagttcgggcattaggt

SEQ ID NO: 442200 - DNA, 492 bp, Triticum aestivum
  unsure (1)..(492): unsure at all n locations
aactgttacttgcccggccnggtctaagtcaancgggtcgacnngaancacnacagntngtcnnctaaaggtccctaagcaatcacttagtggaaaaggaagtgatcgagcgatgacaaccaggaggtgggcttggaagcagccatcctttgaagaaagcgtaatagctcactggtctagctccatggcaccgaaaatgtctcagggctcaagtgattcaccgaagcgacgagaccttgaaagcagctttttcaagtgtcagtagcgggacgttctgtcaatcggggaaggtttttggtgacaagacctggagatatcagaagtgagaatgctgacatgagtaacgagaaatcctgtgaaaaacacgatngcctgccagtggaangctttctgcgttcantcaatctacgcagagtnaatccgtccccaaagaaaccccnaaaaggctncnttccaangggtttaccaaaatntccaaattttcctttnana

SEQ ID NO: 442201 - DNA, 421 bp, Triticum aestivum
gacatgaattatgatgcacttgcaagcacacctcgtggagaaatctgcatcaagggagaaacattattctcagggtactacaggcgtgaagaccttacagaggaagttttggttgatggatggttccatacaggggacattggcgagtggcaacctgatggaagtatgaagatcattgatcggaagaagaatatcttcaagctttcacaaggagaatatgtagcagttgaaaatttggagaacatttacggtgttgtttctgctatagactcgatatgggtatatggaaatagtttcgagtcattccttgttgccgtagtcaatcctaacaaggaagcccttgagagctgggctgaaggaaatggaaccagtggtgattttgaggcactgtgtgagaatccaaaagcaaaagaatatattt

SEQ ID NO: 442202 - DNA, 392 bp, Triticum aestivum
tcgactcccacgtctgtgttggctactccgctctccagctcataattgctcaattcactgaccgtatcacgaacctactatacacgcctattggctatgaggtgcactgctccatgtgctacatcctccatggctcagtgtgcccttgcttcaagttcgacgctggagggataagcaattcttcctgcgtcagctgacacgggtctgccatcaacaacttcagcgtcacccctgtgatctggtccactatcctgtgtaacctcttttctggattatggctcaattctgcagcattctgctatctgtgagttatgtaggatctatttgtcaccatggtggatattccgttactgttctagctctccaaagctatccagatggaagctgcctcc

SEQ ID NO: 442203 - DNA, 397 bp, Triticum aestivum
gggtcgacggggatggatgcgtgtgatcgagttgatcaacacccacacgtgtgggcgttaacatttccgaaaattaattagttacgctaatagactgaaggagtttaatgtgacgttcagagaagcatttaaaatggtatgaaaatgcaattgtcaaacagaggtactaactatctgtgttatcattcttctgaagtcttgaggaagatgtccaaattatgttttccccttgaccatcagatgaagcttggtctccggctttggtcatatgtttgagaggaagcttctcatggaagggtggggagagtttcggttcggaaggtggtgggtgggagcggaggaaggaaaggggagaaagatgtgctttcctcgctgcaacgcacgggcaaattactag

SEQ ID NO: 442204 - DNA, 381 bp, Triticum aestivum
atttgaaagaactcttgcaacatcccttgcagcctaagacattctcacgccgctatttggctggggctggtatttcaccattgcttcaaaagcaactagaagagttgtccaaaaggaatgtaaacagtaatagcagtaatgacaataataaaggatcgcggtttgttattattggccaggatcgtgtggaaccattgcaagctcttcaagattctgggcaagagatttgtgtgaacatggacaagcaaaaggagaagagaagacttgctgagaactggaggcgaaagaaacacgaagagaagaaaagcacacgggaacaaaagagaaaggacaggagaagtgctaaagagagggactgaataataaatgaaatactgaaag

SEQ ID NO: 442205 - DNA, 386 bp, Triticum aestivum
actgggtatcttagtgatggctgctctgatgatgatgagtttcttgatgctcaccgtactatggaggatgatgtcacagcagaagtttttcactatctgaactatcacagaacgcactgcttaatgcttctcaactgatcttttatcaggccatttgcacacacatggatcgtgtgcatctgtaaaggatgagaccttaaaaggcaagacacaaattactgactatagcagagaacacatacccttacttcgtgataatacaagttccaagaagaaaaacatacaggtaactccggtaagctgcaacatggatgaaagtttgatggtggaacggtatggaaggacaaaaaaaaaaaaaaaaaaaaaaaaaaaaaagcggccgctct

SEQ ID NO: 442206 - DNA, 155 bp, Triticum aestivum
tcgacggggaagacgcgacaatggatgcccatgctaagaggagtgcgacggttgactggttcggctgcgatgtgaggctgtcgtcgtcgcaaaataacaggggttgtgggtgagtatagggatggcctgcctagaggttggattaaggtcgggcc

SEQ ID NO: 442207 - DNA, 423 bp, Triticum aestivum
gggtcgacggggactactatgaagatgtatacaaggtttgatctgatcattaccaacttgtggcagacgcggaagaagagttggtgaagatcatcggtgcaggttgacgcagctagggttttacaacctcccaaccgcaagattatttctgggtgatggagcattacgaggctaaaaaatgggctttcaagtaccgaattgacttgtcaacattggtggcgtcaagacaactgtagtcagcttattccaaaaaggataggataagataatttgagtcaactgcgcagccgttgagcgacatggctttgctaaaccagtgtgagttactggtcatttccaacaaaaaccatgtgctacgctactgccatgttgtgaccattggaaagtgagtaatgcatgccgcttaattgcaccaactccaag

SEQ ID NO: 442208 - DNA, 109 bp, Triticum aestivum
gtacggtgaagttttttgtaatacacactaaacattttcaaatactgctagaataaaaaaatgttccatttatttagatcacctgacaaaatccaacagtcggtgttcc

SEQ ID NO: 442209 - DNA, 356 bp, Triticum aestivum
cgcggcgaggtggtaggtattggccatcctccgcaatgggtgcgcaacctccctcattccctagatcgaccatatcctctaaggttgtgaaaccatatactagagcacgaggctctgataccaattgaaaggatcgatacagtcgaatagagggggtgaatatgagactacaaattttaatctttcttgtcaattttaagatttagcggataaataggattcactagatatgcaacttggtgaacacaacctacatgacaagcaagcttaaagcaaagtatgctgggtaacaatctaattagcgagccaacaagcacacaaggcaaagtaaagtgcgggaaaggattaaccacaag

SEQ ID NO: 442210 - DNA, 440 bp, Triticum aestivum
ggtccagaaaaccgggtcgacgggatgtaatgctaggtggctgacattgcaagtataatttactagtggctcagtgtctaattgcaagtgtaatattacttttttcttttgtaactgctgatttcgagtcattttattatgtccaaaaaaaaaaaaaaaaaaaaaaaaaaaaaaaaaaaaaaaaaaaaaaaaaaagaaaaaaaaaaaaaaaaaaaaaaaaaaaaaacgggcggcccaaaggattcaaacttaagtaaccatgaaaggaaagtcaaaacccctccaaaaggtcaaccaaattcaaatcaatggccgtccttttaaaaagtcctgaatgggaaaaacctggggttaaccaaattaaacccctttgaaaaaaaaccccttttgccaaatggggttaaaaccaaaaaggccccaaaaaatttcctttccaaaaa

SEQ ID NO: 442211 - DNA, 439 bp, Triticum aestivum
ctattgactaattcaatcgattcaagttgtgtgtattgtacaaattgcagctaatatgtgagcaaaggttgtcaccaatcaaagtccgtgtccttatgtaaacagatccttgtaaatgtgtgaacaaactgatgagaggtaaaaaggaacggtgtcttaaaaaattggaaaccaagttcttagccccattcccctttatctggtttttaccttgcttctgctaataaaaagattgttttcacgtaaacaattcaaatgcacactctgatcttttcctaaaccatctcgtaatggcaaaagaattgcattcagagaaatcgcatttacctcagcacagcaccctgctcaaatagtcatctccatcaatgtagaccaaccatcgtgcaaggcacctataatttacctttttttttttgaaaactttacggggggggaaaaa

SEQ ID NO: 442212 - DNA, 388 bp, Triticum aestivum
ggccgacggcgtgggcgatggcttataccggtggctcctcgcgggcgatatagaatgatacattttgcctgggtctttgacgggtggggacacatggtggatgcgggaaaaactagtgaattggagggaaaagagtacctgggtggaggggaaatagttttttttgcgaggagatggtttattttcagcaattaatttccacttagtatcaggtaattcacttacttcgacataagtagcaaattattacttataaactaaatcttacatgaaaattatgatatgtggtattttcactgttttctgtggaaaattgtaaataagtatgtcgaaagttgtacaaaagggtcctacgtatgtgatctggactgcgtctctccacccttca

SEQ ID NO: 442213 - DNA, 431 bp, Triticum aestivum
  unsure (1)..(431): unsure at all n locations
gnaacttttactttgccaggccccggtccaagacaacccgggtcgaccggaaggtttggcacctcgatgtcggctcttcgccanctgncagctgtacgtggttccaacggttgggctgttcgcccattaatgcggtacgtgagctgggttcagaacntcgtgagacagttcggtcnatatccggtgtgggcgttanagcattgaccangacctttccctaagtacgagaggaccgggaangacgcacctctggtgtaccaanttatcgtgcctacggtaaacgctgggtncccaagtgcgganaggataactgctgaaancatataagtactaagcccaccccaagatgantgctctctcctccgacttccctagaacctncggtatcacagncgaaaacagngacnggntctcaaccanaccggggattg

SEQ ID NO: 442214 - DNA, 397 bp, Triticum aestivum
gggtcgacggggagtaaaagaaaataactaaacacgaattttaatttaggttcacattagttcaaattaaatccattaaattataaaattccaatttaagctttgttaccaaataaaacaaacgaaaattttctcgccctaaattttggaaaactttttcttaagcattccgataatcgggatgttacacaccctgttcactaaagatgagagaactcgttacttttatatccttaaaatatttccattctcattaaagggtgatgctaagatatggtttaattctcttgatcctggttgtgtgcgtagtccccatgatatgatttattacttctctgctaaatatttccctgctcataagaaacaagctgctttaaaggatatatataattttgtg

SEQ ID NO: 442215 - DNA, 116 bp, Triticum aestivum
tctccaatgtagtgtcggtaactatcagatgttgagtgtcttgaaaactttctgataattgtgggatttgctttgtaatggtaatcgtgaaattggtgtggttatgttttggtcgg

SEQ ID NO: 442216 - DNA, 84 bp, Triticum aestivum
attcacgggccgacgggctatcataaccatcaagcttgttgtgagaagctttggtttgtgagaagtatatccccatactgcccc

SEQ ID NO: 442217 - DNA, 195 bp, Triticum aestivum
ctgctacctactgctgatccatcggtctgtgtagttagtggaaggtgatggttctgaatgcaattgaaattgttggttcttgcaacaaatgaatctgaatgcaatggaaatatattgtgctgcatctcgctatgattgtaccttctggcttgttcctgtacattcttaaatttatcagcaagaacgttgatgttt

SEQ ID NO: 442218 - DNA, 390 bp, Triticum aestivum
gacttacaactgggacaaaaaaaaggtcgagacactgccgcgagtcaagggtggacttgcaactggggcaaaaaaatcgcgccccagatgcaaatcaagggtggacttgcaacgaggacacaaactgttgggctcagttgcgagtcgagggtggacttgcaactgggaaaaaaaagggcggggccaagctgcgagtaaagggtggacttgcaactggacaaaaaaagatcacaccccagttgcgagtcgagggtgaacttacaactaataaaaacatgttaggctcagttgcgagtcgagggtggacatgcaactaggacacaaaatgttaggcacaattgcgagtcgaggatgggcttgcaactgggacaaaataaaagggcggggccc

SEQ ID NO: 442219 - DNA, 95 bp, Triticum aestivum
gggtcgaccgggcctgtatttaaatgtgagattctttgtagcgcagccggagtagtagaacatgttgccgtttttcgcagcatttttcgcagcac

SEQ ID NO: 442220 - DNA, 391 bp, Triticum aestivum
gggtcggccggcttttatttctcagcgtgctttttctttttatttctcgccccacggacaaatgggcccggcgtgctttttctttttatttctcagcccacagacaaatgggcccgtcagctatagaaatacgagatacatatgcaacatgtagagccaggactactgtttcaacctcagagaccgtattgagcacatatttccttgtaccgggaccgtattgaagcaatacgcaagttccaggaccaaattggacgtcgccagcgactacgaggactatagatgcaattatctcatgtctgagaaagagagaaagagctaccgagaaagatttgtgatgtgtgcatgcatgtgaaagaaaatgagagagaaatgcatgcatgacagagaa

SEQ ID NO: 442221 - DNA, 396 bp, Triticum aestivum
aaacggaacactacgtttcttttaggtagtagagattttacctgagagggagcagtaagagtgattagctagtgttagtggtaatgactctgatgatttttattagctactgttgctggtgattagatagctacaacagctagtgttggtggtgattagctagctagaatgagtttgaagatgatgatgtgctacactatgactatgatgattaaataactactgttgatgttatgactatgatgatgattaaatagcttgtgctggcggattagattcaagtggaggcaacatgtggtgcacattgaaagtactactaatccaaacaagatcaagtttggtttagtagtatacttttgacatgcaccacatattgcctccatttgaacctaatcc

SEQ ID NO: 442222 - DNA, 419 bp, Triticum aestivum
agataggtgtaatgcgtctgaaaaaaagactagtctatagctcaccacgtggctattcctgtcgaacgccccaataaccgtaagatatgtatccgacagtgccacttattgcacgtacacattagtagaaaaagaactaccatggcatatgctacaccacggccgagaacacgtgcccacattacgccatctgagaatagtgtcgcacttcgaaaatagaactgtcaataaattttgagcttgtgtgtcgtcacattccaaattacactactaccacgctatatttaattgcaaacctgttcacaccaatcacaacataaacggtttccaacttaggagcatattagtactcggttataagtactactatgccaagatgactgcacattcctcctcaactcctcatccacaaaaacaaa

SEQ ID NO: 442223 - DNA, 339 bp, Triticum aestivum
gtatatgtcaacagttcgttttctccaagcccagacgagctgataattgacttgtataataattttgcaatagacgggaagcttgtggtaaactatgctttatcggcagcgtggggttaaaagattggatttgcgggaagaatcgaatggatcgaaaacgccgtttgaaatttgaccgttttactgtgtatagctggagttgtagttggtcagtcaaagaggcactagctctcacatatgttgatgatgaaagtaaaggttcttgcgagactgccttttctggcattgaactgtccaagtgttctctctctctacagtatgtttattggttcttgattc

SEQ ID NO: 442224 - DNA, 421 bp, Triticum aestivum
ccattccttaagatccagttcgcaaggttcccgttccgacctccgccagcccatgaagatcggaaacgccttagcgctcgctgatcgccgtcatctatatatctcccccctttgccagcagtgtatcgtaggcagtgggccattgtagatcagctatgtttgttcagcctgtagtagcaacctgtcacgggcctttgtcagctggagattggctagctagacagacttgcctggtacccacctgcctgccctggcacattcgccgtgttcccgcgtcacatttttcgcgggtggatatgctagaaatgatatgacattcgccgtgttcccgcgtcacatttttcgcgggtggatatgctggaaatggtatgcataaactgaaaaaaaccgtaggaagaaagaaaaaaaaagcggccgctct

SEQ ID NO: 442225 - DNA, 424 bp, Triticum aestivum
  unsure (1)..(424): unsure at all n locations
gtgcgcggtatgttcaatttcaccctaaattggttggcatggcctactttcctgaagatattctaaatatttctacatttggataaaaggtgctacatgcaccatatacgtcaaaggagatttttccccctcttctttctatattaggcaaattaatgatgtattgttcttttgattactctcatatttccatgacatcatgtttaccctatctatttaattatagattttagtccttcaatttcaattgttgtacagttctttcaatttgagcccatatttgcatgttacagtatttcctttaacaatccttccattttctgctgcgcatcncttgctatgcaacaaattatgtagtgcacaattttttcctttacatagatgaaggctgcacggatgtcatactgcacacaaaccatggatt

SEQ ID NO: 442226 - DNA, 102 bp, Triticum aestivum
atcatgtacacacagtcattctagtgtcggtgctcatagtctttcattgtactatccatgctagtttattttattttcttgctttcttcttgtgtgtttgat

SEQ ID NO: 442227 - DNA, 480 bp, Triticum aestivum
  unsure (1)..(480): unsure at all n locations
ttaacttnnccgccggttcggtaaaggtcacnnggtcganggcccnggtgnngtancancactcgntgtcgtaccaggagacaagcttgacaaagttgtcgttcagagcaatcccggccttggcatcaaagatgctggacctgttgtcaccctggaagtcagtggaaacaaggtcctcatccacgtaacccaaaatgcccttgaggtttccctcagactcctccttgatagcagccttaatctgatcataggttgctggcttcgcaagtctaacagtcagatcaacaacagaaacatcaacagtaggaacacggaaggccattccagtcaactttccgttaagctctgggagcaccttgccaacagcctttgcggcaccagttgctgcttggaatgatgttgaagctggcaacccttccacctctcnaagtccttgctggaaggaccatcaancagtcntctggggttcnatcatgggag

SEQ ID NO: 442228 - DNA, 420 bp, Triticum aestivum
tcgtgggtcgatggggatcactaaaatcaatcctctcacgcgggcaatccaaacctttccctattcttgcaaggtctcggaaacggaaaggcccctgctccgctgcgcgtttgcgagtttgggaagaagccttgcctgccggagggggggaaacgggcgagatggggcgagggcgcagcgagataaagaggatcgacaaccccacgcagcgccagtccaccttctacaagcgcagggacggcctcttcaagaaggcccgggagctcgccgtcctctgcgacgccgacctcctcctcctcctcttctccgcctccggcaagctctaccagtacctcgcgcccaccgtcccctctgtcaaggagttcgtcgagaggtacgaggcttcgaggcacaccaaagtttggtccgacatccgccaag

SEQ ID NO: 442229 - DNA, 384 bp, Triticum aestivum
gtcgacggcatacacgaaggttaaactgattaggtgctggtgcacatattaaaaaacagtataacacagttagctatgactcttcacagtgttttcagcctctcagccatcggatcaccttaacgtgcgatatagatcagctctggatcgtctccaggtcatttcgcgggctgctgctccgcagaacgagcgtccatttctgtacgtaatcgggccgccaaaggcccaggtccagtcgaaatacttccacgggcatgggccacaagtcgtccagcggcattctccgactgctcattttccgttccgtcctctgtgccactgcccttccgtcgtccgcgatgtgccgccaggattcgctgcgctgtcgcaagcttctgttgtgtg

SEQ ID NO: 442230 - DNA, 249 bp, Triticum aestivum
attcacgggtcgacagccttttttattttttttttttttttttttttttcttcagaagctccctaaccggtcggtaagcagctgtcacacaaagattcttaagatcactgccgctgtaaccttcggtcatagtcgcaagctcctcctgtcgtcgagaagtttgtcccatggagtaagcatttttcaagaaactggccttggtgggaaagacacgggtaagctcgaagcgaacgaggatggtctgaaagg

SEQ ID NO: 442231 - DNA, 432 bp, Triticum aestivum
tgtccggacgtagaggccctagcagccttcaagcataacatccgcgatgagtggcttgcccggcacctgggacaggaaaagccgaaatccatggcagccctcacgacactcatgacccgcttttgcgcgggagaagacagctggctagctcgcagcaacaacttatcaaagaaccctggtaattcggataccaaggacaaaagtggcaggacacgtcagaataagcaaaaacgtcgtgttaacagcgacaacaatgaagacacggcagtcaatgccggattcaaaggctataaatctggtcagcggaaaaagccattcaaaaagaatactcagggcccgtccagtttggaccgaatactcgatcgcttgtgccagatacatggcacccccgaaaggccaaccaatcacactaacagggattgttgggtgttc

SEQ ID NO: 442232 - DNA, 419 bp, Triticum aestivum
gtggttttggtagttgtgcccggaactaaaaatgcaaccgcacgctaacatatttatgcatggctactatttgcaatagaggcacacgagaaggctgtgattatttatggcgatgcaagattacacaattacagggcgtggacatactgaggctcggtaacactcgagtgacttactctacctcgtttatatctaagcgggcgtgccttgtggacgtcgaggcttctccacgggtttcaccgtcgaggttagctggatggggttgaggagctgcagggtcggggtagcgatgatgaccatcgcgggggttgttgaccacaatcccgttggagcgtgttcccaaaaggcgacaaagcacttctggggacaccaaagtattttggttgatggctggggtagacctcaaggactcgattggt

SEQ ID NO: 442233 - DNA, 377 bp, Triticum aestivum
ggtcgacggggatatcgtagcagaaggagaggaaggggtaggcgtgggtcctttgggcctggaaggggttatggtggtgatgggtatggctatgtaaatgaagaagctggtgggtatcatggcatggagcataatgggcctcctgtgcaaggatatgagggtgatggaggaaggggccgtggtcgaggccgaggtcgtggacgtggccgtggacgcggtgggggtcgtggccgtggaccatttcctcaaggatctcctcaagagtagattggctggcccatcgactgaatgcgacaagtctcatctttgctagattaatggctgttgtatctggttaggtttatgtttaaagttgatagagtgactcagtgtggggg

SEQ ID NO: 442234 - DNA, 408 bp, Triticum aestivum
tgccccatcaaatattatatgcttgatcaaatggttgatgttggacaaggaaggcaatgtaataggttatgttttcttatattcacatagaagttatattgtcatggatcctctaacatgtggtgctaataatctttagctagccaaaaatcgtactgagttgagatactacttgtgtatccaaaacccttgaacccaatttcttgccctgagagtccacagtatctacctatggattgaatgagatcctcgaagtaatttgtcatcggtgcaaaaagcaatacaaatttctcctaaatatatatgatcttttattataaggaaaaataagctttgtacaaacttgtgatggtaaagaaataaaagcgaactttctaacattactttgttcaatgctagcccgcaaag

SEQ ID NO: 442235 - DNA, 395 bp, Triticum aestivum
ctcataggtcgatgggcgaccatagtgtgagtcgtatcagcagcaagaagtctccgaccacccacgtccacgttagcagccggcgcggcgaccaaccggaaactaccgacaacggacggactgactgatttcacccaggaaactccataaaaccttccaattacaaccaccaaatggttgtataacttccttcgccggacaaacggaccaatgtctctgtgctacggcacgctctcttgcatcaacaaccttccttttatatatttcccctttacagggtatctctagtgtaaatttcacgcacatttgtctcagtgtatatgtaaaatgttgtagtggcaggagcagcagcatcatgtgtttctgacccgagcatcgtggcacatccactgttt

SEQ ID NO: 442236 - DNA, 193 bp, Triticum aestivum
cgggtcgacggcgaacatgaaagcaaatctggataggccccccaaggtcctcattgtgctctacatgacttaggcggacttatcccatgtgtgtaggtacaagtgcggccacactgggtctttcgatcaattcagcgtccgtcctacatcagtatccgtatcgggataacgtttaattcagtaatcttctaca

SEQ ID NO: 442237 - DNA, 250 bp, Triticum aestivum
cactgctctgaccgtgcgccaggcttcccaatgcacgcccagggacatcgaccagcgcgcggaaatctcccattcatgctgcgcgaacagggccaggcgcctcacggtggccccatactcctcctcggacagcacgggtggcacgcccggcgccagcaggcgttcgcggcgaaattccgtgcgccgccggttttccgcatcccagccctccaccagcgtgtcagcctggcccacggtcgtgctgtacgtg

SEQ ID NO: 442238 - DNA, 412 bp, Triticum aestivum
tatccatctgtactattttcatgcatgatcaaacaagttaaattgatgttttaagcagaataaggaaaagcacttaaagaggccatgtttgagtttgaaatttgaatctttgattcaaatttgttcaaacccttctggttttagttgcattagcccaacacactcatattgccatgtttcatgcatgcatcatattgttgcacattgtttggtgatgcttgtgtatcgatgtcctttgcgacaggttctgtctccgaggagtaccgtgattaccctaacgaagaatcatatccgagcatcgaaccatcaggcaagcaaccaaccatttgatcatatcgatacaatcccatgttctcgctcctgctctcttttactgcattaagacaacgcgattcaaactgctgtgtgctac

SEQ ID NO: 442239 - DNA, 419 bp, Triticum aestivum
agaattctctaatattgagcactcttctattaagcgcgccgttactatctttttggctcatgaatttatatttatcacaagagaagccaaagaaatctttgcacactatagggtggacgccggtcgtccacccatagaagcaatcctctatgatcaagaggaaattagacgttttcaatctttggactatgtcgctttcaatgaaaaccttagaaaaaaggtccctatcaatgtcttggttgattgcatcaatgagcttaataatgattttttccttagaaataatgagctaggatactctctcgagtataagctcacaagattttgtcaaaagaatgctttcagtgatgaaatagttgtgcactatgaagggccaagggaggaacccgttccttccgtgattgatcttggggattttt

SEQ ID NO: 442240 - DNA, 420 bp, Triticum aestivum
gggtcgacggggaatctgaatccaaaaccggccatgaagcctggccggtagatatagtccggcgggcgctctttttcctgaggagagcataagcgttagcgcgactcgagggcataaaccctaaacgttaaaattgcgcgccataccgttgtgccggagtctcgatctggtccgcacttctttttatcccgcctggcttcgatggcccatgttggctacccaccgcgggctcggccctccgccgcaaggatttcccctgcaaaacgaaacacaattggtttttgacaaacaaaatgagcatggatggatcctctgaagagtactgggacttcgatctcggtcacctttgaggctggaagtagtccgggataatcggtcgtaatggccactaaggtgttatccttccttaactgaagaaac

SEQ ID NO: 442241 - DNA, 416 bp, Triticum aestivum
cccgggtcgacgacgaaccctactacaccgtgatgtgactactactacgtgcagcccgctgacgacgaccaagagtagttaggaggatcccatgcaggaggcctgcgcctcgttcgatctgtatcccagtttgtgctagccttcttaaggcagacttgtttaacttatgtctgtactcagatattgttgcttccgctgacttgtctatgatcgagcacttgtattcgagccctcgaggcccctggcttgtattatgatgcttgtatggcttatttatgttgtagagttgtgttgtgatatcttaccgtgagtccctgatcttgatcgtacacgtttgcgtgcatgattagtgtacgattgaaccggaggcatcacagtcatatcgttgcagtgcttaggcgaagccctgcgtcggt

SEQ ID NO: 442242 - DNA, 405 bp, Triticum aestivum
aggagtacaagacacggcttgggtttttgctgcttcgcgcgatccatcgatacaaacccggactaaaaaaaggcgagggcgggtcttttcccgcgcggtaggcaggggagtttggcatagtctgttcgaggcaaggaggcaggaagggaaagaagcaaataaaggttgagcgacttagttttgggaaaatctgattttacggaatatgtacccactagggtttatagggctcatctaaaaaacattcgtttttccattttataagtctcagttctactactagtagtagtaccatcacatgttggatttcgaggtgcgttagatcacccgatgcaagcatgtcaagagaaaactcaccaatgcatgtagaagttcatggaaatttagtggtcattcatgcattcg

SEQ ID NO: 442243 - DNA, 190 bp, Triticum aestivum
attggataaggttgggagatgatttggacccgattgcatttcttgtttcctgttcggggtcctccatgcaaaaaacagggactggtctgtaattttctttcctttgtgtgtcctgttgtaaactacggtgtgctagtgctaccgatctatggttaatgcagtttctgggtcgcgtgacccatcttttgtt

SEQ ID NO: 442244 - DNA, 298 bp, Triticum aestivum
ctcgtgggtcgatggggtccgcgtatgttaactcggtgtaggagttatgcttgaacgtaagtagtttcaggatcacttcttgattacttctagttcacgaccgtgctttgccttctcttctcgctctcatttgcgtaagttagccaccatatatgctagtgcttgctgcagctccaccttatacttttaccctactcataagcttaaatagtcttgatcgcgagggtgtgagattgctgagtccccgtgactcacagattgcttccaaacctagtttgcaagtgccgatgagaccgcc

SEQ ID NO: 442245 - DNA, 417 bp, Triticum aestivum
cggggtgggagctaaaaacaacatttgaatgtagatagtaatagacttaatatcgatgttttaatttagtgtacattgtaatatttgaactaaggaccatgcatatgggtaatttatttcgaattcgtgccatactagatttggaaaagttggcattgactcgattgttgtgttattgtgtaggtcatatgtttgaatccatccaaagttttctcactaccatggtgttcatcatgtacatatgaatttgtattgagaaagtagcgtggatactgtgaaatgcgaaatccacgttagaattggagatcactatgtgacacacactctaattcaaataactcctcattaattaatttatagtatctcctttccaatgactaattatttgcaaggcatacacaggcatggtaatacata

SEQ ID NO: 442246 - DNA, 405 bp, Triticum aestivum
ctcataggacaatagggctccctaaagtgagtcctagtacctggaggaagaaggttacggtcggacaattccgagaatcagacctgccaatatgagaggttaaatgcaagaaacgagaataaggcccatgccaaggaaggcgagggtcctgcggctggctgctgctaaggatagcaggcagtagagaagtttctttctgatttgaagtgtgcagattgggacagctcgctttctgtgggcaaccagctgaatgctaaaatgtcataaatggctgtgaacagatcggatatgattcgtacatcagggctcaagatatgtggttttggattatggtacgactcaagatatgtgacctccaaggaaactgcaaactcaagatatgtggtcttggactagcaagatttg

SEQ ID NO: 442247 - DNA, 414 bp, Triticum aestivum
atctggttcaatttggatagaaacctagtccaaaatttcctggctgactctccaggttgttggactatgtggcttcagtcatcggcgtctggtggtcggacatatgtaccttggaagttgttaaggaaggcttcttccaagtcctcccatctgccgatagagttttcaggaaggttgtttaactagtgccgagctggccctttgagctttagtgggaggtatttgatagcgtgtaggtcatctccgcgggacatgtggatatagagaataaaatcctcgatccataccgcggggtcggttgttctgtcgtatgattcaatattaatgggtttgaacccttcggggaattcgtgatccattacttcatcggtgaagcaaagagggtgtgcggcacctctatatcgggccgcatcg

SEQ ID NO: 442248 - DNA, 394 bp, Triticum aestivum
  unsure (1)..(394): unsure at all n locations
aggcgaattatcctatctgggactctattccagaataactttggacaacttcatgccgtcatgccccggttactttcggctaatgatgaagccattgatttcttcattactttgacgctangaaacctctcgacccctccgagatcctcgaccctcgaccgctcagcgatccacgaccctctaccctagttcccgacccttgacccccatgtcacatttgtctagtgtcaaaggattcaacaccatgtcttcatcattagacgaaagtacactagtgaagaaccgggcaatagcaccggttggtaagggcctttagtgccggttcggtaactggcactaaattgtgggcactaaagcccccccctttagtactggttcatcacgaaccggtgct

SEQ ID NO: 442249 - DNA, 282 bp, Triticum aestivum
atttgattcttttttctttctctcctttttcttttgggctctcaacttctccccatccagcccttaaaaaaaacttctccccttcccacccgagatgagctgcagcggcggcggcaacaacttgtcgtgagcggaggcagcggcacagtctggtcggcagcggcggctgcaagttcttctcgggagcggcggcggcaagatcttctcacggtagcagcagcatcctctcgcggctacgtcgtcctgcagttcgactcgagcctagcagggcgtcggtgatgt

SEQ ID NO: 442250 - DNA, 319 bp, Triticum aestivum
taacagcaactccggcaagttcatcagggccacaagaggccgatggtgatggcaacgtgatcagccagccagcagcttgctggatcctcttctctctggatgcctaaagtcagtatgtcaatgtaatgtaaacatccctttccccttcccctttcttcatgtagcttcggtctactccttagtagtcttggtaaagcttgtgctttgtagttgcttcagctactggtactgtctattgtgtgtgatgtaatatattatggaccattaaaaaaaagaaaaaaaaagaaaaaagaaaaaaaaaaaaaaattattttgaagt

SEQ ID NO: 442251 - DNA, 391 bp, Triticum aestivum
cacaggcaaaataacattgggggttgtcctcggctcgctcgacaacttccaacgtgacgacttgatcttcgatatcgtaaccttccgaagtggctatcacgcattgctcggagggaacgcttttgctcgattcaacacagccccgcactatgcgtactgaaagctctagatgtttgatccacgcggcatcatcacaatcaacggtcacacggaacgctccctttgcatctatgagcacattgcaactcttgcagccgatgtgcagcgcggcccctcaagtcgacacatctcatcagccatcaagctgtcggactttgtgaaaagagtccagtcagtctcgcatcctgatggctctgtatttccggaactagactaacaatttcgcctctgt

SEQ ID NO: 442252 - DNA, 308 bp, Triticum aestivum
gatccactatgatgagtcatattaataagaagaagaagaagaagaagaagaagaagaagaagacgaggaggaagaagaagaagaagaagaagaagaagaagaagaagaagaagaagaagaagaagaagaagaagaagaagaggaagaaagaagaagaagaagaagaagaagaagaagaagaagaagaagaagaagaagaagaagaagaagaagaagaggaagaacgaagaagaagaagaagaagaagaagaagaagaagaagaagaagatgaagaagaagaagaagaagaagacgatgaagaagacga

SEQ ID NO: 442253 - DNA, 390 bp, Triticum aestivum
  unsure (1)..(390): unsure at all n locations
gggtccatgatccaccctaaactaatgtcgtaatagaaggttattactgttggtgaaccctgtggttgcggaggtgggtgcatgacaggactcatctcccttcgtagcggatcgttgcaacaggggctaaaccagataccacctatatataggctgcgtccatggggacctctttcnccttaataaccgattggtaaccggagtggggaagaacggtggtggtgtatgtgatacgaagctgctgagcgtatgcacatatctgtaccggctttgctcacaaatagaaacatgtaaagtggcttaggaatccgaagtagtattgtgtttatgcaccgctatagatgcacactataatggatttcggactcgctgggacgcttagtcccattt

SEQ ID NO: 442254 - DNA, 426 bp, Triticum aestivum
tcacgggtcgacggggatacatatgataaatcatctcagaatatttctcctctctctcccaggagtcggaggacagaaaccaggaggcgacggaggggacgcaacgcgactccacactcttccgcacgaatcaccgctctcctctagctggagcaataagggtcacccggatgaccggggcagacctggcaccagtaatggagttgaaggctgtggcaaatggaggaacacccactgaagttgttgcttctgataagaaggataataccaagatggaagaggctgacgagagcaaggatgttgcagtagcgaataccaatgctgaccaacagaataaagcctcagaaaacggcgctaagggctcatctgatgatgatgccaagatggaggaggctgaagatgcaaaggaagatgatgtgggtgctg

SEQ ID NO: 442255 - DNA, 73 bp, Triticum aestivum
  unsure (1)..(73): unsure at all n locations
tnanntttctantggcngactcannacaaangncncgnngntcnntggggnngnncctagantgagtcgtant

SEQ ID NO: 442256 - DNA, 413 bp, Triticum aestivum
gtccacggcgccgcggaaactcaggcgacagatcatgcgctgcgcctcggtgcacttgtaggccgcagacgatggaccagcgtccgcgatgacgacggacgttcgccatgacgacggacgtccgccggcgagcccagcgaagccttctggccacatgctacatcaacaatcaaccccagcatccttctttgttaacgacatgtataattaatcttctcactttttctctcttttcatctcccgtttcagtgaggagcgacgatggagagcgcgccccggggaagggagaggaccaagaggagatgctactggcggcgacataatcggcaccgggtcggagcaacatgaaagaagaatgcatccgcgacgacggcggcggcaggagtacgttgccaacgacgggcaggcggccg

SEQ ID NO: 442257 - DNA, 415 bp, Triticum aestivum
ggtcgacggcactcttgaaaggtgatggaggaaccttcagtacatgccattagggaaaattgtggcagagcaagcagtttcagcgctctatcagtctaacgtcggatgctgggcaacaaggaaaactcttacgagatcaacaacagcaccgctcctaatgtttcccgagggtcaccagttttaccccatcaggaacattgtggagcaacaattggaattcaaacaattcagtattccttcgcaccaggtaacattgtagggattctaggtgtgcttgggcaggcagttaggcacaaataagtgaactatactgaggaccggctactgagccataatgctacccctttccctatgttctctactatctaaaaaataagtgagggtaccaagtgcgagttcctcctccaaggttttc

SEQ ID NO: 442258 - DNA, 333 bp, Triticum aestivum
gcccgggtcgacgggcgtgccaaaactacgacgactaagtgctgcaactacagatacgtcgagcgttttactacgacggcatcgttttgctacgagtggaggcgaggaaccggcgaggacggggatgcgatggcgaccaccaccgacgaaggcggcgtcctatggaaccgacggagtcagccggcggctggcagcaacgggcagcatcacatggccggccggcgagttggcttacgtatttagaaccacggggctgctcgggatgaactcgacaggctattttttaatagcgaaacagttgagaacatccggtctggccgggaagttttttaa

SEQ ID NO: 442259 - DNA, 73 bp, Triticum aestivum
acaatggccacatgcgggatgtgcgtggactgcaacaaccactggaagttctgcagaagcggtggcgctaaat

SEQ ID NO: 442260 - DNA, 440 bp, Triticum aestivum
  unsure (1)..(440): unsure at all n locations
tcacgggtcgacggcgctcactaattcgcctctaacgggcctggtttttagcgggccacaattggtccggcctgcatctttcttaggcccgaatggccattggtgccttcacactttgcgccaagcccacaacttactttggcctatattcgacccatattttagttgggccttttgtggacccatcacttagattggcccaggtagcgttgggccattaacaggctgaatattctactggcccgttacggcccanaagaaaccatgggcctttagtaggccgaaatgcatgttgggcctcaattttcactagtcatcgacgggccttcagtaagctaaaatgtagaccgggccttttttggcccagttatatgataagccgttactaggccaaaacatatcttgggccttagttggcccactgaaatcttggcctttaa

SEQ ID NO: 442261 - DNA, 415 bp, Triticum aestivum
ctcgcgggtcgacgaagcacactattatcagtctaaccacttggatgccacattgtcccattgctgcataaaatcctttcatctttctgtttcagcaatgacgggtcggccattccataagaatatcaatggccacgtaatctggagtccacctctcttccatcatacgacccatcgattcaaaggccttttcaggcatattctatatcacgaagtctcttcaacaataattatctgatgagaataagagactcatttgatgtagatggcttcatgtcaagaatgtgttgctgcctgttacactactatctactgaccagctgagcactgatataactgctttctgcactcctcaataatggcgctcatggatgcaaacaccagaaaaaggaactgatgagtacccaaccaacag

SEQ ID NO: 442262 - DNA, 380 bp, Triticum aestivum
ctggctcaatgccaatcagcatactaagcattgaaatcattgctgaggactttgatttcagactggatcttcacaagatcatcagttgtcatagtgacaacgttgtacttcaggaatttttctttcctgtactgcgctttctaaatctgcctggccttctcaaatttccatttctcttcttggatgaaggcagtcaccatatgactttggccaggagtcaacttgaaatcaggcataggagtgtttgggtccttgtgccagagatcaatgtaatcgaggatcaactttggatccaaaagcagaggcacatttgtgcccttggctctagcggccctgacttgcctatctctgatgttttcagcaagttcttcatcatcagc

SEQ ID NO: 442263 - DNA, 435 bp, Triticum aestivum
gggtcgacggcgatctatcatatctgcatttgtgcttcaaattgctgatatgcaaaattaaagcagtttgaatggttctagaacaagtaccatccataaaatattgcgtccattgtaatgagtgattgcttcgatctatttagaacttcatagtttcgacaggtcatctaaattgcttctacagtcacaacaaccagaattgctcacaaatgtatgcttgacaatagcaaacaacgacgtaggggacaagctggcaatgacatggaatttggtatttgcatcgattaaattgggactttgcttccaaagaatttggtatttgcatcctaagaaacgagaatttccttccgaagaattaggaacctccatctaaaaaaaatgaagatttgcttccaaacaacaaaaaatgatgcatatggacaggatttggcccaa

SEQ ID NO: 442264 - DNA, 384 bp, Triticum aestivum
gatgagaaagacaagacggtcgccgccccgccgcagcctgctgccaaggctcaggtggtgggatggccaccagtccgcagctatcgcaagagcacgatggcaaccaccaccaaccagctgaagagcagcaaggaggattctgacacgaagcaggggcaagagtttctgtatgtcaaggtcagcatggatggtgcgccttacctgaggaaggttgacctcaagacatacaagaactacaagggcatggttgtggggctagggaaaatgttcattggcttcaggacagggaaggatggtgaatatgtgatgacttacgaagacaaggatggagactggatgctggttggtgacgtcgcatgggagatgttcaccgagtcttgccgg

SEQ ID NO: 442265 - DNA, 60 bp, Triticum aestivum
acgggctggtgcttggacgaagacgaaggaggtggacgggcggctgccaccgcgtcgggg

SEQ ID NO: 442266 - DNA, 407 bp, Triticum aestivum
acaccataacgatgttcatcgcatgtaggtctctgaaaccaagcccaccctgctcctttgggagagtcaacctgtcccaaccaacccagtgatgtttatgctcgtcctcctgattatcccaccaaaatcggcatatcatgtggctaatgctctcacatagggacttagtgaggtcaaaacaggccatagcataggcggggattgcctgggctacggttttgattaaaatttcttttcccttttttgacaaaagtttgattttgtatccctgaagcagctcccaaattctgtcccggaggtactcaaagcagaggcgacgcgactttcccacataacgtggtaaacctagatacttgccctgctgttcctcattctgaagtccaagtaagttcagaaagatttgtttc

SEQ ID NO: 442267 - DNA, 64 bp, Triticum aestivum
gatggggctgcctaaatgtcgtgttgacaggactgtccctgagtgaaattgttgctagtctatg

SEQ ID NO: 442268 - DNA, 402 bp, Triticum aestivum
ctgttgaggacgaaattcggggctagatcatggaaatctatcccgtagtagaacatgaccccgcggacgaaggggtgcagcggaaaccccagtccatggacaaagtgggcgagaaacacgaccctctcgtggggtcccggagttggagtgacctgcccatagtccggtagccggtgcgctatgtctgcggccaagtatctggccgcccgaagattcgtgatgtgcttctccttcacggtggaggccacccacttgcctcctgctccggacatgtctatctgtacggagaagatttggactagggtgctggagctcggggaggtaaggatgagcgaaggaggaagagggcatgggtgaaaatgaggggtccttatcccgttatagaggccacgaagtggtgcg

SEQ ID NO: 442269 - DNA, 402 bp, Triticum aestivum
taggggagacagggttcagggaggtcgcggcgtacctgttggatcatgaaaacttcgcaaatgttcctgcaacggctctggtgaagataacacactcggttttcaatatcaatcgtccgatgaacggcggcactccggctcatgaccataagccgcaggtcaccagtaagattgcttcatttcagcagttcatcgctcatgacttcgatgccagtgaccacggcacttcgagcttcccggttgcagctgttcacaggatcggcatattagacatcaggattttcaacactgacaggcatggtggcaatgtcctggtgaggaagcttgatggaggaaccggccgctttggttgccaaacagaactgttcccaattgatcatgggctgtgcttaccggagaact

SEQ ID NO: 442270 - DNA, 369 bp, Triticum aestivum
gtcgtcactaacatgaatcttgggacagttcgagcttgtcgctgccggagaccctgtagaggtgcgcgaagagacctggttagatttgttggccaccactggtagatgctccatgtctcctcctctggttccttgtgcattattgggttgtctcaattttcagtttggaacacttagctatgaatatttttttgattaatattgatgtcgttgttacatattggtactgggaagattttatgtattattgctgagctctcatgagcaggcctaattttacagatgtttagtgcaccggttcctgttcatttacaacacagccctgtgatctaattgatgtttccctgaatttatgacaggtaaactgca

SEQ ID NO: 442271 - DNA, 353 bp, Triticum aestivum
tacgacaccctagactgagtcataataggcgagggctgctggccgaggcaaggttcgtggcgtgatggcagcgttgatggtggaggtcgtggcgtggtggcggctttgatcatggaggttctgtttaattccccgggggtgtcatcgctgggctgtcaaatcctgaagggaggagtctgccggcagaacatttgttttgaaccgtagatctgtttgtagtacagtggatgtaacatggaccgttggatgcaaccatgtgggtttgatcagaccttgtgggttatcctgtgtgcactttcttgggtgcacgtatgggaagtcacgtttggtcatttaagagtagtatatataca

SEQ ID NO: 442272 - DNA, 397 bp, Triticum aestivum
gaatcttgctattctacgtatgttgcctattgacgtgcggcttgaaggcccggtcgcatgttcgatcctcgtcctttattttttaatttgtatatgggtccaaatttgattcatgacatgtgggcccctcggtgtgtagtttgtagcactttaattagtgggtcaaaatttgttccattccaagtggactatcggtgtgtagttttgtagcttatttataataattaaagagaacaacatagttttttcaataataccatggtgcgacgttgaaggtgagaaaggacgtgcgagagactgatggcccagccggagggaaatcaactaggggagttgcgttggttgcaacggtgtttggagtagttgtgggccgaatgctacgaaaatataatctaaa

SEQ ID NO: 442273 - DNA, 429 bp, Triticum aestivum
tcacgggtcgacgggacacactaaagtgagtcgtatgaatagagccttgcctctaaggtaggccccacatggtttgcctcttttttaacataacgcgtcaagtcgcaatttgtttgttcacccgtggtagacgatcctccctccaccaagtggacaaccagtacacggtcaaattaccacgtgggctgccttttcgtacagaaatgagctccaccatgtgcccgcgcgggtgtggttcggaaagagacgggagtacgtgcgctgtgcgtgcacctcttctcttcgtgcatgtcccccacctaagtgggtgtgtgtgagacatacaaacctagacaaatggcttgtgtggaataactactcttcgtaagccattgtaagagtggacaaaatggtgaaggagacgataggggagccggcgaggtgtgcccc

SEQ ID NO: 442274 - DNA, 356 bp, Triticum aestivum
catgctcttagagataacagtaaagatgttatcgggagcatgctcaacctctctaaaccatgacatcaaactccatcataatttgtgggagaaaaggataacagatgatacatccaccgaattttgcgtttgcaaaactatagccaccaatacacatgcaaccttggtgaatatggaacagtgttacatttattataaacataaagttcctggggtcaaaagcagttgtgtctcgaactctcgattcatggttggaaaagagtatacgtgcaaacagtacaataacaaatggattgacctgtttaactcgatccttttatttatacaacagtagaaattaaatactactatgctga

SEQ ID NO: 442275 - DNA, 427 bp, Triticum aestivum
ggtccaggccaactgaaaaatcaatcctgatagaccaagtcagtaagttgactgggaagaaaaatgatctggaggccttcctgagtggtcttgccaagaagctgtttcttatgcttgaaggtaaacctctatgctcggcaaacatttccaattgtggtttttccattcgaccatccccttgacttagtgatcatccttgcagaattttgtcaaaactttgaagaagaaactagccggctggagccaaacctcgaccccgtcaattctccggtgaacgacgaagttgccatggatgttttctgactggagtctcgtgttgcagctgtcgtggactatctcgcaaggctgaaggccgccacatctcgcatcgactcgacgctctggcctgaggagacacttcataatgaccttgagtcgtttaagggcg

SEQ ID NO: 442276 - DNA, 420 bp, Triticum aestivum
gttcactaaaatatgtactcatgattgactatcagttcttttccagcaccatgttatgtatgtctcttgaaatgactgtatatggtctgccacctatatatgtcttgtctatgatctgccacctatatatgactgtatgatctgccacctttatatatgatatgacttagtagtgttaacaaaaaaaaataaactccaacatgtacccgcgcaaggtgtagttcagaaagagacaggagtaaatacccatgttcgtacaactcttcacatcaaaaaaagtggcccccctaaaggttcaagtcttactataccttgaatgaaacttaaaacttcttcaaaattgccactcaatttaaatccatggcccttcttttaaaaatttttaaacgggaaaaacccgggctttaccaattttaaccc

SEQ ID NO: 442277 - DNA, 148 bp, Triticum aestivum
gggcaccatctgatggatcatattcaggagcagaaggagaagcaggagaaggagaagcagaagaagaagaagaagaagaagaagaagaagaagaagaagaagaagaagaagaagaagaagaagaagaagaagaagaagaagaagaaga

SEQ ID NO: 442278 - DNA, 341 bp, Triticum aestivum
  unsure (1)..(341): unsure at all n locations
agaagccgaatgtgaagcacttcatctgctcctgtgactttctcgtgtgatatactgtgtggcgatcttactgtgatgtgaagctcgcttttgagcttccctaaggtatttgctctggcatcttttatcagccggcagattggtactacgtatcctccagcctacttttttcagctggatgatgatcgtgatgaaataagactgtaggttagtcgagtgatgatgattgtcggcatttgtcctatttttaatggacgcgtatgcttgcatgtaacctgttgtggacttgcatttgcatgtntgcgatcgatatgaaaatatgagagattttgttgggtttc

SEQ ID NO: 442279 - DNA, 516 bp, Triticum aestivum
  unsure (1)..(516): unsure at all n locations
cttttaccccgnccggnaccaagtccanaaantcncgggtcnacgggattatcttnggttctcnnnnnnnnnnnnnnnnnnnnnnnnnnnnnnnnnnnnnnnnnnnnnnnnnnnnnnnnnnnnnnnnnnnnnnnnnnnnnnnnnnnnnnnnnnnnnnnnnnnnnnnnnnnnnnnnnnnnnnnnnnnnnnnnnnnnnnnnnnnnnnnnnnnnnnnnnnnnnnnnnnnnnnnnnnnnnnnnnnnnnnnnnnnnnnnnnnnnnnnnnnnnnnnnnnnnnnnnnnnnnnnnnnnnnnnnnnnnnnnnnnnnnnnnnnnnnnnnnnnnnnnnnnnnnnnggacgcgcccctgttanccggcgcatttaanncgcggcgggtgttgggtgggttaccncgcaagcgntgaccgntacaacgttggccaagcngccctaangcgcccggcnccctttcgcttttcttnccgttcctttcccggccaanntcggccgggttttcccccggtcaanctccctaaa

SEQ ID NO: 442280 - DNA, 340 bp, Triticum aestivum
caatgtatacgaatagcatggaatgcccatgatatctgtgctctccaactggtgctttttaacaatacgaggatgactcaacatatttctaaatatatacgctcttctcaaagggaagcacggatttgatacttgtgccaaagctcgtttttgaaatcataagtgaataacattttgaacagtataatttcattgtcacaattacaatcaacatatcgcaatatcttccatgctacacacactagatgcggttcccaaacataatggctaaatttgtactcgcccatccagcaacaatcatcaatccattgattgctccaatcaacgagtgcctcctact

SEQ ID NO: 442281 - DNA, 416 bp, Triticum aestivum
gggtcgacggccaagaagaaacggagaaaaacaagacattggtagatgttcttgtttgctcagacatctcataggaaggacgaagaatagttagcgagtctctgaagccgaagttcaacctctttgtcaagcaggtgtccgccagcattgggatggcagagccacacattgatgtatggatattttctggttgcttgccccgttctcaaactaataaaaaggaagtacatgctaatcttttgttttgctcatatgatattgctcatcttttgttttctgtctgatgcctcctgtatctagagcagaaatattcttaatttagtgtttcttgaacatggccagggcaatggataaaatctactctggatagttgacagagggagtacatgctaagttgacttttttcctgcggattt

SEQ ID NO: 442282 - DNA, 416 bp, Triticum aestivum
ggttctagggtcgacggacagtgatttatcaaaaatttagatatctacaacccttctcttcctaaacgaaactgacattgcaaaagtagaagtataaggcactagctgaatttattctagcattctaaaaaaaatgaatttagtctagcgcgccctccagctcgcacattcataacaaaattccatgcaaaacatagaattagttgaaccatatattaagcaaaaaacaaatactacatgcagaaacatattttaaaaaataaagaactactaaattgtttttttactttacatgttagtttttccctttttgcaaaaaatgatccaaatatattataaaaggtgcagcagtagtataaagcatctcaaacatcaataaaattacattaagggacctggaccatcgaacaacaact

SEQ ID NO: 442283 - DNA, 406 bp, Triticum aestivum
ggtcgacggcttgccccaaactaaggcgcaccataattgcaaacaaagacatagatggatagagcactacaagattaacaaaacatccttactgatcatcctcaaaagaggcacggatcactaggaaacaacatgaacataaggccatatgagacaaacagctcaaggacttagtggaaatgctaagtccctgaaaacagaattaacaagtgcaccactttgcaagcttgcactagtcaccacacacatcacaaaaatacatgggttgcacctctggaaagatgacaaaacccttaacaaaacacatgtagagcatcagggcatatcatgcacacaataatcatggcaaaaatgacaaaaacctaaatggagcagcagatctgacaattatctcaagtaacctccg

SEQ ID NO: 442284 - DNA, 394 bp, Triticum aestivum
gtccacggcgaagctaaaattaaaacgcagcattctgaagccaagaacaaggagctcagcggaaacaatatctttggtccacctcctgagacccctgcaaggccactggctgctcgtaatatggagctacaaggaaatgtacattttgcacttccacaacgaagaagcgtgcacacatcagtgaaagtatccaatcttgctggaggtccaagcaacatcacgttcagtgaggatcctgtagcgaagacagcaaagaaaatccacaaccagaagttccaacagctgacaggcaataacatctttaacgaggatgctccccctggctcagctgacaagtctctgagctcagcaaagcttaaggagatgagcggcaatgacatcttctctgaatgaa

SEQ ID NO: 442285 - DNA, 385 bp, Triticum aestivum
aactggcaacgtgactcccatgccgcctccttcatcatatattggttcacctgttttctggattggcgttggtgtagcattatctgcggcattttccatggtctcttcgatggtaaagaaatatgcaatggaacaagcattcaagtcgatgatgacccaggcaccaccaaacacatttggtgcaaactcgccattcccattctccatgccaccacaggcaggttccacggcaccaagtagttacccatactcaggaccaaggaaaaataccccaaaaggtgcaactgttgatgtttcagctactgatgtggcagcaactggatcttcggaagcagctgatgtggcagaaacatcgaagccttcaaagaaatttgccttcgttgat

SEQ ID NO: 442286 - DNA, 365 bp, Triticum aestivum
gtgacacaggggatgtgcggcgaagtgtggtggctgcaagttctcggcagaggcaagtcctccagcttgaccacatcttcatggtgctccctgccgccatgcattggtatggacatggaactgggcccctttggacatgaacggtggctctcctctagacattccacaagtgcaagcacgtcgtgggcatcctatttgcgagtgtgagcatcgtccacctacagtaatgtgcaaccacattgcatcattccaacgttcggcacactactgattcgtcacaggcctgagaatctcatttgcctcacaacatggagatatcagaacagataagtatgatgcattagctagcttttcaggggtttaag

SEQ ID NO: 442287 - DNA, 408 bp, Triticum aestivum
ctcgcgggtcgacacacttatcaagttgcaatgggaacagaacccactgcaggaagcatctggtggaaagaagatatctattaacgaccttgttattaaggctgcagccttggctcttcgaaaggtccctgagtgcaacagttcttggatgaatgattttattcgccaataccacaacgtgaacataaatgtagctgtacaaactgagcatggattgtttgttccagtagttagggatgccgacaagaagggacttggtacaatcggtgaggaggtgaagcagttggctcaaagagcaagggataacagcttaaaaccacaagattacgagggtggcacgttcacagtatcaaacttgggaggtccttttggaattaaacaattctgtgctattagaaatcctcctca

SEQ ID NO: 442288 - DNA, 436 bp, Triticum aestivum
gactcaaaacaccggcatcagtcactcctcttcactcctaaccagcgagtaacagccaatggcgttctccaagcccgtggcggctctcctcctcgccgtggcgctggcagcgactgccatgtccgccgccggtcaggatccccaaaactgcaagccgagccgcaaggttacggtgcagaacctgtgcggcaaggacctttacctcggcatcgagccgctggccaacagcaagctactctacagccctggccacctgctccgccacggcacccacgtgtcgtacgacgtgtgctcgtggacggggcgcgtgaaggtgcaggacgccgtggtgacggagttccacatcgggtacgacggcggggcgtggtaccaagtgagcacctaccagtcgcacatgcgcatccgtggtcccaacaacccccaagggcaacccctg

SEQ ID NO: 442289 - DNA, 419 bp, Triticum aestivum
gtcgacgggcgaggtgatgtgatagctgctctgctccccggacaagattgaagccatgatcggagctatgccggcaacaaccaggaaagcagtcaaggctctcgcgatgctttccctgtgggagatctggcaggagaggaaccgttgcatttttagggcaaaagaggccagtgtggctgatgtgctacttgcaatcaggagaagcctaaacctctggcagcaaggcggcgtcaagttctttcagagccccttcggggaccccccgggagagtaggctagtggattgtgccaggggcactttgctttcttcttcattcttcttccttctctccttgatctgcggatcctcgccttgtcacttttgtcatctgctccctgcttaataacaatgaaacaccagcctttgctggtccttaaaa

SEQ ID NO: 442290 - DNA, 408 bp, Triticum aestivum
ggtcgacggcggtgcaccaaagtgggttgaaaaatcacatgtgtgtccttggttgaatttctaggtcccatggaagaaatgagaatgaaattcaaacatctgggcgtcatgactcggccgagaacatcgagaaactttgattataaattcatgtaaatccaaaactcgcctggaaatcatgaaacttggcatggtgtcatgtcatggcactaacatgttgtggtaaaaaattgtgccgattggaagctcatggttctaagagggaacgtgccacctttgagtgtgaaacgatatacgctgcccccccttgagtttcttaacaaaggcaacatagaactacattagtgccctgttaaattttggaattattccgggttcgtttgtcgttttttatacattaattgagtt

SEQ ID NO: 442291 - DNA, 408 bp, Triticum aestivum
tacactaaattgagtcgtattatttaaaaactgttggcagcattaaaaaaatgttcacatgtttcaaaaaatatatccctgaaagaatgtttatgtaataaaaaattattcgtgtagttttataaaaatgtctcaacgtgtattcgaaaaatgtttaacaggtattttagaaaatgctcaacaacatgtgtttaagaaaaaaatgtgtaaaaaatgtttaaggtgtatacaaaaaagatacaatatttcagcaaaaatagacatcaaaacatatatttgaaaaatataaatcccgtatttgcaaaatgtaaaacatgtataacataatgttccataaatatacaaaaattgtataatatgtaagaaaaaaatttagacgtgaaaacatatatttgaaaaaatgttaat

SEQ ID NO: 442292 - DNA, 404 bp, Triticum aestivum
ccggcaagatcgtcagtatccggattcctgattgatttataatttctcttttgtgccacatagtgtccttctaatgccgcacactacctgtagtccggccgaggatgatcttcccgcttcatcaagcgggtccttggctccgtcggatgtagattccattccgaccgcctccacccctcgtgatgctgaggatgccgaggtgggatcccaggaggggacccgccaagagggggaggctccggaggtgccatagggcaacctcccgggcttcgtgccgaactccgcaccggaacccgcagtggttccggagtccggcaggcggccccttcgtaagaagggaaagaccgtgacactggcagcctccgttcaaccggaggcgccggacaaacttgttggaggcgctc

SEQ ID NO: 442293 - DNA, 312 bp, Triticum aestivum
ggtccaaaattatcgggtcgacggctatgctatgcctgatttggtacatcgttaatgtgtgttgtactgatgatgcattatatgtcttcacatgttcacttgggagatatttcatataccgccagctgaaataaatatactaccattaagttttgttcacatgtacgaatgtcgtcgtacatgttaacttttgttcccacattggtcctataacataccgttgatctaatgcattgcttctctaaccaattgttttcagttgcggtcaaataacaattgtacgtaccgctgaaatgtcagtcatgatcagtt

SEQ ID NO: 442294 - DNA, 420 bp, Triticum aestivum
tcgacgggtagtgtcaacgaacacataccagtatctatagataggtttttctttttcgtagaggttgtcgcttaggtccttggacccttccttcatgaagcttgaggaagcactcacttttctatccacggcattcttggttctgcacttagtcttgaacctgtgttggtttgggacgtcaatctcattcgtcagcggtgtgtgccgcgtactatgattgctttcttcttgctgtcaaatcccagtctatctttcactgagcttccttcgcttggaattcagagtccaaaagtaagaaagaaagcgtactgtgaggtatgaatgatcaaatgtctacaggtgtcattgaatatcatggggtacgaacttctaaggtcatggtgtatggtattggataggctggtccgctggtcgaagtca

SEQ ID NO: 442295 - DNA, 441 bp, Triticum aestivum
cgggtcgaggacatagccgcacgttatcttgcaggacacggtgtatgcggtgacggatgctgagtacgaggagccgatggagcagatactttggcgctcacttctccacgacgttggtccggcggcgccaccgaagacgctcctccgcgccgtcaagtcagacctgttgtcgcctcctcgctgtcgggtgaaggccgaaccgccttcccttccctgctctccaccgcgctatcatggcattcaaatcggatgccacgtcaaggtggagcggttgtcgccatctcctcgtcgcgtcatggaggagcggctgtcgccacctccctgccatgtcaaggaggagcgaccgtcaccacaacctagttgcaccggtggaggcatgcctcacgcgatcaccgtgaaggcacgccggggcatcatgcgctacctcggtggccgccaaaa

SEQ ID NO: 442296 - DNA, 353 bp, Triticum aestivum
acttgaggcgatcatttgtttcaccagatcatatgtgtgtctcttggatcgtcctgtgcgtatctgagtccttgcattttactataccgacagtcattccttgctgtacacatctgtttgggagattactacagatggaatcaactatttatgatgagtcactctaacgtccttcatcgtatgatcttttaagtcaagatactctggccctatatgcttcactaacgtgcgtcgtaaaataccggtggtgatgccatgttatatatgcacatgatgacccaagcgtgtgttagattgatatgctaggcatgtataggatcaggctatctagctgtggatctgaagtaacccct

SEQ ID NO: 442297 - DNA, 396 bp, Triticum aestivum
cacctcaaacggatccgacgatgacctgtaccgatccgttgactggggtgtcgtcctgtgcgtttggaggaagcaatggccatccgcattgcactccgccgctccctaggaggataacgcccgaccgacggcatgatctgtctggcgcgagtccattgcgtggcgcattgggcgctcgaatcctcctgtgctggataattgcggtcctcttgggagccttccaatctccatttccccatcaccagtccgctggagtatgagtcctaccgggaccggtgtgcccgtcgtgggaaggagaggatgagggcggcggatgcccgcctcgcagccgacatggccgtggcagaggcggttgatgtggcgcgcgggcagccgcagagaaggaagccatccagg

SEQ ID NO: 442298 - DNA, 264 bp, Triticum aestivum
gggtcgacggcgtgctccaattcaagatgaacaaactggtagatgtgcttggactggaggggaacattggacacttgcctgagagatacaagaagtgccttgttaggaacaaggaggatgcgtgatgattattgctctagcaaactatctgcgcttgtttggtcgagaatcgaagctgcagtttgaacttttatatgtatgggacgtcctaatctgcaagctttatgcttttgggcagtcaagaaaactgaatttagcggaccg

SEQ ID NO: 442299 - DNA, 74 bp, Triticum aestivum
  unsure (1)..(74): unsure at all n locations
actgttacgttgccnggccggtccaanataaacgggtcnacggcggagcgcganggggaggagctggagagagg

SEQ ID NO: 442300 - DNA, 260 bp, Triticum aestivum
gggtccacggggtggtatcaagtgaacctttgcatcttaaagtttgtatcttgatatcatgatcaatagtgtgtctattcttgttggatactggatcacacaagtaccaggtattagtgcaccaaagaaaagaggttgctacgtgttggttgaataatatattggtcaaattagtgtaccattagaatcttaattcgtgctgagcatgttcttttattacagaaagtgtaacactttataaaaaaaaaaaaatacaagaa

SEQ ID NO: 442301 - DNA, 420 bp, Triticum aestivum
gccgctagcaaggatgatccgctaaaagtgcagaccgtcgaatcacaagatcttcaccatagtcctgaaaaagattcctagtctacaaagaataaaaccaacaaaaacaacaagacacacagatataaactcttcaaatctgaacaattaaatcagggaggacacatacatacctccatgccgccaccaaaaagggcagagtaatttttttcgcaagaaacatcatgatcaccactagacaccgataaaaaaataatctattgatgatccgaggtccctcactctcggtgaagatgacagctgaaggagaggggattaaatatatctccgatggccgatacttcctcaaaccctagccaactgttgatctctagccagcccgcctggaccaactcaaggtcagagtgcgacactgctttc

SEQ ID NO: 442302 - DNA, 389 bp, Triticum aestivum
ctcacgggtcgacattcgaccccaagatgactctcagcacgcgttcctatttggggtcaatcgtggcactgatggcgaatgtaccaccagtgccatcctccttggcggactccttctgagtctcaggtgaagctgccaatgccatcatacacttgccggtgtatctcgatggtgcatcctccacagtggcgcagcactccgaagaggtgcgcttgccggaataggcatcatagctcttgccggacttggtcgtcttcttccccccgggagcttcaacagcaagtgtgctatgatcaattgcagctgctgcttcacggtacatcttgtctgcgcagatatcggcatccttcctgtcgccggggacagagatgacccgtaacgggcctggc

SEQ ID NO: 442303 - DNA, 449 bp, Triticum aestivum
actcgcgggtcgacgactgaaaccattcaggttatatgcatatatacataaacggccgcaaaggaggcatcctaatactttcaggcaaaagtataaacatagcctttataactcaaatagcattgttattacaatcgagatacatgtcactcgaacatgacactcttcgagcactgagcctctattaaacgagctccttccaggacttcttcaaagtagtgctcggctgaaacctggcctacggccggattctggcttggaatcgcggtggcctccatctccgcccagtatgtcttgacacgggcaagagccatccgcgcaccctctatgcacgccgacctcttttcagcgtcgatatgtggcacagcaccaaggaatcattgcacaagaccaaaataactattcgggcttggtccttccgggcagagacgatccacgacagacctcat

SEQ ID NO: 442304 - DNA, 418 bp, Triticum aestivum
gttcttcttcacagaacaatagggccagagagcttgcttgtgagtggaggaggtattgcggtaaggacggaaaccaactggagtctcaagcccgtgatcttccaccccaagtaactccatgaaggccttccacttgacagaaagcaacttgccattagtcatccaagtcagagtccattcggcatcagtcccaagatggacagtggcatagaattgggccaccaaatttgcatcaaagtccttgttgaattgcatgatactgaggatgttcagccgagtgcacatctaaagggcttcgccaaagtactcagggtccttctccatagaatccgtatcgatggagcgcacatcaacatatagattcttcttggccttgatcacatcaaagtagatggcaaattgaaaatgattctagaat

SEQ ID NO: 442305 - DNA, 412 bp, Triticum aestivum
gtcgacggcgatatacaaatagaaaaactctcagctcagtcgttcccctccagcatccttatccatccgcacacaccactttttccattagccggctgattaagatctcgctgcttgccatcaccaaattgattctcaaaccatcacggctgattcattccttcccatttctcttcgtgtacgtactggcacagtttaccgttgagcagagtgcgcggacgcgtccgtcgcattctcaaggatgtggattctcgacgacctcgtggagtccggcggagcgttctcaagggtttcggccaagatgatgacctcttcttggcgtacggctagaggtccatggcagaggtgttgtagtttggcccagtggaggatgctgcgagggaaatccacgagtcatgtactgagtgagtta

SEQ ID NO: 442306 - DNA, 74 bp, Triticum aestivum
  unsure (1)..(74): unsure at all n locations
ggggngnnnngtatntttatactggcngacggnctactaaagncncaatgggncnntgcnntacccnatngtga

SEQ ID NO: 442307 - DNA, 394 bp, Triticum aestivum
acattttatcatgcatgttgcaacggcaccttggtggctattattgtcgatcatcccggactgcttcctgcgttgcatgtaagcaaagatgaagccttaacctctgaagaggattccttccttataccatgccttatgcacaaatatcatatttttatagaggcgaccatcagaatgcagcgccgagcccctggggactcgtcagcaaaaggtatccgggccaggaaggctcaagaggaaggcggttagggtcgaaacaccatcgcagaggtatagtttaattctgctctgtgattatcatgctagaaatgtaacagtttccatcgtgtcctggcacaaagagtagtcgccagactatgtccggagatcctgccggtcacgcctccaccagccg

SEQ ID NO: 442308 - DNA, 291 bp, Triticum aestivum
ctcgcgggtcgacggggggcacgggagccgttcataatggttccaagggcccgaacattggcagtggcggcaggaagcgctgacagtcgattacatcagagacataatattgtgctgcctaaccatgttccccagcgtaccatcataaacctgtgtcgtctgattaccccgcgatcttgaagttgcaccgtatctgtgacgctgaatggtgttaacgttttggattgtctcgataactttatattagaattgaatgcaagctaaatgaccctgaaattgaaaaacagctga

SEQ ID NO: 442309 - DNA, 308 bp, Triticum aestivum
gggtcgacgggctgatgcaaattgaggcttatgaacatgcctgtcatgtacaattcctttagccctgcatcatcagtgatactagcagtgtcctcagatgaggaattagtgatagcagagacaggtgaagaatttgtagcattagaagcatttgaacattcaggtgaagaattagcagattcacgttcaatgcacttcaaacatggaggaacaaattcttcctgagcagcgctgatttgttgagcaagtaatgaatcgcgctccttctgaagatcttcataactcagccttagcttttcaagatcttg

SEQ ID NO: 442310 - DNA, 398 bp, Triticum aestivum
ctgtcttcaacaccgccatcaaagtggtccttcagccgccgaggaggagggaggtgatggcggccaggaagaaaactaggcgaagctctggatgctccatcatgcacttgatgtgtggcagcacgtgtgctgcctgaattagcaccctggactgactctggagacgaagcatggtgtagtggcaagtcgatttgctgacatagcgcgggcgtctttctaatgcttcggttctgtttagctactacgatatgttgcgtgtttcggtttctacttcccaatcctggagctgtctacgatcgactattcggattgtaggtgtaatgttatgtaagcgaggttgtgtaacaactagatacaggcaagctataagtttatggttagcatctcgtagggatttg

SEQ ID NO: 442311 - DNA, 418 bp, Triticum aestivum
  unsure (1)..(418): unsure at all n locations
tcccacttctccaatgcataacctttcattcacttctcgcattcaatgaagttgtagtgttgaaatgttatctggcaagacaccagaagagtatgacttgtgaaaactctcgggttcacatggattanggaaggcataggttcaacccatangggcatcttaggaacatataccacaaacctcaggagtaatataacacaagctcgaaggcagaggatacaatttaccaaaggcattatgtatccgaggaaaggctcaaaaggttattaaatatgaaggacgttgtcggataaaatccaacaaaggatctggcggtccacataggatctgatgtgagtatcggtactcaaccagaagaagaaagaatgcaaaggcatcagattgtagatatatctggataacttcaaagcttgaatac

SEQ ID NO: 442312 - DNA, 410 bp, Triticum aestivum
gggtcgacgtgtgtctataaagggactacccggaggcgattcagggacaagaaacaacaactcgagagccaggtaaagcggattcgctccctgatcatcgagaccccatcaattccaccacaacgggatcgtaggcttttaccttcaccgcaaggggccgaaccagtataaactccccgtgtcctttgtccggtttaaccccttttaagctaatctcgttgcgatggctccacgactaagtcctcacactaggacatctgacgtgataattccacgacaccatgggtgagagtcaagccatcatgtgtgtcaagcgcttcgcaatcggaattgtgtaagtgtttggtccggagtatttgagagctcccaatgttgaagatgccgcaaagcttttggagatgaacaaagct

SEQ ID NO: 442313 - DNA, 425 bp, Triticum aestivum
tggtgttttaccgtggtgaaaaccaaaagattccccgctccctccgccttcctgtagattgcattgcctttcagccgtttcgccccctttgcttcctctccccattgcttctacctggtgccatggtggcgcagctgatcacgaagtacgaggtgaggctcctgacacaggagctccatgccaaggatgcggagctcagggccaaggacgtggagctccatgagctcaaggaggagaggagtgccatgctcctccgttatgtgcgggagttcacggagcttcaaaagcggcagccgtccaccacaaagatgctcgaggcgttggcggcgttgctgcagaaagagggagatacgataggccgtcaggggagccggttggagcgcgagcgggccgatcgtgacgaggtccaggatcgcctcagccac

SEQ ID NO: 442314 - DNA, 385 bp, Triticum aestivum
gcaggaaggagctggatgcgatatggcacgccctcgtcgccggccccctcgagtccgtccagctgaccctgcgtgagatcctggccgccggcaacctgttccgctgccgcagcttccacctcggcaccctctcaggtgctttgctggtcgttgcttgggttttccaactctgcaaaacgtcacccacccttttcgtggacattgttcttggctctgtgttctacaagctaagcgttttatccggacagttgcaaagggagggcaagtcatttagcatatgtgcacggatacagctagtccttctgcttattttgtctttcaaggataacggtgcttctcaaggcttctaccgctttcttgtggaatcaatctggttgctcaacat

SEQ ID NO: 442315 - DNA, 416 bp, Triticum aestivum
gtacttcatccgactgaaaatcgcactgcatcagaagaaaaaccgcactgcatcagacgggtaagagaactgcttggtttcttttattcaaacataattttttcaaggacgagaaagtagagtgcacttcacatcgagtgtaaatgaagcacaacactatcaagaagtgaaccgcactacttttttgcttctgtaagaattttttgcacttacggatgaacaacatcatacaacggaccgcactgcatcggacaggcaagtgaaccccataagttttctcttttttcaaacttttctacgcttatttgtgaacctcatggtcaaagttagtgaaccgcgtggcctagactagagaacaacatttttttgttggtgaaagtaaatcgcagggcagaaactattggacttcattaaaa

SEQ ID NO: 442316 - DNA, 387 bp, Triticum aestivum
cccgggtcgacggggaagacgcggcagtggatgcccacgcgtagaggagtatgagggttcactcgttcggctgcggtgtgaggctgccgtcgccgcagagtaatagggggtgtgggtgcgtagagggatggcctggccagcggtgggagtagtaggggcggtgaggcctccgcggcatcacagccggccacgcccgccaagaaggcccccgccaagaaggccaagaagtagagcgtctccgtcctcccgcaacaagtttccattctcctgttctgtgtcggtggtagtccaggattctgtgttctagactgtaaattttatatccgggttgtgggtgctctggttcattccggcgtacccttggaggtgtatctgtgggtgaaacga

SEQ ID NO: 442317 - DNA, 431 bp, Triticum aestivum
gggtcgacggggtacgttcgcgttattcgtgagaaaatgaaaacatcccaatctcgtcaaaagggccaatatgaccgcaaacataagctcatgacttatgaagtcggcgagaaggattaccttcgggttactcctttaaagggaacccatcgtttcggtatcaaaggcaagttggctcctcgttacattggaccctttcgcattcttgccaaacgaggagaagttgcctaccaattggaactacctccgcatctttcctgagttcacgatgtcttccacgtttctcaactcaggcgttgcttcgcggatcctatccatggggtggaccacgaaacacttgatctccaagataatctcacataccgggaatatcccgttcgtatccttgatcaagccgagcggtacactcgacgccattacatcaagtttcc

SEQ ID NO: 442318 - DNA, 407 bp, Triticum aestivum
aaagatgaatccccaagcactggggtggatcaaaaggcttagcattggtgttgccgcacctagcagaacaccattatttgcggctggatggagttattgtagggctcgtttcctctctggagctcctggaagtttcaattgtgaaatagaggagcttgtagaggcgaagtcgggcgtaggagacgacgccattgttggatgtgttgtccccggttttgcctgatactgtatcccgttgcgagaaatactgtaacaaatccgtccgtggtgtacctagttaaattatcgagaagtgacattagaaatggtctgtggagagctttggtaataagcggtgcttctgtgcctggtagaatcaaaaaggagaaatcaaaccaagtgtccgagcagttaaaaaggaaaaaggg

SEQ ID NO: 442319 - DNA, 429 bp, Triticum aestivum
ctcacgggtcgacggggttcgctacagttactctggatatggaggcgcctgcgcctgtggaactggaggggcttgatactacggtggtggcggtggatacggtggcggccgtggtggtggtggaggtggctatggtggtgaccatgagtcctactaagaagagcactggctatcaaatttaaaataatgaagtttttaggacagtgtcttgattatgtggaacctaatgttacgtcgttctatgttctttttggttttggtttgtttcttgatagtgcaagagttaatttgtgtatgctgcttcgaggctcggatgagtctcaaggaagttcatgcattttgccgtatattgcactgtacttgtagagaatgatcgcgtatgttagtgtgatcataaattctcttcgaattacattcaaatatattgag

SEQ ID NO: 442320 - DNA, 132 bp, Triticum aestivum
ctcacaggacaacaggatacactatacacaaacaactgtcgggacaactagaataactgttggcacacttcacccatgttgtataatgagaaggacgtctgtctgtttgacataatttaactttttggtgtc

SEQ ID NO: 442321 - DNA, 449 bp, Triticum aestivum
atctgcgggaggtgatgcagcatcctcaagctattcagatgcgcaatgtggtgttgcatatccgcgatgtgcaaggcctgaagggaactggatccatggaggccaggcttgaagctatggaacaggaagtcttccgctgcaaggggatggtggaacatggactcaatgccaatcacctcatgatcgcggactacacccgtgatctcaaggtggatggcaattccatgaaggacatcatcttctccttcaaagagcaaatcaacttcctccagagccagatctacgacctccaaaaccaagtctttgaatatgaggcaaggtttaaaggtatgagtttggctgccggttgcaggaatcgagagactcactcttcctcttacgacggtgagcctctaccatggaaacctgaggacaagattgcttctacttctacactaccaactccttct

SEQ ID NO: 442322 - DNA, 283 bp, Triticum aestivum
atgagcaaacgcgacatcgcacgctgcacatgttggaaaaaacggtacacatcacggcgccaatttgacatactcgtatacccaagttcgggcggctcagtagtctaagtacctacgcgagcttctgctggaatgtatgcgatgagaaggaaagcagttggaatttggggatgcacggacggtcgaaaggatacagccggaggtgctcataccagcaacatcgcaactctactcactgtcacgaacactaactgtagcgtgaggcatcatactgaatcataac

SEQ ID NO: 442323 - DNA, 425 bp, Triticum aestivum
ggtcgatgggcaacactaaagtgtagtcatattataaaaaataaataactataagctactggatagacaaaacaataaacaaacagtagcaaaaagaatcaatcaaaaatatttcataaacctcgagatacggccaaaaaagagatatgaataaatttcatcaaattcaattttaatctactcaaatatgaaatccaattacactaaagaaacttcaagaaattataaaactaatgcaaaaaagaatcagtaaatttggatctaaaacatagaagttataagcaaactaaaattagaactattctgaaatctaaaacagagaaagaaaaaagcatgcatgcggctgaaagaaaaaccgaagaggccggttcgatctaaaccagaaaataaaccgtaccgaaccgatcaaatctaataaaacctac

SEQ ID NO: 442324 - DNA, 333 bp, Triticum aestivum
gtctacaacgtatacgtctcggagtgcgcgtttgcgctccctctttgggatgtgggtgacgtaaatcatgttcactgttttgaccttcagttgaaattttttctgtccccagtgttcggttggcgagattcgtcctcatcttcacttggcggctccttccctttgtgtttggtgcttagcttgccagcctacttgaagacccaacattctttgttggtgtgattcgcaggtttctcggtggtgccgttaatctgacaggacttgtctagacttttatttaagctggacggaccatctccgcaggcttcaaatggctttttccgttgaccgggt

SEQ ID NO: 442325 - DNA, 381 bp, Triticum aestivum
gtcgacgggtgcctgtgacgctgccaatggccggcctaattagtaggtttgattagtttaggccaaattaggtgttaattagtctaaggcttttgcaagtggaccccggctagttaatataattaactagaatagtttagttgatgtccatgacatgtggccccaccttgactagttgaccagtcaaagtgctgactgtatatcacctagccaatgacagatggccccctgcactgttcattgttgactcagtcaacatctgactggacctttgactttgaccctgaccccactgtcatactctatggctggaatagcgctaggtaacaaaagtttaatctggctttatttttcgaatttaagatacatccagtaatttgg

SEQ ID NO: 442326 - DNA, 401 bp, Triticum aestivum
catccccaatctcagaaacaagtcagctggcatcttctggtaaacgaccagcttcacatctacctcgcaatcatctgggaaggcgatcctttatgtcaacaccagtctacccgctagtcttccgcaatccagtgtcagaagcagaagcctcgggggtggctgaggctagtaatgctgggcgtaccacaccgagtgatgacagcctggcttctcctgtgtggaggcgcagtttggcgagtcctgagctcaagttccatgacacactgagtgaacttcggaagatggaggcttctcctgagccgaacacaagctctaggagggaaggattcagatggagcagtgctagcagctatgattttggatatgatggtgatgccattgacatttcagaccatatcagc

SEQ ID NO: 442327 - DNA, 317 bp, Triticum aestivum
  unsure (1)..(317): unsure at all n locations
aggagaagaacgccaagaaggcagcgcaggcctccgggagcaacacctccaacggacgccaagggcaaggacggcaaaatagcggagaagctcgccggatcccgtcnccgccaccgggacgggacgccggcgccaccacgattgccatgcgtttgtaccctgtttgctcgcagcatctgcggatccttgtgccttaatcgtgtatgcttggttaaaactgtcgttggctgcaaatctttgttgcgtgagtttgttgtactctggtgaaatcctcaactcgcgatgatatgataataataataagcagcagtgttcgc

SEQ ID NO: 442328 - DNA, 211 bp, Triticum aestivum
tacgatgtacaggaagagtagattggtgtctcaagatctctcacaaactctatgtgttgtcttcccaatattgttgactataaagtagggcaaaaagtagaaccattggactttgctgtttctcgaaagaacctagcacacttgaagtctgacttcgcatgtttctcccatgtaagcttccaataaggaacccatgatctgattggtacgc

SEQ ID NO: 442329 - DNA, 264 bp, Triticum aestivum
attccgaggtcgacgggggcgaacatgtgtaatactgagctgcacaaaggcaggttggaggtgcctagacttataaaagatttcattgatgaggtttcaactcaattgaaaatggtgtgtgaatctgatacggatgagttgcttttggaagagaagcttgcctttgttcaggaaagcagacatgcctttggaacgactgcgctactcttaagtggggggtgcttcactgggttcattccatgtgggtgtactgaaaaccttggt

SEQ ID NO: 442330 - DNA, 279 bp, Triticum aestivum
tacggctcgagaattccgaggtcgacgggggcaccacccatgatgagatggagcgacacaagtatggagttctgcttgggtagctgcgaaacgaaccgtctaaatacgtggcaagtataagtgcagtgatgtacgcacctgagtgcaacctaacataagaacgatttgagacatgtgtcgacacagcttgactacagcgattaggcacctaccagcgatcctcagtatccaacgcttcgaggtgtatgagatacacatacatacgcatcaagacagccg

SEQ ID NO: 442331 - DNA, 68 bp, Triticum aestivum
cccgggaccgacggaaaacgcgaaacgacgacgcaccagggacatggcggacggaggagggcggggct

SEQ ID NO: 442332 - DNA, 86 bp, Triticum aestivum
aacataacaatcgtaagtcgtactagtgaagtcactgtgagataacggtggtgtttcgcggatggagctgtgacgttattgtcgct

SEQ ID NO: 442333 - DNA, 253 bp, Triticum aestivum
ctcaagtaaagagatgtctgctctgctttccttgtgttccaaagcttctgcttcatcttttcggaaaatttccctggcttggacacacaaactatatatatgaagatgtttacgttgcaatgcatagtagtactagctatatatgagttggacttcagaaagagggatataaaaaaaaaataaaaacgttctttaacaacaaaaaaaaacatcacagaaaggcagaagaagcaacaaatcaaataagataaaa

SEQ ID NO: 442334 - DNA, 412 bp, Triticum aestivum
tccacgggaccgtctaaactcactaatcatatatcgcctcgcaccaatgtcaactctgagacttgaactccagtaggcaggggatatcactgtcctccaaaccattcaacgacatggtttccttgacgtgtaatactcatggggcaaaataattctgttttgctagaacttattataatttggtctcattcacattcaaaggctataaaaggtgaatgagatcaaattatatctcatctagatgagttctatatactcccaaataattaccaaatgcaacccatattatattcacaagaaatcgaaattgtgcagaccattcataacagtacatcttcagacattggaaaactgcactccgcacttggttggcgtgaacccatctcagctcgcactccaaaactcgaaaaat

SEQ ID NO: 442335 - DNA, 261 bp, Triticum aestivum
ctcgcgggtcgacgggactgacaaaacaccagtaatggcagccagaggaagcgacactagttcagacctgacaatagtcctctgaaattttgtcatgttctcagtcgaaagcagggatttcgataccactagaaactgaaccagttgtgcaccataggagcagaggtgaaatttgcttggaagcaacagcagttcagtgcatctgtgtacgccgacagctacttgggtccttgagacgattgccacatgtttatcctcctg

SEQ ID NO: 442336 - DNA, 291 bp, Triticum aestivum
ccacccttctgggctccggatcacgcgcatcgctgccgaggccgtgcggcttgtgggaggcgggggcgcgcggtgggtggtgctcgtggacgacgacaccgtgctgtccccggacaacctggtggtgtgctcgggaagtacgactggagggagatggtgtacgtcggggcctcgtcggagagccactcggccaacagctatttcagccacggcccctcgccgctgtgctcgcgcggacactcgaacgtgttgctcgagaggttacccaggctgtagggaagccacgaccgc

SEQ ID NO: 442337 - DNA, 415 bp, Triticum aestivum
gtcttctgacatgcagcagcaaagttgttgttgttgttgttgtttttgtcgttgttgttgtgagcatggaacttgcttctaacttatttattcattgctttgatggtagagatattggagcagatgagatgagagaataaccttgaagttcagtggtttgtaataggaagcatgctcgacggtgcaatcagggtcaatcagctccgtgagccgtgctatgtccttgtcattgagggaggaatacaactcctgaatcacatctgtcaggggggaagatggtaaggcattacctccatctccctggtaagctttgttgagaccactggttgcttttggccctggtattgatcgtatgggctttggtgagcattgttgtctcttctcccacttggcgcttatctgctgtcgtcgggac

SEQ ID NO: 442338 - DNA, 404 bp, Triticum aestivum
ggggacggggaaaaaaagacgggcaggagggggacgggaaaaaaaaggaaccagcgacttcgtcagccacccccggcgccggcgggacgacggcggctccaacgcaccatcgttcctgatctccacggtctctgcacctctacaagagagtttgtcatcatgcacagccccagtaagcggttgattacctctgtgtccaaacgccttgccgtgtccaatctccaaggctgggcagacctcccagatgacctgctgcactcaattgttgctctcttgggctcctccattgaccttcttgcctttgctgccacctgccgcccttggcgtgccgctttcttctcacacccatccaaatctaccttgtgcttctcatgcccccctgttctcacccgaaaaaaccccat

SEQ ID NO: 442339 - DNA, 394 bp, Triticum aestivum
cggccatccaacggccggagcaactcgaggaactcgcaggcgaggatacagaagcctcaggtcgcgccgccgcctccggagaggtcatcgtcctcgtccgaccacagcaccgcaaacaacaacagccaccacgactggcgcgaagggtcgtcggtgctggacctcaacggtgacaactacttctcgtgcgccgtcgggaggaagcgctccaacgcccgttacctgctcaactcgtcggaggacgtcgtctccttcctcaaggagatggccgagtcgacgacgccccgtgccggtggcctcccccccggcgccgccgctgattacatgttcttggataggcagtaagactaagtttgcctctgctaatcagcaatcacccggcccgccggcccgc

SEQ ID NO: 442340 - DNA, 72 bp, Triticum aestivum
aatgtactagactgagtcagtatagaaacttcgggcaagtttgttgattgtaggagcattgagacgcaaagg

SEQ ID NO: 442341 - DNA, 75 bp, Triticum aestivum
gacaacagactgagaaaaaaaaaaagaccttagtgcccaaaaaagagagaaaaagaggccttagagcccaaggac

SEQ ID NO: 442342 - DNA, 397 bp, Triticum aestivum
  unsure (1)..(397): unsure at all n locations
gaggacgaggatgaggacgaagaagacgactcggacgacgaagaagacgaggattcggaggacgaaggggacgaagacgaagactccgacgagganggggaggacgaaggccaagactctgacgacgacgacgaagacgaggacgaggactcggatgaggaggaggacgacgaagacgaggaggaggaggaggaggaggacgacgagtagcatgggatggaagtggagcctgtggcgttcgcatctgggtgaggatgaaatgaagatgcaagtagctgaagggtcggtttgcactgatgcttaactgtatgtaagggatggcactcggtaaccgaatgttgcggatgaagaatattgactgcggcatgactaaatattgtcctcagggttgatggct

SEQ ID NO: 442343 - DNA, 390 bp, Triticum aestivum
gctgtcacaggggtgaagaaccatccggatgagggcatccttaacagaaaaaccaacttcatcaaattccacagttacagagttatcacgagaaagcttacgaacacagactaaattctgaatcagtttagagacacaagaacattattaagataaagtggtctagaggtggagcgaaaactagtggaaccaatgtgagtgataggaagaccaacaccattaccgacaatgatacgagaagaagtgtggataggagacacggaagagaggttacccgggtaagcggccatatgcgaagatgcaccgatgtccataaaccagtcgccaccgtcggaataagccccggtcgggggctattggtcaggtgcaacgagtagtgtcgggtcataa

SEQ ID NO: 442344 - DNA, 374 bp, Triticum aestivum
  unsure (1)..(374): unsure at all n locations
gacgttgtactggtctcagtatactgggaccgaacacccgatgcctatgagcgaccagctgaagcaactggtcgagctgcacaaggcggctgagcaggccatgaggggccttataatccggatgtggcctggcgactcccttcccaatagctacttcggcctggtgaggcggcttgtagatgcctgcccatggctggaggtcataaagcggtccgtctgcatcgaaggtgcacgccgggcctttgcccatgcgaagctgcactgggccaagatggacgccgagaagctggtgaaggangggccgccgcggggcaaggagcatcgccaccccaaaatgtattatgagggtgttctgaacggtgcctgtcttgtgg

SEQ ID NO: 442345 - DNA, 79 bp, Triticum aestivum
  unsure (1)..(79): unsure at all n locations
ttagccggtcgtacgccccanaaattcccaaggtcnacggggacgacaggcaggcaagtgccgtggcggcacgacgggg

SEQ ID NO: 442346 - DNA, 166 bp, Triticum aestivum
atacaactcgctaaactgagtcgtaataatggcagccttaagagaacagcggagttcatcaaggtccacagtcagagagttatcacgagaaagcttacgaccagagagttagttctgaatcagtgtagacacacgggaacagtagtagtatagggtggtcgagagg

SEQ ID NO: 442347 - DNA, 365 bp, Triticum aestivum
gtggcggacggaggctggtgtgggaatggggtgttctagcgcggatggtgtatgaatgggaaaatggagggagaggtacggggaaccatgtttttgggacgctcctgtctgaaatatgggaaagttacggacgtatcccccatttcaaatttggacgtctcgtcggttggggataggacggtaatctcgcatctcccaagtatttgccggtaactatttcgggcgaggagagggtgttttgctgcccacggttggcgcccatggtgtatgaacggggctgatacgtacggcggttgtgtcacgtctgatggaagttacacatctgcccctatttaaaatattagcctacatctacttcggacgag

SEQ ID NO: 442348 - DNA, 390 bp, Triticum aestivum
acaggatgtcggcgcgacgaggtgacaaaatccggattcgcagggttgcccgagttacggacataacacacgtaggacaatggtggcatatgggatcaccctggaacgacgtccgcagtgtagaccggagtgcaaagcctgtagcaccaagaatcgctgaccaatagaaaatactgtttgatatattattaatatgcacatcgcgaataacttacaacgattgcacctggtatttatctgacgacgtccatactgatggcagacgagatgattatggatgagggacatcctggccagagtgcctcaagactgcatcgggccgaccaacatacggaacggccgatctgatgcataggtcggctggccgaggtgatgtcaggatattgttac

SEQ ID NO: 442349 - DNA, 52 bp, Triticum aestivum
cgggtaatgcagatgtaacacggactacactggtgaacgggacctggcaaac

SEQ ID NO: 442350 - DNA, 342 bp, Triticum aestivum
agcgtagggtcatatcgatgccagacaacttgcgtgagtgatcacagtactggtacgccctacagtacatacgacagtactatgccctagcttgcgagagtagagtagtagagtatgactctgctctactacgatcatcggaggagtagtagattctaatctataatagttacaaacttcgaggcccgatcgtggaaccactacaagccatgcgcaaagaccgtgtctatgtggtgtttggacttacatggattatttattttgagaagcgcttgcattactcaacacatcagcatcacgaactcggttttttctctacgcctagtcctactagacactcag

SEQ ID NO: 442351 - DNA, 353 bp, Triticum aestivum
ttcctaggtcacgggggctgtcgaaactacgaggtttcattatcacgattctcaggcataccagagttactcatatccttcacgctatgtgctagcctctatagtagatctgcactgcactatctcaccattagagttggtgcatacttcgccggtggatccaaactccgtgatcagatgagctcaatgtctgatataccaccataaagcatcccccgaatagcttccatagcttgctactgtggtattcccaacgacattcagacagatagcaccctgcatcattctagcgtgcggattaccattctagcgtgcatcattactgtctcagggccttgcataatcatgtcgtt

SEQ ID NO: 442352 - DNA, 412 bp, Triticum aestivum
gaagtttgatgacgataatgatgccggtgatggggatgacaccatggaagaggagcatggcaaggaggatgctgaagatggtggtgatgaggggatggagcaggaggaagggagtgacggcgatgaagacgatttcccgcatgccttcttctttgtgaggtatctgtgtgatcgggaggactgctatggcatgcttgcgccgttgccacccttaccgaacggtgagctgtcccatgtatttgagtgcaatgcctgtgggcaactgaagaaggaagaagacgaggttgaggctgatgctgatgctggtgattgcagcatggaccagtaggatgtttgctgctgtttttttggagcacttggtgatgaaatggatgcactggttggcgttctccgtactttgggggctgtttgc

SEQ ID NO: 442353 - DNA, 296 bp, Triticum aestivum
ttatgctagttgtatcgctcaccaaggcatgacatgacagttgacgtgtcgctgctgctagtctgtatccaacgccaatttgtgacatgtctgtaaaattctgcatcatacttaatcggatttgtgagagacgggataggcgaatgcttgttcaaattactgtgggagacatcgcactttgtgtcttcattgcagtacattatttgtcacagattgcactcttgattcagtgcctatcccggtcaagctccggtggctctctaatacagtcataatctgtgtgtaggtattgagtt

SEQ ID NO: 442354 - DNA, 406 bp, Triticum aestivum
gattgtgactttccggacagcccaggacagcaacggggtgctcaactcgtgggcgtcaaacctggagaagctcctggacctggtagagaagagctgccaccaaatacacaaggagacgatgatccacaaggcagtgctaaaggcgtgattaacgtgcatacattttgaatggaatggcctccttttagtgttttgtgggtagtagactttctatggtctgatttcacaatgtcggggtgggtaaaatactattgtctagtcaaacatcatgcatgcgaattggtcttaaaacactgtaaccacaagatgatggataccatttgcggccgtggcattgatgtgcgccagtttccacaagtcatgtattttcctgaataaaacagaaaaaaaaaaaaaggaagcaaaa

SEQ ID NO: 442355 - DNA, 415 bp, Triticum aestivum
acagcaccttccaggcatcttcgtacgtagtgtcgaagaacttgctcaaggtttggtgatgtgccagatcaaactcccacaatttgaaggcccgttgttggcatgggacgatccggcggatgagcatgacctggactacgttgacgagcttgatattcttgttcactagcttttggacgcaggcttgaagtctggtcagctcttccaaatctccccacattaggcccgtctctttccaggaggtgagccgtgtggggaaaccagatcagaattcaggggccgccgcccatttggggtcacgcggctcggtgatgtagaaccaccccgactgccacccctttattgtctccacaaaggagcccttgagccataggacgttggccatccggcccaccatggcacctccgcactccgc

SEQ ID NO: 442356 - DNA, 55 bp, Triticum aestivum
  unsure (1)..(55): unsure at all n locations
tgtatcttntctatttcctactcttctttcttttttccattctgttntgtctttt

SEQ ID NO: 442357 - DNA, 109 bp, Triticum aestivum
accgggttatctttccctccatcgtcctggggttcttaaatttgctgaaactagcaagatttgctgagtcatgtcatcgtagcccccgagtctcaaggcgactcgaggc

SEQ ID NO: 442358 - DNA, 406 bp, Triticum aestivum
  unsure (1)..(406): unsure at all n locations
atgacgaaaatgaccaccggtgatggcttcccctctggcaaggtgccggaacgggctctcgattggttttacatggctacagaggcttgcggctgtggaactcccgatctaggcttatttctgggggtttctggatttataggaatttttggcatcggtttcaagtcaggggggtccatgagtcagtgacaaggcagggggcgcgccctccacccttgtcgttgattcgggactcttctggcccaactcttgtgcttcgggggcttcttctggtccataaaaaataatcgtaaattttcagctcatttggactccgtttgatattccttttctgcaaaactcaaaaacaaggaaaaacagaaactggcactgggctctaagttagtangttagtcccataaataat

SEQ ID NO: 442359 - DNA, 383 bp, Triticum aestivum
cccgggtcgacgggcgactatggtcagctactgactagtgtcatcatcgcgggccaaggacttcaggaacaccagctcgtcgcgatggccgacgccgcgagtgtgcttgtgagagccctcgcgtgcccgtgagagctcgttcgagggctccacggcgcgctgggacatctctgctgcatctgcggcttcgcggctggacctctctagtccttccgcggccttggtctttgctgcctggttatatgtccaccctaaactcctgctgccggtcatggcggaacgacttgacatgaaagaccagttttatgggtgatgatgagggtaattgtgaagtaattttcgcgtgggtagtttttatagcccagtgctaagtgtgaacacat

SEQ ID NO: 442360 - DNA, 370 bp, Triticum aestivum
aagccgacggtgccggcacctactgcttccatatcgcgactcgtgagtggagcatagctggcgactggctcatgcccttcaatggcaaggcggattatgtccccgaacttggactctggtttggcatcaaacaagccatcgtcccttgcgctgccgacctctcatgcctcctcagaggggaggagctgtcgccagacaagatgcggatctgggagcctgatgacctgccagaggagtggcagccaaagagcttgcacaattcgtgtgctgtcagccttggttctggcagattcatcatcgtggacgtcttggatctcatgaaattcgacaaggaatgcaacgacatgagtcccgtcaaggaacttgccct

SEQ ID NO: 442361 - DNA, 392 bp, Triticum aestivum
gtcaatactacaccctataatgggtcttaataatgacgccacggcggtttacaagaacaaggtgaaaatgtaaaggaatttttctaagtattgaagattgacatgaacaaattcaaaccaatctagggcctaatgttggggatattactattggacgtaaaccggccaggagtagccgggttaactttatgaagattggaagcccatgaagacttgaagatgatgacgctttacgaagtcccaaggcccagaagtgagttaaggcctatagatgtaaaccgacttaatcatgtaacttgctgtgtaagataggaagtgtggagatcgaaccggacacgtttataatccggcttcaggactctgtaaaccggcgggcgtcaacctatgtatat

SEQ ID NO: 442362 - DNA, 392 bp, Triticum aestivum
cgggcagtgcacgacgtggccgccgtggacgcggcggcgtaccagagctgcgtggtgcccaagggcaagagggcgatgcgcagcgggcacgacaaggtgaggctggtcaaggggatgcactacttcgtctgcaccgtgcgcgggcactgcaaggccaacatgaagatcgccgtcagggtcatctagagtgtttatagctacctgttttgccaactgcattcagatcaggtcgatccaaagcttccgactacagctttttagtttgcttaatgcttgaaccaactgctagtttgcttcccagtttttatccgtgcactcttgttctaggtgcggcaatcgcgagttgtaattcctgttaatttgaatatgggtctgaaggcttactaagaaaa

SEQ ID NO: 442363 - DNA, 357 bp, Triticum aestivum
gtcgacgggacagttgatggtgtttcatcacaacaattgtgtgggatgtcataggcatttggatgctggacgaacattgctgcaagaacttgtacaaactattggatggaacaagccccggttttgtgcttacactggacagttattttgtgcctcttgtcacacaaacgatactgcggttctgccagcaagagttttacaccactgggatttttctttatatccagtttcccagctagcaaaagcatttttggactccatctatgaccagcctatgctctgtgtaagtgctgtcaaccctttcctttttgctaaagtgcctgctctgcttaacatcatgagtatccggaagaaaat

SEQ ID NO: 442364 - DNA, 243 bp, Triticum aestivum
  unsure (1)..(243): unsure at all n locations
gggtcgatgggacacactacaggtagtcctgctaacctgtctgttcctgtgtcctggaaagcctgcctgtccggtgattgcgctatgagtttcttggttcggcgtgcaggcttgacgcgtctttgccatgaagcctgtttcctgtctgctgccggagtactgacttggttgtttctgtgtaccgcaaaccttgtgtgtccagtgagattgtgctttcgaacctgttttacatacaanananaa

SEQ ID NO: 442365 - DNA, 119 bp, Triticum aestivum
ggtcgacgggacaccctacagtgagtcatactagataccaatgaggggacctttgcaatgttttaagctagtgagaatggtttgaacctcacaaaaaaaaaaaacaaaaaaaaaaagaa

SEQ ID NO: 442366 - DNA, 375 bp, Triticum aestivum
gacttgctgatgatccgcgaaacctggagactcgaagtaacaggcggcgcactccgggtattctattgcagacaaacaaacaaacatacaataagtactcatctaattcacaggtaaaactcaaatagaagatcgaaccagaaagttcaacttaagaactccggtttgcaaaaaaaaacaaaacaaatgaagctacggaagtcaaacggcgaaagaaaacagcttcgttttactaatctggatctaagtcaaattttacaaaagcaaaaacttgtttaagttggttattcggaaagagggtttcgagacgaaactccacacgcttgaattgcctgattccgataaacgagcgaaaagttatactaaaacgaaaat

SEQ ID NO: 442367 - DNA, 105 bp, Triticum aestivum
  unsure (1)..(105): unsure at all n locations
ttntctgtgccnngggccgnctcaatacagngncncnnggntcnntgggannccctanattnagtcgnantagtacatgaatttcaaaaaaagttcaccgaaccc

SEQ ID NO: 442368 - DNA, 346 bp, Triticum aestivum
ataacatgtacccaaaccagtcgaggtctttgtccgcgccccactgcccgtcggtaaagcggcatcgcagtggtaccgacaccaggagctgaccgaggtagaagaggagctgagacccaagtggcattactgatgctgcggttgccaaatgcctatttttggtctctgtgtatgctgctgttgctgctggagcagctccgcgtgatccagttgcgcaccgacattatgtttcttggatgatcttatagggatgaattcatagttctagcttaggatcagctgatgaaaatgatccaggaaacctcgagtgaaatgttgctgtggttacacttgttgcatatatatg

SEQ ID NO: 442369 - DNA, 401 bp, Triticum aestivum
gggtcgacgagtcacactaatcaggatgataggggatgtgtgaacatttacctcatcaccctcttttctccgtccagttgcctgattacgctgtggtggatccatgaaatcatcatcatcattttgatgatcgccacgagccattctgctgagataggaacagaccaaattgtcatggtggaaatgtaaatgcaagaggtaagcagttgccacctaacagaaaatgtcaactagtgaatgcagaaaaaataacatgaacacacacgcacccctcctatgattgtcggaaacataaacgcggcaagtaagcacgttgttgcattatcaagtaaaaaaagtgtacatatggtaaatgcacttttgaaacaaaaatgttgaagttgccattgttaccccaagat

SEQ ID NO: 442370 - DNA, 237 bp, Triticum aestivum
aagttcttgatgcatactcaggatatcattacatcttcatggcagaagaagatgaggagaaaaccgcattcattactccatgtggcacatactgctttgtacggatgcctttcggactaaagaatgctggttcaccatttgcaagggtagttcacgaagcttttgaaccacagttgcacagagatgtataagcttacatggattacatactggtcaacagcacagatagaccaactc

SEQ ID NO: 442371 - DNA, 235 bp, Triticum aestivum
acgttcgcgtacctgaacccggtgctccggcccttgttagtcacagcaactggcttgtatccagtgtgggtacccctgaactcatcctcggtgatatcggcaaactggttggcctctagccaaaacttgctgttcccggcgttcgtggactcgttgaaagcaacgttggccttgaaaccctccagccgcctgtgctttctcggcagcgtcaccgtacacgcggccatacttgccc

SEQ ID NO: 442372 - DNA, 301 bp, Triticum aestivum
acgagcgccaccagtgcttgaggagttggagatggacgagtagcctagtgttccgtccgatgtttgtaatttcaagtttttagggatcctttttgacatgctatatccaaccatccgttggcaagtctacgcagtagcatacagttggattagctatcggacgagtgtgttcagacgagtttgatctttttttcttctgtacatgtgtatttccctgagattttatgtaatgattatttatttactacatacagatatatttttctgacgacaacaagcagaaccgaggctacatacaaaa

SEQ ID NO: 442373 - DNA, 345 bp, Triticum aestivum
actgtgagactgagaacccgagaaccacaccggacacacctctcagccccagcgaccaaatccgccaccgcgccgccgccgccggaaggaaggaagagagccccgcagcgcgcgatgaacaccgacatcaccgcgtcggtgaagccggagtacccggtggtggaccggaaccccgccttcaccaaagtcgtccccaacttctccacgctcgactacctccgcctctccaccatctccgccgtctccgtcaccgtcggctacctctccgggattaacccgggattcgcggccgtcgatggtgacggggggcctcatcggcgtcttgggaggttcatgtacgcctac

SEQ ID NO: 442374 - DNA, 330 bp, Triticum aestivum
aaaacgcatggactggtgggtatatagctgggacaagcattggcacattggcatcaaacaggattctcaaagaagagcaagcctgtttgcaactacaaggatcttaaggacatgtatgaaatcatgagaaggagggtagtgagtcaaggattcctagttcttactggctgacaaactttgttaaaacttctgagagtataaagttgggtcagctattttggaacggagtgagtagtcaagaatattgtagctaaaagtagcaggcaggagataaccaagtttcacattgacttaactggtatcgtcgtcttgtagcgataactttgctgt

SEQ ID NO: 442375 - DNA, 424 bp, Triticum aestivum
gtcattaggtcacgctatattgagtcgtcttaggtgctgaggccgtcgtgtgagatggcagctccgctggaggcaaggctgaggccgaggcgtgctgtgtgatgacgtggctgggccatgcgggcagggtagacgttggcctcctcttcttctttactactcctactactatcagtgcgtgtagtgtagtggtaatgtagtgtcccgctttggaaatgtacctgctactaaaataggtccggtcctggtacgtgtactgctgtcctttactgttattagcagggtacatgtttaattacgtagttatgaactactatcaggaagtgagtgtgacagttttcttgtgcttccggtttgctgcctagagatgtactacaagttcctatgtaaaaatatttattttaatgcaagtatcagttgtgtt

SEQ ID NO: 442376 - DNA, 378 bp, Triticum aestivum
aagggttcatggagaagaacacaatagagttcatgagggagctgtggagcctccttctcagtgcgcagcagaatgctagtggtgtgccccagcaatttttggatgcaaaggaggctgagattcagcagagaaaggcggaagaggctagaattgcccaggaaatccagaagaagcgagagaatagatggaatggacacggaactagataaacgcaaaatgatggccggggatactggtaattcaagatttcatggtgattcacttggctctgcgttaaacaatcccagtgtctatgctgataaagaagaggagctggacttgaagcatagctcgagaacaaagagccgggaagatcgaacacctaggagcacatctttg

SEQ ID NO: 442377 - DNA, 307 bp, Triticum aestivum
tcgctacaataagtcgtcttaagaattggagaggaagagagaagattgtagcgacaccgggtagtgcggggttgattttaaactgcggcaccggcaacattaaaagtgggagcaattgggacgaacgtgggcggcggagcctggtcaaagggctcgcctcctggtgagcctgcgtagcggtctgctcgcaggcctccctatcagccggtgcagcggtctgctcgcacgcctcccattgactcacgcccttgctcggacggcacctgccgatgagaagcgggactcgtagcggcacgttaacgaccac

SEQ ID NO: 442378 - DNA, 371 bp, Triticum aestivum
ctctcatcaataacacaggtgtgaaccattgttgcccgaactggccgccatcgtctctctcatcaggtgtgtcttcttgattttctctcaccaactgcagctggcgctcaagcttgttaattagaggcgacagaacacgcttcgcgtgtctagtttctgtaaatctgtttagccatcacttttgtcttcactagtgtatttggcctcagtttagtgtataatttggtttagccgtcactctgttttcactagcgaacgccaagtcttggattggttgcatccaaactctccacgtcctacaaacgctcatgaacttcacttgtcaatgtataatatagactggtgtaaacaaacttttcatttacgcttag

SEQ ID NO: 442379 - DNA, 365 bp, Triticum aestivum
atcgccatgtgattaacacccaaagagtactaacgtgtgatcatgttttgcttgtgagagaagtttagtcaacgggtctgccatattcaggctcattcttgttgagagcaggatccaccgtcttgcccgttactacaagcgcaccaagaagctcccgcccacctggaagtacgagtctaccactgccagcactctggtggcttaggagggctcttcatctggtgtgctcttaccggcttcaggatggtcttgttctacatattatcaatttcatgtaacgcttttgagtttggagcgatttagatgaacacgagaccaaattttctaggtttacctggagaatctcataaaccatttttggtttt

SEQ ID NO: 442380 - DNA, 421 bp, Triticum aestivum
tcgcgggtcgacggggtgcccgaagccaactcgggatacaatcttggccccaccaaaccccccctcgcccgctcgcgcttcccggtgtcagttgttcgcattcatgtctttgtagagcgtccgatccgcgttgacgctggcgcagaacgaggcgacctctcactaccggctgcacgcccgactaaacacgcctccttgtcgcattcatccagcttcagattgccccgcgtatctccattgaacccgcgcgtgggctaagaaacctactcctgacacacgtccgcccgtgagccgtccaacattaaacaaaatgccggttggctcctcgcatccctagctatttaaatgaggtcagacaccgggcaagacctgcaccacatctccgctcctcatctcctatttgcaccatattttgcacaat

SEQ ID NO: 442381 - DNA, 262 bp, Triticum aestivum
ctcccgggtcgatggggatctcgagaatgaatcctactagtggaagaaacagaagaaggagaagctaaagaaacggagcaagtacaaaccgtcgaacaaggcatcctccaaaaccaaaaggaaaccccaccctaagaagaaagcaaaacattaatcaaggtagagctagggctcggcaaaggctgttgacgaagtgctatgctttcagtcatgagaaacacctgcctgtcacgggaaattttgtttaagttgagaattacac

SEQ ID NO: 442382 - DNA, 254 bp, Triticum aestivum
aagtatccttgacgacattactgattgtaaactgcaaaactctgactggatatgcacaagctcctcttgagccattggcgtctgaaaggagtcggcacctgataagtctggagtctcttagcatggaggtctgccaaagttcactagagatgtacaacgtagcggcaactctcaagaatagtacgattgatgggtgaatgaagcctgaatccacatttgggaagatgcatggcatggcacagtgagtcggagtc

SEQ ID NO: 442383 - DNA, 332 bp, Triticum aestivum
atgtctaccactaaaatgagtcataggacaacctccccgacgaccagtacgaggtcatccaccacgacagcgacgaagaagcttgatctacttagctgagcaagatctatctacctatctatctatctaatgtgcgccatggattagagtgtgattccttctagtgatctactgcgtcttaaatttatgtttgcaagtgatgatcttgtatcgtagctatatgtagtgtgtcctctggcttttgcaacctggcaagctactatctatctaatgtgttactgaatcaaaagagatggagtgacaaagaagaaaaattttttaaaggaacagat

SEQ ID NO: 442384 - DNA, 378 bp, Triticum aestivum
gtccatgcggaacgctaaaataagtcgtcataagtcgaacggggacctcctcgaggtgcacggggaacttctgtccgcgatcaaggatgcggaggaagggcttctgcatttgaagcgttctaggctagtgaagcaaatcgatgagatctttccaaatcaggagtcagcatcgctatcaactgaagctgctattgagccattagatccagatgatgttgagccagaaccattggagccacaggaattttcagtcggatcaaagtgtagattcaggcacaatgatgggcgttggtataatggatgcattctgggacttgaagattcaggcaatgcacgggtcccatttctgaaacgcacatcagaaaaaaatgttcatgt

SEQ ID NO: 442385 - DNA, 98 bp, Triticum aestivum
tcaagctgacttcatatctcgttctagagtgtcacgaggggtgcaaatcatgggccgtccatttataacgtcgttactgggaaaagcctgtcgttacc

SEQ ID NO: 442386 - DNA, 413 bp, Triticum aestivum
ctcgcgggtcgacgggagaagataccttcatgttgtagggcacggccgcagtgaaacggatcatgttgccggtgaaagggttgagtacgcgtgcagcgtgaggatgctccctgtccgcgaggacgaacaaggcgccgtcggtggtgacggcgacaacatagtacttgcggagcacaggcatgtccttgtggaggacgcggccgctggcggtgttcaccatgaggcatgagttgggctcgaaggccttgtcgatgatgatccagttgcgaggacagaagcgggggtcggaggagttggaggggtcgtcggtggcggagcgccagctgcggcagacggcgcggaagtccatgtagcagtcaaggtcgttggtgtcgaggaggcactcggcgatgcaacggacgagatccgatggg

SEQ ID NO: 442387 - DNA, 385 bp, Triticum aestivum
aattcggacacgatggtgaatggcaatcgcgggacagatggggaaaagccacgtcaacctgatgcaaaggagatgcgtggaacaaatccaacaaaacttcatcacaccaacaaatcacatgacacggattggggctatttttggcggggattttcggatttaggacgaacacaccacaatcaatctagaaaacacggggtacgggctccataaacgtgatcaccgtggctcaagataccaacatgatgtagggcggaaccctaggggccgatctttcacatttggaatggatcctacaggggaaacacgaataacgcgcgaaaaacacaaagggaaacacggcgagatacagtacgatcacttgactgaccaggaatcaatcaca

SEQ ID NO: 442388 - DNA, 254 bp, Triticum aestivum
cgggcgatgacggacggcaaggtcgccccgttcccgggcacgttcaatgagtacaagaagatgctcacgacataaacctggaaaaatgacgggacatacagactatatgtatgatatgtacgccctgacatgggaagcttatgtaatcttatgcttgtcacctacctgaggtttgaaagtttgagcagaactatgctactacaaaaaaaaggtagacacttaaataaatagcaaaattgagaacgtaacaacat

SEQ ID NO: 442389 - DNA, 333 bp, Triticum aestivum
gacggggaatcatagcccgacccggctcatttgtccttttgttcgcagaagggagatcctgtgcgctagctatatctgttatggatggagccctcactcaaccgacctgctacctggaaatccccaatgcaccaatgtaccaaaggcactgtactttgaataggaaacacttccctacttcacttcctaattaataaagtaggaggtattcgagtacggaggtactagaccgtgattctggtcctgatgcggacacacctgtcgacaacagagaagggattcaattgagagcggatagcaagatcgaatgaatggatactctgagatagaacg

SEQ ID NO: 442390 - DNA, 249 bp, Triticum aestivum
atgggctgatagatcgtgggagtcagaacaactgcctgattggaggcgatgatctcaagagtgggcagactaggataaattccgtctgggcggagatgcatgtgggcgctggatgcaagctcaggcgacttggcagcgctgataacctggggaagtacgatggggtgggtctgtaggcgcatcagctgtccagtggcgggggtatgtccagcagtgacgtcgcggaggacacggacgcaagcaccggag

SEQ ID NO: 442391 - DNA, 184 bp, Triticum aestivum
acatgttctaagcctaacaaatatgtatgacagtatggctcatgtccacataggaccgcctcttgagtatagactagccaatgctcacaaggattactccacaaaataccgttaccgatctatctgatccaggctaacctagtcctgctatctacctgactacctcttcgtgacagtcaccgag

SEQ ID NO: 442392 - DNA, 327 bp, Triticum aestivum
aggcagggtgttactgaatttcgggagtcttgtccggactggatccggaaagggagcgtcgtcaatgtaaaaccacttcgaagtcgagttatctggtgccttcttgggagtaccggatatgtatccggtctcagcgatatgccatacttcggtctcgcccacttgacatatggattctcactggttgcaggggacaatgcagaatagcttcttccatagtccgaaatgagcctcgcagcctagaaatagctcgcaaatggcgacgtaccctgctatatgcagtaaggacgctggggtaaagttgtgcaactggaggtcgtagaactc

SEQ ID NO: 442393 - DNA, 401 bp, Triticum aestivum
ccgggtcgacggggtaccacaatggacaccagtctatcgggtccagagagatatccctatgccacttgttacttccggtgtcgagaaaggtaacctgcgtgagcttgctttggctcgaatggaagacttgggcttgaaatgcagagatgtcagaacacgtgaggctggaattcaggatatccatcacaagatcaggcctgatgaagtagagcttgtcaggcgtgattatgccgcaaatgacgactgggagacctttctctcgtatgaggatacacgacaggatatccttattggcctgttgcgcttgcgtaaatgtggccgcaatgttacaggctctgaactcgtaaggaggtgttcaattgtccgtgaacttcatgtctatggaacagcagttcctgtgc

SEQ ID NO: 442394 - DNA, 422 bp, Triticum aestivum
gggtcgacgggggagacgatcatgcatccgttgaatgctgtcggattcctcggtgaggagaagatcgccgccaaagtggcctacttgaagaagacgttcaggtggtcagacgctgaggtgagcattgctctgcgtaaggctccgtctgtgctgaggaagtcaaaggaattactgcagcgcaggtctgatttcctcatctctgaggtggggttggaaccgtcctacattgctgaacggtcagtaattatcaattacaagctggagggccggatgaaaccccggtactacgttgtaaagttcctcatggaaaatggattgctcaagtgcaacccaggctactaccagaccgctttcaaggtgagagagaacgtattcatggagaagttcatttgccctcacaatgaagttgcgccgcacctctc

SEQ ID NO: 442395 - DNA, 373 bp, Triticum aestivum
  unsure (1)..(373): unsure at all n locations
tgatgagaaaaggagatgcccggaacaaggttgctgcagatgcctgcaagaatgaccaaccccacaggtagccttcacgacgagcgcactgctgatgacgtgaatgctggaggccagtccgtgtatcaaggacttganatggcgctgattgaggttgttgctgcgactgggcagttgaccacaggttgatcatcaataccgtactggtaacttgtggctctgtctgtctttaatatggttatccaacatcaacatggagtttatcttgtgtgccttgatctggcaatgatccgtttcgtccgtcaaatgaggtagcaagaatattagcttcatttgtattttactagtttaattatgactatgtggttgtgat

SEQ ID NO: 442396 - DNA, 417 bp, Triticum aestivum
  unsure (1)..(417): unsure at all n locations
ctaaattgagtcgtattagcgcanattaggaaatctatccttacgcaaatgtaaccaaacaagatctccaggtgcaaacacaacatgttttctacccttatctcgagcaagtttatatttagcattcatacgctcaatgttttccttagttaactcatgcatttttaaaatcaattcagcacgttctttagcatcaaaaataaccttctccgaagatggaagaggcaacaaatcaataggtgcacgaagtaggaaaccatacacaatttcaaaagggcacatcttagtaatagaatgcaatgaacgattataagcaaatccaatatgaggcgagcattcttcccacattttcttattattcttcagaacagccctaagcatagtagacaatgttcaattgactacttcagtttgtcc

SEQ ID NO: 442397 - DNA, 404 bp, Triticum aestivum
ggtcgatgggacagctcaagtcttgatagagatagagatagggttagtccagcggcgccgccctcgcgcgtggggagcttcgaatcgaaatttaggaattgagagcgggagcgggacgggtgagatccagatttccctcctccttcttcctcccttttcccccttctctttatctttatagattattacagaagagagagagagagagagagagagagagagagagagagagagagagaggtggagatcctgattcctcgcttctcctcccggcgggatccgaagtaagatcgatctccaaagttgggccaaataaatagctaccgtactagtccaaagctagcgttggaggaggcagaacacaaagggttggtgatttctcgactcaggtcccaggctaaatc

SEQ ID NO: 442398 - DNA, 136 bp, Triticum aestivum
gggtccacgggggtcccaaaattcagtcgtatgaatgatgatgatgacgacgacgatgatgatgaatcttgtatgcatattgcagattccatgtcttcatgcatgttgcttcacgcgcattggataatttcgcagg

SEQ ID NO: 442399 - DNA, 323 bp, Triticum aestivum
gagatgactattcatttatattcgagaataatggttgttctagttatatgagtaacatattttatggtcatggacccaatgtgaatggtttattcttgttgaatctcgacagtagtgatacacatgttcataagactaatggcaaaagatgcaaagtgaataatgatagtaccacatacttgtggtactaccccttaggtcatattgggcaaagtgatgaaaaaactcaaacggagggtttttggaatcacttgacttggaatcattttggaacatggtgagccatacctcatgggcaaaataccaccagactgttttctcgc

SEQ ID NO: 442400 - DNA, 420 bp, Triticum aestivum
ccacgctaacatcagtcgcggcaggacttcaattgatggattgaccacttcttcgacatgcacgaacactcgatacaggtacatccctaacgtggtccgcggcggccttggtggcgacaaatagtacaaccccggttcctggaccggtatctcaacaccaatcaccttcggtatggttgacggcttcttcatccatgccataaccgtcagagcccagctgtctggaggaacaaacatacttacgagctcacatccaaggtccttgataagctcattcatggactcgttgttccaagcatgtcgaggcatgctgtggaaggtaagctttgttaaaaactcaagctcagagggcaccgagccccatcctgggtgctcactagcgagccatcgtagaacaaacgccgggaagattcgaacaca

SEQ ID NO: 442401 - DNA, 166 bp, Triticum aestivum
atgacttcaattgatggatggacccgatcttcgacatgctcctacactcaaagcaagtacatccctagtgtgggccgcagatgacgtggaggtctggcttattacaggacttgttcctgtttcggtagtcgaatgcaaatcaccttcgttaagggatgacgggatc

SEQ ID NO: 442402 - DNA, 376 bp, Triticum aestivum
  unsure (1)..(376): unsure at all n locations
atccggatacttgtttattacgagatgaatattcatttaaattcgagaataatggttgttctatttatacgagtaacatattttatggtcatggacccaatgtcaatgggttaccattgtgtgtgtgctgttgtctaggagcacctgtgaagagccatgtaggcagggaaggaagaggtggtcatcgtgtggcttcacacgtctggcatgagcgccttacgtacacacgtgaggaggatcgtgacagagggcctgcagtggtgggctctgccagctttgtgtggtctgcacatgttngtggccatgtaagtgacccatgtaagcgttctctctctcttttctaaactcgctcagttttctaatttctgtaattgtg

SEQ ID NO: 442403 - DNA, 420 bp, Triticum aestivum
cacaaccacacccgggccgaaaaccgcatacggccttcaccggaacaacttggtgacttcacccgataaaaaggcgcggaaaacccctaagccttaacggacaaggtaatggaccacaatttccaaaaagggttaaaaaccgtgacaattgaatcatacaatggaacgacagatcccacaatatggatcaaaaattcccttctccacatcaacatggctcagggcgatgatctccatgcaatcaagtacctccccctaaaactcaagggaccagcacggcactggttaaacagcctcccagaaaactctattggtagttgggaagatttgggagatgcctttggagacaacttccaaggtacctatgttcggcctccagacgccgatgaccttagtcacatagtccaaaaacccgaagag

SEQ ID NO: 442404 - DNA, 81 bp, Triticum aestivum
agcaacaaaactaactaataagggaattccaaaagcaatccgagaaaaaatttcaaggaactttccaacggtccggttaat

SEQ ID NO: 442405 - DNA, 415 bp, Triticum aestivum
gacggggatctggaacggtggatgtattgagctcgagctgaagatcagccactccatccacgaccaatgcttcttttccttattttcatggagatgatttcagtactctttatccgtgtcatgttagagccaagatgcatgtgccactcgttccatcaagtgtctaatgaactttcagttttgttcctggtttatcttggcttcttgctgcttaatatgcctatgattcaataacaatacctactataaaaaaagaaaatggaaggggtgcttcctacctggcaccgcccaacttgctctctttgttcaatattgtgtcgagtccccaagggaacatggtgctgtataaacaatagtggaaagcacagggctcttgagaattaggatttgttggtttcagtcgtttcaagtttta

SEQ ID NO: 442406 - DNA, 411 bp, Triticum aestivum
  unsure (1)..(411): unsure at all n locations
agttccagagagaggtgcgcgccatcaggcggacgagccaccgcaacctggtccgcctcctcggcttctgtcacganggcgcgcaccgcctcctggtgtacgagttcatgagcaacggctcggtggccgacctgctcttcaggggtgcctcaacgccttcgtggtccgactgccttggcatcgcactcgacgtggcccggggccggcactacctccacgacgagcttagcagccgcgtgacccactgtgacgtcaagccgcagaacatcctcatagacgcagccggcacggccaagatcgccgacttcaggcttgccaaactgctccaacctaatcagacacgcacttttcacggtgtccgccgcacgcgtgggtacctgggccccgagtggtacaggggcacgggccctg

SEQ ID NO: 442407 - DNA, 390 bp, Triticum aestivum
ccgggccgacgggtttataaatggttgtatccctggggacagtgtcagcttggaaatagactgtgcgtacctcacagagagtgttgaggcagtgatcgaggtctatgcagaggttagccacccttgccatgtgagattcgtcgctttcagcagtggctatgacgatgagattgtgctcttcgacggaaaattctctggggaaaagcttttcaagcatgttgttgctgtgaaggcagagagagaactgaaggttcagttagaggtggagaaatcagttttccagtggatttttcagggtggaaatgccggacctcttagcttccccgatgactcgatgttgaagtatggccagtttgatgtgggtgtgtgtttttatccatcgacgggcta

SEQ ID NO: 442408 - DNA, 166 bp, Triticum aestivum
tcccgggccgacgggttccataaagtaagtagttgtgtcctggttcatatgactgcaagactggctgctatccagcaggtggaagtaagagggcgtgcggcaagttcgtttgttctttgtgtgatcagttgtgtactttgtgtctaatgaaaaacttgtcttcatg

SEQ ID NO: 442409 - DNA, 389 bp, Triticum aestivum
ggagagacggaggcgggcggcttttataggagggcaagaggggttcgggggtaaaaagcacagagccgtgcctggcccgtttaacccaggccgtgccgtgccgtgccgggccgggccggcccatttgaccaggtttgattgtgtatccgcctcgcattttctgatttttaccaatttattaatagtagcaaaaatgcccgtgcgtggaagtattggacatatagtttattgcatggttacttatatttgtatcatgatatttatttatttaactaacacatcatgtttttcaatttgtcttcaaatcacccgtgagatttacatatgtatccactaatgcatcatgtgtttcatcagtttatcttgtctgcatgacaccctcattcaac

SEQ ID NO: 442410 - DNA, 125 bp, Triticum aestivum
acgggcttcctgatatttccagttctctgtttttctctttatttcgggtggacacagtttcctttggtcgtctgttcatactcgggttgtatattgtgatatttattttcgagccgaatttgcac

SEQ ID NO: 442411 - DNA, 408 bp, Triticum aestivum
  unsure (1)..(408): unsure at all n locations
taacatgacccatccagttggaaccatacccaagggatacctgatcaaaaattgaatctctttcggtaaaagtaatctattaggcaccggaaaccctgttgttggtttgcccgtcaacaagcactgtggaaggctcgaaggcaaaggtcacaccaatggtcatagggatgtgaatgtgttacgctcgggccaacaaaacgaccttgatanggcaaacttagtagtgctacaacacctagatgtgctagaagatttcatgacactgcacaaagagaccatcgcaaagaagtaccgtgaccgtggggtgcacaggacggacgcttaagttattagagagcacaactccactttcttgttttggttcaaagagcgagttctggctaatcccccggaagaaggttgtccaaa

SEQ ID NO: 442412 - DNA, 423 bp, Triticum aestivum
gacgggatgttggaatactaaatttggaggatttaattgcaacggaggtggtaccccctcaacaatggttgaattggcaaattcccgtagggttaactcaaagttttaataagatccataaataggtctcggaagaaaatgctcttgcttgtcataaataatttactccagaactattctggtgtagttgttctgcgaagaagacagtatgtttgtgggaagagcatgctcttgcttgtcataaataatttactccagaactattctggtgtggttgttctgcgaagaagacagtatgtttgtgggaagagaatgctcttgcttgtcataaataatttactccagaaatagtctggcgtttctgcatatcctggcctgtgaagaagacatagtaatgattgtactataatttagcttcaaaaa

SEQ ID NO: 442413 - DNA, 161 bp, Triticum aestivum
tctcttcaattcaggtgttgatagtttgctttagttatatgtttataatcagggtgtatgttgtgatatatagtttcgagttttgtttgaagatttacttagagcatttttagagtcgaggatgacaggatggtaattttcaaaaagttgtggctctagag

SEQ ID NO: 442414 - DNA, 60 bp, Triticum aestivum
  unsure (1)..(60): unsure at all n locations
gnnnnggnnnngnaatttacgccngcagtnccggtcaagaattcacgggncgacgggacc

SEQ ID NO: 442415 - DNA, 120 bp, Triticum aestivum
agtgaggaggccggcgggaggttcacgtacgggagagaagcgacggagttaggagttgtaaatatgcattgttgtatcgcgacctgaatgaatggaataaacgaaataacgctgttattc

SEQ ID NO: 442416 - DNA, 399 bp, Triticum aestivum
gaggagtacgagtaccaggccgaggttagccgcctgatggatttgattgttcacagcctctacagccacaaggaagtgttccttcgggagcttgtgagtaatgcgagtgatgccttggataagctgagatttctcagtgtaactgatccatccgtgctggctgatggtggtgacatggaaataaggattaaacctgaccctgatgctggcacaataactatcactgatagtggcattgggatgacaaaggatgagctcaaggactgccttggaactatcgcacaaagtggtacctccaaatttttgaaggctctgaaggagaacaaggagcttggtgcagataatggacttattggtcaatttggtgttggattttattcggcttttcttgttgcagag

SEQ ID NO: 442417 - DNA, 411 bp, Triticum aestivum
ggagacatggatcccttcctccggccaattaccaccaccaaaccatttttaaccagaatgaccaaaacacctggaaccaggggtcaaatgcccctccggcaaaaacttgcacatgaggacaaccttaattcacttcttcaagttgataaaatggtccaatctaatggcgcagcacacagctcacatatgaaggaagagcctcgaagctaatgcgtggcatgcaccgaaattgttaaggccagatagatggcttcagctattttccttcggttccatagcggtgctgctaggaatccctacatgatgttatactgatggagcgccatgaacagttgccgtacatccttgagatcatttcttacccttccagctgaagctcgggaaagcgtgtttggaaggaacagattctgc

SEQ ID NO: 442418 - DNA, 481 bp, Triticum aestivum
  unsure (1)..(481): unsure at all n locations
gnngnnnngngnnngaattctacccggnctgtaccggncacaaattcccgggncgacgggaaggtttnagcacctcgatgtcggctcttcgccacctggagctgtaggtggttccaagggttgggctgttcgcccattaatgcggtacgtgagctgggttcagaacgtcgtgagacagttcggtccatatccggtgtgggcgttagagcattgagaggacctttccctagtacgagaggaccgggaaggacgcacctctggtgtaccagttatcgtgcctacggtaaacgctgggtagccaagtgtggagaggataactgctgaaagcatataagtagtaagcccaccccaagatgagtgctctctcctccgacttccctagagcctccggtatcacagccgaagacagcgacgggttctccacccatacggggatggagcgacagaantatggaaataggataaggtaaccggcgaanac

SEQ ID NO: 442419 - DNA, 395 bp, Triticum aestivum
ctatagcagttgatataacagccaattgcaaagataattcaataagtgtcaacttaatcaaatcaagtccacgatataaagaaagagggataacactaacaacgggtccaagattacataaagcaattttaacaaaatttcctttaatggagcaagggaaaatgggtaatcctcgaaaaccaagtttccttgggaatccaaccctaaaagttaaatagcagcatggggaaaccaactcgggaacttctttaatatacaataccttcaaaaactaggcataaggatttattttgagcatatcaagttaaccgcatacgcaaaaagataggtcaaatcatttaagcaaagcgctcaaaatcctcatcatcctttttcttggatggtttgggggggaa

SEQ ID NO: 442420 - DNA, 404 bp, Triticum aestivum
atttcagaagggtggaatacacaaaaccccgatggataattcatgtccaatcaagaatttccatgcaagagacaaagagttcacctatcgcccaggcgttacctattatgcttgtggagaagaagggcactatgccaagcagtgccccaagccaaggaactcaaccccgaagcccaataatggtggaaataattcagcgccaaagcgaagcaatttcaaccccaataacaaccatcggaaaggtcacctgaaccatgtgacccatgaggaagcacagaacgccctagatatcgtgctcggtacgtaccccgtcaacacaatacctgccatggttttgtttgattctggagcttctcactcattcatttcgaagagttttgctttgcaaaataatttttcgatgc

SEQ ID NO: 442421 - DNA, 400 bp, Triticum aestivum
cacctctggaaaggaaccctttggccatggagcatcagcaattttacttattagagcacctccgcacgctgcgtactgcccctcgaccatcttcggcttcacatcgaaggtcttgagccacaggccgaagtgaggggtaatgcggaggaaggcctcacaaacgacaataaatgacgagatgtgaagaagggaatccggggccagatcgtgaaaatccagcctgtaatagaacataagacccctaacaaagggatccagagcgaggcctagtcctcggaggaagtgggagacgaacacaatgctctcgttgggttcaggagtagggacgacctcccctcgggcgggcagcctatgcgaaatttcggcggtcagatatctggcctccctcaacttcttgatg

SEQ ID NO: 442422 - DNA, 415 bp, Triticum aestivum
ccgcttttaccaagctaccgcttcttctccgagcagccacctcgccggagccgtcgcttgcttcccggtgatgccgcctcctcgccctgccactgaagtgcgagggcgccaccggattcaatggggtgtgccgacggccgtcagacaactacggcgtcgagtttgaacacaccggtattggctcgacacatactcgtcagcctacctcatgacatcgctgtgtggaggctcagcctcccccgcccgaaactcaattccctgcaaattgagtctggtgaatgcggagctcgtcagcccgccggtgacaattgaatctagcccaatttgggcagctcctcacattgttgtcgatgagtgggaaaacattcgagagagcgataaggatgccatggcagcgttcactaaggcacatcgg

SEQ ID NO: 442423 - DNA, 357 bp, Triticum aestivum
tcgcgggtatttcaaacaggtatgacgatcgttagcagagaccacctgggtattgccttgtacgtctgagcccctagctttcttggcgtatccgtcccgctatggatccgatgagaaggtttatcagaaacggcctcgagaagacaaaaaacttgaaagaaagagaaacgtgaaggtatgtggatccaagagcggttgagccgcattgtggaccatggtctagccgtgcctccgtccatgcccatggtattttaagtgcatattgtgtacggcgacacgaatttcatcgctttgttggggctaggacgtaggccggattgctagctgagctccggacgagtcagacggtcctgttgc

SEQ ID NO: 442424 - DNA, 414 bp, Triticum aestivum
acgacgcgcatacggtgacttcgtaaatctcaagatgatatgtcggctcattctctcaaaggtgcccataggggtagggtgtgcgtgtgtgcgttcatagggatgattgtatgcgcgtgtatataagcgcttgtgtctgtattgatgctcaaaaaaaaaaagttaaccatcatgatttacattgcaatttcttttaaagttatgctaaagtgctcccacctgtcgaactaatgtaggagcaatcgtgaaatagatactactctctccatttccaaatatgtgtctttctagagatttcaacaaatgactacatacgaagcaaaatgagtgaatttacactctatatacatccgtatgttgaaatccatttaaaatataaaagacaaatatttaggaataaagggaattccaaaa

SEQ ID NO: 442425 - DNA, 410 bp, Triticum aestivum
gcacataaatctgttcaagcacagaagtaatcttctttagtcatgaaaagaattgttattaggagggaacacaacagatgaaatagagctagtggcagatgcttgcatacatcagatccaatgcttttactacataaaacaatcccttgaattaatagtggcaaaatgcaatggataaaaacaatgggtaagccctttctcttttgttagtattggttctactcctccttgctactttgaagtactgataattctcctccttgggcatgtcatttcccagagggttaaaatgggcactcttaatttctctttcggaggaagcggagaagctgtagatgacgctaaggcacagaggaagagcaagaactgcaacacctgtggatgttgtcaacgtttctcattgtaattga

SEQ ID NO: 442426 - DNA, 403 bp, Triticum aestivum
  unsure (1)..(403): unsure at all n locations
ctacggcaccaggggctcacagcccatggaggagagcatccttggagcagatggcgccgtggtggagggcaggtaccaccacaacctggacctcttcacgatgtccaaggacgtcgccgccacaaagatgccgtgcgcgtgacacggcctaacccgaccaacccctgggggaagaaagacaccactgccacggttcactgtcagccttcagccgcggtgctcttgggcacattctccggtggtgcttangagtctgcaccggttactgtacccatatgagcttatgttggtggttgtgactgttagaggatctcatgcttggctatatataggaatcctggtttgtcgaaactcgaataatgaaaagttgaaattgcattctgaatttgcgcaagaatataat

SEQ ID NO: 442427 - DNA, 404 bp, Triticum aestivum
cgagggcagatgaaaatgtgctgaagcttgtggcaaaacacaagagggagaaaaaggctgctctagatgagattatcaagttagagcagaaactggatgccaaacagaagcttgagctagaaataaaacagttgcagggaaaattggaagtgatgaagcatatgccaggtgaagaagactctgaatcaaagaggaaaatagatgaacttagtgccgagctccaggacaagtatgatgaaatggatgcagtggaagcactccaccacactctgcttatgaaggaaaggataagcaacgatgagttgcaagatgctcggaagaagctaatagatggtctgcgggatgttacaactgcccgagcaactataggcgttaaaagaatgggtgaccttgatctgaaatcg

SEQ ID NO: 442428 - DNA, 140 bp, Triticum aestivum
aactggtgtttccagtgtctaacgggtgactaacacgtacaagtctgcccttggaaggggaacatcaactggaaccagttgcggataccccgtatgctggggatgttcaaaacatgaccaatagctttgatgtccggact

SEQ ID NO: 442429 - DNA, 328 bp, Triticum aestivum
aggttgcatcggtgaaaatttccagtttttcctagattagatttattttcttacctattgtccaagaaaaagccacaaaacaaaagttagatttaatcaacctttggcctaaccagactgaacctttggaattttcctttcaatggttggaataatgaattaacggttgcatcaacgtgtccaattgctgggcctaatgtccaattcctttaaagtttcgagttctgttcacaataatcacgcaaccgctggatcaatatcccaaccgctgtgtaacatcccatacaacaatttccaccaagtgctaagcactgtttaatgtcacaat

SEQ ID NO: 442430 - DNA, 421 bp, Triticum aestivum
gacggggcccaagaggcgttcttttggtggtggtgtggagagcggcattgatgcatcgatgcttggacaggatgggtgggctgagggtgaggagggtgaaggtggacagcgggaggaggtaagagagattaacataaatgaggaggcacgggctacagatggtactggcagggcaaatgtcacaggaggagttgaggacctgggcagcttccatttggatgttgatccaactgaggatatactagggaatctgggaaatttacacaacttgccgttcttgagggtggataatcttgggaggatgctgtaactgttgccattgcttgtcatggtgctgaagacctgaagtattgtatgattagctgggttggaacagatgctccaaggattgtctttacctttcctgttgtaattcctggta

SEQ ID NO: 442431 - DNA, 413 bp, Triticum aestivum
tcggtaactgatttataggatgaaggtctgacgagaactgtttgggggccgattgatacgaatagaattttggaggttcctatggcaccatcaagaattgaagattttgttgcatggaaccacactaagagcgggatgtttagtgttcgctcagcttatcatgcggaatggagctatcgatttggtaggcacgaaagaaacttacttggcgtcgaggggtcacatatcatcccgggtgtggaagaagcggtggagcttatttgggtggtgagcactatatggaatattgccgaggggtgtcggtgtaccaaacattatttgtaccgaaattaatcttaactgttgcatggtacatttggtgggagagacggcaaacggcaaaccgttcacaatggaccagtatagacgcctca

SEQ ID NO: 442432 - DNA, 413 bp, Triticum aestivum
caactagtatgcatcacaccctgatgatctcttatgtatatcttatcatgttacttctgtaatcaaacatctaagatgcgctgttgagcgcattatcagctaataaagggcatctgccatcattgtataaaaaaaaaaaaaaaaaaaaaaaaaaaaaaacaaaaaaaaaaaaaaaaaaaaaaaaaaaaaaaaaaaaaaaaaaaaaaaaaaaaaaaaaaaaaaaaaaaaaaaaaaaaaaaaaaaaaaaaaaaaaaaaaaaaaaaaaaaaaaaaaaaaaaaaaaaaaaaaaaaaaaaaggggccccccaaaagttttaaactttaatttccggtaaaagaaaattaaaaccccttcaaaagggcccccaaatttaatttaaaggggccttttttaaaaaccttttagggggaaaa

SEQ ID NO: 442433 - DNA, 412 bp, Triticum aestivum
gtccgtagagatcttcttctcccgcaacaacgcattgttcgccacccggcggatgaagctgctgcagcgcgtggcctacttcaacgtgggcatgtacccgttcacctccatgttcctcatcgtctactgcgtgctccccgccgtctccctcttcaccggcaagttcatcgtgcagcacctgagcgccacgttcctcgtcttcctgctcatcatcaccatcacgctgtgcctgctggcgctgctggagatcaagtggtccgggatcacgctgcacgagtggtggcgcaacgagcagttctgggtgatcgggggcaccagcgcgcacccggcggcagtgctgcagggcctcctcaaggtgatcgccggcgtggacatctccttcacgctcacgtctaagcccggcggcgcggac

SEQ ID NO: 442434 - DNA, 399 bp, Triticum aestivum
ctccgccatctgttccaaaatgtagtgcgtatagccttactgaaaattcaaacctaactaactttaactaattttccttaaacaaaattgcaaatataaattacccaatatatatatcatttcattcatcttcgagaggcaactataaatatggggaaagagtgtacaaagaaagaccgtcgtatgacctgcaacaatttcaaccatcctttggtgtggaggaatatcataggaactctacatgatatgatttttataggatttttttttctttagagcgaattggttcgtaggaatagattcatatactccatatttcaaaggaaaataaacatgatacatttttatagctttagagcccattagaaaataaacatgaatggattcccatactcccac

SEQ ID NO: 442435 - DNA, 413 bp, Triticum aestivum
cctgacaatgctgcattcaaaatgcttgcccagatccactagccaatcgtcagcgtcggtagcctcaacacaaccgctgaacgtctttgggccattagcaaggaactggttcagagtagcaaagtggtgctgattgttgccttgattcccttgactgccttgattgcgctcttgaaggatttgcatgatcaactgtgtgtttgcattagtagcggccatcacagcttgccatgcttccggaggaggcggaggtggaggcggattaggattcggagtcgtgcgcgttggaggagccatcctgaacaggttgaccaccattagcacatagatagacaacaatatagaagctgaatccaacggaatgaaaattgcaacatatagtcttcacatccgaacaagatgaacgaatgcat

SEQ ID NO: 442436 - DNA, 396 bp, Triticum aestivum
ctagtggattcttgggagcattgtacctccacacgctccaaacggagattagcacccgcaaggatgtgaacttcgggatacatcgttcctccgcgtgcctcggttatctcttacccgacccctttacttatgcactttactttatgatagccatagtgtttcatgttgtatatcttgcttagtataagttgttggtgcacataggtgaggctagttgttttaggttttctgcttgagaaattaaacgctaattctattccgcatttgttcaaccctaaaccataattattttaaagcgcctattcacccccctctaggcgacatccacgatctttcacccagctttctccaaactcccttgccctattgaagaggaataacatatgtttcatacct

SEQ ID NO: 442437 - DNA, 385 bp, Triticum aestivum
  unsure (1)..(385): unsure at all n locations
gaagccagcagcagccttcttacaggctttgaggtaagaagtttaaaatatgtaatgtagtaccgcatggatagtagcccctaatgcccagttcggtgttcggaaagaaaaagccggactgaggatctaaaaagatatacgcaggagttctaaaaatatgtcaatatcggattgcaggctgcgctgctgacctctgccgcattgactgcgaaggtcggtgctttgaagcaagacctcgagcggaccgagaacgagctcggccttgccaagaagcagctcgaggacaaagaaggtgggtaacaccgtaataaatttgtaccttacagaaaaggattttggttgcaatagaaataacaagcataacttgggcactgcanggggcacg

SEQ ID NO: 442438 - DNA, 410 bp, Triticum aestivum
gaatttgatcagcattttcttgagcgccattttcttcagcattttcttcaggtgcattagctcgacgttcttcacgttctggaatgaattcttcagcagattcttcggtaggaatgacatcctcagtagccttgaacttgatagtttcctcaggtgctggttcatctatcacagaaggtaggtgctttctttgcgagccattagtttcatcgaatcgcacatctacagtttcaacaaccttgtgaagaacgttgttgaagactctgtaggtgtgcgagtcctttccgtaaccaagcataaaaccttcatgtgctttcagtgcaaattttgagttgtgatgaggatctctaatccagcatttagcactgaagactttaaaataactcacattgggtttcttgtcagtgagg

SEQ ID NO: 442439 - DNA, 412 bp, Triticum aestivum
cgatgcaggtaggaaagtggacgtcatggatgatgatgacctgattgagagggagctggaacatggcgtggagttggctgccgaggacgagaaaaaacacgacagaaggcagagctggccccaccccgcgcaccgggaggatcaccagaacacggctcgcaaggcggagaacaccgaagagggcgagctgtccctggatggccaggaataccgctctcctggccccgacaaccggaagaggaaggacgcgcacgagcacaggagcaatgaccgcagcgccgagagagacatcaagaggccgaggccatgagatgaagtattcattgtggggggtgatcagcggtgacggactgagaactggtgttttgagcgccagtgcgtgatacctagtttttgcatcgcgggaacatac

SEQ ID NO: 442440 - DNA, 275 bp, Triticum aestivum
agataaaacggtggagctgtcagtccgtcaacgctccttccaaaattggggtccggtaaaataaccaaacttgaaggttgtaataactgttgccaacaatttccgccttactttaaatggaaaaaaacaaaattcatttccattgcctatgatggatttcgatttgcttttcacatgaagcatcaacataaatcgttgaccaaaaaaaaaaaaaaaaaaaaaaaaaaaaaaaaaaaaaaaaaaaaaaaaaaaaaagggagctcaaaagggatcaa

SEQ ID NO: 442441 - DNA, 421 bp, Triticum aestivum
tccggagcgacgaacggcgcgatggcgacacaaattccaagaaggaccacctccttcaggcaatgaccgccaacttcaaaaacctccaaccgctcaaccgtgcccgccagaacaaggtgaagtccaagacggcggcggtggacaaggtggaggcggattttgaggagcgcgtcgcccagacgtagatctggttcggcgaggcccgggaagagttgaggactgcctaaggtgagctggatgtgcgcaagcgagagctcatcctgaagcaggccgacattgagaaggtccaagaggcggcgaaggaacaggccaccaaggatgaagctgcccggcagcagcagcaagctctactggacaaccaagaagaacaccttgttgcgcgtgagcaagcgcttgccgccacgcttggcagcaaggacgg

SEQ ID NO: 442442 - DNA, 399 bp, Triticum aestivum
  unsure (1)..(399): unsure at all n locations
ttcttcatcttcttcttcttccttgacctcctccctagatgggagaagggtttcccctctggtccttggctcccatggcgcgggaggggagagagcccctccgagattggatctatctctatttctgcgttctcagatccttccccttcaccgtttcttttatatccggagatccataactccgattggggtgaatctttcgcccagattattctcgtaaaattagctttcttgcggcaaaagaagagcgtcaaccgccttacgggtggcccaagagagtgccangcgcgccccctatctcctggccacctcgggcaccgtttctacaagttggagcatganggtgtttttttgatgtcttccttatgagtggcggtcgggggacgagcgatggtcttt

SEQ ID NO: 442443 - DNA, 82 bp, Triticum aestivum
  unsure (1)..(82): unsure at all n locations
gggngnaattctaacatccggngncgngaacggtanaggantcccgggccgacgggcgagcganagcggatttgggatttta

SEQ ID NO: 442444 - DNA, 84 bp, Triticum aestivum
tgatcaaaattattagagcattgtcccaagtgaggaaaggatgatggagactatgattcccccataagtcgggatgagactccg

SEQ ID NO: 442445 - DNA, 284 bp, Triticum aestivum
gaggaggaagaggggacgggacgagggcgcggctgctgatggaaggggcggagcgacggaggaagacgcctcccgatggatcaaatcgggggtagtattgtaatttcacactatttcacctggtcggaaagatgcccccagcgacaattatttcggaacggagggagtaattttttacataacctagaatgttcttctgaactataattttgaatgagccattatctgagatttaaatctagccaaaaatgatcatggctgatataatgcattctcagaatgct

SEQ ID NO: 442446 - DNA, 412 bp, Triticum aestivum
  unsure (1)..(412): unsure at all n locations
taggtgcatgtggattctggtcacttggccttggattggagtgagcagcgttgcgcagagacttgggagtagatggattggagtggtggggcgcctttattatatgagagtccaaactctgttgcgttcacatcatgctggctctattctgcttctccaattaattccctctgcatgtaattgaggatgcatcattgaccgttcaacgtctcgagaaccgctacccactccctccttggcattcaagcacctatggacccgtcgatgacgagggtgctatggtgacttcgtaaatttcaagatgatagtgccgtgcatatgtgcattcatangggtgagtgtatgcgcgtgcatataagcgcttgcgtctgtactgtgtanaaaaacgtaaatgcatgtcaaaaagagacta

SEQ ID NO: 442447 - DNA, 219 bp, Triticum aestivum
attcgcggatcgatggggaggtccaccatggagctagggttgtcgggatgaagaagaccctcgtccttcaacccgggcccccccccaaaggggaacgcaacaaccgggtcaatccacaatatcccctttaaggccaatgggcaacccggattccaaaaggttcatttgttatgttcccaatcctccaaaaaggttggccttgtcctcaaaaacgggcac

SEQ ID NO: 442448 - DNA, 396 bp, Triticum aestivum
tacggtcaaaaattcccggaccgacggggatgaataaatccattgtgagaagagcccttgtgataatgcacaaaaggaacaaattggattacaaaaggaaccccaaggttaattgccggcaaggcttaacctaaactgaaccgatggacctacaagggaaccctcgggcaatctgatgtgtgtgtataagtactgctgacactgcagcccgtttcctgaggaaatttgttgggtcgttgaaattgacttgtagttgtactactttgagctgtagctgtagccctaaatcatattgtgtcgaactgaagatgtaccccagtaagttcattcatgaatgcagcattttggcgttctgcagctgagcagagtcaatgcctaaaacataaatggtcaaaa

SEQ ID NO: 442449 - DNA, 425 bp, Triticum aestivum
  unsure (1)..(425): unsure at all n locations
atgttcatcaagattgagggatgtaggctgaagtggatcagggaccaccagagagagatacgtgccgatctataccaaggccttgtggatagcatcgcggttggggagatgcgagcgagcgctgttgggaagaggatcgtgctgccagggacgcatcaaggaagcaaccgagacatgaagcggaggcagatggacgccatggcactggtgcagacatatgggaagcctgacatctttttgactatgacatgcaatcctagctgggaggagatactgaatgagctacttcctgncaagacaccccaggaccgaccagatcttgtcgcacgcgtgttcagggccaagctggagaccatgaaagagatgttgttcaaaaagcacatccttggtgttgtggtagcacatgtgtatgtcgtcgagttcca

SEQ ID NO: 442450 - DNA, 392 bp, Triticum aestivum
ggagagctttataagaaaagcactaccggagtccttcaaaggtgcatctccgaagaggaggggcggaacctcctggctgaaattcatgccggacttagcggtcatcacgctgcagcccggtcccttgtaagcaaagccttccctacaggcttttattggccgacggcccgggcaggcgcttaggacttagtccaactatgcaccggttgccagctctttgcaaaccaaagccatatgccacccaccgccctctaaactatccccattacttggcccttcacggtctgggggcttgacatggttggaccccttaaaggcggaacctacaaccaaaaatacatactggtcatgggggataagttcaccagatggatagaagccaagcctgttaa

SEQ ID NO: 442451 - DNA, 431 bp, Triticum aestivum
acgcagtaccacactatgattatctcaagctcaagatgcccggtccacgcggcgtcataacagtcaatggaaatacggaacgctcccttcgtacagaagagcacacagctgccttagcagcggaagtagagagcggccttctcaagcaaaaccttaatttggctgccgagccacggacatcgttaagagggtccgaactactctacagcaggagagctcggctcgccaggagctcgactagcaatctggcctccgtcttagtcccgatcaagtggtggcattcgtgtcgcgcgtacataactacgcactcaaaatcccatgggcaacgacggagggataactagcttgtggtccaaagtacgggtcaaccgacatcggatacacacatactttcacttttacttgtttccttttcaggtctcaatcccaca

SEQ ID NO: 442452 - DNA, 438 bp, Triticum aestivum
  unsure (1)..(438): unsure at all n locations
gggtcgacggagggagaaaagctcgatcgttccccatctctctcgtctcgtcggcgacgcactccacggcggcggggaagcaccggtgctcctccccggcggcgcacggcatggggaatttcgcgtcgagtgacgcttcttcttcagtcaaagaggcacaaagggtatcaacaaccagcttcacgcccaaggactcaaggaggaagcactgggactctgggagcattcaggattggttggagacggcggaattggttgggccgcggctttacagctgccgccattgccggaaccacgtctgcctccacgacgatatcatctccaaggacttccagngaaggaatggccgcgcgtttctctcctaccacgccatgaacgtcaccacaaggggcaaaggaggacaggcagctcatgacagggctccacacgatcgccgac

SEQ ID NO: 442453 - DNA, 425 bp, Triticum aestivum
gaattgatcgagaagcactgcggaggtgtgagaggaggatgggacaacctgcttgcagttatccctggcggttcatctgttcctttgttgccaaagcacatatgtgatgacgtgttgatggactatgatgcactaaaggctgtacagtccggattaggcactgcagcagttatggtgatggacaaatccacagatgtagttgatgcgattgctagactgtcatacttctataagcatgagagctgtgggcagtgcacgccttgccgtgagggtacaggatggctctggatgatcatggagaggctcaaagtgggcaatgcaaagctagaagagatcgatatgcttcaggaggtgacgaagcagattgaaggccacacaatctgcgccctcggggatgctgcagcatggcccgtgcatggtcttaa

SEQ ID NO: 442454 - DNA, 384 bp, Triticum aestivum
atgattgggatactaaaagccacaatgtatcgaggcttagtggagtcagtcaccagcctctccgttgtttgaacaactgaacaacaacatcaagcggcgccaaaacatattgctgatctgagagacatccgagacatgaatgaggaaaaaatgagaaggtcggccattgttggctcaagctcaggaggtggtcgaaagcctggctccacatggtcctagcactactgtcacacatggtgttcgggccacttccaccagtgctctgcgggttgtcgttccgcgagagcaatgacggggagaacaagatgatgcggtgctttgctcgcctgcattgcgctgcttgcgctcgggacgtgcatgtctacagaagagccatgacatact

SEQ ID NO: 442455 - DNA, 261 bp, Triticum aestivum
atgggaagaaaaacttgatgaagttgacaagaagtgtcatttcaagaattatgatcttatccaaccacagaatagcttttgctttgaaaggagggattggatgactgtgcagccagacgaactgcctggcggaaggcaactgataatggggcttaatcctccttttggagtcaaagcagctctggcgaacagatttatcgacaaagcattgtcttttaagcccaagcttgttatactaattgtcccaaaagaaactaaaag

SEQ ID NO: 442456 - DNA, 414 bp, Triticum aestivum
acagattcgcgagagctcgagagagtgcgaccaaaatggcgatgagatgcgcgctgacctcgctccccgcgcgcctccggtccccggcggtggtagccagcgggacgcggcgccttctgagtgacgggaaggggcgcgtgctcagcgaggaggagcgcgccaaggagaacgtctacatccagaagatggagagggagaggcaggagaagctcaagaaaaagctcgaacaggagaaggatgcggccgacaaggctaagtccggcgccgacggcaagaaggccgagggaactaactaggagcgatcttcgcctgcctgaaggtgaccccatcttggacgcatctgggggacatttgtgtttatagatgtccagagatggaagaataaattctgtaaagcgttgatagcgctatctt

SEQ ID NO: 442457 - DNA, 421 bp, Triticum aestivum
cactccaagcacaagaaggaattgcggccttgaggagcaatgttgatacactgatcgtaatcccaaatgataagttactgactgctgtttctccaaatactcctgtgacagaagcctttaatttggcagatgatattctccggcagggtgtccgtggaatctcagatatcatcactgtgccaggtttggttaatgttgactttgctgatgtacgatcagttatgtcagatgcaggttcatccttgatgggaattggaacagcaacaggtaagacacgagcaagagatgctgcgctcaatgccatacagtctcctctacttgatattggtattgaaagggcaacaggaattgtgtggaatatcaccggagggagtgacctaacattgacagaggtgaatgcagcagctgaagtgatatatga

SEQ ID NO: 442458 - DNA, 432 bp, Triticum aestivum
  unsure (1)..(432): unsure at all n locations
gtcgacgggccattcataacattggacaaattgtttacggcttgacctcaactgtcgccgaacactaccgggggctattaactggcctcccaaactaaatcctcaatattttgctcttacattggagatgaggtttcatgatcatgcttagcatgacaacccatagaaaggaaccgatagcgggactattttctttggaagacatttcttctgttaaacagtaatataacatgtctctccgcgtacctttgtttataaaaccgtatggccagattgccttgtttgttgtaaatctttgccctcataaaggctttataaagtaggacaaacactcctcgactattggccgangaggtggaagccgatggtcggtcaacaaagttttgtacaatgcagatccgagcattaatgacttaaagtacttggatacat

SEQ ID NO: 442459 - DNA, 407 bp, Triticum aestivum
gatgatcttatcgggaggaaaaacacttgaaaagaaaagcatctttacacttattcaaggaatcaatacaatttttaggcaaagaagaaaaccaagttttagcacgattcccatagggagaacggaaatagcttcaatttaacaatatcattatccacatcttttttcttttgcatatcacacaactcaaggaaagtatttagatgggatgcaacatcttcattaggactaccagaaaattgttctttcataacaggattcaacaaagcggcattaatttcataagattccgtactagtggagagagcaatcggagtactaataaaatcattattattagtgttggaaaaatcacacaacttggtattctcttgagacatcatgacaaagcaagaaatctagcacac

SEQ ID NO: 442460 - DNA, 424 bp, Triticum aestivum
ggatagctaatcctgtcgaagactatgctcctggccatctccatcttgcagcatgtagaagagagtagattgaagtcctccaagtagcatcgcatagcataaatcctacctggcgatcgcctcctcgtcgccctgttagagagcgatcatcgggttgtatctggcacttggaagggtgtattttattcagtatccggttctagttgtcataaggtcaaggtacaactccgggtcgtcctgttaccgaagatcacggctattcgaatagattaacttccctgcaggggtgcaccacataacccaacacgcttgatcccattcggccggacacactttcctgggtcatgcccggcctcggaagatcaacacgtcgcagccctacctaagcacaacagagcggtcagcacgccggtctaaccctaag

SEQ ID NO: 442461 - DNA, 211 bp, Triticum aestivum
aatctcgattgttaccatccggtaggcggcagcagggccttgggtgatccggggacttggaggacaggctcgacaaaccaaaccggtggataatcacacagcactgtaatgtaaacccgatctagaccggttctcggtgatctcggtcaacatcgtttttccattttgctgtaaacatagtgagatttctcacgacggcattatagaagtg

SEQ ID NO: 442462 - DNA, 222 bp, Triticum aestivum
ggagcaacttcattacactacggaactgtaagtgaatgtcagctcagcgtgagtcgatttaaaacgtcggaactgggatggaactgtctggacatatgatatgcgtgttgcagtacagctgacattggagagcgtttcttgaagaaatttggtgggtagctatcactcatctgaacattgtgcgaattctgaactgtagactgtgaccctaaatgatactgt

SEQ ID NO: 442463 - DNA, 413 bp, Triticum aestivum
gacacacagaagattgttgagaagtactccaactccaacattgaaattcacactttcaaccagagccaataccctcgcattgttactgaagacttcttgccacttccaagcaaagggcagacagggaaggatggctggtaccccccaggccacggtgatgtgttcccctctttgaacaacagtggaaaactcgataccttgctgtcacagggaaaggagtatgtcttcgtggcgaactcagacaacttgggtgctatagttgacatcaagatactaaaccacctgatcactaaccagaatgagtactgcatggaagttactccaaaaacattggctgatgttaaaggtggtaccctcatctcatacgaaggaagagtccagctcttggagattgcccaagtccctgatgagca

SEQ ID NO: 442464 - DNA, 407 bp, Triticum aestivum
aagtttgtgaaggaccacggaggagatgagattcaagccggccccaccgtcaactagtatctttgtgaccttgaggttgcggatagttggtgagaccaacatcggcaagcacccgaccgcagttacgcgatcagggtgatcctcaatgttgaagatgataggcgtgctggaccatttcaggggcttgcgtgactctatggatggctctgctgcattcacttcccgcatccactatttgagctggcggtgcgaagtatgcagagaggcgccaccgtcaacgcacaggacctctgtggctttctgaaattcttgctcatcggtctcatcatcatccacgtcttcgtcatcgtcgtcatcttcatccttgtcacggccgtggggaggcctgtctccttgccgctgcttgg

SEQ ID NO: 442465 - DNA, 429 bp, Triticum aestivum
ctggtattctgccctttcactgtttcttatatatccggagatccgtaactccgattggattgaaaccttcactccgattttttttctcccgaaaattagctttcttgcggccgaagaagatcattaacctccttatgaggggcccaccagggtcaggggcgcgccccctgcctcgtggctccctcgggcaccgtctcgcgttgattttcttcccatattttacatatattccaaaaataatctccgtccgtttttatcccatttggactccgtttgatatggattttttgcaaaactaaaaacatgcaacaaacatgaactggcactaagcactggatcaatatgttagtcccaaaaatagtataaaaagttgccaagtatatgaaagttgtagaatattggcatggaacaatcaaaacttatagatac

SEQ ID NO: 442466 - DNA, 424 bp, Triticum aestivum
gaggatgaaaatgatgaggaggacaacaaggaaaatgaaaacaatgatgatggtgataaaaaaaagggcggccaatttcctgcagggaaagggcaggggaaccaacccccggattgcaaccaacattgaggtgcttcaaacatgaagacaatttcccttggctgaaaaatgtttggttctgcttgatgcaatgtcgttgattttggttctgtggacccattgggggattgattgcgttggttttgtggaaaaaccggtggggggtttctttgtcagggacatggtattatatactggtagcatttcaattgttgtattgggttgaaatactttgtccgctgctgcgagtgatcatcgatgttgccattttggtagtcctacttgttttgcctggaaattttgatatactaagtatttgtgtgcg

SEQ ID NO: 442467 - DNA, 422 bp, Triticum aestivum
caaacataagttcccgcttcaaaaaccggtatactacgtatccactgtcctcacaccatgcaagtcacggtacccacattatcaaaagatagcatacgcggtcttgatggcatctcggaaactatgacattactttcaagagtgtcactactttcaagagtgttcaatcacggtggcctccgaagtaccactcaatgatataataaataaccgtgatgccaaggggccaaatttgctaagtgggccatcgagctctcccgttcgacatcatatataaaccagggtgagccattaagtcgcaagtactggctgacttcgtcgccgaatggacagaagcatactccaattggatcatgcactttgacgactctaagatgttggccggtctgggagcgggtgttgtcctgaaatcccccaccgga

SEQ ID NO: 442468 - DNA, 262 bp, Triticum aestivum
agaacgatgaggtcatcatattgacaatgtcggtcgacggccagatcataggatggtgtctcatggcaaacaatccaccaggtaccgtcaataatgcctctcagctgcagaacggagtggcgtgaatactactagtactatccatgcagtggacgaatctggcagctgcagccattcaactcaggatactttagagggtaatgtgagctttgagttaagtgtaacattcatgcacatgagagcgtctaacgagtttcaatat

SEQ ID NO: 442469 - DNA, 230 bp, Triticum aestivum
  unsure (1)..(230): unsure at all n locations
gaataaaagattagtaaagaaagcaggggcttttctgaaatttttgtaaatctcgtttttatctagtcctttcctgtcaaaccctcgccgtcgcagcatcagcaatagtactactactactactagtgccaaanaaaaaaaaaaaaaaaaaaaaaaagaaaccaaaaaaaaaaaaaaaaaaaaaaaaaaaaaacgggcggcccaaaaggttcaaacctaacttacccttg

SEQ ID NO: 442470 - DNA, 423 bp, Triticum aestivum
tttgagccacagccaagcgcgccgcactatcctgaggggcatgatatagctctgcctccaaaaagtgccttggaggccgcacacgctccggcaccgatcctcgactcggagattgctgcgtcctttgaggatgaacggttggacgtcaccttgggggctgcgatcttaaaggcgatcgagccgaacgcaagccccgcactccgcatggcccatgactcctaggagccggattcttctctgaactccgggccttccgtgcccccgccgatcgaatctgattgggcgcctgtaatggagttcaccgctgcggacatctttcagtgctcacctttcggtgatatcctgaattctctcaagtctctctctttgtcaggagagcccaggccgaactatggtctgcgaggttgggatttggacgacgaa

SEQ ID NO: 442471 - DNA, 415 bp, Triticum aestivum
  unsure (1)..(415): unsure at all n locations
gagtggctggtggagctgctgaccggcggcgggcccgcgctggaggtagagtaggagtagggtagggcgcagcactcgggtaggcaagccaaggcgtaagcgtacgcgcgtttcctttttcggacggttgtacagcgggcaagggaaaagccaggaaaaaaaagggcggtggttcgttttggcgcggcccggatcggtcgcatcgctttcttccgcggcatgggcgggcagcgatcggtccgttcatcaatgcggtcggtcttgtgtggtgcgttgaggggtgaggttgcgaagaaatggaaatggtgcttgctggcggcacgatccggctggctggcccttgtcgccttgcctgcttttgcgtccggtttctattaaaaaaaannnaanaaaaaaaaaaaaaagcggccgctct

SEQ ID NO: 442472 - DNA, 359 bp, Triticum aestivum
gcaaaaaggatcattgagaagatgaaggagaaattcccggacagagatgaagggtggaaagaggtagaggaggcattacctcaatagaataaccactcgcagatgaaagactgcactggtcagtgattcaaattgaagtttgtcgctgaccatcccttcttaaaatgtttgttcttgcgtgctgaaaacgtggttagcagttgggaactgcaacaacatttgttggactgttctaagcacatggagctttgtttaagatgtaattttgctattagaatatgctagtcccagttgctgttataaattacctcctgtcaaagaattattgaggcggttgtcaaaaccatgatctttgaggt

SEQ ID NO: 442473 - DNA, 412 bp, Triticum aestivum
gggacgttactttcctctgcctcccttgatagtcgcacaggcaaagctccacccggctcctttgccctcctcctccggcggtgctgccgccgcgagcgagcttgggaaaggatgccaggtctcagttctgtatagtaggtctaggattaagtgtagggcaaggtctagacttccctccatggggtatggcatgatgccgagtagaagcactacatcagcgcttacgagcggcgcccgacgccgttcagcttcgcttaccggctgctctccgtggtggagagaaggtgcgggaggcggatctgactccagcttctccaataagctcgatctcgtccctgatttggaggatggccatcgcttagtcctattttctcgttgctgtcatggtgatgggaacggaaataggacgagg

SEQ ID NO: 442474 - DNA, 429 bp, Triticum aestivum
cataatcttatcacccaatatgaatctagggttggagttactttgaaaaatcttaaagagaaagaacctatagttaatgaaaaaatagatcttgattccgctagaattggtaaacttgaggatataattaccaacttaggttcggcgttttctcccatgaaaaacactccaaaaccctctacaaaaatcaccaagtttatctatgttcctaaaaataaaggtcaaacttctagtaagggagacgcggacctcaaatccataagtgttcatcccaattgtctttctatcattaaggaaccttttgctacaaatgaatttcttgaattttttcccaaaggtttattcattgctaaaaagggagaaacccctaaagattattagtgctctacttatgaatcaagtgccaaagatggcactccttagatctat

SEQ ID NO: 442475 - DNA, 69 bp, Triticum aestivum
tgttgatctgtcatcgaactgaattatctcgacccaaaaaaaagaaagaaatcacctacgcaggcctcc

SEQ ID NO: 442476 - DNA, 423 bp, Triticum aestivum
ttaccgcgttgggcacctggacccaaagcacaatcttcctgagaaacttaccactgccgaatgggcaaagcttggtcctaccattgcaaaggttaaagctctactaagaaacgggttaactggcattgatttggtcaggtgctgggtttcttggtggatcatacccttgagtcgtcgcaccgtcttaatgtgcacttacactggtggtgtaaaggatccactgcaccacagctctgcaccattaactaacgaggaaattaacaaaatggttaagtcccttttaaatgaagatccagaagattgcattaaagtgggcctggaaaccttctgcaaacttaacccgccaccggatgtgattccccgaatttaattacctttaactcattactcaaatacttgttaacccaacctttgatgaccttt

SEQ ID NO: 442477 - DNA, 61 bp, Triticum aestivum
tagcattcagtcggcaagcttgaagaggagaatgcgaccttgaggaccgccattgaagaag

SEQ ID NO: 442478 - DNA, 400 bp, Triticum aestivum
gaatcccactgtgttggctcgtcatactgcgaaacaagtgcattatgatatttcacattatgaccatctgaatgcgaatgatatattatccggctatctcagccatgtgcactcaagccgtgacttggagattgaaatggtcaagaagttgcagctgaagtatgaggtacgttcttccaacttatattctgccagtccccaagtcttcagattatgagaaaaccggaatgatctgtagactttatgatataggcttagactttacctttagatttttctggagttcaataaaatagaacaaagcttcacctgtagtccccaagggccggttcatttgaccgtaaatgagccggttctttgaattttcataaccgtctcgtaccgaactcaacaaatattg

SEQ ID NO: 442479 - DNA, 406 bp, Triticum aestivum
gaagaagaaatcagcgagacgtcaagtcaaccaagcccgccccaagcaatacgccgaagaattacaagccccggacaaagaattggttcaacttaaaccttaaggcccggttaaaggttggttccaagtcaatcctgaaggcaaactgccggttggtttcaaaaaccaaaggaacaaatgcaatgaaccaaagaacaaggaaattcttgcacctgttgcttttgaaacagatattcattggattgtccctgaaggttaacaaggcaacaatcaacatgctccgcagggtcaagccatatgttgcatatgggtacccgaacctgaatagtgtgagggagttgatctacaaaagaggttatggcaagctcaacaagcaaaggattcctttgaccaacaacaaagtcat

SEQ ID NO: 442480 - DNA, 421 bp, Triticum aestivum
cagtaaaactctgggacacggagaagtggcaacctattgccagccttcctgttccgcgtccagagggagctcaccccgataaaacaggcagcggcaagtttgttctttcagtggcctggagtccagatggcaagctcttagcatgtggatccatggatggcacgattgcggtgtatgatgcggtccgcatgaagttcctccaccacctggaggggcaccacatgccagtgaggtccatggtgttctcgccggtggacccccacgtgctcttgaccggatgtgacgactcccacatccacatctacgatgccaaggagaagggcctgatcggggccatgtcgggtcatgcgagctgggtgctgagcatcgacatgagcccggatggcatggcggtggcgacaggctccagcgaccgcaccgt

SEQ ID NO: 442481 - DNA, 90 bp, Triticum aestivum
tgggatcaagagaccgcgtgggaggccgagaaaggagagaccgccagaagaaatgtctacagaaactggagatgcaatgcctgctcctga

SEQ ID NO: 442482 - DNA, 243 bp, Triticum aestivum
  unsure (1)..(243): unsure at all n locations
ggnnnnggnaacnttacgccgccagtacngctccaagaattccnanggtcgacgggaaccacctggttgtgtatgcgtttgtcagggcctgatgtgtgcgcatgcacgtgtaggttgagcacttgagcatgaaagtgtgtgttggtcgtgtggtgtgtgcatgcatgcgtgcgtgtgtgcgtggctgcgtgtgtacgtgtgagtgttgcgtgcgtgcgtgtgtggctgcatgtgttcgcaccc

SEQ ID NO: 442483 - DNA, 65 bp, Triticum aestivum
atgaactaccgcagagtgtgtatgctttttttttttttgcggctcgataacccttctctccttac

SEQ ID NO: 442484 - DNA, 283 bp, Triticum aestivum
aggtccagaccagaagccatggccgctggggaaaggcccgttggggcgatggagagagggcgttcgcgctgttgggagcgatgcttagtgttcgggctggggctcctctcgtcccgaactaattcgttcgatcgatgcccagattcctccggaacgaatcgttcggtgtggggaggtcccagaccgaacgttcggccgttatcggcgtcctatatatttttgaaaggaaaccgagcaatatctcatcaaataaagtcaaatgaacctttcaatatcggagaag

SEQ ID NO: 442485 - DNA, 219 bp, Triticum aestivum
  unsure (1)..(219): unsure at all n locations
ggagcgaatctttcagttgtagtattatagggtacttgacccagaggccgatcggcgggcttgatcgaccgtangatatagtagatgggtagaattttttgggtcgtttgttcttgttgtgtttattcgtatagaagaagatatgattgaattggtgccgttggttggttgtttgttttgtgtacagctgctggttaactgaacttagcctgttgtttt

SEQ ID NO: 442486 - DNA, 423 bp, Triticum aestivum
aaaatatatgtccatgcattggaagatttacaggctcaagcagaagttgctctatgcttctgctgtgtcaagcattagctgtaagcaacttgtccttttccccacgtgttccggagttggaactcgatgcaccattcagcttgcactgttaacaccatttttgaagatggatgtaactgacaaacacccctccagtagttgcagccttgctggaaggatggattcaggtgtgcatcctgacagtcactatcacttttgaagattgatgatgtacctgcaaacggcttcgttaattttaggaaggatggagtcgtgcatggactggatcctaaccgactgacatgaaaacttgaggctattacacggattcagcgttgaaacacggctttgaagtccgacgtgtgccttatgattttttgtggg

SEQ ID NO: 442487 - DNA, 88 bp, Triticum aestivum
  unsure (1)..(88): unsure at all n locations
ggggnnnnnnggnnngnnntnttgcagccttncgcgccaataccggtcaagcattcccgggncgacnggagagttggcactgcatggt

SEQ ID NO: 442488 - DNA, 335 bp, Triticum aestivum
attcccgggccaaagatgttgccgatcaagacgagtacgatgaatttgatgagttgccagccaagggatcgcgcacaagtgcaacagagaagcataaaatcatcaaaaaacccaagttcattccgggtcaacttaatgatcccagttcccccatgtacatgggaatgaagccgtaagactagtctttatgcctaccccgcaacttaattcgtttaatttagaactgtcgcgtgtactgaatttgtgagttatgcctggttttctgttgatgtaagaactgttaatatgttgaccttgatatgctgtcagctcaagcaatgaatatgaactatttt

SEQ ID NO: 442489 - DNA, 376 bp, Triticum aestivum
  unsure (1)..(376): unsure at all n locations
ggcggtttgttattcagaacatagtgctgtcaaatgtatcggtatgacaattgagacgagacctgattattgcctgnggcctcatttgcggcagatgctatcttatggatgtacccgcttagaaattggtgttcagagtacatatgaggatgttgcacgtgacacaaacagaggccacactgtagctgctgttgctgattgtttttcattagcaaaagatgctggttttaaggtggttgcgcacatgatgccagatttacctaatgttggagttgagagagatatggaaagtttcagagaattttttgaaaatccaacattccgagcagatggtctaaagatctatccaactcttgtgattcgtggaactggtcct

SEQ ID NO: 442490 - DNA, 404 bp, Triticum aestivum
tcccggaccaaccatggacgcagacaagcaggttgtaaggaagacatggaaaaagggttagatgaaaggcgtcccgccgggggtccaaaatttcaacgggaaaaatgaatttcctaaagtcctacaggcacctggttgggctaagaggtgtgtttccctaaatcaatcaaattagtatgcattgctgaatatttgttgttgagcgattaggagtgatgctgtcatacgtgtattgacgtccccttggggttcagaacattcagacaggtagttgatgctgttcttaagcagtgtacggttatgaatggatgatgatctatccagcttggagcatgttgttactaatttgaaggttgctgtacaattggttatgagttatgaattaaggggagtgaattgtagtt

SEQ ID NO: 442491 - DNA, 480 bp, Triticum aestivum
ggccatgccccgatagcagccacagggctttggaaggcgcgaatcccgcctaagattaaggtcttcctatggcaactatgccaagatcgccttcctacctctatcaatatagccaagcgcaatggccctgcttccggtccttgcgctttgtgtgatgatgcggaagatgctgaccacgtgttcttccggtgtcctttggtgcgctttgcttggagcgcggtccgtgaggccgctggggtggattaggatccacgctcacgctctgagcttgtgtcatacctatcgtcgatccagggccctctgcgccgggtcatgtggacgtctgcttcggccatgttatgggccttatggcatattcgtaacaagtttactattgagggagtgtttccccctcactccgctgatgtaatcttcaaatgcatcttattcttgcagcagtgggcaacgctgggaaggcaacaggagtctgatcttcatcac

SEQ ID NO: 442492 - DNA, 430 bp, Triticum aestivum
  unsure (1)..(430): unsure at all n locations
ggtccagnaatccgggtcgaccggggaagcaacaacactagcagcaggggcaacattctcaagtggctttttaatgccaacatcagaatcttcttgccgactggtgggaatagcatcatgggatccttgagctacagaaggatctacactgtcaacggcaaccaatacagaagcatcaacactaccacggccatcaacaacacaactgccctgattcagatcaacatgaagttccacgctatgttctccaacctgtggaaagtttaaaatacacagagtcaacctgtggaaagtttaaaatacacagagtaacacaaaaatgagcgtggggataactaacacaacaacacacaacacacttatgtcaaaagactgctgacaacatacacataacaactacagtccccatatgcaaaacaacaccaacaca

SEQ ID NO: 442493 - DNA, 425 bp, Triticum aestivum
  unsure (1)..(425): unsure at all n locations
cggcggcttcatccacgctccggtcccatgagtcgagtcgaaagtagtgatgctatgtgtagttctgaaacattgattagctcatgttgtaattatactttaatgaacttgtatgtctctttggtttggacagtcgttcaatttagatgtaatcgatgctatttattagtaggaccatgaatcgtgctattaatttcttgcttttctcttccgatccttttgttgcatacttatatattgcttatgtattgtctgttgttcggctagtgcatagagatgccgtcgtatgtcgtgtacaagggtaaggttcccggagtctacgacgactgggaggagtgtcggagacaggttcaccgtttcagcggtaacagttacaaagggtacaccactanggcggaggcagaatctagatacacgcgctatct

SEQ ID NO: 442494 - DNA, 420 bp, Triticum aestivum
ggcgcaaggaggcgccgagttagtcatgggcgcagtggtgttgaagtagtggtgcatcgagaagaaggcgttgtttatgaaggcatgtgtcagtgtttccagcatcgagcatgcatagacggatgatgacaaagttgacgaagcgccgcactagccttgccaggcacggggatacgtcatggacgaagggaaacatcggtattgctagcatcaagcatgtgtagatgtgggacttgcacgagctgtacgccttgttgaggagtcggagggccagtagagaagaagactcaataatggttgcggtgccaatcagcatggggccgatgtcgccattaatagtcggactagacgaagtggtcagggtagatgatggcgacgctggtgacaggctggtgctcgatgaagatgaaggggggttga

SEQ ID NO: 442495 - DNA, 433 bp, Triticum aestivum
ggtcgggtgggtattataaggttcaggctggcgaagcccgcccttgacgtgtcaaaaagaaaatttctcattattactgatgaagattaaaaagaagggaacatagtgtttcttgccgatgagttgcgtcctgcttcagccacccaatcgttgctgtcaacggtttagtcaaccctggagacttttctactttgcaaagagtatatgcgaaactttgcttttccagaacactttaggactagtttaacagaggccacctgatttgtctatacactaatgattcaaaggtatctatcctgtaagttgcatcatgctattttccttttatttatttttgataaagggtggcttttattgcctcaaaatggagtatcaagaggatacataacacaatgagcacacacccggtctctgtataaataggatgcacaca

SEQ ID NO: 442496 - DNA, 462 bp, Triticum aestivum
ggtataaggacaatgacagtggataataattgtcttatatatttaggaacataattgaaaaaagccacatgatgtaacgcccgaattacgcaagggcaaaagaagcgggaagacaatgatatggctcgctggtctctagtttcttgatgcgttgttgcaggccgcgggagctagtctctggggtgagcggcgatgagctctttcctgtcctcaatatgctacttgagagcgtccacggattcctccaccagccttttgcgcttcatgtgcagcacgacattctcgtccaaaagtttctcgacgatgacgttggtcctcttcaacaaggtagtggtctcctcctcctactccgcacttccgacgatcttcgccctcagcaggtcgcgctcggactggagcttctcattgctctcccttagttgccagatggcgccaatagcctgttcaaacgaggctttcatg

SEQ ID NO: 442497 - DNA, 398 bp, Triticum aestivum
gtggtcgaacatgtttagcccactgggcggcttggacgcgcatgcacgaaggtacgcatcacgcacccgccacacgtgcatggcatgatgggccatcaagtggatgaggtgatcctgcacctcgtcacgatcgacgcactcgtgctctaaccagctcgcctgaccgcccatgtctctcacgcttcgacagaaacactatcgacacctcgaacatcattgtggaggacactataccgcttatgaagctccgtggactcacgctcatacacgccgagcattgtactccgctcatcctttagctcacggatctccacatcgttggcctcgagcttcatatccatgcgcagggattcctgtgtcaggcgcctcaactcagggaccgtggtctaatgggccaa

SEQ ID NO: 442498 - DNA, 393 bp, Triticum aestivum
agggtgaacatttatttacagcaaaataaaaagttttattttattttcttattagttttgttttaggtataacaggagttctataatagatattggtttgattctttttgcacctagtttgtatgttgttttcctttatgttagttagtaaaaccattgttttggatctgtaaagaaaagtgttagtaggttaaaactacttctttgttgttgcttgatgtgatggaaaccttgattttgttttcctcgagttttctttgattttggtttgagtgcttgtgtgttttccttcagtttgctgatatgtcattagtgaaatacttatttgtgctattgtttgacttgatagaatttccggagtgcgaagcttgctatctcgagtcactagcgttt

SEQ ID NO: 442499 - DNA, 478 bp, Triticum aestivum
gatccatgcgcgccgaggacgtgggatgcatgggagggagttacttgccatcccggtaacaaagggcttgtgatcactcagctggatcttgcaagtcaaggactgaaaggcttcattgctgatgaaataagttatctgacagacttggtaagcttgaacttgagctctaattccttgaccggaagcttgccaccaggtttaggccaaccttcacttgcgacactggatctgtcctcgaaccagtttactgggagtattcctggcaccataggctcgtctaaattacagactgttctactaaacggcaatcaacttgatgggcaagttccagaaagactttattcagttggcgtgcatggtggcgtgatagatctgtcaggtaataaaggcctatgtggggtgcctaccctacctgcgtgtgcattattctgggagaaaggaggcttgaataaaaccggcaaaattgcacttggagcct

SEQ ID NO: 442500 - DNA, 462 bp, Triticum aestivum
cggtcaagagaagccgaagtccatggcagccctcacggcactcatgacccccttttgcatgggcgaagacaacttgctagcctgtagcagtaatactacaagcgatcctggcacttctgaagctaagaataacaacggcaggccctgacgcaacaaacacaagcgccgcatcaataatgacaataccgaagacatggcggtcaacgccagatttagcggcactaggaccggtcagcggaagaagccattcaaaagaaatagagagggctcatccagcctggaccgaatactcgatcgaccctgccagattcatggcccctccgctaacctgtctatcatactaaccgaagttgttgggtctttaaacaggccgataagttaaatactgagcataacgagaaagggtcgccgagcgaggacgacgacgaggagcctcgtcaaccacacactgggggacagaag

SEQ ID NO: 442501 - DNA, 462 bp, Triticum aestivum
acatcaaatcaccaaacattttactggatcagtccatgcatgctagggttgccgactttggattgtcaagagaagaaatgcttactagaaacggggccaacatacgtggaacttacggatatcttgatccggagtacgtgtcctcacgatcattcacaaagaagagtgatgtgtacagctacggtgttctgctatttgaacttattgctggcagaaaccctcaacaaggtctaatggaatatgttgagcttgctgcaatcaacgctgatggcaagactgggtgggaggaaattgccgactctcggctagaaggcgcatttgatgtggaggagctcaatgacatggctgccgcggcttacaaatgtgtaagccgtgtctcccgaaagcgaccgtcgatgcgagatgttgtccaggcactgatccgggtggtgaaacacagccacagcagcaggaatcatcatg

SEQ ID NO: 442502 - DNA, 474 bp, Triticum aestivum
tggcgatggacacgtgcaggaggacgacgttggcgtcgcggtggtgtcgatggcagagaggcctggcaacgtgcgcatgtggtgcccattgaaagtgcgccagaccggtgtgtaacccagttcaagtattgtggcttggatggggcatccggcattagttgtgaggtgttggtgcaatgtctgtttggtattaggcttggacattcgtcaccccttcatcacgggtctaggagtagcaacatgtattgtcaagatggtggcttcaggcttactgatgtattaccttataacgactttatgaataattaataaaatggctgcatgcatcgcccagatgcagatgcagaggcaggggccagggggtatatcctccttttcaaaaataaaataaaattaaaacctttggtcaactcatttgcttagttatgtttgtctcatgggagggaaccgcgcgtgcaactggcggttcactcg

SEQ ID NO: 442503 - DNA, 410 bp, Triticum aestivum
aaggccgcgcatggagagagccgagacaagatggccaagatggccatagaattaaaagccgccgctgatcattgccgggttcttgaaaaggaaaaccaagtgaaggcatcagaccttgagaaggctgctacgacgagaaaggacctccgctctgctatgagggcaaaggaggagctgcgggaagccggggatattgtagctgggaaatcctttatgttgtggaggatgttcggagatccacggtatgcccctctagatcgactatggagttcgtaggatgtatatatggatttggcggtgagcgctgccgatgcggccaagtatttccagggtcagacggaccgtgaagtagaccatctgttttggagacaatatcattcgcccgagcgtccgctttcattgactgacca

SEQ ID NO: 442504 - DNA, 425 bp, Triticum aestivum
gggtcgagacgggccgtgagctcatctcctttggccccaagtccgactaccaccacaacctgacatgctcctccataggccttggattactgttagctaccagatgaagttcggagaaaggagctaagacatgactcaccaggtctgctctatattgtaccatacagttcatattttggtagtcttgcttcttcggaaatttctgaaattcaaagttaccctcgaagtggtagagaatgaacagaactagagcatgggccattgtcagcttctgtgttggtagggcgattcttaggcgcaccaagatactggtcctggacgaagccactgcttcggtgacagtgcaaccaataacctgatccagaacacaccacaacatcatttctcagggtcaactgtcatcacgaccgtgcatcgaatcacct

SEQ ID NO: 442505 - DNA, 444 bp, Triticum aestivum
ggtccagatatccgggtcgaccggtagtccagaattccagttgccggcatttttcctcttcatgcaaaccttgtaaaataagtgagaaaaggcataagtattgtaccataatgtgtaataacaacccataatgcaataaatatcaatataaaagcatgatacaaaatggacatatcagttctcaagatgagagggcatcttattataatttccataagaattcttgtaggagttaccataattattagaggaattacaaggaaatggcccagggttgaaattacctctatatgcgttattaccaaaattgttcgtaccaacaaaattcacaaccatagattcattattattctcaatcaaacgagaggcaaatggcaaataatgtaatgcaacatatgagagtttatgatgggtacttggtaggattgatgtagatctccccgg

SEQ ID NO: 442506 - DNA, 484 bp, Triticum aestivum
ccgcaacaagattgcactcaaaaacagatctgacgagaaaacagcgaacgaaaaagagggcgaataaaacagcaaatttttgtgaagtggggagaggaaaatgagtggcaaatggaaaataatgtgaattgcaaggagatgagatttgtgattaggaacctggtagatgttgatgatgtctccccggcaacggcaccagaaattccttttgatgtttgcttgaactacgtcggtatttccccaaagaggaagggatgatgcatcacaacaacggtaggtatttccctcagtgatgagaccaaggttatcgaaccagtagaagaaccacacaacaccacataaacagctcctgcatacaaagaacaaatacttgcaacccgacgtaagagaggggttgtcaatccctcacgggtaaaaagatagataaaattgtagtagattggataaatagatctcgcgggaacgtgagataaaataaataaca

SEQ ID NO: 442507 - DNA, 479 bp, Triticum aestivum
gaggaggtggcggctgcgaggagatgaggaaggaggagtgcgatgggaggagttagggtttggttggtcgggctgcgggtgggggtgggggttaccctttttcttttcttttttcttttttctgaagatagatggatggatggacgtgggatggagagatggatggatggatggggccatgtcatcgatccgtgtgacagctaattccaccaatgagaatagagcacgtgtaaatatgtttttcctttagtttttttctaatttttcatatgaaaaattcaaaaaatgatctcatattatacacaggggtgcattttgtaatggcaaacagtgttgcctaaggaagtttttattttctatccacgaaaaattcatttcccatttttcgagtgcccaaagtgagtttttttgtgaaggggactacatacatttgttgcaaatttgtaccaaatctattttccaatatactaggacatatt

SEQ ID NO: 442508 - DNA, 56 bp, Triticum aestivum
ggactctatttcacacacattgcatatgttacattttttgattgaccccccccccc

SEQ ID NO: 442509 - DNA, 509 bp, Triticum aestivum
gcctgggcgtacggtccggtagtccgggtcgacggggggttaagacgcatttaaagttcgggtgaacaaagatatgatattagtacttcggtacatacaatcattatacataaaattcttttacccaagtcacttgggggctcctaaatttatatgagccattttataataagtgttcttcttcttagtcgttgcaaagtttttattactattattatttatcactccttttttcgacatgagcgtgtggtcactagccggggagcctaatttctctctcaaagccgctagagtttagtttggtaaactggcctaatgagaagtactccggcctcgggataggaggttgaagccgtaggctgacccgcttgaagtcttgagataggatgtgtcatgttaaagcacgatagaagcacttctttttctaaggccaattttcggattggcaccgaacacttgatcctgttcggacgtcaagtttttactgacgttttttggttttccaagct

SEQ ID NO: 442510 - DNA, 217 bp, Triticum aestivum
gggtcgaccgggtcactttcataaactagtgggaattttcattatagaacttggcgtgcgtagtgttctatcggtagtcgatagaacttgagggaatatttattatacctttagctcctcattgggttcaacactcttacttatcaaaagaggctacaactatcccctatacttgtgggttatcattcccccataagtcgggatgagactccggacg

SEQ ID NO: 442511 - DNA, 421 bp, Triticum aestivum
gggtcgagcggtagcattccttgatatgctaattatgctaaattatattgttgctaaatttataccacctagcttcacataccagcaaaagaaaaaaaattctatgacttgcgacattacttttgggatgacccacatctttataaagaaggagtagatggtttcattagatgttgtgtacctgagcatgaacaggaacagatcctacgcaagtgtcactctgaagcttatggaggacaccatgctggaaatagaactgcacataaggtattgcaatccggtttttattggcctaccctcttcaaagatgcccataagtttgtgttgtcttgcgatgaatgtcaaagaattggtaatattagtagacgtcaagaaatgcctatgaactattcgcttgttattgagccatttgatgtttggg

SEQ ID NO: 442512 - DNA, 428 bp, Triticum aestivum
ggggtaaagccaatgattagaggcatcggggacgcaaccattatgtgcatgtgcagatatctgagtggaacttcattttttttccagttcaacttttgaatgtgtttcagttcgtctacttcccggtcgtcctgagctggagaattgctgctactgtttatgtgtttgcaaatttttgaaaacaagcttcagtacaagaaaaatgggtggtcagtccagctcctgcaaccaacacaggtcgttgccccttttgccacaacggtagcagcacaaacattagtgtggtcatcctcaaccagtttctcacgcggcctccccgcaagccctgctcatgatcaggataacctcgataggttacacatgttgctcacgaagctgataggttccacatgttgcccaggagtatacccgtatggagcggagatgac

SEQ ID NO: 442513 - DNA, 348 bp, Triticum aestivum
aggattcaaagctgagccacgaaatcggtttggagttgagcaagatgagtgcttccgccggattaagaccaattggagcagtggtctttatgcaacgtggactgctgaagatttgcttgaggactacagacaatacaaccaacacagcagagatcgccaaggcatatggcggaggtggaaaggcgagctcaagttctttcgcactaaggatggacgagttcaacgcctggattagggagaacacatgaaccggcctggaatgctggatggcaatctggtgtatcatatcgtaacatgcgtgcatgcctagttgcgaggaagatgtgaaaaatgagcagctgatgttgg

SEQ ID NO: 442514 - DNA, 435 bp, Triticum aestivum
accgtcatcgccgtcatcaaagagtctgtgaagacattcacatatgagacattgaacaacattgcgagattgataaatggaatatcagcactcttgttgacactgttacctggaaaagccaacattttggaaggggtcagtggctgggaacttaggccagcatttcgcgggccacgtcttcctcgttggatggaaagtggggtctcttcatttaacgagttcattcacgaactttctgccgattcggagtctgaatcaattgctggctctgtccctggggatgatgacaatgaagagtttgtctgccctccttctccgttgtcccaaagttcacgattgtcacacacaagcagctttggtagacatgaccgtcgattgagaaggcctatcaaatatgcagtttcctggattaattgggctgtgaaaaatttccct

SEQ ID NO: 442515 - DNA, 444 bp, Triticum aestivum
gcttgatagagggtcagtgctcgaagaatattatgttcgagtaaagtgtatcataattgtaacaacaatattatgatatgtttaaggctatgtttttatacttctccccgaaaagtttcggtcgtcggcttcagccccctcgcgtataacacgggggtgtttggaaaagcacttgatcacacttgacccaacgtcttggtccgttaaggaggtgttagtgcggcaaactaggcaatcgaactatagagctttaacactttcacttagccatatgagtttgacagtggggctactatatagcccctggtatgtccgtggttattcaaatacggtgcgtatacatacgtgaccagaaggacggtccttcgcttaacacgaagggaatcgcgaagattctgatgagtcatcgagtggttgactagctctcaccgcatcatgacagtc

SEQ ID NO: 442516 - DNA, 407 bp, Triticum aestivum
gaagaatttggaggccatggcgcgctgcttcaggaggggatgtttgcatctttcacccttttcctgctttcatggattcttgtgtacagtttggctcacttttgatgagaagctcctttgttgaacataccgtgatatgggatcggattggcggaaaaaaattcaccagaactctgtagattattgaagagccctagaacagcattgtatggaatcggttcaggcagtcatgttgtctctgaatcccagtgtaattttgatagaacatcttagcataccagttgttggcagaacatgttcagtatgcttgacatgtaactattggatatcattctcttatgtcgattcaataaaatgttttaacatgaaaaaaaaaaaaaaaaaaaaaaaaaaaaagcggccgctct

SEQ ID NO: 442517 - DNA, 397 bp, Triticum aestivum
gtttgtaatagatgcaacgatggtgctgagcatacttattgtatgcgggtaatgatggaaaaggttccggatggtgattggttttgtgaagagtgccaaactgaagtagaatttgaaaaggagaagttagaaaaacctcaggtgaagcttgtcacttcaaaggaagaatctgttcaagggaaaattagtaaacctttcaatgatgcaaacagcagaagtccttgtgagaatgaagtggaggatgaaactgttggcagaaaagaacggaatgaagcaaatcaaggcattgatatggttgaagatgcaaagattccgcctgtggctaaacaaaatattcctgaacccggtggtttatcaatggagtcttactccagaaaaggaatacctctgctatgcg

SEQ ID NO: 442518 - DNA, 337 bp, Triticum aestivum
tcgacggggctggcgtcggtggcttgctggccgtccttacttcttgcctgaccaacatggatggcttcattcacagccacctcaacctgcttgcgatagccagccatgcatgcacgcacgcgcatgtaggtgcgcacctgcctggaatgcagctcggtcagcaggctcgtcctcctgcatgcaccatcgagacagcttacctacgtccctctcgttcgtttgatccaggtcggcactgagcgcactcacctattcacgcagcatgcggtcagtcagcaggcagtaatcacccgccgggtaggtcaagctgatagtttatttccaaccaagaatttgg

SEQ ID NO: 442519 - DNA, 396 bp, Triticum aestivum
ggggcgccgctgcccaggggatcgacggcatcatgggcaaactcagtatggaaagcggcagcgatgcctcttccattaaccgcgtgctctccagctccggcatagacccctacatcagaaacctcatggtgctcggactcggcttccggcgctcccggtccaacatcaagcaggcgctcaagcggcacgacgatgacagcgaatggtggatgtgccctgccattccattgaaggacattatgccggtgcctcccccatcgatggaaccaccgccaccggtggagaagaagaatatggatacgaacatgaatgcgctgacggatatcgccgctgggccatgcattacatgtgttaatgatgaacttcctgaccctgcttatggcgatgatggaattt

SEQ ID NO: 442520 - DNA, 65 bp, Triticum aestivum
tcccgcggcatcgatcttcccccagtgcacctttgctatgggtaaggtcactcacgctccgtcta

SEQ ID NO: 442521 - DNA, 109 bp, Triticum aestivum
gggtcgacgggaggttcaaaggagagaagcgacggagttagaagttgtaaatatgcattgttgtatcgcgacctgaatgaatgaaataaacgaaataacgctcttgttc

SEQ ID NO: 442522 - DNA, 180 bp, Triticum aestivum
gattcaggacgttactatgtttactttccagacgatcagtagtggagcccagttggggcgatgggggatcttatgcatttggggttgtctttattttggttttgtagtcagaccttgattgtattctggatgatgtaatgctatatttatgtattgtgtgaagtggcgattgtaagccag

SEQ ID NO: 442523 - DNA, 70 bp, Triticum aestivum
cggtcggtatccgggtcgacggggaagatcagaaaagatcttgataaaagatatatgggcgggaaaagct

SEQ ID NO: 442524 - DNA, 432 bp, Triticum aestivum
cgggtcgggcggggaaggggggagagaccacgcccatccagtcccgatgggtcgctcgattggatcgaccggaagtgcgggaagcatcgatgcgcgcgttgggatcgaccagaggatctgggtccagctgatgcgctccagcgcgcgattggatgcgaggtgcgcaaggggatcaacggaggcggacaatgcgggtgaagaaaggtggggacgagggcgaggcggtggcacgagcatggaatcatctgctgtcgattcgagttcgtttgtcggcgattccgtaattaaatcgcagtttctacatgccattactggtaatggttgcaggtttttaagctcgttggaacttgcttacggtgggtttgctctttgctggttctgcttgattgcaagcatcatggactatccaaatgcaaacatgcgcaactttcc

SEQ ID NO: 442525 - DNA, 457 bp, Triticum aestivum
agaagggtctaaggtacctagggtttatggcgtctcgttgtttttgcaagctagcatgtgactccgggatgcctgttttaagattaagatttcgcttgtgttgagagatattattatttactgcttgtagcctacctgggataccatcatattttgctgattatggaacagcttttatcctgcttaaaaaaaaaaaaaaaaaaaaaaaaaaaaaagacagaaagcaaaaagaataaaaaaaaaaaaaaaaaatacaaaaaaaatcaaaacccccaaaacaaaaacaacgaaaaacaaaaaaaaaagggggcgccccaaaggtttcaaactttatttcccctggagggaaatttaaaccccctccaagggggcccccaaatttaattcaagggggctttttttaaaaaatgcggacggggaaaaccctgtgtttacccaatttaacccccttggaaaa

SEQ ID NO: 442526 - DNA, 494 bp, Triticum aestivum
acggtccggtagtccgggtcgacggctaaatcgagcaaaggcgaccagcgatggcgatgacgtttgctttgctccgctgccggctgcgatcgcaatacgtacggtttttcaggcagattggcaatacacattttttttgaggggtaattggcaatacacatatgtaactctcatttcccagccgaacaggcctggcccaattcatcctgcttcttcttttccttttctctaatttcttaccaggctgacatcccgtgtcgcgtgttaggcgctccctatggattttttttctgtacgcgtctttgggctctagatgttttttttggtttattcggctttttggtttttgcccagtccccctaagcttcggaccaaaaaatttcaaaaaaaaaatttgcttgaagaaacatgtttttttcttccgcggtagacatgggtttgctttccatggaggcacaagtttgattccatgagaggcaaagacacctgtgcct

SEQ ID NO: 442527 - DNA, 456 bp, Triticum aestivum
gaaaggaaatcaaacatgttggatgatccatgacaatataactttttagatataagaaaacataactcattacgttgtcttccttgtccaacatcaaccttttagcacgtcatattttaatgagtgctcacaattaaaaaaggtttccaagatagtatatttatatgtgaaaacctctctttctttcttacttcctactaattgcaacaatgaccaaaactatgttagtcaactctcaacaacttttattcatcatactgtttatatgtgaagtcattactctccataagatcaatatgatctttttatttctttttattctctctttaataccctcaagatcatagcaagatagcaaagccctcaactcaaaactactctttattatataactcacggactcgattacatagatagagataaaacaaaactcaaagctagatcatactaaaactt

SEQ ID NO: 442528 - DNA, 365 bp, Triticum aestivum
gggtcgggcggagacggatgccaagaaacagctgtgagactgagcaagccaagcgccgcgctgagggggacaggaagagggaaagcgaacggttcaaaatttccctgtttggtcacgccatattcagatattctccccccttttcactggagaacgcaatgcgatgcaagagaaaaatagcctttcctcttccgttattcgatgtttgcagtagcaagtagtggcactcctagatgtattctcttgagttggttttcttttctctatcctctactatggtaagaagaaagagatgtttgaagactcagaaataagtgaattaagtaaaataggatttgtaacaatggtgcatgtgaagcttaagg

SEQ ID NO: 442529 - DNA, 433 bp, Triticum aestivum
ggaatgggtaaagaagctcttaatgttcgagcagctgcagaactatttgataaggcaaatgatatacttggctatgacttgctgaatctttgcatcgatggaccaaaagaaaagctgaactcaacagtgatcagtcagccagctatatatgttaccagccttgcagctgtagaagtgttacgcgcacgtgaagaaggccaatctgtaattaactccgtagatgtcacatgtggtctcagcttgggagaatataccgcgcttgcatttgccggtgcctttagctttgaggatggtctcaagcttgtcaagcttagaggagaagccatgcaggatgcctcagatgctgtcaatagtgcgatggttagtgtgattggtctagattcagaaaaggtgcaacaattatgcgacgctgcaaatgaggatgtggatgaaa

SEQ ID NO: 442530 - DNA, 64 bp, Triticum aestivum
cctgcctgtctacttagtttaacagctgtagctttgttgccagataaaatggtgaactttgcgt

SEQ ID NO: 442531 - DNA, 444 bp, Triticum aestivum
tggttcttttatcaactactacatgtatcatggtggaacaaattttgggcgcaccgctgggggtcccttcattacaacaagctatgattatgacgctccacttgatgaatatggacttgcaagagaaccaaagtatggacatcttaaagaacttcatagagctattaagttatgtgagccggcattggtttctgttgatccaactgtgacttcccttggaagtatgcaagaggcccatgtctaccgatctccatctggttgtgcagcttttctcgcaaactataattctaactctcatgcgaaagttgtcttcgacaatgagcattacagtctaccaccttggtcaatcagcatccttcctgattgcaaaacagttgtttataatactgcaacagttggtgttcagacatctcagatgcaaatgtggtccgatggggcctcttc

SEQ ID NO: 442532 - DNA, 417 bp, Triticum aestivum
gagctgaaactgctggtcttttacttcgagaattggaactgcaacctccttctgaaaaatggcatagacgcaacatgtttggaggaccctggtcagaaccagatgatctcggtcgcattggataatatgccacatctgaaaataggtggtcatatcaaccctcacttgtctgacatggaagaggagggtaaaactaactttgggattcaaagtctttggccaagaaagcgccggttgtctgaaagagatgcagcatttggtctgaaaacatctgtaggtcatggagcttatcttggcgtgatggggtctcgacgagatgtcatcacagccgtgtggaaaacaagacttgatggtgaatggtataagtgcatacgatgtctgcggcaaacttgtgcatttgcacagcctggtgcccca

SEQ ID NO: 442533 - DNA, 91 bp, Triticum aestivum
agagtgtgtccacgtaccctcgtagaccaaaagtggaagcgtttagtaacacagttgatgtagtcgaatgtcttcacgatccaaccgatac

SEQ ID NO: 442534 - DNA, 413 bp, Triticum aestivum
ccaccacggaaggccgggtggccgactggatctatgccatctccatgggcctcgccacgggcatctttgtctacgtctccatcaaccacctcctcgccaaggggtacatgctacagaggcccgtcgccgccgacacgcccgtcggccggtggctctccgtcgtgcttggcgtcggtgtcatcgcagtcgtcatgatatggaacgcctgatcctgaattcgtgattcatgagaactagaagcatttagctatggatgtaagcctattgtgctgctataagtttctgctagttggacaccagatttgcagtaccagctgatcaaatgaagcagctaatgacagataaacataagcactaaatccctggttgtttcaatacgcatttagtgtgtgtgtatatatatatatatcaac

SEQ ID NO: 442535 - DNA, 253 bp, Triticum aestivum
ttggatagcatgcaaccactgacatcgcataagtttggcgaacgctttaaaaatatatttaaatacgctgtagtgcaaaactgccaactgaaccagatttgaaaatcaggtgtaaaactcaaaatatgcattgaatgaaatatgttttgcataacagtgatttagaaacctcacatgacatctccagattttggttgaaatttgtagataaatttatcaaatgctggtacttcataaagagctccaaaactaa

SEQ ID NO: 442536 - DNA, 284 bp, Triticum aestivum
agactcatctatgacgccacatgcactacacgataccggggattgtccgctcaagagggtagaatcgttgatcaacgaccatggaccattgtcactctccattgtggcagcatcagataagatcaactacattcgtttaggggaaaatgcaatgcaagacttgctgggtaagacggtttgatcaccttgcaggaaatcatcaatattttggcggatttcaccgcgttggggggggaacttgtcccggatcctgcgaggttcccatcgaaaatgctcatcgagaa

SEQ ID NO: 442537 - DNA, 282 bp, Triticum aestivum
ggtcaagaattatcgggccgacgcgcaatggaagatgtaggtgtgatatgtcaagtagtggacagataagccaaccactggatgtggttctgagggatttttgcagtggggtttgtacggtgctatgctgctgaactgctctgtgtttgggatttgaaataaaacgaagggagatgtgccccgctcttaaaaaatcaaaagaaaacaaaaagcaaaaaatccaaaaaaaaaaaggtttacaaaacgatccaaacatcaagtaacactcatatgagatttcat

SEQ ID NO: 442538 - DNA, 397 bp, Triticum aestivum
gatactattttcttttgtttcaggtattgccggaacaagtttattcaattcagttagtttaatggcctataatgtcttctacacaagcattcctgttttaactactgttctggacaaggatttatctgaaaagacagtgacacaaaacccagaaattttactatactgccaggctggaaggcttttgaatccaagtacttttgctggttggtttggtcgatcgttatatcatgcaattgttgttttcttaatcaccattcatgcttatgccaatgaaaaaagtgagatggaggagttgtcaatggttgctctctcatgaagtatttggttgcaggcttttgtcgtgacactggagatgagttctttcacttttctgcagtttctggcaatatgggga

SEQ ID NO: 442539 - DNA, 428 bp, Triticum aestivum
gacggggaaagaaaagcagaagaatcctgcagattctgctggtattgatggtgcaatagaaggtcaaagtccggcggaaaattgtaccgacagggtatctcgtgctaaacgagctgcagaacaagccaaacagaaacaaatagctgccaccaaacaagcagagacaaccctagttcttgcaacaccttccacagtaccaccagctgcacgatttactcgttggtcaactcagctagcagcacattcccaagctcccttgccacctgacactacttctgaagcactcttgacacaagatgagttggcaagatcagatgaactttgtgagcttcaagtgcaagaaggttgttgctggagtcaatttacagttgcatgcttctttatatgtagtctcacagtttgatgtacactaacacttcctatgtttc

SEQ ID NO: 442540 - DNA, 395 bp, Triticum aestivum
acgaccagggactgtgttcatgtggatttcagttgcttgtttgacaagggtttgcagcttgagaagcctgaggtggtgccattcaggcttacacaaaacatgatcgatgggttgggcatcgctgggtacgaaggcgtctttctgaaggtctgcgagatcactctgtcggtcctcaggggccacaaggaggcgctcatgacggtcctcgagaccttcatccacgacccactagtggagtggaccaaagcccacaagtccagcggaggggaggtccgaaatccgcaagcgcagagagccatcgccaacatcacggcgaggctccagggcgtcgtggtgggcgtcaacgccgctccctccctgccgctctccgttgaaaggcatgcgcggcggctgat

SEQ ID NO: 442541 - DNA, 138 bp, Triticum aestivum
acggggaagaataactggctgctgctttcttgcagggccaccgttcatcgttctctcatacttgtcactcttgattcattgcataacccggctcaccgccggctgcatacatatagatttatatctacttctaagtat

SEQ ID NO: 442542 - DNA, 420 bp, Triticum aestivum
  unsure (1)..(420): unsure at all n locations
atacaggcggggaaggtaccggtgccgatgccgctactgaaaagaagaagcagaagaagtagaggatacgaaaacctaactaactcggcattggacgactggtgatcacaaagatgacacctggcaagtttgagccatttgagccggaacaacctcgcaagtgctatgggaaccaagtaggatgcatcctacaggaatgcacgagcatcaacgatgatgacttaaggagtcaagaacatttgaggcagttgctcctgacgaagttgtacaagagattcaagttccccgacagggatgataacatagaacaaccatgggatgatccgaagatgaaaaagattaacaatcacgccatgggcatgttcagcaatgatttggcctcctggaaagagagggtanacaagctattgaggccgaaga

SEQ ID NO: 442543 - DNA, 431 bp, Triticum aestivum
gacgggttttgaagtacgcaaaatgatgtaccttctgacagttccgcatataaaatgcgccctgtgtagatagtagcccctgaggctcggtgtgttgtcaaaaatgacagcgcgccgaggatcataatcccaagtataatgtgtcgcccttcctatgtaggtggcgaagggtccggtggctagccagactgataaatttgctgaactaaagcggcaacttgacgtggcggatgccgacatcgcgcttgtcaagaagcgacttgacgagtcacaaggtatgcaatttctccgcagacacctggtaagggagcttgatgcccgtgccttacaacatgtatgcttgatgcagatggtgcagctgccatggagaaccttcgggcggagctcgcccgagccaaggagcagaccagatagagtgatgcggctgcctt

SEQ ID NO: 442544 - DNA, 81 bp, Triticum aestivum
cgatctctagtagggatgctttcgaaaggatttatacttgcgtgtcagtgcgatgtccctcagagatcgtcgagaggttcg

SEQ ID NO: 442545 - DNA, 403 bp, Triticum aestivum
ggtgcacacactggttaaggagtctccaccagagaagcaagccaccacagctgaatccatcaacaactctgtcagaccttcacctcaaatgcatcccggtgtaagtaatggtgaaggctccggtgcgagcacgcagctgaaccgacacgaccaagccgcagtcattggagcgctgctcgagcagatgcagcttgacgagcagatcggtagtctagcaacatagacgaacaaccaaccgagcccggtggctggtgcgagaagaagttaccatttgttagctaaagaagaattgcaagtatttttttgattttctgttcattgaggtggtcagtcaacaagccaaaaggatggatgaatagctgaaggcggtgattcagggattggttttcgttaaatttttggg

SEQ ID NO: 442546 - DNA, 422 bp, Triticum aestivum
tagctccttgagaaagatgccgaaactcatgtatagatcaacactccaatcatcaatgctccaagcatcataccggagattgactagtaggatcacaaaagtgatgcatctgtacatgaatttgactacatttcctgaaaaaatacccagaagaggttgagttaacaatatgtgagtttgaaaatgttgttcatattttactagtactatttgggtagggtatagactagacaagcataagtggaggtgaattagatgtctgaataaaaattgtcgataacatgtagatgaactgcacagacatcaaaaatcttattgctcccatcaatatccggcagattagactatagttattaagctataaatttgtattttctactccagctgccatagaaaacccaagttgaatcaacattgcaatt

SEQ ID NO: 442547 - DNA, 392 bp, Triticum aestivum
  unsure (1)..(392): unsure at all n locations
gaggctgcaaagctcgcccgctacaacaagaagcccaccatcacctccagggagatccagacctccgtacgcctcgtcctccctggggagctcgccaagcacgccgtctccgagggcaccaaggccgtcaccaagtttacctcctcttagatcgcgtcgcctgtatctagtagcaaatgtagttccttgctgttggcttagtgcttgtctgtggactctggttatctgcaagtaatattagtcctactgttggatgaaaattgctgaatcattgcaaatggtttgttggctcgttggccacctgcaagaagtgagttatgtccgctggtctaatggccaantgaagattctccaaaaaaaaaaaaaanaaaaaaaaaaaaaaaagcggccgc

SEQ ID NO: 442548 - DNA, 416 bp, Triticum aestivum
gaggaggagcatgattggtgatgtcgtggagtattgctaccaccgtcatgtttaggtgtcctctctactcttttggtgtcccgatgccaaaggaggagagagtgtacggatttgcggtgtgttgtgagttgagtgtgtttctctttttgcagttgctttcctcgctcgaactcgtttgctttggtttgtgtttgagaccatatggggtgagacatatgagctaagctatccatttctatctatgtcaagtactttatgttaagtaatcgtttgtgagatatatcttgtgtatgctctcattcatatgctcacatagtttctcttgcatgctttcatcttactatctatgcaagtacggtttggtctataaaatatagggggggtggatcctatatgtgtgcattttgcattccaaa

SEQ ID NO: 442549 - DNA, 411 bp, Triticum aestivum
gactggacctctagggcgaatcccctggcaatatagttagtgtccgcattcctgaatgatttataacttctccttgtgccacgtggtgtccttccaatgccgcatacaacctgtagtccggccacggatgatcttcccgcttcatcgagcgggtccttggctccgtcggatatggattcccttccgaccgcctcgacccctcatgacgctaatgacgcctatgtgggatcctaagatgggacccaccgggaggatgaggctccggaggtgccgcaaggcaacctcccagacttcgcaccggactccgcaccggaatccgcagtggttccggagtccggcaagcggccccttcgtaagaagggcaagactgtgacaccggcggccaccgtccaaccggtggcgccggataac

SEQ ID NO: 442550 - DNA, 245 bp, Triticum aestivum
ctgaagaagcaggtcctaaagctgacggaagagagggacgtggccaaaggtgccttggctgacgcacaggccacagtcctcggcaaggttgagctgctctctgaggccaatgactccatcagggatctgaagctgaagctggagggccccagggaacgctttcggaggtcaggccccgggaggagaccctgaccaaagatctggaggccgagaggcagctacgcaggaatgatgccgccaacccc

SEQ ID NO: 442551 - DNA, 268 bp, Triticum aestivum
gaaggagcccaagtcgcccaagaaggccgccaagtcccccaagaaggccgacaagaaggcctagagagaggcgcgcatcgattagcttgccgtgctttgtagaactaatggtttcgatgtagatctgtgccgccaagaaagaacaattcagaaaacctctattcgattggtttagccgctctagtgctctgtagtaacagtgattgctgtgccgatgtagatctgtgctgcgaagaggaaaatgccagaaatctctctgatttgagcg

SEQ ID NO: 442552 - DNA, 392 bp, Triticum aestivum
  unsure (1)..(392): unsure at all n locations
ggagggggtctctggaacgtggccgttgctgctcattgctggtgtcactgatcgatgatggatgttcgctgctagtttagctccatggtagtccctccctctctttcaggttgctgctgctgatggcgatgatagaaatggtagctctagtcccatctagtcgttgtcctggatccgagtggtgaagttgctagtctggtttccttcctgtagggtcctgtgctcggaccaccctctgttccttcgtttttagcatgttttaattcagtctctgtcggatgtacctagtgtcgtgcctgtggttgttttaagaatcctacccagatctcaatatatatggtgttgaaagcaaaaaanannaannaaaaaaaaaaaaaaaaagcggccgctct

SEQ ID NO: 442553 - DNA, 397 bp, Triticum aestivum
gcaacggcgtctttctggttctgctcatggccaggtggatgacaactttgccaagccttccccgcccttttcgcaagatcaaccaggaagaaccgttcggtcaaggacgcactgcacgctgacagatggatcctggacttgaggcgaggtgaccccgatgccattgcactgcaggtggtgcagcttgcgagggaaatcaggcaggcagccctcgccatcatcccaggaaccgaagattctattacctggaagctcagcgcctcgggatgctacacaacaagttcagcgtacaatgcccaattcagcaatagacagattacctccttcaaatccatcatctggaaagtctgggcgccgggcaagatcaagatgttcctttggttgctgcaccttgaca

SEQ ID NO: 442554 - DNA, 414 bp, Triticum aestivum
  unsure (1)..(414): unsure at all n locations
gccggcgacggcgaccggagggacggcgagggcgacgacgagtatgcgctgctcactaggataactgacacatcagcagctgaagcaagggcaggaaaggatatacaaggtataccatgggagaggttacaaatcaccaggcaggattacagaaaagctaggttggaacagtacaagaactatgagaacttccctcagtccggagagctcatggataagttgtgcaagcaagtggagagcagcagcaagtactatgaatttcaatacaacactcggatagtgaaaccctcaattctccattttcagcttcggaatttgttatgggcaacttcaaagcatgatgtttatttcatgtcgaattccacagtanggcactggtcgtcattgtctcacanaatgacagatgttcttgat

SEQ ID NO: 442555 - DNA, 332 bp, Triticum aestivum
taccctccaatggctagtacttggagggagtctgagacccctccattgtcatcttggaaagctgagtagacagtttcatctcttcaacaactacagtgtttacttttggtgagaaggtaaaagcagggtacagttgaacccaggatttcgttttccatttctgcagatgcatgtatatgagctgagctgtggcgtgtgtatgttatgcttggttaccgatttactcctgcttaaaacaatgtcattgctaccaaggcttctgtattgtattgaccaacaaaatacaagtgatgtgtgatattaatatgtcggcagaacgaataatcctgttt

SEQ ID NO: 442556 - DNA, 401 bp, Triticum aestivum
ggtctgacgaaagctggagttgccttggtcggggacctggcggatgcgctaggaccttccatcaaactgctgctcaagaattccaacttccactcggagctccttgggcgctgttcccagtctgatgacgaacagctgagggagactgcatcctgggtccagggtgtgatctcacgtgtgctggtttcatgagggaaagcttctccagcaaagctgccagcgttgttgatggttctctgggcaaactatttctcttgccagatgaaatatttttgagaaatatgctgcatatatgtcctgatatcatgttgcaaaagtggaacaaggttgcatgagatcatttacggtcgtcaagttcgtagtagtggcagcggcttgccattgtctaaagtgggttgggt

SEQ ID NO: 442557 - DNA, 398 bp, Triticum aestivum
cgattgaagagattaatgttttgagtggaaagatggacgagcttatgaaattgtttgctagcaagagtgcttctatttatcctaatgatattcctttgttcactttgattgataataataatgaatctatggatgtgaattttgttggtatgaacaattttggtaataacgcgtatagaggtcattttaatcctaggccgtttcctagtaattcctctaataattatggtaattcctacaacaaatcttatgtaaattataacaagatgcccactgattttcaaaatagtgttaaagaatttatgagttcgcaaaagaatttcaatgctttggttgtagaaaattgcttaagattgatgatttggctaagaacgtggatagaatttctcttgacgttg

SEQ ID NO: 442558 - DNA, 411 bp, Triticum aestivum
tacacgccggagacgacgggagggagctctgaaccttgtcgaaattctgaccgtgaaggaagtggaagtagaggagggagacgacgtggccaatggcgtgaaggcgatatggtgttcgatccgtgacgtagaggaagcaggggaagaagaccgcgacggggcgctggacttggcgatccggctcgtggaggtcgctccaaaggaagaagaaggccaccacgacatggacgacaccgggctcgagctcggcttggctcgaccggccatggcgacggcgacggcagggaggcgcgttagggaggctcccgcccaactaactggggggatcggtcgaggagggtgacggggtgcaggacgacacgtcgaagacgagcttgaggccctccggccgcgagaacgacgacgggcatc

SEQ ID NO: 442559 - DNA, 407 bp, Triticum aestivum
tggtcaaggagtcaaactgttgaacatattgggaaaatattgtgaagctttttcttcgatggtggaggggaaaaataaagtgtcaacagatcagctttctggtggagcaagaattcactacatttttcagtcaatttttgtcaaaagcttggaggaaattgacccttgcaagaatataagcgatgaagatatccgcacgagcatacagaactctgacggtccaaagggggctatgtttctgccagaggtgccttttgagattcttgtgcgaaagcagataggccgtttgcttgatccaagtcttcagtgtgccaaatttatctatgacgagttagtcaaaattagccatggttgcttaactagtgagctgcagaaataccaaatcttaaaagacgggtgggtgaatc

SEQ ID NO: 442560 - DNA, 434 bp, Triticum aestivum
acggtggcatgaagcagttgagtaggtgtgcgtggatacacactattcatcgcatttgtcatcgagcgattgcaccactatcttcagaagctcatcaccctgaggaaatcagtcaacacctcccagagaggagcttgaaattttccaaatggagttcaaacgtgaatttgagaaaatgattccttggctaagttccaaaaatgtcattctatgaagttcggctattcagccatggactagtcaatggtggagttgcaattttgtttcttttgtacatacatgaattgaatgtaatcaacggaaagaaacatatgttgattctccaagttagagttcatttttattttctacaagtagcaaaacttcctgtgtagattaatacatgttctgtgcgatcttgtgttacaaatcttgtagtactgtttttacaggga

SEQ ID NO: 442561 - DNA, 75 bp, Triticum aestivum; identical to SEQ ID NO: 442016

SEQ ID NO: 442562 - DNA, 409 bp, Triticum aestivum
tactagcgtatgaatagaagcactaaagagggacaaaattacaaagtttgaatgtgatcacggtatttttttggttgctaatgatacatcgacacgttagtacaggtgctttggatggattgaagatcatggttagctaggctgacatgtgaatggcttctcaagcatattgttcaaccggataaactccttctcgtgtccttcttcctttccgcaaatgaatttcccctttttgggatgaatgatctcaaagctacgggggcaaagtatacacacactcctgcgaggtttcttttctgttaaaagaaaaagagataagttagtattcatgttatgaaatcacccacatgcagtattcaaataactgtacaaggatatatagccgctccaaaagaatgtacacacatac

SEQ ID NO: 442563 - DNA, 390 bp, Triticum aestivum
tttgatgaaactggcatgtaggacgccttcatgcaagattacgtcggcctggacctggacagcttcccgctcgaccactagtttccagaggactacgggctcgaggaagaggatgagttggacatcgacggggagcctttgttcgaggacgaggtcgccaaccaagccgtcgggttgtagccgaagcgcaagagcaggcggacgaaggcatacatgatggccgacgacaagctcctttgtgagtgttggagggacatcgggcaagaccccaagactggcggcgaacaaaaggcatcaacattttggactcgtgtccatcgcgagttccatgaacgcaagaagtctccatcgtagcaaatccaagcacgcacggggtgggtgtccattttg

SEQ ID NO: 442564 - DNA, 419 bp, Triticum aestivum
  unsure (1)..(419): unsure at all n locations
gacgacgtcgtaaggatttggaatccgcgtggaggatctcaggaagcccagctacgagagggcagacccgaactacgtgatgatgtcgacgaacaaggagcacctggcgccggccgccctgcgtgagttcgggcagcggcccatgttccaggcggacgtggactcgggcaacttcgaccacctgcccacggagctcaggcccatgagcaagatcatctaggatctccagaggtcgcaggaccttgagcgagtagagtagctgtgaaaagacttgtagatttcagtttcaggccggtttcaggttcagttggcgagagcttgctagttcttttgcgcagctattccacttatatagacatgtaatangaggttgtagacagtcaagttgtantgatggttgagccgagcgtgctgaagta

SEQ ID NO: 442565 - DNA, 395 bp, Triticum aestivum
aggatagtacctctctgcaccaggacggctaaggctctacaatccaattacgaagactttcactgatttcgagatgagaaattccacatttgttggtacttacactggaagtctgttgtctacagagagcactttcacttctgaggctgaacgttgcactatctgcggctgctatggcacccttgaagccatcgaaccttatgcactctgtgaagactgtatgtcgcatcaagccttgcttttattgcagcgtctggaaggctgcgctgaactgggcacgctttcaagaattaccaattgccaatagacaatttcaaccatggtccagcaaaaatagttttcaaatgtcagcctagttattttttagagaatattgctgctaacctgttcctttt

SEQ ID NO: 442566 - DNA, 423 bp, Triticum aestivum
cttgccggagaggaggtcggcgccctcaccgacgccacagcaaggagcagcagcaatgagactgccatggaggacttgctcgcgctcgcccgccggcggggcctcctctagccacccaccaggcaggagccacccagcagccaggagcagcaatgaggatggctgccgccaggtccgtcagtcaggtacacaagacaagaatgaacacctgctctgctggtgcttggccatggcattcagtcatgcctaggaagagaaagatcttaatgaattgtagatctttcaacaacaacaacttgattagattggattagattagattacagcaactcagatgctctcttgtcttccatgtctcttttcttcctaaaatccagtgcctggctgatgctccatggaatgtactctctctgtcctccctcg

SEQ ID NO: 442567 - DNA, 406 bp, Triticum aestivum
tgtgtttccgttgactataataactccgcgaggtcctggcatcttgagcttgaggtatgcataatgtggcaccgcattgaatctagcgaatgcggttcgtccgagcagcgtgtggtaaccactgcggaacgggactatatcgaagattaactcttcgcttcggaagttatccggggatccgaagaccacttccagtgtaattgagcatgtgcagtgggcctctacgcctggaatgacgcctttaaaggtcgtctttgtgggtttgatccttgaggggtctatacccattttgcgcattgtgtcctgataaagcaggttcaggctgctgccaccgtccataaggactcgagtgaggtgaaatccgtcgatgattgggtctaagactagtgcggcgaatccgtcgtga

SEQ ID NO: 442568 - DNA, 381 bp, Triticum aestivum
gttgtcgatgcggtcgttcattgcttgttgctcttggtgcaacgctcgttgtgcaccaaagaggtggctctcggtgacgtatgatgacatgtcatcgtcttgctcgatgaagagtgggttggtagaagtagtcggcctatccatcattctaagcaaaatgtgagtggtagaaagagaagaacttataccaatgtaccttgaccgatgttgacaatgaatcaagttcactcaaatgcgaccaatgaaatagcactatcggtaccaattcttgtcggttctcacacctacacaattaaaagcttatggtggagcttggttaggatggtggcacaaaatttgatgcaattgtaagtgagcttcaataatgttggaaaagattca

SEQ ID NO: 442569 - DNA, 384 bp, Triticum aestivum
  unsure (1)..(384): unsure at all n locations
ttatagtgaaaatcttaggaagagagttccctattctgaaatatctcaatctttgtacgttgaggattttgaggagtttgattggattactagaggaatttatgtaggattcagcagggattggttgagtaaaatgatgaaggaacccgctaggaatgagctacgcattttatatgatgatatatacggtgatgatcccgactatgggtttatgaatgttaaaattacaaatcaaagccctttccatgatttaagttcttcttctaaaagggaaataagggaaaggatagattttctaagacgagttttggaggatttgataaggaaagaattgcatgccgaagatggcaatacctagatctattcgtgtntttatgcctggct

SEQ ID NO: 442570 - DNA, 373 bp, Triticum aestivum
ggaagaagaacggatggcttgtaccctctttcggcgttgctgcttcgacttgaaccgatgaccgagcgagcaggaagcatcaagctggaccgcgaaggcgcaggctgccgtagtgtggtgcagcccacctaagttggtgtgcatttgcgtttgcgtttctgatgcacgtccctggacttgcgtcgtaggtaggtcacgagcccctcttgcttgtggtggtggctcatgtctagatctttgcatctctggacataccctttgctgttcttgctgtgttccgtttcaacttcttcatagacatttttcttgttacatcaagtagaacagaggagaaaaaataacttcatgtaaaagtttttactatgcctctgcg

SEQ ID NO: 442571 - DNA, 347 bp, Triticum aestivum
ctcggcatctcgtcgatgaaaaggaagagccctcctgtgccttggtagagcatgagtaacagtgtctccaattttctaatatggatgcattgccacgagaagcgagaacttgttaatttgaatggttccatttttgcgggaaatgcagtaccttgcaatcactttggcgttattagtaggtgtcgtggttctaagtctgacagtagaatgaggggtaggtatgaggaggcaagatcctagctacgatgaggttgtgcacgcaagatttatttacgagttcaggcccttcacggaggaagtaatagccctacgtctcagtgcccggggcctcggtcgattggattatg

SEQ ID NO: 442572 - DNA, 57 bp, Triticum aestivum
  unsure (1)..(57): unsure at all n locations
gtgggnngnaatttaagtctcaggggcgtcaagnntaaggttcncgggncgacgggg

SEQ ID NO: 442573 - DNA, 282 bp, Triticum aestivum
ggtgttggtgctgacgcagttcatgtataccactgtcttgtgtttcatctctttcactgtcgtgttgacttgtcagaacgtgctggtctctgtggttctgctgtgtgccataatgtcctcctggctaatctatgcgacttttcgccttgatcgactaaacaccatccactctggggatcaatctcgtcaactcgcttcacaacatagacaggcgcatgcgtcatcttcaatcaggcattaatgaacacttttaaccctcgagaagcgtgtgttttcaaattc

SEQ ID NO: 442574 - DNA, 417 bp, Triticum aestivum
  unsure (1)..(417): unsure at all n locations
gtaacggtcagcaggtcgagggcggaacacgggacatcgggtcattcccctcaatcctcggtccaatccgccttccctcccgacctccataaattaagggaccttgcaacctacccgttgccggaagcttcttcaacttccttctccccttctccttcggctcccaactccctctctccgatccagcgatctctcgggtctcgcggccgatggcggggccgatccgcgtcaccatggaggtcggcgccgacggcgtcgcgctcatcaccatctgcaacccgccggtcaatgctctgcaccccatcatcatccangggctcaaggagaagtacgccgaggcccttgatcgcgacgacgtcaaggccatcgtcctcaccggcgcggcgggcaagttttgtggaggcttcgatattaatg

SEQ ID NO: 442575 - DNA, 158 bp, Triticum aestivum
  unsure (1)..(158): unsure at all n locations
ttctgttgggttgccatccttggccatgggtgggtggttgatcgggggacgatttccctttgaataaaatcatgttctgcattgtgtttcagtgaataaatggagatgtttactaccggatttaaggagagttactaagagattgggaccaaccnaat

SEQ ID NO: 442576 - DNA, 414 bp, Triticum aestivum
  unsure (1)..(414): unsure at all n locations
ctccctgtcccatataggctccgccactctgtaaccgccgggaccgagtttgtgttcccctaagttcaactcccgcatttctttcccccactgacttgattcggaggttgcgctgctctcgcatttgatcttgaactccttgtagtcatcttcgctgatcgaaggatttttcgccttgatcttctcataactatcacctttgtcaatcattctcttcaccgcgcttctccaagtagacagggccgtgctcatcgtcgtgagggcgtcactgttcactttattccctgagaggcgtgtgttttcaaattcagccgcgaacttgtatcattcgtgcagctttgtgaagaggagtgtcggtgtcaaaaccggcggatctcgggtanggggtcncgaactgtgcgtctaagcggatgg

SEQ ID NO: 442577 - DNA, 247 bp, Triticum aestivum
atcgacgacgtagttcattgctctcaaagctgacctgatggctaggggtgtacgtatggatctgctcggaatggcacccgagtttggccgcaagtgcaagcctccgaataagaatattcggccgggggagtagcattccccttggttaacaaccttggaagagatctccagagtctggcaaccattttgggacaggttaacggaaggccggattgaaaccacaatttccaagtcaaaactggtcgat

SEQ ID NO: 442578 - DNA, 392 bp, Triticum aestivum
gctacccactgacatgccttgcttgcatgatcacgccagatgtcaccgctctttctacttttaacacatggtgggcccataacccacagttccacaggatcgagacctgactctcctgtacaccctgttgccaaagttattcctagagcttgacttcgtatgtagttcacgggccacctgcctagtgatctattctggtatcagacgcaatacatattcccattgctctgaacccctttcacatttcgtatcaggcaacgaacgattgcctatgcgcttgaaacttctactttgcacattcttactttgctctcgataatttcttaagtttcaattcaagagttatttttcgccaccttccctaatgttatctaccggataagcacccatgc

SEQ ID NO: 442579 - DNA, 325 bp, Triticum aestivum
gatgagagcatctacatgcgcggcatccacggcatcctcgagcgtgatggtggctagtcgctcgatgtggacgcacacgaggtcttccaccacgatcgcgacctacacagcaagatggtacgctacccgcgcgaagtgcttgccagtcttcgacatcgtccttatggccctggaggcgcgtacggggccgctgtttgcgaagcatattcagagcaagatcgacaacatcacgtcatccatttgctggacgaatctgaatccgtgagctactgagaggatggtgtcaatcagaggtatgataattcgatgcagctcagtcatacca

SEQ ID NO: 442580 - DNA, 393 bp, Triticum aestivum
ggaataatacaagatgctattctcaacacgagcaacctaccgcccttaggcgcctggtgaagacttcttcgctcactctaccaatcattggtggctttatgccccgcagctacttctaagcctcggaggaagggcctggcatccattgcactcatcccttgatgatgcggaatcacaggagcggctgcacctttaactgtgagcagccaagcctcaaccgcctacttgagcaaatcaaggatgaagctattgcctggggtcgcgcaggagctacagagtgtctcccctgtacttgggctgtccactagcttggtgttgcgtcgtaaccagcatttttaggctttaaaatagttctttctattcattcgacccagttggtgtggcacctcagtt

SEQ ID NO: 442581 - DNA, 328 bp, Triticum aestivum
  unsure (1)..(328): unsure at all n locations
gggtcgaccggtgcagtttttgcaagtgtgagaacaagtaatacagtacttcagcgctagttggggacacctgatttcccatgcatccgtctatcatcatgtatcactgcttgaatataatcaagcatggctgaagaacattttggtcctcggcgtcgtcgacctggtgctcatggccattatttgcatgctgaagctctgaatctcagccccatccccatatgtatccagcgtgatggaatcgatgtagttcacatatgtatcccgggcgatgtatctgctttagcaccgtatggttttacctatctggttttcagagcaaaanana

SEQ ID NO: 442582 - DNA, 369 bp, Triticum aestivum
gacgggtgcattatttatgactaatgatacagccgaagctcaagtgagagctccaggaggacctttgatcgtttctatgtctcgtttcctgatgatgagtatggagcccaattgggatgatcggggatctagcatttggggttgtcttcttttaatttggttccgtagttagaccttgattgtactctgatgatgtatgtttaattcatgtattgtgtgaaatggcgattgtgagccaactctttctcccattcttgttcattacatgggattgtgtgaagatgacccttcttgcgacaaaaccaccatgcggttatgcctccaagtcgtgcctcgacacgtggggtatcgtgggtgttacaacagtgt

SEQ ID NO: 442583 - DNA, 351 bp, Triticum aestivum
cccgggccgccggggaccaaaagtatccaaccccccgatctagggtttcttttccccaccgcgcgggcacaacacagagagcggcggcggcggggaggagccggcgtggaagacgatcgatctcgggggcggcgcgctggagacgcagatgggtggcggggttaaagccaaggaggagtaccgctttggctcgtccaaggtttctcccttgcctacggtgaatgccgaagaagtggccgctgccaaggggaagaaatccagggcgaagaaggctgcgtcgcggatagacttggacaaggctgaatcccttgcgtataaagccaggattaaggcgacggagtctgccagggt

SEQ ID NO: 442584 - DNA, 411 bp, Triticum aestivum
gaagacgataacgataatgaggatgcccgggctcttgtgaccggagccaggttctcatgtaatgatctcgaatgcagtttgtcaatatcacctgaaacggaccgtctgacatctcctaagctgaagatggcctttggtcttagcggcaacctgcaaagtataatgctttgaagaatcaggggatgaattagatagcggtagtacatcataccacctgatggagaaaaggagcctagagaaaagcattctgcttgagctggaacgcgatcatcatctcaaaattcaagaggaagttagaagtaagttatcttcgttggaggtatgccaccaaaatgaaatccagagaacaatctctgcatttgctcgacttcagaaatatgcagaatcacgaaaagagatagatagaaggct

SEQ ID NO: 442585 - DNA, 323 bp, Triticum aestivum
aattactcaaaggcaaccaagaaggaaggaaccaaggcaaccgggtcctccccaacaaccggaacccaactgcaacaagaagaattacaagtaatgttccaagaatgtaataaccggttaacaataaccaaaggttgtgcctttgccaaaggtaaaggtggttaatttccaatgaacctggaagttgtaattgcctctgcattcaggctcgcttgttttggatgcgcatggcaagttctcgattaatcctaatcaagatgtagtggcgatggtttgtgaacactccctatgtagtgctgaatgatcatggtgttttcttcttc

SEQ ID NO: 442586 - DNA, 326 bp, Triticum aestivum
gatccgaaactagagtcccaagccatctacccacgccgccgccgttcccctccggcaaccatggctgggatggcatcacgctgcgaaggcaagacaaccggcgacaaaggctactgtagtgtgatttattcaccctatcgacagtcgtcgcctcttcatcctcgcctggcctacctgttccaacactttggtctggacaagatccgcgcgattatgaacagttctgatggtaagacgttcgatcaaacgatcgacacgttacgagaggaaatgactgctttcaaacgtgctcatgatgtactctacatcgtctaaggcgacgatcg

SEQ ID NO: 442587 - DNA, 405 bp, Triticum aestivum
cccgggccgacggggtcagcaataactctgacccccaaattctggaaataatagcaattagagaggctcttgctcttgcagaggatctttacataaacaaaatgtccattgcatcagattgcaagatggccattgatgcgatcaaagaagggagttccgctgcctttggagcaataattaaggagattatagctagaacgagcatttttcttcatgtatttttagtcatgagtataggacctcgaatgtacaggcccataatctcgcaaagtatgctttatccttaggttttggccgtcatgtttggttacgccagatcgaagatctcgtatttatccttaccaacattgcgaagcagtaataaagttttgcgagatactcagaaaagaaagataatgttggcat

SEQ ID NO: 442588 - DNA, 409 bp, Triticum aestivum
  unsure (1)..(409): unsure at all n locations
ggaggcgattctgcaggcggtagggcaagagcccggtcaagaattggagggcgaggcggaggagagcgcagatcgagaggggaacggcgacgacgctgggaaggaagatagtgggtgtaaagatctggtcctggtagaggaccctgtcctggtcgaggatccagaggaagcatttcaggaagaaatgagagcgcttttggcgtctgtccctgaaggtgccggggcatcatttactgcgatgcagctgcaggagctagagcagcagtctcgggtataccagtatatggctgcccgtgtgcctgtgcctacccatctcgtcttcnccatctggaagagtgttaccggtgcatcctctgaaggcgcgcagaattaccctacattgatgggattggcaacactctgcttggac

SEQ ID NO: 442589 - DNA, 66 bp, Triticum aestivum
  unsure (1)..(66): unsure at all n locations
gggnnnnnnnggaantttatctagccggcggtacgaacanacccnggtcgaccggggcacatatgg

SEQ ID NO: 442590 - DNA, 437 bp, Triticum aestivum
ggtctagaaatcccgggccgacggggctcatattaaagttctccgtcgcactgccatccctcttggcactaccgtgattgacaagatcaaccctgctgaattggtgaacctggttgacattttgggcccttcatccacaccggtaatgatcaccatcactatacggatgggagctaataacatgagggtgaagttgcctcatcccatccgtgctgtctgcaattctggacatattgtcacatggattactgatcccatgcacaggaacaccatcaccgccacatgtggactgaagactcatccatttgactctattaagaattacgtgcctccaatcttccatctgcactaccaagaaggaagccatccacgaggcatccaccttgaaatgacagtacagcatgtcatctaatacatcggtggatcacggaccgtta

SEQ ID NO: 442591 - DNA, 79 bp, Triticum aestivum
cgggtcgacgggcacataattcctattttcaacaataagaacatcattaattcttcccataggtttcttaatggtgggg

SEQ ID NO: 442592 - DNA, 391 bp, Triticum aestivum
  unsure (1)..(391): unsure at all n locations
ttgaagaccatgtaggcagcataggttgtgtcttgggagaggatcttgctatttatcttcccgcggatctctaaccagcaaacatccctgagttgagcaccttcggagaacctgtcgtagacatanggtcagaacttgcaaaagaaagaaaaaaccaatcaacagcgtaagttgttaaaggaataatgcccaaaaggcattattaaattggtaatttaanattccctaanaccatgataaaggttaataatccatgctagaattgtattaaccggaaacatgatacatgtgtggatacattgacaaaacaccatgtccctagtaaccctctactacactagctatttactcaaatatggtaaagtttccaacccatacacatgtgttgaca

SEQ ID NO: 442593 - DNA, 402 bp, Triticum aestivum
cccgggccgacggggaggataatgaactggggatccaggtgcaacgcattgacttggtaatgcgagagcacggcgttgaagaaatcggagaaggggggattaggccagcctagagggcgtgaagatgaatggggatctcggtggctgtcctatcaatcgcggagcgggaagtaggtcaagccaccgtcaccttgcactcattgaaatctgaggcgagcatggggcaaaccttgtccattgcttcctggttgagcaccaccgaccgctcgatggcgggctcgaggaccggcggtgtctggattgaggtgtgggtcttcttcttccccttcttcttctgtttcggggcgcagcagagaggattggagccggttcaagccatggcaggaggcagctgtttctggg

SEQ ID NO: 442594 - DNA, 403 bp, Triticum aestivum
cacggagcccaacgacacctcttccctgcgcgcaaacagctgagcacgtcgcggtcgccactgatacacctcagcgccatgctgcaaagtaccaccagccgacacagcttgaagtccttggaagatatgtcgtgcgtagcacctgccgaccaggcatgacaaagcgtagcacctgtcggtcaggcatgacaaagcagttcgataacgggcacgcatgcgtcttaataaccattctaaaattctttcatacagcagcaagcagcaacagtggcgtgcaaaatttacatcccgatatttttgccacggcgcaaactcgaccagtagtccagtagtagtccgccgtaccaagtttatcaacacccgacggctaatcctagccactagctaagctgatgcttctccc

SEQ ID NO: 442595 - DNA, 397 bp, Triticum aestivum
ttgacaaatatctggccgcactgtaggatacagacttacatgaacaagcctccgacgtcacagaacgtcgacaacgggtttgcgaataacgtgatgcctgtaccactgaatgtttaatcctcgtcatttcttgcttttcctttatttcacctctctgccctaagtttcggggtgatgcatctgtggtagggtataggcctgataaaggggggaggcttttgtaatgttgatatgtagtatcccattaatttggttcactgtaggagctcaagtcttttagagcctgtaacaatcgacaacacagggaggctaaatactgcagtagttggacagattcactgtaagcatctgttgatacaagtcaatctgtatccccggttctagccagtaaagctct

SEQ ID NO: 442596 - DNA, 190 bp, Triticum aestivum
gaaacgcaagtggctataatggctgaaggcaagcaacacgcattggcgattggattcacaaagatgtcagcgaaagacataagcaacatcaacaaagggattggagttgacaacatgcactaattaaatgatgggctgttgaaaatggaaccggttgagtaataagatcgccgttggaaacaaaatccgc

SEQ ID NO: 442597 - DNA, 120 bp, Triticum aestivum
cgggtcgacggcttttaacataagctcattcaggcacattggccaccccgccaaattcggcttcaacgatgacttacaggccttagtggcaggccatgcagcaggctccgcggcagaaaa

SEQ ID NO: 442598 - DNA, 384 bp, Triticum aestivum
gagcacacagcaacaacacacacagatggggttagtgtccctctagagatctcgttcaagacgtccaagtgtgtcgagatctagagatctctgttggtttttttcatcaaaaatgccaaagcggaagaaagcctggtttcgtgatgcagatagttttgaaactcgcattacacttgaggcagaccgaggattccttaacctcttggaccggacgcaagacagtctcaggaatgcacgaaacaatgcgccaaacatgacgacgaaagtcttgggtgggtttgttagaaccttctactttgatgaagaatctaatgctgatgtcattgatggcgaaatgcaaattgagtatgatctagaacagatcaaagtataccctatcacagt

SEQ ID NO: 442599 - DNA, 415 bp, Triticum aestivum
agctgcttgcctatgctggcgagtgcaagcagctcgctggcataggaggtgggctgggccagtaggtgggcctgctaggtgggcttccaggtaagtcctctgttcctttttgttttctcttttttatatgctctgctctgtgtattgaaatgattaaaataccattccatttctaaaaatcctggaaataatcagaggcacatttgaaaatattctcaactgcctaaaagtacttccaagagtatttgagcactttaaaatatttatagtattgaaaatgcccaaattcaaatacttatggcttgttcaaaaatccagaatggctccataatttgcaagaccatttttggcaggggtttaaaccagagccaaaaatggtgggcttttatgaagggcattttggtttcattgaaat

SEQ ID NO: 442600 - DNA, 70 bp, Triticum aestivum
tgagcaaagtttgacctgttaaccagtgtggtagtttggctggtgtgatttcagcagccttgccttttag

SEQ ID NO: 442601 - DNA, 408 bp, Triticum aestivum
  unsure (1)..(408): unsure at all n locations
gcgtcgacgctcccgcaccaaacgccagcgagtccacctccacctcagccttctcggcagcgagccggcagcctcgtagctgcacgtccctctccgctcctcacctcgcgccgcgcccacactcccgagggagttcgtgctgagctccatggacgagcggtcctccggatcggtcgacgccgatgggttcccctcctcgcgtcgggaaggattcgggcatagtaaatccacaactgcaacttctagtcgttttagagggcaagatcacgcttttgtaagatcatactccgataggttgcttaagtgtgacctcacgttggatatgctatcagaaaatgagaagatgaagataattgagaaattggtaaagatccagaaagatggcacactggaggtanatgtgacccg

SEQ ID NO: 442602 - DNA, 380 bp, Triticum aestivum
aacagcgatgtccgagattccggtgcggggcgacgacgtgcaggtcgagcagatgaggagggagctcaagatgagtgagaaggggatgatttacgtgaaggggatattcgagacatgaccgatagctttgatgtctggagtatagtgaccaagcaagcagttcaaagcaggctttcctgtgatgcggtgcaaaatgaaggtgggagaggaggtgagggtgggttttggtaatccacgggcaaatctgtgtcttggcttcgagaaatagagatggtttttgtcgggaattcggtatggctcctaggtccaaatgatcccagtatctgtaccctgtttgtatatcaactacgtacataagagtttaacatgcattccgcaaa

SEQ ID NO: 442603 - DNA, 413 bp, Triticum aestivum
  unsure (1)..(413): unsure at all n locations
cgggtcgacgggactctagctaattgctcccactttcaatatgtatccagattgagactaagagtcatctgatttggtgtcaaagctttcgttgacgtaaccctttatgacgaactctttattacctccataattgagaaatatctccttagtcctcttaggtaactaaggataattttgtccattatccagtgatctactcctggatcactattgtcctcccttgccaaactcatggcaaggtacacagcaggtttggtacacagcatggcatactttatagaacctatggttgaggcatanggaatgactttcattctctctctatcttctaccgtggtcgggttttgagtcttactcaacttcacaccttgcaacacaagcaagaaccctttcttttactgttcattttg

SEQ ID NO: 442604 - DNA, 359 bp, Triticum aestivum
cccgggccgacggaaggggcaattgaaagttggaaggaggaataaactaattatagtatttattgtgactaaaagttgctgattagcaactaaatcatactgcatattgaaacaagcacttcaggccatctatgtgttaagagtttaggggcatagcttccatcatccaactaaactacacaacttatactaacccatataagttttaacacttcactgatattcttcataacccatataattgtccactagtcagtaccatgttttgaccttgttgatcttcaccaaataactgggaacattaaaacacctaatacaacagtataaactaggctgtcttcaccagtataacacgaaac

SEQ ID NO: 442605 - DNA, 258 bp, Triticum aestivum
ggggatgccaattgatgaatttgtgggcaatggcgcctccaatgttgatgaacaaccacctacagattatgattaaggttgtggtgctgccaagggttcaaaccccgaagaattcaaccgcaacctttaagaagctgcccaaattcttaagaaagccaaggaattcaagattggcaaggaccaccaagaaggcccaaaaacctttccgtacaaggccgcaaaggctccgttcaaccgccttggaattaaggccaaaaa

SEQ ID NO: 442606 - DNA, 375 bp, Triticum aestivum
tcaggtatttactcgacaaacatagaaaccagagtactctagaaaccagctctggtccacatggttgggatttcatgaatcaaactggttggagttttcaacatgaaccaagttcctgaaatcagcatgattcggatcttggatttccgaaatgaatcaagtttcagaaaccggcaatatccaaattttagaaaccaacgtgatggaaagaataaatgatttggtgaccagagtcagattctagtatgttgcaattctgcagagacactaaaaggtggtgcaccattaccgagtctttgtgctcactgatttcacacctttgtaatgctaattgaattgaaaatgagatgagaggtgataacagacatgctttta

SEQ ID NO: 442607 - DNA, 358 bp, Triticum aestivum
aggacacgtaaacatcttttcggcagcgcctccacaaatctcgtcgttccaccacctgttggaacagatgatagtccatacatggaaactgctacaacctcagcgattgacatactgatcgtggggggaacgggaacattcatcgggcattttacagactgcgtcttcgcccattcctagtttaatatcactgaaatgtacattgtgttttggttactgtaccaactcgatatcaggtcatacagcatcatcacccggccgaaatcggccggcaatgtggttggtttttgttgcctagattgctatgtccgcatatgagtggatccgcctgtccatgtctcagcaacaacttcccgtc

SEQ ID NO: 442608 - DNA, 391 bp, Triticum aestivum
ggagaagatctggcatcacactttctacaacgagctccgtgttgcacctgaggagcacccagtacttctgactgaggcacccctgaaccccaaggctaacagggagaagatgacacaaatcatgtttgagaccttcaatgttccagccatgtatgtggccatccaggctgtgctttccctatatgccagtggacgcacaacaggtatcgtgttggattctggtgatggtgtcagccatactgtgccaatctatgaaggatatgcccttccacatgccatccttcgtcttgacctcgctgggcgcgacctaactgactgtttgatgaagattcttacggagagaggttactccttcaccaccaccgccgaacgggaaattgtaagggacatc

SEQ ID NO: 442609 - DNA, 381 bp, Triticum aestivum
cgggctcgacacaagacaggtacagacgcgcactgttggaccctgaggaggttccggaggaacacaacatacgtgcgtcactcggcacctctgagtttgcgcaagaagtttctggaacattcagtctttatggaatggacagtcagaacatactaacatcacttcctctttgtcaccatcgttcacacatacgggccctcctgacaatcgaagggaaccacttccaccagaccagtgcattgtaataatagcatcatgggcttcttcagactcagttggatataacccaatgcacttggtgtctacgtgcatcctctctaagcaacgatctatcggccaacgcactcattctccgtgtatatgtctcagtcaagttgacta

SEQ ID NO: 442610 - DNA, 403 bp, Triticum aestivum
cgggtcgaccggcggggcaacgatgcaggtagatgaagtcgagcacgggaaagctactagacaagggtttgcatcgagacgaggagggaaacaacaggaaacggggcgacaacatgccaaagcacagttttggctgatgcatcccatggtcgccgcgtgagctggcatgcgcggcgcgtcctggcaaaactgaccatgcccagtgcatttatattagtaccctgagtccaaacggagcaacaagtcggctcaggggcaaagaagagaaaagcaggaggggcccaaacatatcagcagcaacctgtttgtgttgtctagtggagacacaaacttggcaacgaaggaactgatttgtctggggcttatcatacactaagttgacttttatcaccaaaactcagct

SEQ ID NO: 442611 - DNA, 207 bp, Triticum aestivum
cgtataatggatgcaatttggtagagttgcttccatgccttgcatttttcggtcgtcttgtgtgttcgatcatcctaacatcttgataaaagagctattgagaaagtacatcatgggtgagacccaagagttgaatgtcgtcttgtaaaaattattgttgaatgatgactatgtgatataagcagaagggatgagcgtgtgaccatc

SEQ ID NO: 442612 - DNA, 416 bp, Triticum aestivum
actccggaactgaagaggtgatcagattgggaggcgccaggtggaggtgaccgccagaagccgagaaccatggggattctattcttgttgtactaacatgctatacgccgcgggcgttgcgcagcagctaatgggtttcgtctcccctgcgctcctctgccttcccttgggaaaaatgtctccgactagcgtgtacaatgcaaaatctgttgggaggctaagccgtttagtggcgacgacagataaattatttgttcactttgaatagccaaattctgtatctgatatatgctttatgcgttgtgagctcaaaacagacatttgcttctttgcttgtgttgtcagtggtgatatgcggcgcctgctcgtttcacatgtattaagaccgtatgcagtgcaaagtgcttgataaaaag

SEQ ID NO: 442613 - DNA, 336 bp, Triticum aestivum
ggaacgattggagactaaacgaattggtataccaatctatacctcaccaacatctatttccgaagtttgtcgcaccacataatcaatcaatgagatggttaactacagtaactctagtactactgcaagtactatcatcacttcaagcccttgcgtgaacaagtccggttcaacatattgcatgctaccgtttctgatcaacgcctgcatgtgccgattcttcatcttcaaaggtatgggcaggtggcataactgagactccaacgacatgatgatgccatctcaactgttgcatacatcaccaccacaacatctgaatttgatgtattggtttga

SEQ ID NO: 442614 - DNA, 408 bp, Triticum aestivum
  unsure (1)..(408): unsure at all n locations
gggtcgaccggtggcagggactaccgagcatgctgcgatgtgacattgagcggcccatttaatgcgccctgtcagcctgtagagttaggtatgatagcactgtttgctatctaatcagtgcataatgattgatttgccacatggtgaccccttgacctataaaaggaggctcatggcaaccatagaaaggattcggaccctcacacgtccttgggcgcgtagccgttctctcncgaggcaaaccctgccgggaaaacgtgctgcgctcaccaccatttttccgcctcacggtggcccgagcctgggtaaaactgcccgcgtgatctctgtcatgctgctcaacgctcccctgctctttgtgcaatgtgtcatccccccgtcgaaccagcaagggactcctggtcccat

SEQ ID NO: 442615 - DNA, 253 bp, Triticum aestivum
gctatgatattagcaggaaaatatgacccgcattgccatcttatgcaggctaacaccggtaaccatccatcgcacacttggcgagcaattattattgggcgaactgtcctaaacatgggtctcatcaaaagggtgggaacgggcacagagatcaatatttgggaagataaatggatcccgtctaatccgtcactacgccccttgtggaaacctaataatactcaccttactctagtgtgtgacctcattcgca

SEQ ID NO: 442616 - DNA, 289 bp, Triticum aestivum
gggtcgacgggtggtcgcaaaggggacgtggggtgtttgcatcggtatttcttccatttacgttttgttgtccgcacgccaatctgtagggtatatctatcttcaccactgtttagggtactgtgatttgcttccagtgatttagccgtgtagcatcagaatgttgtttctccttcctttcatctttgcagttgtccactctcttaaacgggttcagacataaaatgtgaacagacatcactatgtaaggaatacatcaactgtgacagttcagtcaaaatgcagttag

SEQ ID NO: 442617 - DNA, 395 bp, Triticum aestivum
  unsure (1)..(395): unsure at all n locations
gggtcgtactgggacgtggcagctactgcctaaaggtctgcaacatggaggcaagtggcctccacctctctctcatactcgtttgcctcctctctagttataaaatatctcctttttacctgaaagttaaagaaggcaagagaangangggtaatatggacagcatgctgtctgtcaaagattattcggtacaggagggactgctcgttccttacaagaaactggtagcataccagagcattataatcaagaaaagtangtgctaattcaatgtcattcccctttatgggcaccctgagataattagctagacgagtggcataaattccaccaaagaaaactccatccttagcattaagatgtaacctcctcgcagtaatacccccaagttatat

SEQ ID NO: 442618 - DNA, 107 bp, Triticum aestivum
gtgtatatatcttcacagcgttgacggttatagaagatgctccatgcgaagaatttcgttattgctgatgcagcatcacatgccaatggatatgtatatgcggaaca

SEQ ID NO: 442619 - DNA, 355 bp, Triticum aestivum
gcagcggctgaagctagcccggacatccggaccgccgtccggatcatccagacccagccagatcatccgggtccccctccggatcatctggataaccgcgctgaggatacccgaaggtttctcctgaagccagatcatccgggccacctcccggatcatccggacgacggccggatcatccggacccccatccggatcatccgggctttgcctgcgtgcaacgcttcgggccaaggcccatgtacccattcgccccctcacttaccccttcgcccactagactataaatagacctcctccacctcctttctagggttagcaaatatgatagctcattcttaggtgagctttgctc

SEQ ID NO: 442620 - DNA, 253 bp, Triticum aestivum
cggtcaagaaatcccgggccgacgggattgcgtagtctagaatgagtgtagttgaaatgctcattttttacctctcgggatgggtgcttgcctggaaccctgggaaagggtacttttgtccccctatatggtgcaagataatctgccctgtttggggaaccccgagtcaacaagataaaattttcctattgatggcaatgcatttcagtcaaagtcaatgtcaatgtataacaattcaatcatgtactaaatg

SEQ ID NO: 442621 - DNA, 412 bp, Triticum aestivum
cgggtcgaccgggagatgagaagaaggcggctccagggtgcgacgtggaggcattgcgcaagtgcctggaagagaacaagggtgatggcgccaagtgccaggctcacattgacgccttccgatcctcatgttctgtcagccccaccaacacctccgactaccgtcccaccgtacaaaaggagacctgaaacactggtgtctttgctggggtggttttacaagaaaccttgtggaataattaggatgaggtgcgactgtgcaaatgctcatgtgaaagataggataattagggcttagactagcagtttttttttttgagaaaattatacttttcatccctcaattcttcgcgaagtttagatttggtccctcaattccaaaaccggacaacttgcatccttaactactgaaa

SEQ ID NO: 442622 - DNA, 377 bp, Triticum aestivum
  unsure (1)..(377): unsure at all n locations
gggtcgacagaagatctgtaaaaaatgttggtttagctgtgaaacaaaaagttttgcctgaggcccttactttgatcaggagtgctctgttgcaaggacaagcactgcangcactacagaagttttttgctgcactggtccaatctgcaaatataagctttgaaactttgttgaactcccttatttccactgctaaaccatcacagtcaggcggtctttccaagcaggcactattctctattgcacagtgtgttgctgtgctatgccgagcagctggtgatcagaagtgtgcatcaactattganatgcttaaaggcattctaaacgatgacagttctactaattctgctaaacaacacatggccttgttatgtttg

SEQ ID NO: 442623 - DNA, 363 bp, Triticum aestivum
  unsure (1)..(363): unsure at all n locations
gtcggccgggccgaacctgtacatgtgattgggctgtggtggatgctggtattttggttgggcagaagcacaaaagttganatgttctcttagtatgttggatcttctaatgcattaagacgagtgttttgttgcttatttatcgtttaaagacatggtcggtgaaccttgtgattgtgttcttatcagtaatctgcatacaatctattggtatctgatatagatctgtttggaggcggttctgttttgtatcatttgctaattgtgaagtgtagttcctcttacgattgccttcactgtttttaggatataatcatatcactatggtaaccacaaaaaagaagaagaagtgaaacacataaa

SEQ ID NO: 442624 - DNA, 332 bp, Triticum aestivum
gacgggaacttcaaccaaaaattctccccctaattttccaaggccaaattgacttatatccagaataggggacggaggtggcgggctagcaaaccacaggcatgcctggtgtcttttgctcaccaggtggccccccacctgtagttatttgctccagtatttttgatatattccataaaaattcctggtaaagtttcagctcatttgtagttgtgcaaaataggtggcctggcgtagctttttcaggtcccgatttccagctgccggaattctccctctttgtgtgaaccttgcatattatgagataaaatgcattagagttactccaaaaa

SEQ ID NO: 442625 - DNA, 413 bp, Triticum aestivum
  unsure (1)..(413): unsure at all n locations
gggccgacgggggtccatctctctttctatccatcaaaaatccccaaccggtttctcggtcccccaactcacaatcctcaagccaacctcctcctcccttggcttcggaaacctgcccttctcggcctcgccctctcggtaaccaaactcctctcccagacaagatacatagcggtgctgctgtggcggcaatggctgtcaaggcgcggttcctctcccaggccttcccccacgacctcaacgcctacaggtccatggacgccgcggcgccgggtaactcccagttcctggacgagcacgccgggtgcgcgccagcggtgccgtgtattgggaacaacactgtgctcagcgatctcncgcgaagcgagctcacatgcaacgacggtgggcgtacgtcgcgcggccgagctcgt

SEQ ID NO: 442626 - DNA, 178 bp, Triticum aestivum
  unsure (1)..(178): unsure at all n locations
aanccactggcgaaacttatgggnccctgggtcnantttccatcatataaagtttccaatccattttactttgcaatctttaatttcaatcnatatcataaaaataccaacaatagtancctaaccataataaccccaacaagttncaacccccgtaagttgaccgtnnaagggattg

SEQ ID NO: 442627 - DNA, 73 bp, Triticum aestivum
agtataaaggccttattgagccatacgggaatagaggagagaggccaaaaggaaggaggcctgcgcccccccc

SEQ ID NO: 442628 - DNA, 124 bp, Triticum aestivum
gataggatgccttaccagaacgtacacgcacacgaggcgacaccaccccactacgatcgagcatccctcccaaaaaaagccccatgatcgagcgcactaggcacaggcacgcaacgctgttggt

SEQ ID NO: 442629 - DNA, 343 bp, Triticum aestivum
agctgaatgaagaccctcttctgccagttatttttgttaattcagacagattcgattgagatggcccaagatagataaattccgagcggaatttgtactagataatatcgactcattttcccatgtggaattttgagtgtttgtgctggccgatcgcttgtttgttgaatccagatagatttaagcatttcccagctgacaaaaaaaaaagaaaaaaaaaaaaaaaaaaaagaaagaaaaaaaaaaaaaaacataacagagaaaaaaactaaaataaaaaaaaataaacaaaaaaaaaaaaggggcccctcaaagggttcaagcctaacttccccgtgaatgg

SEQ ID NO: 442630 - DNA, 337 bp, Triticum aestivum
tgcttatccatattgcttcatccatcgtaagataacccagaacttgaaaccttcaatcacacagaactcaaacaaaacctacgtgagatctgttagtataagaaaccaacccactactataagtactatagaaaacctattattattttgtttttgcattatatctactgtattctgacttttatatggcaaaaactcatcaaataaaaccatagaatcatcaaaacaagcacacaatgcaaagaaaatagaatctgtcaaaaacagaatagtctgtaaaaatctgaaaatttcgaatacttctgtaactccaaaaattattaaataaactttttga

SEQ ID NO: 442631 - DNA, 339 bp, Triticum aestivum
ggggtgagaacgatgatgagggcgatgagtattaagcctgcctcctggtgctttcacaaagcttgctactgctatcctatgatctgcgcgattggctttatctgttatctgtctgtttgaacgtttgcgttgtggtgtttgttttacaacctgttgtgttgtaagaaccttgtaactttgaacctgctttgcaccttggttaatatgcatgctatctggttatctaaaacaaaacagaaaatgacatggcggacataaaaagtaccaaaacagaaaatccaaacaaaaaactaaatcaatgcatgaacagaaaataaaaaatgcggccactccaaaggt

SEQ ID NO: 442632 - DNA, 337 bp, Triticum aestivum
gtccagaataccgggtcgacgcgatggttgcatggaccaaaaatatcaaggtgtcagaccctctcaaggagggatgcaggcttgggccagttgttattgaaggacagtatgagaagatcaagaagtttgtagcgaatgctaaaagtgaaggtgccaccattctgactgggggtgtcaggcccaagcatctggagaaaggtttcttcattgaacccacaatcatcactgacatcaacacatcaatggaaatttggagggaggaagtctttggtccagtcctgtgtgtgaaggaattttctactgaagaagaagccatcgaactggccaatgatactca

SEQ ID NO: 442633 - DNA, 177 bp, Triticum aestivum
ggtcgaggcgatgtagcattgtattacattggacgcctcgtgacgtgtgatggacatgcctgtagtatgaactgctaagtgttatgtagttcctttccggttgaaatggtaatccctgtcgatgacgagatgaaaatttggttgccctcagaaaaaaaaaaccaaaataactataat

SEQ ID NO: 442634 - DNA, 167 bp, Triticum aestivum
acggggacgggacgccattgcatttgcattgctctagtgatgaccgacttgtctgtaactttgtttgtttgtagtatttgtactttatactagttggtacgtactgcagagttgcagtgaatgaatgaatgaatgaatcacaacctgtgtgttgttgttgttgttgt

SEQ ID NO: 442635 - DNA, 355 bp, Triticum aestivum
cgccgccaagtcgcccaagaaggccaccaagtcccccaagaaggccaccaaggcctagatcgtagtagtgcggtgtgctgatggttccagtttggttagatgtagtagctgtttcactctgtatcctgcgcccctgatgtaatcggaatcaaaggggaagccgcttgcttcctcttgacttatgaattagtatcaactaaaaaaaaaaaaaaaaaaaaaaaaaaaaaaaaaaaaaaaaaaaaaaaaaaaaaaaaaaaaaaaaaaaaaaaaaaaaaataaaaaataaaaataaaaaaaaaaaaaataataaaaataaaaattaaatattgaaagggtttgaagagaattttttttt

SEQ ID NO: 442636 - DNA, 374 bp, Triticum aestivum
gggtcgacggggctgcatctggcagagctgcagctgccgccccaaagggcaaccttcatcaaacacaaccccataacagggcctcaaggttatgtgccccatcgcccctctttctaaattactgaaacgaaaatggctaagcctgatgtgcctcttgtatctgttgctggatttgttatgatttgattcaccaagagtgattcttctacagtcttgtagtatggttaaatggaacaacgaaggatatttctaatttggttattgctagaataattcatggacttgatatatgctgggatgttttgcctgtccttactgaagaagatgagaatggaatttaattggatggtccctttcatcgtgcttaataatgt

SEQ ID NO: 442637 - DNA, 348 bp, Triticum aestivum
gcggtggtttcaggggctgaggcagatggcggctcttgagcagaggcctccggttcagtcaggaccggctcttcgaccggtttagtcttctttgccctcttactgagctttgcttgagcactgataggacaaaaggttagtacaaaagcatgagtaaagataagcacaacataagatgatcatcattacccgggtgcggtcttgaaagccggcaggttcgattgcatagaatcaccagtggaaggtgaagtgtcctgataatttgaatcagaagaattgagcggttgacgagtaacgcccgccaaaggatgaaaagggtataagttggagataacctcggtccggcgc

SEQ ID NO: 442638 - DNA, 224 bp, Triticum aestivum
gggtcgacgggatgacggctatggtcgccgcgaagctggtccgggagctgagcgccaagatctcaaaatgagcagcgacagtcaggacagaggcagcagcagagaggattttcaggcacagtggtcgttgatcttagttcctgccaatcattcagttgtgccacgttttagtctgacaatcttctataaataataaaatcaggctcaaaaggttgtatacatgt

SEQ ID NO: 442639 - DNA, 388 bp, Triticum aestivum
gacggtggccccgtcagccggtcatcctcccatctgcctcgccgatgcttcacggctagcgggatcccgagacatgctgcggccgcgtctggtgctcttcggcgactccatcatcgagcagtccttccgccctggcggttggggagcggcccttgcggatacctaggcccgctatgcctatactgttgtcacaggctacggtggatacaactcaagatgggcgctgttcctgatcgaccgcatcttctccctggctggcttgccagccgttgctacgaccatattcattggcgctaacgaggcagcgcttctaagaccatcaacccagcagcaacatgttccggttcaggagtcaatacagaatctcaaaccaattgttaatcacctg

SEQ ID NO: 442640 - DNA, 314 bp, Triticum aestivum
gggtcgacgggacacccaaaagtgagtcgtattagaagaagatttccttcttttcttggtaagagcgtatctttttgcctcaagtcgaagacagtcagtactcctcggtcaagcttaatatctagctgaataaagtggaatctgcgcatgcatgcagaacacatcaattacattactataccttcgattaagggaaaccgaatatgtacagcacagtaacatgcacgtgcagttgtaaagatacagtagtttcgactcgttgtgattcacgagcaacgattgtaacacgttgtcgtcggtatctgtgatccaat

SEQ ID NO: 442641 - DNA, 381 bp, Triticum aestivum
gaatggctacatcaggatagattgctacggcggcctcaaccagctgcggcgcgatctgtgcgatggaattgcggttgcacgtcttctgaacgcgacaatggttctgcccaagtttgaggttgctgcatactggaacgagtctagacgtgtttgatgttgatcacttcattgagcaaactagaggttatgtggaggtggtcaaggatatgcccgaggagatatcgttgaaagagccatttaaggtcgattgccgaaaacagaaaggacattttgattatgtagaaacagttcttccagctcttttacaacatcgatatatttctctgacacctgccatgagccaaagaaaagatagatatccatcacatgcgaaagcttgtt

SEQ ID NO: 442642 - DNA, 354 bp, Triticum aestivum
cgggtcgacggggagaagaaggactctctgtgcttcatcgaggtgatcgcgcacaaggacgacaccagcaaagagcttctggaatggggctccagggtctctgctgccaactccaggccacccaacccccagtaggccaagcacgcctgcatcactagtagtcgcatccagcagcacgttgccatcaaataatgttgaacagtttatctttgctcttctgttatgttcttagttttgtgcctactagttacttgtgagctgtggccaaaaaaaaacctgcagttcaaacaaaacaaatttcaaaacatggaatccacttcatgtccgaattccaaaaaaagaatgctcttcaac

SEQ ID NO: 442643 - DNA, 131 bp, Triticum aestivum
ctgccccatgtgctgtatactctatgacgatgattggctaggttaacgctctcgtcactcaatctgcctggcatgtgggcaatgattctgaactctatgcaggtgtgccttggaggggttatcatgggata

SEQ ID NO: 442644 - DNA, 363 bp, Triticum aestivum
  unsure (1)..(363): unsure at all n locations
tgtatgactatggtaatgagtctctcccctttctggactaattcctccggtttatataggcaccgggaggatctagggttacacaaggtcngttacaaaggaaaagaatctacatagttggttgccaagcttgccttccgtgctaacgagagtcccatccggacacgggtgcagtcttcggtcttcgtatcttcacagcccatcagtatggcccatggctaacacgctggacgcccgaggaccccttagtccacgactccctcagtagcccctgaacctggcttcaatgacgatgagtccggcgcgcagatttgtcttcggcattgcaaggcgggttcccttctccaagatagtctccggata

SEQ ID NO: 442645 - DNA, 234 bp, Triticum aestivum
ggataagactccggactttaggaaacagtgtacaggccatataacctcaagtcaagattggaggccacgggatcccttaaaggatcctgcatttattttcctgcatcttggctgctcgattgggtctctgcttcattttcatcacatgatacttaagtctttcttaacatgtgccggcccatccattaagtgtgcgtccatgtaagactttatggatgtaacatccctgttctt

SEQ ID NO: 442646 - DNA, 153 bp, Triticum aestivum
ctctcggaggtactactctggttttttcagatttatttttccttcaagtactttgttttttcatggcattggggtttttctggaaaattacatgaccaccaattcaaaatggccttccaatttaaaaggtataaccaaaaatttcctgcaacc

SEQ ID NO: 442647 - DNA, 382 bp, Triticum aestivum
cactccgatgtcaaatccagggtttttcaaagggaattttcgtacattcactcggtttcatcagggcagtgaagtttctcatgtataatatattcgcatcagttgcatataagtcatgctacttgcacagattaaccaaatattatcatgccacatgaatggtagattatatctccgaatcatttacatcaggaagggatgaggaactccaacacatgtactggcccagccataatgtttgcgtacatgtaggattgtaaggatctagcataaattttcttgttggatggtggttttagaatctgattcattttctgattccaattgacagaagacgtaacccaatagtatagctaaatcagagattcgttaactgaatcca

SEQ ID NO: 442648 - DNA, 382 bp, Triticum aestivum
tcccacttctccaatgcatatcctttcatttacttctcgcgttcgatgaagttgtagtgttgaaattttatatggcaaaataccagaagagtatgactcgtgaaaactttcgagttcacacatattaaggaaggcataggttcaagccatcggggcttcttagaacatataccacgaacttcagaagtaaataacacaagctcaaaagtagagcatggttgataaagcagaggatacaatttaccaaaggctttatatattcatggaaaagctcacaaggttatttgaatatgaggatattgtgagataaactccaacaaaggatccggtggtcttcaagggatctgatgtgagcatcggtactcaaccagaggaaaaaaga

SEQ ID NO: 442649 - DNA, 100 bp, Triticum aestivum
aagtgcattcggcttgtgtgggagacatgccgcagcgagttcaagtcgcgtcagcacagtggcggccagggtcatcttcctctatgcttccgctaagggg

SEQ ID NO: 442650 - DNA, 263 bp, Triticum aestivum
  unsure (1)..(263): unsure at all n locations
gcggagagatcaaggcngggtacctcacgaagtgcccgtgatgcaagccatgacgaccaagggtgccaggcgggcgccagcccgcgcagtgtcctcctttcctctttggtgcaaatggagcaagcgcaggcgagatcatcaagcaaaggcacctctttcggtggaacgagaccaagaccagtccaacggcagggaggaagtcattatggagcccaagccagcgtcaccaccagagcctttggcaggcgaagaccaactttaat

SEQ ID NO: 442651 - DNA, 354 bp, Triticum aestivum
tcgagggcgagacacgagcaagagaagtctgaaaagtatggcaaagcaatggcttttcttcaagaacaagaaagcgcttttaaatgcgggcagatgggaaaaggcaaaaaaaggaagaggtgatgatatgctgatcatgttgctatcacagtccagtttgcgctgggtattggagatagaaaattaggcatgcacctggtgaccctggcatgccccgctttaactgcctttgccacttccatgtcgaagacacgccggaaagagtaatcatgtcgcaaacgctgatgtggatggacgcgttatgtttcttgcacttgagaatgagttgctccggagtgctgtactcctgcaata

SEQ ID NO: 442652 - DNA, 403 bp, Triticum aestivum
cgggccgacggggaactggacctaagagtactacctagggatactagggattgagtgtgtgagatgaaccggagaaggtaaatgcagagagatgaaatgcacaaaagacggagggatgtgatggttgcttgtccgtttattttaccagaccacttattactgcgagtggttgggttttgtgatatgaccgctttactgccgcgccacgagcggggtgagactcgcgtgcagcaccgccctctacactagtactacatcggtcgtggtttattagtcccccattgaatttaactaaagatttaactgacacaatgttattgcatgtcaacaaaaactatatcgttcgattcgtatttgaacatagttttcaatgataaaattttaggtgacatgcatcagcatt

SEQ ID NO: 442653 - DNA, 274 bp, Triticum aestivum
tggggaggcgaaagcgggctccgcgggctgcctcgggtacttcggccggtttgggcggcggagggcctgctccgcgagcgtggtcgagcccgcggtcgggatccgggagatcagcccgtacatgctcggtctcgtctcggcgagtttcgtcggcgctttcaacgctttgatagagtcggtggtgccgtgagatagccacgggaatcgtgtgcgagttcacagcttcattgtcgcagaggttgatggctgttcatctttgcagaacagaggccct

SEQ ID NO: 442654 - DNA, 245 bp, Triticum aestivum
atggagtcagtgagaacatgatacatatttctgcaaacgtctgtgagaccagttacactgcacgtgtggcaacacgcctcagtcacagccgcgcacaatcaggcaatggcttattcactgatctacgtgtgcgcgaggtagacctgctaggggcataaccatggaagcaccccctctatcaggttactgttaagcaatgattcagagttgaagttcatctcttcatagcttacgtggcttcatca

SEQ ID NO: 442655 - DNA, 255 bp, Triticum aestivum
gtgccgatgccgcgcgacacgggctacgaggggtacttcgaccagtttggcgggcagaggaactactacgcgaacccggacgagcccgaggtcgggatccgggagatcatcccgtacatgctctttctcgtctccccgattttcttcgtcgctttcatcgctttgagaaagtccttgatgctgtaagaaagcaacgggaagcgtatgctagttcacagcttcattgtctcatagtatgctgatgttcatctttgc

SEQ ID NO: 442656 - DNA, 390 bp, Triticum aestivum
acggcgtcggagtcggcggcgcgcatcttccggtcgatccagatggagaggcagcagaacggcccgtgaccgagcgacctcatgcggtggttggccggcagaaagaaagaaatgaaggaagaaagcttagccaattagcgcttgggagtatgttgttatttttgagcaggcaatagcattcctatatatttgtccctcggcgtcggtaaaagcgaatttttggcgactgtaaatatgcaaagcaaagcaggacttgtatctatctatctatctatctgtctatctatgccacaatgaaaactgttaactgttagtgttagggtgtatgtctcaggcaaaaagaagtgaaacctgggagtgatgtctctgctgtattatctatgtatgtgc

SEQ ID NO: 442657 - DNA, 372 bp, Triticum aestivum
ccggtcagaatatcgggtcgacgggacacaatatgattttgtgtggctcctgcagtcatatatttgtcgattgttgcttcagacgagtatacatacaggctgtgcaccaagtggcacggtatagatgtaaggagtcataggccctcgggacgggggccaaaattttgcaaatcttgccagctgctggaaatttggaagtgtgtgctgagtcatctgtatcgtaatatccatgtagctgatgcatctataggtgtttgtaatttttttttgttgggtgtagacttgtatttagaggatggttatgcctattgtgcattggctgtctcgggtttagaactcgctcatataagtctccaaactcactttgctccg

SEQ ID NO: 442658 - DNA, 418 bp, Triticum aestivum
ggtcaagaattaacgggtcgaccactcaatgacttagaggaacctttaggattcctccgcattaacgaaggaccatttcccggtcatgtacatacgtgcaccatattcggacgagcgcggaggtaccaggggctatatagtagccccactgtcaaactcctatggctaagtgaaagtgttaaaccaatatagtgtgattgcctcgttcgctgcgctaccacctccttaatggaccaacacgttggatcaagtgtgaatacgcgttttttgcaaacacccccgcattatatgcgtgggggctgaagccgacgactgcaaactttcaggttatatacatatatacataaatggccacacaggaggcatcataatactttcaggcaaaagtataaacacagcctttataactcaataaaac

SEQ ID NO: 442659 - DNA, 249 bp, Triticum aestivum
aggtggtgcggatcatgaaggtgtaccgtcccatggattctcatagacacaccggtcatgggtatcgacgattactttctgcagtaggaacagcatatggctagcagtagcatcacgaacctcatcttgtgtgatctacaacttcacgactgccagcttacgtagacgaccattgtggacgagcctgcgacttctacacgtgcgccaggtactaggattcatactcctacggatcatacgtttcctcct

SEQ ID NO: 442660 - DNA, 316 bp, Triticum aestivum
gagtgagtaggattcctccgctttaatgatagaggaattccctgtcatgtacataggtgcaccatgttcttgtcagcgcggctgtaccagaggttatacgatggccccactagtaaactctcatggcaacttgtatgtgtttagccattatgctgtcattgcctcgcgtgtcgtgctagaatctccttagtcgtccaacacttagttgtatgtgtgaatacttgtcttttgcatgtacccctgcattatattccttcgggctgaagccgtcgactgctaagtttcatgttatatgcatcattacatcgttgggcac

SEQ ID NO: 442661 - DNA, 338 bp, Triticum aestivum
aagaacccctgcgtcgccacctgcgataagcgctgccccaacgagtgcatcgttatgtgcccaggttgcaagacctactgctgtaagcatatatacatacatcatgcgtatcacctatacatatattcacacatactagctatgtccatacaaattaagaagtcgagatgcctaaattaattacttaacatttttgtacgagtgtgcgacttctaccccggcatgtcgtgcggggacccacgcttcactggtgccgacggcaacaacttctacttccacggcaagaaggatcaggacttctgtgtcctctccgatgccgacctccacatcaacgctca

SEQ ID NO: 442662 - DNA, 365 bp, Triticum aestivum
gagcggcatactttcattgtcaacataacaaccaagagatggcgatatcttccatgctacacacattataagcggttccgaaacagactggtatagtttagactccccctccaccaacaagcatcaatccatgacttgctcgaaacaatgagtgcctccaactaacaatagtcctgtgggagttttgttagcaattaatttgatttggattgcataatgcatgtgactgggcatcacggtgaccagccattttctcatgagtgaggagccgagtccaatcgtcttgagaataacgcgcctagcatggacgatacagacaaccctaattagtacatgcactatacgagcatgcacaacataatttc

SEQ ID NO: 442663 - DNA, 377 bp, Triticum aestivum
cggctcatcgcatcatgcatgcttttcccatcccctttctctcgggctagctggctcagggtgttgccttgtgaagacaagattgtagttagtatgcatacatgagtatgacagaccatagttggagcacaacaatggcttccatatcgatgctggccacaagaacgagcacagagcataggccatggtgctggcctgctgggagccttgcgagggccaggcacgatgccacaccacacgcccaagctgcagcggtagtgacacaggtgcacagtgaggcgaaggcgatgccgaccggcatggtgatgccgagcacaggcaaagaaaccctatgtttcaacacaaggcatacatcatgtaaatgtttcgctcgaaca

SEQ ID NO: 442664 - DNA, 315 bp, Triticum aestivum
aaggccgagtaggccagtaggagaggacagatctacgctcccgagactggtaataataaaggcggtggattttgcctccactcggtgatgtattcttccttgctactgatagtgatttagtgcactgatatgttcttcaaaaaaaaaaaaaaaaaaaaaaaaaaaaaaaaaaaaaaaaaaaaaaaaaaaaaaaaaaaaaaaaaaaaaagaaaaaaaaaaaaaaaaaaaaaaaaaaaaaggggccgcccaaaaggttcaaacctaacttacccttgaatgcaacttaaaacctcttcaaaagggtcaccaaaatta

SEQ ID NO: 442665 - DNA, 374 bp, Triticum aestivum
agagtaaaaggatcggccggacaagccttgttcaaatctgtgtattcaacacacatgtgccaagtgccgtttttcttaagaacgagcaccagattagccaaccactcagggtgaaatacttcgacgataaacccagcagccaacagtcgggctacctcctccccaatggccttgcgtctttctttgttaaagcgacggagaaactgcttgaccggtttaaacttgggatcaatattgagagtgtgctcagcaagttccctcggtacacctggcatgtcagaaggcttccatgcaaaaatgtcctggttctcacggatgaactcgatgagcgcgctttcctattttggatccaaattggtgttgatgctaaactg

SEQ ID NO: 442666 - DNA, 367 bp, Triticum aestivum
gggccgacggggtccggaggctgataggctcaagcctcccgtggagccgtgattttcccagttgatggatctttcctgtgcacgctggcatccaggtcggcaacgcgtgctgggaactttactgcctcgagcacggcatccagcctgatggccagacgaacggtgacaagaccatccggtgattcgctgcttgcaaacaacagctagtaaatcggtcaccgtgggggcggggacatgagattcagagaagagatgctgctgcctgcctatactagttcatatcaggctcgtccctggaccagatgttcaagtacagccccatccaccacatcgacctggagtcagatgctgggctttcatgtttcct

SEQ ID NO: 442667 - DNA, 175 bp, Triticum aestivum
tggcagaacttttatgcctccttcgcattcaggtacaggacactgatgaaggatatgaccaagatccagcatctacagggaactggaaagctacctcagcatacgatgtatacatagtggacacatcctataggaatgtcaacgaggatcgacagggtgcacagagggatccttc

SEQ ID NO: 442668 - DNA, 352 bp, Triticum aestivum
gacgctgacaagctcgcccgctacaacaagaagcccaccatcacctccagggagatccagacctccgtacgcctcgtcctccctggggagctcgccaagcacgccgtctccgagggcaccaaggccgtcaccaagtttacctcctcttagatcgcgtcgcctgtatctagtagcaaatgtagttccttgctgttggcttagtgcttgtctgtggactctggttatctgcaagtaatattagtcctactgttggaaaaaaaaataaaaatatatggtaaaacatcaatcaagacacaacaaggaaagcaataacaagacatcaatatatggaactgcccaaacaatcaagaac

SEQ ID NO: 442669 - DNA, 350 bp, Triticum aestivum
ggtcagaataaccggtcgacggttctatctgatattgctcgactttgactccgaggacattgatggtatggacgcctgatgagagatatgaccaagaatcagcatctatagggaactggatagccacctcatcattgtatgtaaagatggtggagacatccataatgtatttcatcgatgatcgaaagggcccatatagggatcgtacccttgaaaaattatcaaagctgcgatacatgcgtcatgtacatcctcaactccacgtagacccaagcagtcagcacggcgatactgctgacgcataattcactattgagcaatcgtccatcaaagctatcaccggaaaatat

SEQ ID NO: 442670 - DNA, 362 bp, Triticum aestivum
ccgatctggtgctcatcctggaagaagcagaccctgttaggttggtgagatggatgagctgttggcagctcacacaggacgatgacaagaacctactgaccgcgaaggcgagaaggtcagagaaggagcccagcagagcaacaatcgaatgaagcaggacatctggtaggtcttcccaatctttatgtccagacatggcgaggacgcaacacacaacagccctttcttgcgttctgcaggttgcagcttcccttgaggagtgaatatatatggtatatcttccctcatgaccctacagggacagcatcagaagacatgaacaaataactctgagcaaaatgtgatgacacaagaatcatgac

SEQ ID NO: 442671 - DNA, 374 bp, Triticum aestivum
gatcttgtactactgctcaacagggaggagattggtgacaatggagttgtctgggaggttgaggtaaagtaggacttacatcctggggagtttgagggtaaaaggatcaagatttactacagttgcttcacaactgcatacttggtccagaaatgaagatcaggatgatgcactctcatgaagcatcaacttgagctcaaattgggcagggcttagtcattaggtcatatgatgatgctgtaaaaagatcatgctaaatggaaaaaccaaaatagcacttgcttcacaaacatcatttctgtccagaaacttggaataattatggtggtcaaatggatcaatgaaatgatgccaaaatgggtggagagatgttt

SEQ ID NO: 442672 - DNA, 380 bp, Triticum aestivum
  unsure (1)..(380): unsure at all n locations
tcatcaatatgggcgtgggtaacccaaccgcttctaagactcttagatcataggcaagtccaaacggacacggataggacgttcgatatccaccctctttataaagggacgaggccttttatttttccctcccgtgctcaatcgaatccttcccccacctcaagctcaaatgcccaaagttcaggtcaggtgctccgaaccttcagtcatgtccggatctagccttcaaggccgatgggtgccttcttccgtcacggaagaagtcgtcaaaacgttgagggaggccagatatctgaccgccgagattctgcatcgactgcctccccgggggcatgccatcncctcctccgaacccaacgagagcgtcgtgttcgtctccc

SEQ ID NO: 442673 - DNA, 450 bp, Triticum aestivum
cgggtcgacggggggacggacgaatcgagagagatggttgttgtgttacggatgctcctctctctgtctctctctcacacacacacacacgcgcgcgcgcgcgcgcaagtaaactagaagaccgttctctcatgtacacacaacgtatcggcatctgtctatgtctcactcatgcatgatcatttgcacattcacacctctctatgtatgtatcacacacacaccgtctccacactgcccttccgccacaacacacatatggacacatacacacgttctctctcagtcacacacacaaaatcagtattaaaaaactagggcgcacctaaaacgtccaaatccaaataaacacgaactgcagctaaattcaaatatatggaaatattgcagcgtcaagaactttcacaggaaaaaagttgagtaatactcgaggattgtttcacacacaaa

SEQ ID NO: 442674 - DNA, 357 bp, Triticum aestivum
aggaggaccccgactcggatgacggctgctgaaagatcacgcacttcttcggcccacagagcggctccgcttatggcttatccaaggttggagcttcaccggcgccatggttgtgctcggaggaggactgccgatgctcgccgctgctgtcgtccacatgctcctcctcacgaccacgggtggacgttggctgaggtctagcctcccatccacgcgcagattatgcaagaatctgcttggtctgcatattagtaccgactagcgagcacaggaaggacgacttggacctgacgacttggacgttggctgaggtctagcctcccatatgcatatttgaccagtactacgcgcggcccg

SEQ ID NO: 442675 - DNA, 356 bp, Triticum aestivum
cgatagaggaaaagctgaggaggtttaggttgacggagatcagtcagcagctgcgtaggatggacctgatgaaggagacggtgaggatggtgctcgatgcccttgagagtgctgactgaataatggctgatcgatagtgattggtaaactgttggaagggggaaatcagtctttttgtttctagatagactatatgtggttaattacttacttccctggacaaggttgcagttgcctccatcaaaattaggcatagaacatggagtgatggtcttctccttgttattgttcatggatcattgtattttgggattcttaggtgctaacttgtggtttatatgctatttggttgtgtc

SEQ ID NO: 442676 - DNA, 424 bp, Triticum aestivum
ccgacgggggggacaggatgagaagatggattcaatggaagccaaacagaatttttcatgcgctggtgtgatgtacctctgccaattcatagagcaaagtggtgggaagctccctgaacgcctggaaggcattaaaccatcagcaaagcgatttgaaacaattggcatacaggggttgcaactagccatagaaacagggaattttagtgatttcagcaatgctgattccactgacaagataagcaggtccaactcgttgaagtctgccaactaatttttttcggggttggtgagaaatgtatccagattcgttacttagtggaacatttaaagggaaatccttgctggataaaatgtaaagagtcccagcctttttggtaattgccttcaggaaattccggttggttaaatttgaaaatgtgtg

SEQ ID NO: 442677 - DNA, 368 bp, Triticum aestivum
gggtcgacgggtcacatggtcgttccattccccgagccctcattctctccctcgcggcaggtgatgagtcgtgcagatgaatcccctggccctggtccttaaattgatatcctcccaaacactcaactctctctaataggattggatttggtagaaagatgatttgagtggaaagcaactcggggaaggctagagatcaagatttatgtggtaggaatggaatatcttaacctcaacacaagtgtaggtggttccctctcagaaaatgtatgttggaagtgtaggcatgttctgatggctctctccatgaataaagagtgggtggaggggtatatatagcctccacacaaaatctaaccgttacacac

SEQ ID NO: 442678 - DNA, 361 bp, Triticum aestivum
gggtcgaggggattattaatcttgcatgatgaaaaatgatgatattgttagaaatgattctggattaagtgaggtttgatcttaaccagagaagtatcttgagttgatgatggctcagtgggagcatggttgatttagttatttttatggttatgtgatgcatgggtagtgtgcatagcatggcattgtgacaccggttgttttcattttaagttgaacctgataaataactcaactggaatatgttgttgaccgggtcatggtgccgctgaaatgagtctttcccagtgcaaccacatttgccggtatgggacggccttaatgcgtttcatggtcgtgccattggtcggtgcctccattt

SEQ ID NO: 442679 - DNA, 270 bp, Triticum aestivum
cgggtcgacatgaatcttcacccaattaacgaacatcattatcaaacctaaaataaatccaaaaaatgcaaacaccattgtcaagtcaatgacttgaactttgatgggttggtttcatcacaagggacgccgtaaaaaagaagttccatctccttcggcttgcttggctgaatttgctacggatctttttttcaaagggcaactccaacgcggttcgttataacagacacaaaatgtttgagggcacgtctggaccagtgatagggcgga

SEQ ID NO: 442680 - DNA, 65 bp, Triticum aestivum
  unsure (1)..(65): unsure at all n locations
ccttgccnccaaaannaaaaggcccnggcccnnngnnaancgaatggaggnggctcntgtgggca

SEQ ID NO: 442681 - DNA, 364 bp, Triticum aestivum
  unsure (1)..(364): unsure at all n locations
cgggtcgacgggaactctcatcatgacgaccaatcgtgttgatgtccatgagcagattattgagagcatgaagaacctcaatgccagggcctacatgctagcaaagagcgtcgtggatccagggcatgcagcagcacagcaggctgctcggtgagaccaacagatgatctgcagctttgaggcggtaaaaattactttgggaactttgttgttaggcagtgacttcgttgctagtatttgaatcatattgctacagcttatgctgatgttttaaatgctttgtactccttttactcaagtttatcgtcctatgaattaatactgcaaaagacgtttaacgtanaaaaaaagaaaaggagaggtg

SEQ ID NO: 442682 - DNA, 387 bp, Triticum aestivum
gggtccacgggatcgagtcaaagtgccaccaaatcgagctttctccagtgcagccacatttgcctttatgggaggccctagctaggtctattgtcatgcctctcgccggtgcctccaactagggaaggttatgggcgcgcgctaccctgatcaggtaggcggacataagccttgtgagcccgagtttggttatgtgcacatgtccctttttgggaccgtttttgccacgatggtggtcgtaggtgactttggtaggcacggggccacccatgacttagcccaaaggggagttggtcggagtggccgggagagtgtcatggcagtaggtcagttttgtcggaacgccgttggtccaaccgaatgggagtgcaaggccatggggttcgt

SEQ ID NO: 442683 - DNA, 292 bp, Triticum aestivum
ttctaaatgcatcatcatctccgccatgcgtcgttgacttatggccatgacaataagggaatgctgtgtgggtattaaggagtatgttgggtatttgtttgttcactgtaaagaggaacacttcctttaatatccattgttatgtggtaagtggtttagtggtgcaaccataggatgcatgtgttctcatgtggaagggacagtgctaatggaaatgagctggtgtttagttaaaacagacgatctagacaatcaaaacttacgtacccatgcaaacaagtctcaaaccgca

SEQ ID NO: 442684 - DNA, 226 bp, Triticum aestivum
  unsure (1)..(226): unsure at all n locations
ggttnncaatgaatgttgctgtaaatgttgttgttgttgttgttgttgttgttgtcnttgctgttgctgttgctggtgcnattgctggtgtngttgttgttgttgttgctgctgctgctgctgttgttgntgttgttgttgctgttgatgttgctgttgccgttgttgttgttgttgttgctgttgttgtcgctgttgttgttgtatgntgntgttgttgntntng

SEQ ID NO: 442685 - DNA, 354 bp, Triticum aestivum
attatggttgtagaaatttttatcttattaaattacctctcgtcatgttgagattgctatcgtctctttcttcttccttgcatatgcttgtttttgcttgccttgcaaatttgtttgattataatatgcctatgcataggaagtatgttagaattagatgtgtttgtcctgtgtttcatgatgctctctttgtgcttcaatttttgtccttcatgtgagcatcattaaaattatcaatgcctagctaggggcgttaaacgatagcgcttgttgggacgcaacccaatattttcccttgctgttatttaataaatcttgcgtctaccttatgtttaaatgtttttttatctttta

SEQ ID NO: 442686 - DNA, 360 bp, Triticum aestivum
  unsure (1)..(360): unsure at all n locations
tctactactattactccacacatcatcggagaggctatggtgttgatgtagaagccctccatgatcaatgccccctctggcaggacgccggaaaaggccccaagatgggatcttacgggtacagaaggttgcggcggtggaattaggtttccgtggatggagcaacgtgggccccacgagggtataggggtacgtaggtatatataggaggaagaagtacgtcggtggagcaacgtgggccccacgagggtggagggcgcgcccaggggggtaggcgcgcccccctgcctcgttctctcctggttgatttcttgacggagactccanatcctctgaatcatgtttgttccgaaaatcacg

SEQ ID NO: 442687 - DNA, 349 bp, Triticum aestivum
gtctgcaggttcatgggagataaattacagaattacgacttgatcataggcattgttgtatcgcgaacgtgaatcgataaactcacatgaatgctctgtgttcattgcgatcaggcttatcaaagacttcgaaacgagttgtcaaagatgaggcaagcagtgttgatcccaacactgctaaatttctgaacgagaagaaagcagtcgctgatcaaagaagtgaactcttgtgttgctctgaaaaaaacaacatgcacctgaaaataatcgagttgatctttttgatgccccaagtggtgaagatgcctttggtgaagaaaatttcatgttagcatcacctatgtcaaac

SEQ ID NO: 442688 - DNA, 274 bp, Triticum aestivum
cactacccttcggtccactcgatctctgctgggttgcgtttgatgtaaggagcagtctccgcaatgtatcattccatacggatgccgtttgaaataccttttccgccactgacatcagataagcattctcacagcagtttgcactgcgcctttgtgtagtaggttagtccgataagtaatagagaactgtaggagaacacccattacgcatccagcacagataatattatattaatgtagaatctcgtgttatagatactgtcgtgtcattgtc

SEQ ID NO: 442689 - DNA, 341 bp, Triticum aestivum
acgggtgtatgataacttgattagggatgttgcaaccattaattgctccaaattctcctggccaagtgtgttacaggcgagacctcgctgacttttggaaacctgtatgtctgacaagtgtctatacttgctttgttacatgtgtagaatgcattctttgcactctcaataactcgacgatttgatctgatcaagtgaccatgattgtagtgctcaacccatgattctatcttgtaggtatcattaccacacaacttcatgtccataaaacttatagaacttctcaacagcctgtaatccttcaaatatcatgcctaaattaggcttcaaattctcttcac

SEQ ID NO: 442690 - DNA, 380 bp, Triticum aestivum
gtctatccacccgtccatggatggtgcaattggctctgaattgagggtcggagcggttgtcggtgcggtctcctggacactgtccgatggtagagctaaatcatgctcatcgtgaccgtgcggcgcactcggcaggggctcgaatccgtcgaagatgaagtctccgcggatgtccgacgtgtagtttaagcttccaaacctaacctggtggccaggggcgtaactctcgatctgctccagatggccaagcgagttggcccgcagtgcgaagccgccgaatacaaagatctgtccagggagaaaagtctcaccctggactgcatcgctatcgatgatcaaaggagccatcaagcctaatggtgacgacacagaggaactct

SEQ ID NO: 442691 - DNA, 340 bp, Triticum aestivum
ttctgaaacctgggatgcgcaaggaagctgacgagcgggaggccctcacgggccgcaccgctggccgaccctgatcttctgtgaagggttcgagttggagcacgcctgtcgggacccgaaagatggcctccgcctcctccgggatgctgcacgacgtggctcccctccctcgtctgctgctgccgccgaccttgtcacgtcctttgtggccatcggcaacttcgcaaaggtgtctgagacgctccacctcatgatctctgcgggatgtcctccagctacgtttgtctaccagcgagatcaagctgcgtggttatgccatagatgtagtcacttacagcac

SEQ ID NO: 442692 - DNA, 399 bp, Triticum aestivum
gtacgtagggaagcaccgcctctccgccgccatccagcgcctcgaccaggagctccagtcactccaggatgaattgaatgagcttgaaaccatggaacctgcatctgcggcatgccgggaggtgatcacaagtactgaaggaaagcctgacccgcttcttccaatcacaagtagcccggagaactcttcctgggacaggtggttccagcgcgtgcgaagctcccgcagcaacaaatggtggcaatccaaaggctccgattttgcctagctttcgccgaagctgagacaagctgtgtgcagattgaatctcccctgatccgtatggtccatccatggatggcttggcaacagaatacaacccagtttttcctgagaattgttgtgtatgtaatccctaac

SEQ ID NO: 442693 - DNA, 395 bp, Triticum aestivum
cgggtcgacggggaagatgaatccagcgagcaagggttccagaaggctacgggggccatgtgcgtcgatggtggcgtgtcgctgcatacttctcaacgccagctcaagcagtgggcgcgtgagattagaggagcggcgccatcgttcgacgcttagaagccgctaaagtggtccagcacgcccctcatctttgatgccgaggaccaccctcaccgcacagccgcggtcgggtgtttgcggttggtggtcccgccaacgatacgcaacctcaaggtgaacaagatgttggttgacggcggggccagccttaacttgatctcgcccgtcgtgatcagaagactgcaaattcttggtggagaccttgatgaaacgggcacgtttcgaagggtcaatcc

SEQ ID NO: 442694 - DNA, 475 bp, Triticum aestivum
  unsure (1)..(475): unsure at all n locations
ggnnnnnnnngnaannttgcttcgccaggcacggtcaagaatcccgggncgacgggggaaatgggaacagcggcttaagccattaggtgtaggcgctttccagaggtggaagatttacgttcttcctatttgacccgaaaccgatcgatctagccatgagcaggttgaagagagctctaacaggccttggaggaccgaacccacgtatgtggcaaaatacggggatgacttgtggctaagggtgaaaggccaaccaagatcggatatagctggttttccgcgaaatctatttcagtagagcgtatgatgtcgatggcccgaggtagagcactcaatgggctagggtggcccccatttcgctttaccaaccccaaggaaactccgaatacaagccgtcatccttagtacanacagactgattggtgctaaaattcaaagtcnagaagggaaacaacccaaattcgtaccctaaagg

SEQ ID NO: 442695 - DNA, 379 bp, Triticum aestivum
ggtcgacgggccttacgaacggcgatccggtgagccgcctcatgcaaacacggaagcagaatgacagcatttaccgtcgctttgctgaaaatgatttcacaggcggcggtagcaggtctggccgattaaacatggaaataacgtggacagcggctctgcgagtaaagatagatgttctacgcatcacacccaaggagaaaaagacctttgtgaccgttaaggacgtcaaggagaacaggaaggcccgggcttctgctggctgcttggaggatcgaaaagggcggtctcgtcttgctcggtatgccggtgaagcaacaggggaacacatggggcgatccgccagcaagattggcctcaaatcaattgtcgtgaaagtgaa

SEQ ID NO: 442696 - DNA, 428 bp, Triticum aestivum
cgggccaaatcaaagaaggtgcaaacataataaccatctaactgaagttttagctgacgtgtcttagacatacatatgctgagttccggaatacctcttgtacatccgccactgagcattgcagtgatcgtagaaaatcttttggtttacatacaccatccgtgaaaccttgtaaatagagaagtggatggtagagtgagtgttcatattatctataatgtcacttatctgatcaaggcaaaactgcggaagttgaaatgtcagaactggaatcgtcgttggtttaactgaagacttagaccacaactgtcgttgacctctttaatccatgtggctgccgtatgctaagaattattacaccgtccaagtgcagaagtgcattccccgagggtaggaagttgtatgggtccaaaacacgtctgagtgga

SEQ ID NO: 442697 - DNA, 406 bp, Triticum aestivum
  unsure (1)..(406): unsure at all n locations
ccgggccgacgggtaaggaactaaccagatctaacgccgaagcaccgctgcaactccttgagcagatccgggcaaggcacgaagaccggattgccgcagggctaccttctgatgcggttgatccggaggaggacttggaggaggaggaggagcatgaggagaacgtgggggacactggggccgtggatctgtaggctgagcaataggcgatcctcgattccctctggtgggaatcagcgacgaaggccaagcgttgtcttctgcacgaggtggaggcggagcacgccacagacgttgacaagatgctcgctgatatggatgagaaggaggatccggagccctccaacgtgcccaactacncggcaccggcatggacgtcgtggacatctccgctgaaagaacttag

SEQ ID NO: 442698 - DNA, 400 bp, Triticum aestivum
acgggggagagagagaggaggagacagatatttcccccgaggtcaagtcgtctcgtcccgtgttgcctttctcctcctccccgcattcgccgtctgcggttcgcaccaccggacaagctcacacatcaagacaataaatagagccttgtctgtttggggccaatcaaaccaaacaacaagttcatgtctgatctcgacgtccaggttccaactgcttttgatccgtttgctgaggcaaatgctgaggactccggcgctggtgctggatcaaagaactatgtgcatgtgcgtgtccagcggcgcaacggaagaaagagtctgacaactgttcagggtctgaagaaagactacagctacaacaagattctcaaggatctcaaaaaggaattctgctgtaatg

SEQ ID NO: 442699 - DNA, 425 bp, Triticum aestivum
gggccacgggggcagcggaggctcgcgccgcgattttcgggcacgcggtgaacccgttgggaaagcgcgcggcgacgaagctgctgcggaagaagctcatcggcgagcatgtcgcgcagtggtaccccgacgacatcaagcgcgacgaccccgaagtcatggcgcgcgaggagaaagagcgtctcgcgaagctggaaatgcttaaacgtcgtgggaagggtccgccgaagaagggccagggaaggcgtgcgatcaagagaaacaaataattgccttgcttctgtttaattttagtactgatctggcagctatgctgaaatatttgctgcgaaactaccctctgtattctctctctaaaaaaatctaccctttgtattaggtcagtcatgcttcattttgtcacggatttggcaatgatgggtttg

SEQ ID NO: 442700 - DNA, 75 bp, Triticum aestivum; identical to SEQ ID NO: 442016

SEQ ID NO: 442701 - DNA, 399 bp, Triticum aestivum
ccgctaactgtccggcttgacggatttcctcgcgtgctgtgcaggattcggaccgtgcctccttggcgtcttgaagggccttggcgagttcggtccctttcgccttatgttcttcttctaaggactcacacttgcgggtggtgtccttgagcttctgctccacctcggtcacccgttcctcaaaacggcgccgagcggcctgttcggccgttatgtccgcagccgctttatcagtgacggccttgcttaccctcgcttgctccttggcttgtgtaagctcacccctgagggtctcaaccacggcggcaccatctgtacaaacacacatattgcggctcttgaaatttcgcagcacacggacataaacatgcattaaataagatgtgtcttgtaccttgc

SEQ ID NO: 442702 - DNA, 368 bp, Triticum aestivum
cgggctgacggggagcgtaaagtagcactgctggcatcgggctggaagtttgggcgagcaagccactccagcgaagaagaaggacccgattgcttttccattttatgttttagggtcctttgtgtaaattagggtcctttgtgtaaatttgaaggactattctctaactttagttctctggcggtcctatttacactttgtactcactaatgatgaatgaaaggcagttggtaaaaaaaaaaaaaaaaaaaaaaaaaaaaaaaaaaaaaaaaaagagaaaaaaaaaaaagagaaaaaaaagaaaaaaaaaaaaagaaaggaaaagaagaaggagaaaaaaaaaaaaaaaaggggccgcccaaaaggtt

SEQ ID NO: 442703 - DNA, 450 bp, Triticum aestivum
gggtccacgggtcggctcgatcgacttcaatgctggtaggtggctagccgctgcgacggtgttaatgtggcgggggtgctagagctggcaaaggtttgattgtcacatgcgatgtggcggacctccgaactcccgaagaccggccttcggtttaagccgaccgggggaatttcgaacatgacaccgatccagcccaaaatgagagtccgcgttggtggcctaaaaatgttaggatcatcatgtctgcacttgttgagccgggttggagatgccttagtcaaccgagatcatcatgtccctttttacttcacaatgcaaaattaatattatttgattcttcatgaacttaattttatattgtattactttattgtttttgatgttaatttattttacataaatatatagttaaactttacgaagtttaacttgagacacaaatcttatata

SEQ ID NO: 442704 - DNA, 418 bp, Triticum aestivum
  unsure (1)..(418): unsure at all n locations
ggtccacgggtacactatatgttcatcaccgggagcatgtaaaatgtttgcatcaaatccttcattagcagtctgttcattagacacttcaggctcaagaacaacatgagcttgtatgtgttgcaccggaaacttgattagatacatcagattcagtcagttcagtattgattgggggagttataaaataagcagaaattggtttcattttctcatagattccctacatacaaccagaaattgaacaattgaattagatagaatcggcgatgtgatgtacctgctcgttgcgcatgctactcttgcaagctgcgactgtccgtttgtgcaagctcgatgccatgctcgtgctgccgccgctgcctcccatgcaggttacacctanggttggatcntcatcttcntgtccttccgttca

SEQ ID NO: 442705 - DNA, 382 bp, Triticum aestivum
gggccgacgggacatcgccacaggcctcgggcaccccactacagggcctcgacgtgcgcgcggatccggtttgccgaggcggatggttgcccttcccaggtgcattaatcgcgcgctataaatgcgcggaatacatggggtcgtgtgggggcatgggtgtagttaaccccacgccccaacgatcgtcgtttcggtttcgccgccgccgccacgggtataagtagggggacggtgcacggctagaacgcctcgtgtcgctccccgctctccatcttcttcttcctttgtctcccctgctccctcgctaccgccgtgctgccacgccgtctaagcgccgctgcagctccccgtcgcgcaatttctctgcatcaccatggccttg

SEQ ID NO: 442706 - DNA, 383 bp, Triticum aestivum
ggccgccaggtaatagggacgacggagcggttcactagccaaatgccgtgggctagaagtaatttccccccgaagatcgatcaaatccggagcagaaatagcagttcggcttccgttgcccatctcatatactcgttaaaactataccacacatatataactacgcacttaagataccatgggcattggcggaagcgtaatacggacaagtctgcaagcactccggtaacatttttttctactttcctttttctttcttcattacctcttaaaaacaggtggcgcaaaggagaaacatctaaaaccgactctatcggagttcagatctgtacactcacctacggggctacttccttcaatgattccccttgccgaaggacggc

SEQ ID NO: 442707 - DNA, 288 bp, Triticum aestivum
gcatcgtaaacggtgccctgttatgtagcgactgactacaatggtaggttgcgtacgtccttaatacatcactactaggtgcttatgttacttcgttctgtccggttattagcactcatgtttactttcgcactgagaactgaaaaactgaatgtaaatttagtatggatgccgtgtatgtggaccttgtgttgtaattccgtttaaagcactaggcgaaaaaccaaaaaaatatatattatgcatgtaatcctcgagcattgactattaatgtcttctgttagctat

SEQ ID NO: 442708 - DNA, 55 bp, Triticum aestivum
gacgcgagcgtggacgttgatgtcgcggattttagcaggatccacaatgaagggg

SEQ ID NO: 442709 - DNA, 329 bp, Triticum aestivum
cggggtgagtgtagtgaggtaggctgctgcctgcctgcctgctggggctgccagcgtttaggtgcgtgtgtgtgtgttgtagtagatgagatgatatgagatgagatgagacgagacgggacgggaagccattgcattgctgtagtgactgatttgtctgtaaaaaaagaaaataaaattaaaaaatggaatacacacaaaaaaaactaacataaaaagggtaaacaattaactgttgggcaaatgattaaacttcagattatcatgataatatccacgcaaaagatcattacacaggaaccacgtcgaagattaaaataaacgccccc

SEQ ID NO: 442710 - DNA, 325 bp, Triticum aestivum
gatggaagacagcaaacatatggagcatgcggtaatggttatcactaaggccgtgattctggtgcactacaaatctgcgtccggatacctgatcatctaatttgtgagttcagaatgctcatggagaagttcctcgatgtgtactactcgtactgcctcacgcatacaactcgcatcctcgtaacgcctctaaatgccctggtgctccataagtagcatcctctgtggggcctcaccatctgactggacgtgttcgtcgtcctaaagaacacactggacgacgggttggcaatgtcaccgtgcacggagctggtcaacgacaccg

SEQ ID NO: 442711 - DNA, 391 bp, Triticum aestivum
aaatattttttgggttttctttttaattattactacagcaagaaaagtaaactaactaaaagctacactaattttttttggttttcttaaggtttattaaacacagaagaagaaagcaagaaaaagaaactaaactagcatggatattacagtgaaagagtatgagcaccgacatctaacaatgagtgtgtgaacataaatgtaatgtcggtgggaaatacgtactcccccaagcttaggcttgaggcctaaggatgtttattgccacggatggcctggcggatatccatagttgtagttggggtcgtactgagatgcagtggtcattgcatcgtgtgctgcagcttggaggcgagctctctcagccctcctcctatactctgcctcctct

SEQ ID NO: 442712 - DNA, 64 bp, Triticum aestivum
  unsure (1)..(64): unsure at all n locations
tgnggngnaactgtctacttnngncgggcctnncncanaanccaaaangggccgggnccacggg

SEQ ID NO: 442713 - DNA, 448 bp, Triticum aestivum
  unsure (1)..(448): unsure at all n locations
ggtccacggggaggtttgatggtacaaaagcaagctggagacagtaacatacaaagtgctccatcagaagataaggagctcttttttcgtagtcagcactcaagtatgatcaatggtctgcatggtatttaccaagcgtatgggccggtagtgaggctagcaaaaaggtggatttccgcacatctattctcttcatttatctcagaggaggcggttgaattggtggctgcctacctatttttgaggccgtttccattccatgccccctcttcacgggttactgggttccttaggttcttgcggttgctatctagttttgactggaccttttcacccatgattgtggacataaataatgacttcaacctgaaggatgagaaagaaatcaatgaaaactttatgctgagcagaagatcttatgaacanaatcctcatgatatagagcctg

SEQ ID NO: 442714 - DNA, 230 bp, Triticum aestivum
gggtccacgggacatttgaacggttctgtcatcatggtggagattgttcatgctcccaaaatgagttgcgtagaggacaactggacagacaagtttcttcgtagtgttttcgtaggtatctttcttcttgttgttgctgctgctgagctgaaagcctgagatggtgatggaaactggaaaccgtacattgccgtgttgcctaaataaagatgatcgctgagttttacgtg

SEQ ID NO: 442715 - DNA, 391 bp, Triticum aestivum
ccgggccgacgggtatggcaaatctggagacaggagaaggtgagatcgagagagagctagggttttccccgaatcgggctgaattggggattttgaccagggaggggatgcacaatttgcaaaaaaaaccttcacaattatcctgacagtgggccatacgctgagtcagcaagccacgtcggccccgtaacggctcgcaacagggaagtgacacattcgctcataaagcaaaccaaattgaccaattctccacattttgagacttgtgtgaccaacgtgctcatcttgcgagagttcagtgacaaacggtgcgtttatgtctttcataaaacacattacaatcgggaaattgaaatattatatttcacttgtttcaaaaaactgattacac

SEQ ID NO: 442716 - DNA, 417 bp, Triticum aestivum
agatgatgaaccgggcaatgcacgccgcggcgaggggcgacgacctgaagatcctcaaggagctcctgcagggttgctccattgctggtgcgtaccaggacgcccagggcgccaccatctttcatgttgctgcttcaagggggccaagttgaggattgctgctataagttggtcttatgaacattcaacatgccatccaggttgtaattctgcttgtaccctccccttcttcctacatctcaattccctctcccatgcttcttttctctaagagctctctctttcttcaattttttctgcagagagatggccatggttgcccgatgcccgagcgtcgccggccaaggacccgtcggcgtctagacccctccacgccatcccatctcgccaaagacctgcaccaagtcccgtccagag

SEQ ID NO: 442717 - DNA, 408 bp, Triticum aestivum
ccgggccgacgggtatcccatggagtaccgttttccggtacgccacacccctcctgatgaacaggacccctgtttcgaccgaagcgctccaacacaagtccatttcctccgttttgcggtacaccacacccctcccgatcaataggaccccatttcgaccgtaggaggtccaagggaagttcgtttcctctgttttgtggtacgccagacccctcctaatgaacatgatcccgtttcgattatggtcggtcgaacacaaggccttttcctctgttctgcggtacgccaggcctcatttcgatcggttgttccatccaagccagttggttcccgatgaacacgacgtattctgttgcctcccgatgaacatgacgcattctgttgcctcccgatgaacacgacgacaat

SEQ ID NO: 442718 - DNA, 444 bp, Triticum aestivum
  unsure (1)..(444): unsure at all n locations
ggtctaccattcccgggccgacgggcccggaagagaccacggacatgacgagcagtctcaatatggtcgggacataaagattgatatattggaccatgttattcggacaccggaagtgttccggattgtttcggataaaacaggagtgccggaagggttaccagaaccccccggggaagtaatgggccttagtgggccttaggggagagagagagggcagcagccaagaggtggcgccccccaaggggagtccgaataggactaggggaggggggtgcggcccctctttccctctccctctccctcaccttccttcttctcctacttggactaagaaaagggggagccaattcctacttggagtaagactcccacccttgggcgcgcccccctaggaaggacngccttctcctcccctctttatatacaatggagggggcaccc

SEQ ID NO: 442719 - DNA, 59 bp, Triticum aestivum
gggccacgggcctcatccaggtcatcagggagctcctgcctattaaggtaggtcaggcc

SEQ ID NO: 442720 - DNA, 382 bp, Triticum aestivum
ggtccatcaaatatctttcatgggtatgatggaaaggaaaattgtggcaaagtgttagaagaagaattacatagaattcttggcataaaatatttgaatgatgagcatgattgcaatgttgttagtatgaattccttgaatatccatgatgctaatgatatgcaaagccacaagcttggggaagctatgtttgatgaagatgatattttttctcccccaagttttgatgagaatatttattatgatgaaagcatgtctcctatttatgatgattattgtgagtaaagaataatgataaccatgaaacttgttatcttgatcttaattttcaatcacatgatagttattttgttgagtttgctcccactactaatgatgagaa

SEQ ID NO: 442721 - DNA, 397 bp, Triticum aestivum
  unsure (1)..(397): unsure at all n locations
ttgnnaattcccgggtcgactttcnctccanctttggtaccaggatggattggcctttgtgtanncggcgagngtgatgtctgctgtatgntgttgttgttgttgttgttgntgttgttgttgttgttgttgttgttgttgttgttgttgttgttgttgttgttgttgttgttgttgttgttgttgttgttgttgttgttgttgttgttgttgttgttgttgttgttgttgttgttgttgttgttgttgttgttgttgttgttgttgttgttgttgctgttgttgctgttgtngttgttgttgctgttgntgctgtngttgatgtngttgttgatgtngttgtatggatgtttgttgttgttgttggtgtngntantnggttgntggtgttggttgg

SEQ ID NO: 442722 - DNA, 437 bp, Triticum aestivum
  unsure (1)..(437): unsure at all n locations
aattcccgggccgactttcgatccatctttggtaccaggatggattggcctttgtgtacgcggcgagtgcgagttctgcttaccattggcaggggaaggaagggaatggcggcgtgtgtagacagttttttctgctgaatcagcgctaagtctaggtgatatctgtccccgcagcttcgcctttgcagattttgttgcagccatgtagctgggcacagctggagagtttttggagccgttctctggatattctggcttcgttgagaacgaagacctcctgttaccacctttaaggctttcggcggagagaggttcttctctggatctctgctccgcatcattcaccaaagcattttcttcattgtcaatgtcttgcangggcataacttcagctgctgtagcaacaacggtcggctcatcaagtttttcttcacttg

SEQ ID NO: 442723 - DNA, 356 bp, Triticum aestivum
gggagtcatgttcatccaacctcagtctgctcgatggatcagagtcatgtacatcaaggaggtaatcatcatctgggttccctggttcattccactcccgcatctgggtaagtatgtccagtccacgtcccacctgactaactcatcacatgttcatccataggcatcatcaattggtttcagttaccagcagtagtgaaggaattgctcgatcgggttcagttaacagccattgatcgatcgctcgggttcagtaacgcgtagcctgcagtgcaatcgcttgggttcagttacagcccaatgcctcgctcgggttcagttagagccaactcctcgcacacacgcgcgtatgtgta

SEQ ID NO: 442724 - DNA, 344 bp, Triticum aestivum
catagaaagtaccaagacggaagatgtcatggcgggcatagaaggtaccaagacggaagatgtcatggcgggcatagaaggtaccaagacgggagatgtcatggcgggcatagaaggtaccaagacggcacatgtcatggcgggcatagaaggtaccaagacggaagatgtcatggcgggcatagaaggtaccaagacggaagatgtcatggcgggcatagaaggtaccaagacggaagatgacatggcggacatagaaggtaccaagacggagaatccaagcgacgaataaatcagtgcatgaacggagagtagatatggcgccacttctttggtggccctga

SEQ ID NO: 442725 - DNA, 391 bp, Triticum aestivum
ggtttgatgattggagtgcgtccaccagcgccttcacgtcccttgctgtgcagagcactccttccacagctactgccaatgcataccattacagcctatctccttgctatgcttcctggacccattacatgcttaacaagaatgcatatagctactatcctgcacctaatcaggagcacacccaccctttcagccttgataacaaccaggctaaagatccaggttctatacccagctttgggattgagtcatttaatacaacatccctggcaccaaacatgtctgctcatatgcctcccatggaaggacccctacctacaaaggaacctgaggctccagaggacatgcctgctagagtagctacaattaatgattaaatggatgccaaaaa

SEQ ID NO: 442726 - DNA, 275 bp, Triticum aestivum
tggcagggtcatatcgactccctggccggcgccgcagctaggccgggtggccctgtcagttgatggctcattcctgaaggaggatggctctgcagctgtcggtatggtgcttataaacgacaaaggagatgttcaaatggaagcctaccgcttcatcttctactgcaatgacccgctggaagcagaattacatgcgatcatgcagtgtttggccctatcaatacaacactctgatttacgggtggtggttcaatcggactcggctgaagctttgt

SEQ ID NO: 442727 - DNA, 388 bp, Triticum aestivum
accgatacagggatgacactgaagcacagagacttgaccgtttgaggtcgggtcgctacaagatggtatcagagcacacactgagtgtaggacacgaccactaagctacaaccatcgatcactattctcttctcatttttgactcctctccattttctactctttaggaaggtggatgcaaggaacaagtttacacaaccggaggaagaatcaccttttggacgacacctgaaagaagtcactaggtacctgaacattggaatgccaagcttcaccgggacttacaatgccacattaccaaaagaggagcgatggatgattcaagttcaagttccaggaaggaccttcacggcagtcactaaacccatagagttttccttcgatgcac

SEQ ID NO: 442728 - DNA, 378 bp, Triticum aestivum
gactgctaccccagataaaaaaactacagtaacacacccaagcggagacatgctcgagacctatgccagctagccctgttcggtgcatgtacgggcaggagcaatttaaccaaaaactgaaaagaaaagggtcgcgctaactgccacacatgtggcagaaagggagacgcaccacacgtctctaatgtaaacagattgccacgtcatcgcatgcatacatgtaggaatatttttggattttcagtttttaaattgttttatctcttaaacgaaaaatccgactgaaaatccgttttcaccattaaatccctcacgatgagatcttcgaaactagatcccatgttgatatgttttgatgaaatttttttttggattaaa

SEQ ID NO: 442729 - DNA, 355 bp, Triticum aestivum
  unsure (1)..(355): unsure at all n locations
ggtcgacggcgcaagctatctggggaaacataaactgatgcatgtgttgaccccttgacgtgttgttaaaatctaggtgcttttatgctgaggtatcattttagtttctgactgcatgtggtaacaacctactagctgtatttagctccatttgatatgtttgttttagaactttgttgaagcaaggtcttggtggcactgtgtcagaacgcagcanaaaaaaaaaaaaaaaaaaaaaaaaaaaaaaaaaaaaaaaaaaaaaaaagaaaaaaaacaaaatgaacaaaattaaaaaaaaaaggaaaaaaaaccaaattaagccagctaagaatgaaagaaaaaaaaacgggccccc

SEQ ID NO: 442730 - DNA, 378 bp, Triticum aestivum
tgatggcgatgacgccgataaggtaaaggagaagatgggggaaggggaaggaaggcctcccctcctctggctctggcctgtgggaggaactctccgcccgcgggctgctgctgcggccgcgtgtctaccgcctgatcggaactggatggctggataccggtcttcatatgctaccatgatacggacgtctgaaccgttggatctcagatccgacggcatataaggagttgttgtacctgcacgcaatttcaagattcttcgatgatttttttgtaaaatgtttaatagctcataggagccgtttgatctgatatccaacgttaccaagagcccgtatcacggtatcacctaaacgttggtagcacatgatatttcccc

SEQ ID NO: 442731 - DNA, 391 bp, Triticum aestivum
gggccgacggcgaccccaaactccgcatcactgttcgcggtgacgacggccccctcgcgcgccgggccaaggatgccttcatcgcccatggcaagcctctggtcattgcgaagatccgggattatgtcgccgccatggcgaatggtggccccgccaaggacgagatagattctaagaagatttccaccaaggccgccccggcggccggtggcgcagctgttgctcctgctccttcagtgaaggtgacagcagcgccagtgcaggcgccagcagctaaggagaagaaggcgaatggcaaggataaggaaggattcaagactatcgagatgacagagaagttcaactgccgctccaaggacatctatgagatcttgatggatgagaacaagtg

SEQ ID NO: 442732 - DNA, 160 bp, Triticum aestivum
  unsure (1)..(160): unsure at all n locations
gggggnngnaantttgagcnccagtggccgtnaaacggtcaaagnantcccgggncgacgggacctaaaactaaaaaataaggaaaaaataaggaaaaaactaaatctaaacctaaaactaaactaaaactaaacctaaaactaaaactaaatctaaact

SEQ ID NO: 442733 - DNA, 427 bp, Triticum aestivum
ggtcagggacctccgggtcgacgggaaggggcagcgagccagtttcgtcaccctccgtgacgctgctgccgccggagccaccagccaggagctctggcccttcgtctcccggtaccgtaaatcctgctgcaagattcgcctccatgcctccagcgatggcttcctcatcgtctcgcggggagaccggttctacatctgcaacccgaccacccgcatgcacgctcacttgccatttcctcgccctcctctgccgcgctcctcctgcatcaatgacatctacattcacggcctctaccatcacatatcaaccggcaaatacaggctgctcttgtccaacattcacaagaaagaagccacattgtacgtcctcaccctagaaagagccaacgagttgaggagcattcaaatcgtcatgccaacactgcct

SEQ ID NO: 442734 - DNA, 395 bp, Triticum aestivum
acttctagcgcattcattcataagcaaaacatggtgaactggaatctagaactcatcgacatagggagacttgatccacatccaacaaatagacacgagctagatttgagaaagtcagtcaaacgaatctgtaaaattaagaattcatgcttgctggatttgtaagcaattagttgatccaccaaacgagaaagagcattgacagcattaaattgcagaagaaaaactaacagcaacccaaaatcacccaaatcactggttgattagcaacaaacaagacgcgcgtgtgtggtaattcaaagaagaaacggccctgcagacgacggcgccgcccatgacaaggagctgcccgaggagccgtacatccccttccttcacaaaaccacatcagacct

SEQ ID NO: 442735 - DNA, 223 bp, Triticum aestivum
aattcgcgggccgacgggcgaggtaaccgttgaccatatctagacgcgttcacaagttatggcaccggtttcacgtactagcagcaccagtaagtgtgtacgtgcaatgcacgttaatttggaactatattaagtgcatgcggatattaagtaggatattaattgcgtgtcattatgtgattaacactattccaaagacatgaaatcaacaacaaatgaataa

SEQ ID NO: 442736 - DNA, 384 bp, Triticum aestivum
gctcccaccagcctccgcatctcttatcttcctccgtccgcggcctcgctaatcctcgaatctcctctccccgtttcagatctacgcgcgcgaggttcggttcggtcttcggagctcgagacatggcggaggagaatgccccagttgaggttgctgctccggttgcggcccctaccccagttcttggagagcccatggacttgatgactgctctgcagcttgtgatgaagaagtcaagcgctcatgatggccttgtcaagggactccgtgaagctgcgaaagcgattgagaagcatgctgctcagatctgtgtgcttgctgaggactgcgaccagcctgattacgtgaagctggtgaaggcactgtgtgctgagcacaatgttc

SEQ ID NO: 442737 - DNA, 416 bp, Triticum aestivum
attatcgggccgacggcttctgcacccttgaaactagtactcgggtgttcgtgaagacccaaaaattctttatccaaagttttggtcctttaaggaggtgtttggcgcagtgaacaaggcaatcggactattcggctttataactctcactttaccatagaagtctacaattttaaatttcggcgaagcccatagtattcggaaagccaaactaggcattatacacacctaaatcgaacgaagcccattcctcgccttaagcggaaaaaatctttagggattttggtacctcgcgaacaacgaccaactctcgccgcatcatgacggtcagttttcggctttctctactgaggtgctcgtccggaagaaccaggacacaatcgcagtagttctccctgcgctaccttagccgatat

SEQ ID NO: 442738 - DNA, 150 bp, Triticum aestivum
gggccgacggctgtacaaacagacagtcggaccacacgcccagccggattaccattgtacccccggggggtaggcctatataaacccccccagggcacccatgcaaagggttgatccaagctagttctagacaccacatagagagggggc

SEQ ID NO: 442739 - DNA, 393 bp, Triticum aestivum
gggccgacgggagctgcaagcatcaggagggtgctgctggatcgacgacgagatgtggagggtgtgcgacaacagcaacggcgagctgcggagagaggtggcgacctgcaacccatggcgatggcagctgccgcagggtgcgcaagctttgtgcggcaaggccgcggggttggggcggttggctgagcgcggtgactcgttgtgggcagaggcatgatgtgcggaaggacagagaggaaatcatgcagctacttttgcctaaatccaacggctgctaggcgaccggccgaaagttgggccggtgcgccggcgcctagcagtggccttgttgttttattggatgcttgcctcttcaccctgctggatgaactcgcctacatttttttgacctgg

SEQ ID NO: 442740 - DNA, 418 bp, Triticum aestivum
cggcgaattatcaacaagatcttcgtcactatcacagtcgccgggtcagaaccagaacttttcaagaaggagatttggtgcttcggctcatccaagatcagacggatatgcacaagttatccctaccttgggagggacctttcgtggtcagcaagaatctgcacaatgggtcgtactatctgattgatattcaagagcataaagactcacgcacatcagaggaggagaccaacaggccgtggaatatagctcatcttcggccttactacacttgagccatcggctctatctatgtacatactatggtagtgtatatattatcattgatataataaaaccggagcctcagctaaagcggggtctctgttctttcatatcatgtgtggttacatggagtggttccgttttaaagcgggct

SEQ ID NO: 442741 - DNA, 414 bp, Triticum aestivum
agtgcggtctagaattcacgggccgacgggagccagacggccggcgcgcagaggctgctgcttctcctcgctctcgtgattgaagctgtaaacaatggagcagatatcttcactgaagaccagcaagaaattatcaagcaatttggcagaatcaaatccgagactgttcctgagaacaaggatgcagggtctgatgacgatgatgacgatgatgaagatgaggatgatgaaactggtgatgctgatgatgatgatgccgatgctggagaggacttctcgggtgaagaaggcgaggacgatgacgaggatgatgaccctgaggcgaacggcgatgatgctggcgcggggagcgatgatgatgatggtgacgacgacgatgatgatggtgaagacggcgaggatgacgatgatgat

SEQ ID NO: 442742 - DNA, 357 bp, Triticum aestivum
cgccggccgacgggaaacgcaagtcaggcttccgtgagggcgtgacctacggagccggtattggcccaggcgtctatgacatccactccgccacgataccctccacggatgacattgccgagcgcgtcaataagaggctcgcagtccacgacatcaacatcctgtgggtgatgcctgacatgggtctcaagacgcccacgtacagcgcagtgaagcccgtcctgaccaacatggttgccgcggacaagctcatccgtactcagctcgccagcacactgtgaggagccacgggaatcgagcaacttgatactactgcataatgttttgtggggacagagtgccacatgatccacattt

SEQ ID NO: 442743 - DNA, 220 bp, Triticum aestivum
tgtcatcaaagcgtgctgcggttctgtgcatacatatgagtacatgccattctttgtatgttatggtagttatgggaataatttgcctcagaagttcagaagtttgtttatttgttggaagagagtagaagtgtaacaactgttgtattagtgttatctctggaactatctgttgtttaaagccttggatcttacctctataaactgcatgttgtttgag

SEQ ID NO: 442744 - DNA, 121 bp, Triticum aestivum
aattcgcgggccgacgggggaaggaactccatgatgtgtgttctggtcgtcgacctccaggacaatgtcacggatcactcgtgcgtgcatcattcatcaaagagttgtccacatatcttca

SEQ ID NO: 442745 - DNA, 191 bp, Triticum aestivum
ctgaggaaataagtatctactagctagctagctacgtgacagtgtttcttctgtgagtgattaggtctggagtaccgtgtgttcagttcagtgtgtctgttttgatccgtcagtcatatgagtgtgtaaggatcgttcaatggtgttgtggctgtcgtcaatctaatgataaattaagtaattacattagt

SEQ ID NO: 442746 - DNA, 183 bp, Triticum aestivum
aaagtcatggcgaactggtttcccatggctctcaaggagggcgcccgctcctggctcctgaacctgcctccaggctcaatttcctcctgggatgaaatgcgcatccacttcatcgccaacttccagggcactcccggccgcccccagtcgtaggcgacctgcgctgcatcaagtaacaaccag

SEQ ID NO: 442747 - DNA, 142 bp, Triticum aestivum
cgggccgacggagaactaatagtgagactgaagtctctctgcagaaacataaaataggcaaacgtgagtacaaatgtacccagcaagacttacatcagatctatctacatatgcatcattatcaacaaagggggtggtggtg

SEQ ID NO: 442748 - DNA, 361 bp, Triticum aestivum
gtgcaggtacacgaggtcatgcacgtattctacgtcgccctgctgtgcaccgaggagcacagcgtgcagcgcccgacgatgcgggaggtcgtgcagatcctgagcgagctcccaaagccagctgccaaccaagatggagaagaagagcttcctctctcctgcgaaggacctgaatccaaccctcctgcctcaaccagttacaccgaggcaccagccggcgacgcgaaagatcagcagccgcagcagcagcacacaagctcggagtcgtcgcctcctcctgatctcatcagcatctgatcatccaagtacccggaagcatcgccgtccgtcgcaaatatgttggggcttcctttgatcgtgc

SEQ ID NO: 442749 - DNA, 382 bp, Triticum aestivum
ggccgacggggcaactacataggttgcacagcaataggatcagaaaaagcgccctggcaactggccgagctggctcctcctccctccatgtaagacgtggcaggtccgaatcgctgaaagccaaatcccagcttctcttagacagaacaacgggtgacaaaggttgtagcatcactggcctgggtaccgagaatgctacaggagcttgcaagaggttctcaaaagacctcctccaaatcatctccgggggcaaaggaggcccaaaagggatcacaggcagagcaatctcctttgtgacagtaagaggatgatacaccacaattgcccaattgttcgctgtatcttcattgaccacaggctgcataattgtttcagatatatc

SEQ ID NO: 442750 - DNA, 370 bp, Triticum aestivum
attcgcgggccgacggggggagcaaggaagggggagacaaatctttcaggtacaatggtatgacaaccatgttctgaactatcaatgagatttggtgctaagtcagcatcgtgttttatccaatctatcaaacaccataagtttcatgtcgaaaaaaaaaaatcacagaaaaaaaaaaaaaataagtaaaaataaaaaaaaaaaaaaaagagtcaataaaacaataacaaaacaaataaaaaactagtaaatgttataataaatggataataaaaaaacatcgtccacagagaattacatccgttaatggttcctttccctgggaggcaatcccctaaagtgcatgtcaagactgctaaaaggggagtgt

SEQ ID NO: 442751 - DNA, 239 bp, Triticum aestivum
attcgcgggccgacggcctgccggatggaggtgttctgggacgtccacagctggctcttcgggccgacgacgacgagcaacgccgtgttcatgttccagacatgccaggcgcccgagaagtcgatgccgtggtcgtactcgcagatttttagggagtctcagctgcagggcctcggcttctcgctcatcctacatgcatggaagattgagtaggtgcttgcagaccataagttgcttct

SEQ ID NO: 442752 - DNA, 409 bp, Triticum aestivum
ttcacgggccgacgacgcggctgatccagagatttacgctccccacatagtccttatgagcggcggtgtcatcactctgcaggtccttctcggtctctatggccttgttcagggtctcctcccgggctgtaacctctgaaagcgtgccctccaagccgtctagtttcagcttcaggtctttgatggagtcgctggcctcggatagcatgttggccttgtcagagatagcaacctgcgagcccgccagagtgcggttggctgcgttcttctcctccgtcagctccaataccctcttcttaatcttcttcctcatcttcagttgggtttctcatcatagaggatcttactctggccatggacttgttgaccttttcctttctcttcttgcactcaccagtctcctttgggt

SEQ ID NO: 442753 - DNA, 299 bp, Triticum aestivum
attcacgggccgacggctacagcatcgggatggtgctcctggcggtggtgaccgccaagggcgccgcggacggcggcgaggacgagggagaaggggaggagacgatggggatggtgaagatcggcgtgctgtgcaccgccgaggcgccggaggagaggcccaggatggcgcaggtgctcaccatgatgagcgagttcatgtagtgttttgctggtgtagtgtcacggaatttcttcgagctttgcagaagtagcctgtaggcaagaaagggtattgctttcaagaactggatacaacag

SEQ ID NO: 442754 - DNA, 386 bp, Triticum aestivum
gagtcgaccaagctcgcccgctacaacaagaagcccaccatcacgtcccgggagatccagacctctgtgcgcctcgtcctccccggggagctcgccaagcacgccgtctccgagggcaccaaggccgtcaccaagttcacctcctcttagattgcgtcgcctgtatctagtagcaaatgcagttccttcctgttggtttagtgcttgtctgtggactctggttatctgcaagtaatattagtcctactgttggatgaaaattgccgaatcattgccaatgcttttttggctcgtcggaaacaatgttgcgttgttggttctatttatactgatttccgcggtgatttaaaaaaaaaaaagtaaaaaaaaaaaaaaaagcggccgct

SEQ ID NO: 442755 - DNA, 424 bp, Triticum aestivum
tccgggccgacggagtggagagatggcttggccaacggtggagtagcgcttcacagcgaagcatgctaagcagagctgctagcagcaggaggcaggagcaggtggtcccggcggcgctggaggaagaagacgagagattgaagatggatgtcggtcgttggatgtaaatccaacggctaacgatgttagaatcatttgttgactaagttgacaacgacttgcattggcttcgaactattggcccacattttagcctccaaaaatgtggcacgtattcaacccattttttcagaatttacagtcttttttgcggggtagaatttacagtcaatttgatctttttttttgaattacactccattagttgggctgggtgaacaaataatgtagcgtccatgcgggccaattaagtttttccaaaaat

SEQ ID NO: 442756 - DNA, 393 bp, Triticum aestivum
cccttcatcatttacttgaccatagtatgtggtagttgatttgctttatttgttgatttcggactttgttattttaggcccacctgtgtcatcgacgaggacaacgtggtggcgtcctcaacgttgaggattgcggctattgaagcccctaagtttggtctactagggcggggttggcagatagagtacactgccggaggttgccgctttggagatcgttaggtacaacatctttaggtccttgttcattgagtccttagggattttcgccaccgtatagtgtgaatcttttcattcttatggtttgcaagtgtcatgcctccggttagcaatcttgaggccacgaaggcaataaaccctaagccgcaagttccggatcggtctgctgttggc

SEQ ID NO: 442757 - DNA, 427 bp, Triticum aestivum
  unsure (1)..(427): unsure at all n locations
attcacgggccgacacctcgacgcaacgagtggcaaataggaaatagccatgaactattctaataaaaatgtgaacaacgactcgaactcgcgtcactatattgcacagatggttcagctaatcactacgccaactgaacgacaacgattgcttccaacgcgaacaatataagaaccatcgtagccgtgctatttactacgcagcatcaccttgattttttttaatgaaaaaagctcgtcaaatttttgaaaaaagttcacgaattgagaaggttcaacggttctgaaaagagtttatcaaatttgaaagaaaagtttactgtttcgaaataaattccatcaattttgaaaaaagttcacccaattttgaaaaaaaaatcatccatttgaaaaaagttaatagattttaacanaaaatcatcagttt

SEQ ID NO: 442758 - DNA, 407 bp, Triticum aestivum
ccttggaactgggaaactcacttgcccagcttctcagcaacgccagaatcctgattcactcactatcaccaacttgcgtaatgcactgaattttctgtccatagttgaagagcttcagagtttgttcgtacgatatggtgagctataacctgcagtcgaggacagttggatgcatgggctgcgtgacaaggtagagctaatggtgcctagcaattattcatcacgagcatatttgtaccaaatcatgtcagtcttgaacaagttttgtttttgcagtgctattcctgtgattttccaatcctatgaaccaaagaaggcctaaacttgctacaaaatctgtactttccctttgcgagcgaaggaatacgaactcctgttttgcaccctatctgcgttgttagcccaaa

SEQ ID NO: 442759 - DNA, 296 bp, Triticum aestivum
cagccagagcaaggtgtggagcttgagctacaacgagaatgacaacttgggtgttagctgcaaaaaccaacagttcaagtgttcaaacagttcaacttgggctgatagagtttgctattaaatttctttcttggaaaataatttgctgctattacttcaaatgttacaatgtttggttatcttttgagaccttcatgtttcctatttcatgttggcattgtcaatgtttacagtaatgtgcaagcagaaattactcgtgttgagtgaaaaaaaaaaaaaaaaaaaaaaaaaagaaa

SEQ ID NO: 442760 - DNA, 66 bp, Triticum aestivum
  unsure (1)..(66): unsure at all n locations
ttaaacgnncacgcggccatgnaaacggtcaaggactcccgggccgacggngtcgcaaggattcgt

SEQ ID NO: 442761 - DNA, 425 bp, Triticum aestivum
ccgggccgacgggaggcagatgcgttggcagcaactgaggtggcattcatccttcagtctgggcaaggaagaggagtgcatttcaccatagcaccagattctcctgccacgccccagcacgaaccacaaccttgaagatgtcgtgccgatgagcgaccggctggcggctgcggctacattggattgctggcttgcgcgaatcaccaaaggagttatggtctgctgccactgcagagccatgttatttacgtactttacgtcattgcccagagtgtaacgttctgagacgtgtcccagtttgtgcttccggattctgttagggttggcgttggccagggagtctcggtgagtggtgtgtataaagtaagaaagccatttggaccgtgtatgtcggtcccaactgttaactttaaaaaagaaggggg

SEQ ID NO: 442762 - DNA, 407 bp, Triticum aestivum
aatgccagtatgtagagaagtgatggaaagggttgtgctctttcatttgagaaacttccaaccaaaattggaatgttagaacagaatatttagatacaggtcccttatgaatactgtactgagtaagattcattgaagaaatgcttctccgaagcaataagtttgtggcacaagcatagtcttctgctaacctagcctttcccatctttctattaaaacgaatgtagctaacgtgaactaaaagcaagctcttgttcgaggaagtagaaattgttagttgttgctagcttgaactgagttgttcctgttggtgctagggttgccaagggagttgtagcgagatgctgctaatgcagctatttctgatgtccggacgatgcagcggaagtgaaaagaaaaaggtatga

SEQ ID NO: 442763 - DNA, 410 bp, Triticum aestivum
gtaccgatctacaattcccgggccgactgccacccaaagactgactcgggaaaagtgatagacggaaaggaactttttcccctcatctagatcgccaggcccccgcacagctggatcacctgtgtccgttcatcactcgatttggccttcttgaccgactgagagcggcaagtgaagatgtgcttgaagagtccccaatgggggcggcaacccaagaagttttcacacaagcaaacgaaagcagcgagatacacaatagaattgggagtaaagtgatggagctgcgctccgaagaagttcaagaagctctggaaaaaaggatgaggaggcagagagaatccacggcgatatgggtggtgaggaggattcactcaccatcaagaggctggggttcgacttccttccccgga

SEQ ID NO: 442764 - DNA, 392 bp, Triticum aestivum
ggtcagggattcacgggccaacgggagagataggcatcgcatcgcggatcggccattgagagagaaccaatggagagcggcggcttgaggcgagatgcatcacccagtgcctcaggagtcctgatcttttgtcatggcatcatggataatgtcctcagcatcttcttcagtcactcccgtgaccagggatatctaaaatgccttggggacggatacctattgcaaaccaaatttcacaacattggtgcaacccttgtcggagttgatacttttggaatcaactatctatgagaaactacatgacactcagtatggaacgcatatgtgggtaaagtatgctgacaatggtcgctacaatgcatcccaaatgcctgctgaatggcatggatcgc

SEQ ID NO: 442765 - DNA, 403 bp, Triticum aestivum
ccaagcacctcgagtcatgctggtgatcttggagtgagagcacggctctcaacgctgcactgctacgcgtcaccaccgacggaccaagcacctcgagtcatgctggtgatcttggagtgagagcgcggctctcaaggctgcactgctacgcgtcaccaccgaccgacagggcacctcaagtcatgctggtgatcttggagtgagagcgcggctctcaaggctgcactgctacgcgtcaccaccgaccgacagggcacctcaaaccattctggtgatcctggagtgagagcgcggctctcaaggctgcactgctacgcgtcaccaccgaccgacagggcgcctcaaaccattctggtgatcctggagtgagagcgcggctctcaaggctgcactgctacgcgtc

SEQ ID NO: 442766 - DNA, 422 bp, Triticum aestivum
ggtcagggattcacgggccgacgggtgagtcacggaaggctggaagctatgttgagtagtgaacagatctgcacttctgcagttaggacacatgtaccaggctctgaagctttcctatgcatggaattgattgccgggagctcaactctatctggttattagtttcgtaatccaaactactgctgaaaccattcccctgttctaatcttgtagcatgactagcatctgcaggacttgttctgcttgtatcatttcctgtttcttgtctttaggtgccagtgtgtgtgttacatgtatactgtgttaccagcgttctgcctcaagaacacgcatgcacactagaatacgcatttgttagctgccagcaacttctggtcaagcttagcgataatttcgttcaagtagggatcgacatcgaggaa

SEQ ID NO: 442767 - DNA, 430 bp, Triticum aestivum
gacgggtcacatggtcgttccattccccgacccctcattctctccctcgcggcaggtgaacacgcgtgccgctgcctccgccatctctgcctcccatcctcatcccgatccttgtgtaccaaggagatccggcttccctccccgagctcgcctcccggcgactattccatgcgcggccgcggcaccagccgcctcccggtcgtcggtgccacgaaccatgaacgccatccggctatgagaatttccgcgacacccatctgccagttcgtcagcctgaccctgcccatcttctcgctcgttcgccagttctgaaaaaactaatcactttgtagattgtaccaacttttcgtttttggtctgtttgcacttctgcagtctcaaatgttacctctcagttcgtgcgatctccggatattctctacagcttttt

SEQ ID NO: 442768 - DNA, 224 bp, Triticum aestivum
tgctagcaggatatctctaactggtaaatagttacgcattcaaacctagttctgacggcagtcccctgtacaaatcatatatcatgaatagcaactgcatgacttagccggcttgagtcatatcctgtctcatgtctaatgttcgagtatgtatgtcatatgtagactgtgatgtcagctttctgacctcaagaacacgcatgctgatgaaagtgacgcatttg

SEQ ID NO: 442769 - DNA, 402 bp, Triticum aestivum
gctgctaaaccggattctcactactgcgccccctacttggcgcaccaaagatgtcggtggaaacgacacctatgggatcacaagaatccctactacggttgcggggcgcggggtcatgagaagagcaggatcaacagtcaacacaagcactcgggtcgtttacccaggttcaggccgagaggatgcgtaacaccctagtcctgctttggtatgtatatctgtgttcttggagttcttgagctagctacaatgagtgtaacttgtccaagggtctgaatccttctcttggatgccttgggcctccttttgtagtcaaggggatcgccacagtggcacacatgaggtggcatcggtgtacggtggctaagcttatcgtttggcattacgggacaagacacattt

SEQ ID NO: 442770 - DNA, 59 bp, Triticum aestivum
ccgggccgacggactaacaaaaataaactgatcaggccggtccaactaaaccacaactt

SEQ ID NO: 442771 - DNA, 400 bp, Triticum aestivum
caaattgatcttcggcattgcaaggcgggttcctcctccaagtacttcatagaagattttgaacacaaaggtagtgtccggctctgcaaaataagtttccagatattgccatatagagaataatatttacacagatctaatctgctgatgtattccatagcgtgacatcacactacggccaagtctttattcgaatcaccacctcagcgcgtttatcgaggcggtttccttggcacgtcatgttaaagtagatatcatgtcaccttattccgggattctcatcaatacgggtgtgggtaacccaaccgtacctgttggtatgttttctcgatcaaaggcgagtcccaaacggtcacggggagggcccttggtattcaacctcttataaagagaccaaggg

SEQ ID NO: 442772 - DNA, 385 bp, Triticum aestivum
cgtggatcgggaggggattcacgtgcgtctgcgtgcagaggagggacagcgacacgcgcatttccgtcgatctgacccccattcaggaagagtgcctacaaagattacagaaccggattgaggtgccgtatgatagtcaagatagagaacatcaggaagcactcaaagccctttggcatgcttcttttcctgggactgaacttctaggactagtatcagatcaatggaacgatatgggatggcaatggaaagatccatccacagatttcaagggtggtggctttatctctttggagaatttactttacatcgcgaagaactatccaaaatccatcgatgagctcctttgttagcaaaattgtgacagagcattatgggaatatcc

SEQ ID NO: 442773 - DNA, 97 bp, Triticum aestivum
tggatgcgccctgtatcggcgcaatcagcgcggctggtgtggtggagactctcagcatgtcagccatacatgcctcaactacagcgtgtgctcaaca

SEQ ID NO: 442774 - DNA, 399 bp, Triticum aestivum
gggtccacggggctgccaacaagcagaggcggggcgagcttaggtgttgttcttacttgaacaaacctcctacttatgattaaccctcccgcaagcatctgcaactatgagaaaagtattaagaataaattctaaccatagcatcatacatactatcaaaatatcaaacacatatcaagttcacatgattacttgcaacatgatttctcccgtgacctcaagaacaaaagtaactactcacaaatgataaacatgttcatgatcagaggagtattaaatagcataatggatctgaacatataatcttccaccaaataagccatatagtaatcaactacaagatgtaatcaacactactagtccgaaaaaaaaaaagcggtaaaaaaaaaaaagcggccg

SEQ ID NO: 442775 - DNA, 457 bp, Triticum aestivum
taccgagtcgtaaattcccgggtccacattggcgtcgaaacccttgacgagtatttccggacggagggagtacctaggaacacaatgagcacgatggagtttgtaacagaagccaagaccagaaggatgcatttcgggatgcaattgacaaatgtggactgctggacattggatacagagggaaagactggacttttgagcggaaagttgcaggctgaccattcacgagggtgcgtctagataagatgccttgcaacgccggagtgatgcaacattttccctagtgcagcactagtacaccacacggcagcctcttctcatcacgagccgatcccgctagccttcgatgccgacgtgcatgtgcatgcatgcaagggatggcccaggtcatttaaatatgaattgatgagggaacgccaccccgaactggtggaattcgtgggcactggccactggg

SEQ ID NO: 442776 - DNA, 430 bp, Triticum aestivum
ggtccacggggcattgtcagtggcagagtggccttgctgccacgatccactgagatccagccccatgtcgcacggattcgtccctcccccacaactttccttcaccaagtaaggttcgaagatgccatcaaaatctgcaccgcaaaatcatgaggactagaaatggctaagtcccttgtaagatagacccttgtacccaataaggccagtggaaacaacactcaaaactatatgtgccaaatgcaaaagatacttggccgattcatgcggatgccgtcgtcagaggctacactgctaagtcatgctcaaggcaaatggtatagtcccttatatgacatatacaatcactcaataaggccagtggcgagcacactcaaaagtatatgtgccaagtgaacaagatacttgaccgattcattcggatgccttc

SEQ ID NO: 442777 - DNA, 405 bp, Triticum aestivum
aggggaggctccgcggggaacaagttccggatgtcgctggggctgcctgtggcggcgacggtgaactgcgccgacaacacgggcgccaagaacctctacatcatctccgtcaagggcatcaagggccgcctcaaccgcctcccgtccgcctgcgtcggcgacatggtcatggccaccgtcaagaagggcaagcccgacctccggaagaaggtcatgcccgccgtcatcatccgccaacgcaagccctggcgccgcaaggacggcgtcttcatgtacttcgaagacaatgctggagtgatcgtgaaccccaagggtgagatgaaaggatctgccatcaccggacctgtgggaaaggagtgtgctgacctttggcccaggatcgccagcaacgccaatgccatcgtt

SEQ ID NO: 442778 - DNA, 436 bp, Triticum aestivum
  unsure (1)..(436): unsure at all n locations
cgggtcttaattatgcaacttgaaacactctgagatgtcatgctcgtctctcttgcaatacctgcaatacttcttgtctttggattgcgaccggcccctgtagccgtttttacttttgcctctgtttccattattggagttcttctcctttgtcctgccacgaacagataatccctcggcttgggatgaacttgaaccatcatgaggcaccattaatttcatcttctccttagagttcaaagcttcataaacttcattaagtgtgagagtatcacgactgtatataatatggtgtctctaacattggtataagaacttggcagtgaacacagtaacattaaagcagtatcttcctcttcatacttaacctccattgcagctagatcagatatgatctctttagattttgaaatatgattcanaacattacctccct

SEQ ID NO: 442779 - DNA, 269 bp, Triticum aestivum
tcggtcgcatgcaagtcgtgcagcaagacattcaacagcgagggcgctctagcttcgcactccaaggcaaagcacgaggccaagtgaagaggagaggaaggtgttggctggctggctggctccagttgctattattttgatctgtctgccctattgagattattatcgttatgctgctgtgttaggctatctgcgatatcttattatgttgtcgtacctacctagcctgatcccgagggaagggaagggagaaaccgttgagctgttgc

SEQ ID NO: 442780 - DNA, 410 bp, Triticum aestivum
attatcttcccttgcatgttatagttcatcaagaaactctagtagcttcgtgatagcgactggagaacttttgtcaatcactctcttatctggaagattaactcccacttgattaaagtgattgaagtacccagacattctgagcacatgctcactggctgagctattcttctccatcttgaggcaaaggtcttgtcagaggtctcaacctctcaacacgggcatgagcctgaaataccaatttcatctcttcgaacatctcatatgttctatggcgttcaaaacgcttttggagccccgactctaagccgtaaagcatggcgcactaaactatcatgtagtcatcagaacgtatcttccagatggtcacaacatccacagacaacgccagaggggttggcacactgagc

SEQ ID NO: 442781 - DNA, 427 bp, Triticum aestivum
aatacaaatcactcaatcgagcaaaattggacgtgtgacattattaggttgatctacacgaaccactcgtaggggaaaactgtattgtggagtacaccataaggtcacagtggcacaatctgaagtagatcatcctgtatacatagaagtgcaatagaaccgattagatgccattaagcgtgcatgcaacaacagccaccagaaagcagcaccgaccttaactatatagtaatgtgcgcaatatagtatcagtcctcatgcggtcgaactgatcataatttacattgcaaatattatagcatcatcactcgttagccacatggctttatttaggcagaggcattacgtcatatgtcaagcggcatcaggaccaggtatttgcctataaggacattttggtgtaaggactaaaaaaactccgtgtcac

SEQ ID NO: 442782 - DNA, 445 bp, Triticum aestivum
ttcgcgcggtcacggggattagactatcaatcaaggtccctctactcctcgtgccctcgcgaagctgaacccaatcttgttgggcccttctacaacctagatggtctcatctctcatattatggttcaagggacaaccatggatgaacctgcagacgacgctgattctgacgaagcgcctgcaccaccgaagccaaggaagctgaagaaacctaaagcttcgaagccttcccctacaccaaaggtttcacgggcgaagcctctggccactgcacctcctaaagactgtgcagtctgaagatctttcacgcatctccaagcccgccaaagtgaagatgcccatgcaacccactagccaagcactgacccctgctgttgttctgcgcaatgagaatgacgccattgatctgtccagcgatgacgatcttggcaatgacgctcttgag

SEQ ID NO: 442783 - DNA, 432 bp, Triticum aestivum
tccttgctgagctgcttagtggaccgttggaggccagagacccacacgtttcacttctgatgggggagagatggctcctactctggaggatgtgtcacttttgctcggactaccgttggcaggtcatgccataggaccgttggacgcaccggctggttgggagcgagcccttacacaacgttttcatggtgtttttttcggatgctccggatctggtatgggagcatcacggacctaagtatgagtggttgctcaatttccgggtaatttccccaacttcttatcttcaagttatcgtgcatatggttttacagaaaataattgcggctaactaaaactttctctttgcttaatgcagatccaaaacttccgggcgccgttgactgcggaacagatcactcggagcctagaggcctacttgatgtggttttt

SEQ ID NO: 442784 - DNA, 436 bp, Triticum aestivum
atatgaccaacatggcaaagctgttattcttgttcatgaaccaaaaaagagcttttataagaagttcttgtatgaaccgttccctgttgaaagtaatctgagggagcacttgcacgatcacataaatgcagagattgtttcgagcacaattggtaataaagaggaggcaattatctatcttacttggacttacctatatcgcagactggttgttaatccatcttactacggattggaagatactgaaacatataccttgaatgcttatctctcgaggttagtggaaactacacttgaagatcttgaagacagtggatgcataaaagtggatgaccattctgtgcagtctttaattttggggaaaatagcttcacaatattaccttagttaccttaccgtctcaatgtttgggtcaaatattggtcccaatacatca

SEQ ID NO: 442785 - DNA, 416 bp, Triticum aestivum
gctgctggaggggtggtagcggaccgggagaaatccctggctggattcccggccacgacgacggcgacacctcctggtgtcgtcttcctccttggaggcgccgtcgaggtgcgtttacccccttccctcccactctcatgcccgggtgaaaactctagtctcttcaggctgggcggcagcggcgtttcatgcgtcgtcatcttcttgaaggtgccgccttgggtgagttgggggtgtgcaggggcgatgggtgtggtgtcaagtgtgtggcggctttgcaggaggagttggcgccatggtcttcttgttggggcaatgctctgctatttggttgttcgttgcctgtcttgtggctgtttgttcgctggctctcagtgccatggcatggacagggtgaagatagggttctttccccg

SEQ ID NO: 442786 - DNA, 419 bp, Triticum aestivum
ttggcttttcttaggtgattttaacgagatcttatcactagatgagaaggttggggggggggatcgaccacaatgattactggataatttcagggaggccctggagtcatgcgagctcagtgacattggctattacggtgataagtttacctggagaaaccatagtaaggagctcagtacatacatatgtgaacgcctcgatagagccacggtgaatgcaccctgttgtgattggtttcctaacttcagtgtcctcaacggggctcctcgtcactcggaccacaggcccgttattgtatgcactcagggatgaaatagaacggagcgatgtggggatcacgggttctgttttgaggcgtggtggctacaggacgaagggagtagtgaagatgtgcaatgggcacagggggaatgatgct

SEQ ID NO: 442787 - DNA, 114 bp, Triticum aestivum
aacgggaactttacattccgatttccgtcatacaccggcactgtccactttccacgcaacatcttcgtgttactttacttcctctatcgcctctggggccacggcccttcctgg

SEQ ID NO: 442788 - DNA, 424 bp, Triticum aestivum
gacgccatctatgctgccatccactggctggacacgaaccatctcgctgaggcggtcgacttcgaggacaagatgaatgagctggtggccctgtgcagccccatcatcgccatcatgtaccagggtgctggcgccgacatggacggctgcatggatgacgacacgccggttgcattctgcggcgctggcctcatgattgacgacgtcgactaagctagtctatgttctgtggcagagacctgctgcttagttattattatgtcgtgccctatcgttatctgagactgggttgtggtggttattgttttggtccgagtggtcagggttattccgtggagtaaacattcgtggaacatcagtggattatgggtcacgtcacgtctaagtaatatattaatctaaatcatccagtggattatgctgc

SEQ ID NO: 442789 - DNA, 426 bp, Triticum aestivum
ctatatataatgttagttcaatttttggtcgtactaatctatagtagtaaggtgcccgtgcgttgcaccgaagagtgaaatgcattgatcggggagttgtttattttgacaaaggatgtgggggtcatctcatgtgtaacgggtatcgataggtttcttgggatattatctcatctctagagctcacaaacatccgggtgaaatagataaaaaggtatcttttgcaaacaaaaccgttcaactgttcaacctgcatccaaaacttgtgaagaaataacacttattgtgctttgcaagaaatgatctttaagaattagtttttgagtatcgattgttatacatgttggctacagatgacatggcactttcttatagtcaacaattggctatactattaagtaatattaaccaatgccttatacacct

SEQ ID NO: 442790 - DNA, 420 bp, Triticum aestivum
gataggagtagactgagagatgggatagaactccatggcatccgagggttccagcggcgtcggcgtcggcggccggaaaccatcggtgtcacacatacctagacatcgcggagtggtgaaattcctcaccggcttgccagcgcgaggaaacctctcgtcatgttccaactcttccaatctgggaagcctcatggtttaagtcagcgagcacgacatacatcctccagagggatcagtgatcgacatggatacgacaaagatcgtaatcatacatctgcaactaaataacacagacagtgaggccaaagacacacgttctatgactccacaggaaactcgcgagggtataagatgtaccgcagaattttgggtgtgcataaatcatcccaaaagcccaacttgggcagtttcttcggattg

SEQ ID NO: 442791 - DNA, 417 bp, Triticum aestivum
cgggtccacggggatgactaagcggaggatgggggccaggcggacgcaccagaacgcggagcaaacggccatcctcatcccaagcgcgcctctaacaacgagccgcgtgcgaacgaatcgactgctgccggaggtgatcacaccgatactagccagacggcttctccgatgaccgactctggcgcctcatccgacacgcctaatccgtctgctgcgccataaactgccgctgtatctcttaagttagctgcttcactaatctgctgaaaacttgttaattcacaacattctacccacgggatgtactttgaggctccactcgataattctgccaaaggcctatattatgtagaggttaatatatatctaacctttactgcgcaatgttcctatggcctttttcctttgccgccttca

SEQ ID NO: 442792 - DNA, 448 bp, Triticum aestivum
gttagaagttgtaaatatgcattgttgtatcgcgacctgaatgaatgaaataaacgaaataacgctcttgtgcaaaaaaaaaaaaaaaaaaaaaaaaaaaaaaaaaaaaaaaaaaaaaaaaaaaaaaaaaaaaaaaaaaaaaaaaaaaaaaaaaaaaaaaaaaaaaaaaaaaaaaaaaaaaaaaaaaaaaaaaaaaaaaaaaaaagggggccccaaaaaaatttaaaaataaaataacctttaaaaaaaattaaaaacccttaaaaaggggcccaaaaattaaaataaagggccgttttttaaaaaaatttaaaagggaaaaaacctgggttaaacaaattaaaaccccttaaaaaaaaaccccttttccaaaaggggggaaaagacaaaaaagcccaaaaaaaatgcctttcaaaaaaattgccaaaccaaaaggggaaaaggaaac

SEQ ID NO: 442793 - DNA, 446 bp, Triticum aestivum
gagaagacggaggaggaggaatccatggggaacatcctgaagtgcttcaggggagacgacgaagaacaagaagaccactacccctactaccgtccaggctccaggccccactacccccagcagcagcagcaagctgatggccatggcgtcgcctccctggcgcacgacctcctcaactttgagagcgcgtccatggttcctgaagggctcaggcagcatgttacggcgtccaagaaagcacagattaaatggtaccagaatatgttggaggcatataagaatgcgagaaccccaccgagaacaccggaagaggctgcacaactagttgtatcagccctaaactggatccagagtgctgatttggagggtatcctcgaattctacaacttccccatcccatcactacctgcagcatcctcaaaccaccgtccatcctcgctgccaga

SEQ ID NO: 442794 - DNA, 74 bp, Triticum aestivum
  unsure (1)..(74): unsure at all n locations
ctgttagcccngccggtaccgatccanaattcccgggtcnacggggtggcggatggaggaggctcgtgtgggca

SEQ ID NO: 442795 - DNA, 107 bp, Triticum aestivum
gccaccttaatcccagtacctcgctcacgatcgtgcatatcaacatcattaccgttaactgcatcatcaaacaagtctgtgtcctcaaactcaatctctagcgggcg

SEQ ID NO: 442796 - DNA, 298 bp, Triticum aestivum
gtacgtttttaccaaattaaaaggctgcaatgacaatggcaattgccggacggcaaaggattcaattgtaaggtaatggaaattcagcaccatcaattttaacccccccattcttgaatttaaccttgcggcaaattgtaacgttaaccttattcttcccctccggtttgctccttcccgggttaatcccttaaatatgtccgctctcttctatccctctcacagatatcgggtgtctcgagaaccccgcaggagatatcgtgtaaatttgggcccccctgtcatctcatatcataga

SEQ ID NO: 442797 - DNA, 441 bp, Triticum aestivum
aggcgccataggagttgactttatttattgtatgacctgcgtgtcactgaataacgccatgtaattactttacttcattgctaaaccgttagccatggtagtagaagtaatagttggcgagataacttcatggagacacgatgatggagatcatgatgatggagatcatggtgtcatgccggtgaagatgatgatcatggagccccgaagatggagatcaaaaggagcaaaatgatattggccatatcatgtcactttttgattgcatgtgatgtttatcatgtttatgcatcttatttgcttagaacgacggtagtaaataagatgatccctcataataatttcaagaaagtgttccccctaactgtgcaccattgcaaaagttcgttgtttcgaagcaccacgtgatgatcgggtgtgatagattctaacattcacata

SEQ ID NO: 442798 - DNA, 118 bp, Triticum aestivum
attcgccggtccacgggagtgaaataaccatcattattagaacattgtcccatgatcaaaatataagtggccaaataagccccctcccccccaaaagatataggccaaagaagcctac

SEQ ID NO: 442799 - DNA, 418 bp, Triticum aestivum
ggtccacggcgctagagttattttaacttctcctcgaggggacaagttttgttatgtgttgcgattgatgtttccttgtactaacaacgccgcagaatatgaagccttgatctatggtctttgaatggatgaatagataagcctgagtcaggtctggcaccttggggattcatatttggttgctcaacaggtgtgtcgcaagtgggattccaaggatactctcattgcggcttacaatcgcgatagtcgaccctgtatcagggcattttaacggttatcaagtggaacacattgatcgcataaacaacgaatcggtcgacgcctcaagccggtttggatctcagcgtacgccggtaccatctaaaaccttttcggatgttttacataatgcgtctattaagttgcctacagaggaaaa

SEQ ID NO: 442800 - DNA, 283 bp, Triticum aestivum
acatgccacagggagatcatatacgacattggtcccctgcctaagaagtgggcacttcctgcggctacatgatatgcctaggacaactagctagaagaacacgacggcggtggagagagagcaacacggacagaattagctgggtgagaagtgacagtacgttctgttgaataatggaagcctcgtgtatgcattgggagggtcttgacccccaaggaacacaataaaggtcataattatgaatggaagtactacgatggttgtcagaaaaaacaagtggagg

SEQ ID NO: 442801 - DNA, 428 bp, Triticum aestivum
gacatcaaaacaaatcacgtcatcacatcaaatcacaggggaccaaatggatatctctacctcccctcgccggaccgcacgtataaaatcgccctttctacacaaccgcaattccttgcttcctcaatctcgactcatctctccattgtagtggtaatttcttgcgatcagttcgagctcgatcaaagcgagaagccacccacacacatacttagccgtagcagtggtattacttgctgccgatcaatcagcagactcagggcatatcggttgctactacatacattcataatgtcgtcgtcctcctcctcgtcggctgtcttcaacctgtaccagctcacgccgtctcccatcgagcagctctgctacgtccactgcaactgctgcgacaccatcattgcggtcggtgtgccgtgcaacaacctgtt

SEQ ID NO: 442802 - DNA, 51 bp, Triticum aestivum
  unsure (1)..(51): unsure at all n locations
tacttctnccagtgangtaccagtccngtaattcccggggcccacgggggg

SEQ ID NO: 442803 - DNA, 414 bp, Triticum aestivum
gagttccaggacgagccccggtaccgcgacgacccgcgatacctccgcgtctggatccagatggtggactatgtgaaggacgcaaagccattgctgaagaagttggagaggaacagaataggcctcaagagagctgcgttttatatggcttatgcgatatattatgagaagcgtaggaggtttcaggaggcagagcagatgtaccgcgtgggaatccagaaccttgcagagcctatcgaggagttacacaaatcacatgatcaatttatctatcgcatggagttataccggaagaggaaagataaagaaggaatgcccagcagagttaaaccacttcctagatgtgcaaaccaagttgatggtcaaagcagaaattatacagaacttaagtccaatcctgtgcaaaaattggga

SEQ ID NO: 442804 - DNA, 375 bp, Triticum aestivum
attcgccggtccacggggccaaaaaaggcatgttccataagggctaaacttaatgatgacgccgcggtaggatgacttacataggagacgcacgtcattattgcggggtttggttttttaaactgtgggtgtgaataccaatcaccaacatgttggatccaacgactgttaactgtattggcaacgcggaaaatccaaggttgcctgaagttaaagttaaatgagaaccaaccatttactggcacctaaaaaaaaagaacatccaagaactcaacctttccgtcagattctgtggaagtggtgctccaactgctgctacagctgccccagctgccagtggtgcataaaaaaaatggggaccctcaagaagttaaa

SEQ ID NO: 442805 - DNA, 182 bp, Triticum aestivum
cggggaggatgcagatggaaagtaagggaggctaggacagactgaaagaaaagtggaccactagggtgatttgagtgtgcatcggtatcgatgtcattcatgacgacggtctacatgcccgccacaccatcgacaattggcggatactcagcagatcacataagtctggactagtctgcgga

SEQ ID NO: 442806 - DNA, 469 bp, Triticum aestivum
ggtcctaaattatcgggtccacggcgagttcctatggctcatcttgtcaagcgcagagatacaaattttcttcgcaatgatttgggagatgatgaatatatgagagactctggaattacagttcctcttccaaaccgttatggcatgcctccagaccgtcattgtgatggagtggaccgcaacattggatacgagaaggacatgtatacagcgaaggaatgccaatcaggccactgagcgggaagcatacctttggtccgtcgcagatatgtgagcgccgcaactgtcccatgaacatgtccggtggcatgctggctggatccgttgctgaagttgcccaatgtgcctgaattgaaacaaatcgatgcccttgaacatcatttcttcgaccacatgatgaccgtacatgatttgctcgagtacccatgcagttttgttgtgtaattgctggattctgctactgaattct

SEQ ID NO: 442807 - DNA, 453 bp, Triticum aestivum
cggtccgagatcacgggtccacggcatggactcaggcaagtacgtgcggtacacgccggagcaggtggaggcgctggagcgggtgtacgccgagtgccccaaaccgacttccacgcgcaggcagcagctgctccgcaagtgccccagtctgtccaacatcgagcccaggcagatcaaggtctggttccagaaccgaaggtgccgtgataagcagcggaaggagtcttcgaggcttcaggccgtgaacagaaaactgagcgccatgaacaagctgctcatggaagagaatgagcgtctccagaagcaggtctcccagttggttcatgagaatgcatacatgaagcaacagctgcagaatccttcgttggccaatgatacaagttgtgagtcaaatgtgaccactcctccaaaccctctacgggatgcaagttacccagctggactccttgcaat

SEQ ID NO: 442808 - DNA, 438 bp, Triticum aestivum
gggtcgacggcagcttgagagtaagagccgtagttcttggacgagtacttggcatatttgaagtcatcttgcacttgtcgctcggccttggtcgcttgatgaactagatcgagaaggttggagtatggttggaagtcggcaatccgcttgattgggtggttgagaccgttcaagaagcgtgccattgtttgctcgtcgtcttccttgacattggatgtatcatggcaatctccatttcttggtagtattcttccaccgtcttcgtgccttgcttgaggagttgcaacttcttgaagagatcatgggtgcagtgtgtaggcacgaagcgagctctcatgacatccttcatttacgtccaagttgtgattggtggttcgcctcttgtatgccgtcgctagatcacttgttcccaccaaatgagggtgtagtcttgaaact

SEQ ID NO: 442809 - DNA, 393 bp, Triticum aestivum
tacattcaaaaaccatgcggcgaaattttgcatgtggagactgactggaaaaaattatccagagactgttgtagcctaggttaatgaaacatttcatcagggggagaaaataggttgcggctttgaacaattattatttttactaaatttgacattaagctaatgcaaatattaattaacatgctaatgaactaaatccttctactacttgaggggatctcacagctcatgaatattcctcaattacgattgcgcgtacacaatttgtgatgttctaatccttttgttctagatacaacgacaaataatctaattatggaaaatatgcaaggatgaagaaacaagaaaagcatagcccttattgctggcctcattgccgatcatcctagtcgt

SEQ ID NO: 442810 - DNA, 214 bp, Triticum aestivum
tagatagcatggtgaataagtggcgttagattcctccatgtacactccctgtttgccttgtcgcttcccttgtcatttgcccactagaaccatgacacatccttaattttcgtcctctgttgtaaagagtccaaccctaccagcacagttacatgagtacctgtgactattacagatctgaacgaaaaaaaaaaaataaaaaaaaaaaataaaa

SEQ ID NO: 442811 - DNA, 417 bp, Triticum aestivum
  unsure (1)..(417): unsure at all n locations
cagaaaaatgaagtgcgtgtatttgttcttgttagtgttggatcaattgaagaagagatcttggatcgtgcaaaacagaagatgggtattgatgcaaaagttatccaggctgggttgttcaacaacacctccacagctcaggataggaaagcgttgctacaggagatcttgaagagaggaactagtacacttggaactgacatccctagtgagcgtgaaataaatcgtttggctgctcgaactgaggaagagttctggttatttgagaagatggatgaagagaggcgacgacgagaaaactataaatccaggctgatgcagggacctgaggttccagaatgggtttttgatatcagtgaaaccttagctgagaagccccttgcggnagaagccaaaaatcctgtgataaacacaaag

SEQ ID NO: 442812 - DNA, 409 bp, Triticum aestivum
acgggggatatggaagatgtacatacttagcaagaagatttactagcataaaaaaaggaatccaacaacaaaaatgaactgtacaaaaacacacaagaaaattaaagccatctcgcgaagtaagagccggatgaacggtgtcaccacgtgtgggattatgcacgtgttacgtctcatcgtaaaagggggcgcccaaagggttccagctttaagttcccttacaggccactttcaaccccctctaagggtgcccccaatttccattcccgggccgtcctttttacacttccgtacggggaaaaccccgggctttcccaattttaacccccttggggaaaatccccctttcccaaggtgggttattcccaaaaaggcccccccgttttccccttcccaaaattttgccccc

SEQ ID NO: 442813 - DNA, 444 bp, Triticum aestivum
gggtcgacggcacatctgaaagcaagtctttgcacgaatcaatcagggagaggcacgtctctcacccaacaccgaatccaacagcatacaacgaagctgatcactgtgggtggtcaacagaggaagagatacaagccgatctgaaaaaactggacgccatggaacaggatcaacaagttacttctctccctcaacctggagccatgcatgtggaactcgataactcgatccgcacaaattcggtcaaagctcacagtgccaaattaagctcttacaataacttgaaaaacagtgttccttcgtcgacgatatccaagatgcatccgtgggtggacaatgctttaagcatcacatggaagctatgcaaggagattatggatcacaagcagcatattaataagctcgaacaagataatcgcaatctgagagacatcattgccaaaa

SEQ ID NO: 442814 - DNA, 433 bp, Triticum aestivum
aagttcccaaaggcaacataacgtaggaatgcaattttgaagtgtgaaactgcatgtaagtttggtatgcattcatcttgtgtaccatttaccgtacaagatttcatgtggttcgtgtatgttcttttggtattcatttaataattgtgaaaataaattgcaataaagaggtaagaaatgttttttagggaaagaggtaagaaatgttatttgtacatgttgttagttatggagcaatatgtttgatgaaacacgttaatccacatacccctagtcagatttcaatctccactcattacctttggtaaatctgtattgatggagtgaccatgatttcatctaaacatttccaggaaaagattaacgactttcttcacaaaaatgatggatgattgcaagtttttcacatgagaagaggaaagaacagagaggt

SEQ ID NO: 442815 - DNA, 235 bp, Triticum aestivum
taaccgtcgttaaagcaactgtatctcaggaaacagacaccttgcatatccggaactactacatcccacaataacaatatactttgaagtgccacatatgggaatctgcaggactccaaatgtatgagcagatcaaaacaagttcccacagatcaagcttagaatcctacagatccagctaagtcaagcaacaaaacaccacaaaaggggacaccttgcttttcagtcaattcga

SEQ ID NO: 442816 - DNA, 381 bp, Triticum aestivum
tggctggctttcattcaacaaagatctccagttattacggggatgatggtttcgtttgccaaaaatgttgctaatttcatcagtagcattgggaaggaccatgttgttattctttcaagtttagattctggcaagagaagagtaattgatgcatccagtgatatgctgtattacctttcaagctgcaatgaggatggttctgatccagaatgtgagaaactagggtggaagaaacttgaggaatatgatccatctcaacgactgtggaaatgtcttgctagtctaattgagggtggtgttctttcagaagatatggctgatgatcctgaagagatgaccgcaagtgattactacgcgaccttgccacttgcagctctattc

SEQ ID NO: 442817 - DNA, 290 bp, Triticum aestivum
gggtcgagcggggccagcaccatacccagcaaccacttcattgcgccgttggctgtgtccttcctcacgctgacataacatttgagaccacatgaattagtcaacatcagatacgggcggagcctggattcataaatcgctgaggcgacattacatctatgttcccctagttatgaggctcgataatactgttttttttgtatcccctgtgatttgtggcgatgaggtaattaacacattacaacatttgcaccgccagaatgataccaaggtacctacacgtgcgccta

SEQ ID NO: 442818 - DNA, 352 bp, Triticum aestivum
ggatacacaagcagttggtgtattttaattgagtttacttcaagtcctctacaaccggatattaaccaattcccatatgccacataaccgcaagcacggctctcaaaagtttaaaccctacaggggtatcccaacttagcccatgacaaactcacgatccacgaagacaatcctccatcgcgggaccctccgatcagactcggaatcccggtgcacaagacatttcgacaatggaaaaacaagtccagcaagacctctcgacgtgctaacagcctgatagtacctgcgcgtatctcgtctcaggccactacagatgagctatgcatccaggtgccaaaataccccaattaag

SEQ ID NO: 442819 - DNA, 370 bp, Triticum aestivum
ggcgacaaacaccaaagccgagaagcggccgccggcgtccaaggacggcggctagaagacagggaagacgagatcgaacaagagcgtggagacgtacagaatctacatcctcatggtgctcaaccacgtgcatctcgacatcggcatctcctccaaggccatgtccatcatgaacgccttcatcagcgacatcgtcgataagctcgccagcgagtctgccaagctcgcctgctatcacgagatgcccaccaacacctcacgggggatgcagagcaccgtcggccacatcatcgtcggcgagctcgccgcgcacaccgtctgagaaggcagcacagccgtcaccaagttcaacggcgcttagaaaatctgt

SEQ ID NO: 442820 - DNA, 363 bp, Triticum aestivum
aaactgaacctgcaacacttcccgagcatctacaccatcgctgttcaggctgccggtggaatatacgagaaggtgatctgcaattacttccttttggccctcacacccaacgataaggtttggctcatgcatttaccggaggactcgatttcgtcacgcgaagacctgtgccacgaattcatcggtgccatcaccggtgggcaccacgaactcggcaagcccatcgacctacaacttctccagcataaagaaggacaaaccctccgtaaatacttacaacgatttaatacacttcaaacgaatattccaaatatctatccagcagctgttataacagccttctaatctaatgtgcgcacatgt

SEQ ID NO: 442821 - DNA, 406 bp, Triticum aestivum
gaggacagcagtggcgtgcccgtgttcgcggagtacaccctcgacgagctacacgcctccaccgatggcttcgcaacggaccacatcatcttcgagcactgcgagaaggagcctaatgccgtctaccacggaccctcttcagctctggcaccaccgtcgccatcaagcgcttcgaccgctccgcctggcctgacgcacgccagttcgtggaggaggctagggcagttgggctgttgcagagcggtcgcttgtccaacctcatgggatgatgctacgagggtggcgagcggctgctcgttgctgagttcatgacgcatgataccttggcagctgtgattcgtagtgtggttagggtttgttaagtttactagctccttcattgatgatgggtggcccgtggtgcttt

SEQ ID NO: 442822 - DNA, 368 bp, Triticum aestivum
aacagggatcggtgcagattctgccagaaggttagcaatggcggaataagcaggttcaagtttcatctgtcgcaaattccgagcaaaggcgtcaacccttgcgtcagggtgacggatgatgtcagggaaaaggtgatcgctctcatagaagccatggaatcacacagggagctcgagcttctcaagagaaaacgtgttgctgaactgtcggtgcttccgaaaagaacacgggaacttccatctcagccttcctccccagggttgcctacttcgcctgctattaatcctgcattcgatccgagtcagctccttggcctggaagtgcctgctccggtacttagactatctggtgctgccaccaagccccg

SEQ ID NO: 442823 - DNA, 177 bp, Triticum aestivum
gaaggagactaggtcgcccaagaagagcgccaagtcccacaagaaggccgacaagactgcgtagagacagacgagcgtcgatgagcttgctagaagcaatggtttcgatggtagaatctgtggtgccagccggaggtgaaaagggcgctgttcatagcggccgcgccatacgatatc

SEQ ID NO: 442824 - DNA, 389 bp, Triticum aestivum
gtacttcaaggccggcgatgccgatgaggcacgggcgatgtttgacagggtcccggtgcggaacctggtgagctggaacgcgctcattgccgggtacgcgcaaatcgggcgctccgaggaggcgttgcatgcctttcactcgatgttggaggacagggtcaagccggacgagttcaccatggccagcgtgctgtctgcctgcgcgcagctcgggtcgctaaaggaagggaggaaggttcatgacttcatggaccggatgcgtatacggaagaaccacttcgttctgaatggcctggttgatatgtacgccaagtgcggcgacctcgagcacgcccgcaaggtgttcgacagcatccaacggaggaatactgaatgctggaactcgatga

SEQ ID NO: 442825 - DNA, 381 bp, Triticum aestivum
  unsure (1)..(381): unsure at all n locations
tggnngnngnaacgtttacttngcccggttcngnnnnnnnnnnnnnnnnnnnnnnnnnnnnnnaagtcccannnnnnnnnnnnnnnnnnnnnnnnnnnnnnnnnnnnnnnnnnnnnnnnnnnnnnnnnnnnnnnnnnnnnnnnnnnnnnnnnnnnnnnnnnnnnnnnnnnnnnnnnnnnnnnnnnnnnnnnnnnnnnnnnnnnnnnnnnnnnnnnnnnnnnnnnnnnnnnnnnnnnnnnnnnnnnnnnnnnnnnnnnnnnnnnnnnnnnnnnnnnnnnnnnnnnnnnnnnnnnnnnnnnnnnnnnnnnnnnnnnnnnnnnnnnnnnnnnnnnnnnnnnnngactcaccctgtancggctcattaaacnctncgnntgtgat

SEQ ID NO: 442826 - DNA, 87 bp, Triticum aestivum
cgggtcgacggggttaggaattgtaaatatgcattgttgtatcgcgacctgaatgaatggaataaacgaaataacgctgttgtccag

SEQ ID NO: 442827 - DNA, 400 bp, Triticum aestivum
ccagtttagatgacggtctagcgataggatgcataagcctggcatgtaaactctattgcagttgctctggtctttaaagaaaattgttgtgctttttgtatgattgatactttgcaataacatggttgcatgcatcaatcgatgcaaaggccccagggctccctcttttattgaaaaaggttaccatatacaagagcatgtcataatataatgagacaacacaataaagcaaccggagaatgtacccaatgaaaatgatttgtaatggacaacaaaaatgagaaaagaaaattgaacttacaatgataattttaagggtaacatcaaggccttgtttctttaacctaagaaccatttcatcctccaaagcacgaacttggtccaatatataaacaatctg

SEQ ID NO: 442828 - DNA, 123 bp, Triticum aestivum
gaagaagcccaaggcggagaagcgggcggcggcgaccaacgaggccggcggcgacgggaagacgacgggccggaagaatggcagcaaggccaagaagggcgtggagacgtacaagatctacat

SEQ ID NO: 442829 - DNA, 396 bp, Triticum aestivum
tacggcagcgaaaaaacaacaaaattccaggggtgaagaacacacatcgtgtcagcgctgctccggcagacatctcgagatctgctgtgcgaaaacagacctgatctgtgtgctgtggtctcatagagaccatatatatctacactaaatatatcacatgtcacatctcacatcgagatgttgttacacctttctcgtgacagtctcgcgctataacagatagcgctctctgttcgccccgccgcccgcggagatgctatagtggtagagtgtatatctcctcctccgcggtgtgcctctgcgtgtacatatatggatactctctctgtacagtgacaccggctaacattgagattataacactctgtgtaatgttataatactctgttgccctcc

SEQ ID NO: 442830 - DNA, 330 bp, Triticum aestivum
gacagaagtaaccttggatcggatacctctaaatacaacttcgctgggaagataccgaccgggcttgatatgcccagcgatgtcgcagacgagaaggaggctgaagaagctagcaagaactgaaactgtcagggtgcttggatgtctttgattcttttaccaaaccccggttctggctgacaatgaactcagaatagatgagcgacatctacgggtaggacttactgtctgttgctccggtgtatgatcaacacgattggttatgtttatgtgatttgttgtttgaacagatacccaaattcatgggaaataaggacttacacgcataag

SEQ ID NO: 442831 - DNA, 380 bp, Triticum aestivum
ctaacttcaacacagatctggatgactctaagtcacaaaccggatacgtgtatattttgaatggtggggcagtaagctggtgcagttgcaagcaaagcgtcgtgacgggtactcgaccgagacggtggtgaccgccaccggcaacgagggggagtacgagcggatcaccaaggaggagaagcaccacaagcacaaggagcacctcggcgagatgggcgccgccgccgccggagccttcgccctctacgagaagcacgaggcgaagaaggacccggagcacgcgcacaagcacaagatcgaggaggaggtggccgccgctgcagccgtcggcgccggcggcttcgtcttccacgagcaccacgagaagaagcaggaccaca

SEQ ID NO: 442832 - DNA, 348 bp, Triticum aestivum
cgcgggatgctgcgaggagggctgacgctggggcgctgccgcgctcgccggagtgcacacgcacattgacggcggcagatcgcccgtgtcagttggagtaggagggcttttttttattcgcgagatcagacggccctgggtggactaatcagacggctgcgcgtcgaccggccgatatttggcggcgcctatcatcgcccattttacaaacacctaaattcttaccaacgtcattagttcacgcacaaatttactgcgatcactccctcacacacacaacttcatttacaataaaaccatgtaaccgagtcttcgcaaattaaaaataatagtttgtgcaaggtaaaa

SEQ ID NO: 442833 - DNA, 273 bp, Triticum aestivum
gggtcgacgggccatggtgtgggaggggcgagagcccctccgagattggatctgtctctctgtttctccgttcttagatctggcccttcaccgtttcttttataaccggagatccgtaactccgattgggcttaattttggacacgatctctatccggaaattagctttgttgcggcgaaagaatggctccaactgccttacggggtggccaccacggtcagtggcccgccagaaccctggaggtcgcccgctgctcctggccccctcaaggc

SEQ ID NO: 442834 - DNA, 95 bp, Triticum aestivum
aaagtaaataagcgaagaacaatatgtgaaaagctcgtaagcattagatcggtgatggagaattatgccggatgcggttcatcatgtaacagtac

SEQ ID NO: 442835 - DNA, 345 bp, Triticum aestivum
gggtcgaggcgcactggaagcggaacatcaccgacaagaggctcaagatttgcttcgagaagttctgcttctgggagagcatgctgtggcactggggcgaggcccccaacaacgcgacgaagaaggccccgacgccggcgctgcccgccgcgaccctgtcgagctcgtgagatgctgtgtagatatcctcccccgcgaaattttagcataccagatgatgatacagcagacccccccagtctcctccattccatacaatacacaatagcgacagctttgtaaaggtagccatgcatgctgctcctaggcctttcgttcccaacagctatacattttgtttgctgc

SEQ ID NO: 442836 - DNA, 66 bp, Triticum aestivum
gtcccatgtgaggaaaggatgattgagactatgattcccccacaagtcgggatgagactccggatg

SEQ ID NO: 442837 - DNA, 393 bp, Triticum aestivum
gaactagaaaggttaatgccggtcagtacatttctgtccatttgctctagcttcacttttatgcttcgtgcgatcttccccacttcatcgatgtctttctccatgcgtcccttgattgctggaagatgcatcatttaaacgctccgcgtatatcttaccacattaccactcagaaatgcaatcagtacatatatacaagtaaaggatggagttcaagcctttcattgcagaggccttagtggctgattttgactcctcgttggcttcctgcaggtggaaagaaagaattaattttccttgtcaatagtacaagttagagactaaggtgatggcaagatgtaactaaatattgttttaaaaagggaaagagctcatgtctgaaacgtctgaaac

SEQ ID NO: 442838 - DNA, 53 bp, Triticum aestivum
gacacggatttctctctaacggcaaaattctgctggtacagatgagtgaaaaa

SEQ ID NO: 442839 - DNA, 395 bp, Triticum aestivum
ccaagacatacaaagttggcgaacttgttctacgcttgccggagaagaaaaaggacaaactcaagcccaaatgggagggtcccttcataatcgacgaagttcttaccggcaaagcgtaccgtctttgggatgcatcggacaatcgcctagagccgaacccctggaacgcggccagactccgagggttttatgcctaccgccgaattctttgttcgtccccttctcccctatagtttccattactttttctctcttttccacctttatttttttcgctttaaagctctcatacggctcgaccgaacaccgctgacgtagacatctttacatatgtacgtccattatacccggggacttctttacgagaagcttgttcacactattttttccgagcg

SEQ ID NO: 442840 - DNA, 410 bp, Triticum aestivum
ggctacatctcattggacatgaccccatggtaatgacatctcagatggagaaacttgatctaacagagacataacatgcgcgaaatttggcaaggcaaacctgttagttggcagacgagcacaacatcagtaagaatgtatgcaagacatatatggtataattttgagataaacaacaaataataatactcacatcggtacggttaaacattctcggatgttgtatgagcgtcggtcgcagcgcttgtgttaataataagatcctttgagtagtagagcatgaagagggcaacgatggtcatgagctcaccaccgtcatttaggtgcttggcatggaaattctcgttgcagcggtaagccgcgtagcacaacatctccacccacacatcgcggatcatatgaagtgttgt

SEQ ID NO: 442841 - DNA, 69 bp, Triticum aestivum
gaatcttaagtttaagttaggcatagtttggtactgcgccaaaacaaaaaaaaataaaaacatcaaaaa

SEQ ID NO: 442842 - DNA, 388 bp, Triticum aestivum
gatacgcatacggggatacgggatacggcattttccaaaaacagccattcggggatacagcggggtatataagtatttagaaaaataaatatgaaagtatatagaaaaataaatttgaattaagatctaatgagaattttttagtactggatatatattgtctcctttctattcatgaaagactgagagcagtccactcacagcccatgtagctgtccgtccacttagagcccatgtagctgtccatccacttagagcccatgtaaggcccaattccagaaaaccctagactagtagcactccagctgctccagccgaccccaacctcccattctcgtactccctttctccagccgccagtgaagaaaggaaacgacagcgccgccaa

SEQ ID NO: 442843 - DNA, 403 bp, Triticum aestivum
gggtcgacgggcgcaggtttgggcagctggagcaacaagaccagaggttgaagacgcggcttggctgttggattaacatccaacggtcagtgcagctagaataatttattgactaagttggcaaagccctgcgtacgcgttaacttagtaggcccacaagccagcctccaaatatggtgggtcccagctagcagggggaatcaatttttttcgcgtaataaggtggcacttccttgcatgcgaagatgttttctggttttttttctttttttctttttcgagttagaataaaaagaaaacaatttaacatctttgatacaatctatattttcatgaaaaggatcataataaagctggcgggtcccagctgtcagggagaggaaactttttatttccgcataat

SEQ ID NO: 442844 - DNA, 367 bp, Triticum aestivum
aatccggcttcgataagctcggccagctcctcccccatggcttgttgcttgggttcggaaaagtgccgcagtgtttgcttgaccggtttaaatccctttaatatattgaggctatgttcggccaacttgcgtgggatccctggcatatctgacgggtgccaggcaaatatgtccaagttttcgcagaggaatactcatagtgcggcgtcaactgttgggttcagctacgctccgatagatgttgtcttcttggggtccgttgggtggacctggaatttgactatttcttctgctggtttgaaggaggtggatttggggcgtttatcgaggattatgtcgtccctgtccaccatggagcacagtgcag

SEQ ID NO: 442845 - DNA, 411 bp, Triticum aestivum
gaggataaagaaaacgaagaagatgaagaagaagaagaagaagaagacgacgaagaagaagaagttgaagaagaagaagacgaagaagaatgaagaagaagatgaagaagaagacgaagacgaagaagatgaagaagaagaataagaagaagaagaagaagatgaagcagaagaatctgaagatgatgaagaagatgtagtcgaatacgatgacgagttagctgacgatcaagatgaatccgttgcgcataacttgtcgacggcgatgctgaggacttcgactcaggtttgcaactggacgattacgctgaccaggaccatgacgtttgagacgaatttgatccttcgtacgccgattggcagcccgaccaatacttcgttcataacacctcctctgactcggtccggtct

SEQ ID NO: 442846 - DNA, 409 bp, Triticum aestivum
agtgatactcaaccaaatcctatgtcttcgagcaaagacaatgagagcaaaccttatccagagctggatgagtcagctttgtttgtagcccaagccaagctgtcgcgtgtgtttgaaatctcaccgttgggcacgtatcagttccttagtgacccaaggtcatttcggacatatcatgtcgggttgcctcctggctataaatagcccactccctacaccataaatttgtggctgctcagagttagtgcacggcttttttcgtttgagaacaaccctcctccgaagcatttgagagagagagagatcattgcgaggactaatgtcacatccctagttctggtatgctcaaggctagctagtcatgtgtgcatcatgtttcaattccatttaaatttgaaatgaggatttg

SEQ ID NO: 442847 - DNA, 413 bp, Triticum aestivum
ggggttaaatggattctatcccggctatatgaataagcttgttgctgcactacggcagtttgaagaagatctctcgcccgccgtgtctcaactgtctctattgaatctccttccattggaatggctgccaagcgtgaggccgcagcaatcatgttatccagggggctcgaaaagtgacccgatggtgtaggcacatactgtggcaggttaactgtccgtcgaggtggctccgttgctcgtggctgatccaaggcgatcctaggcgcttcggctcggtttgcggctgtcggattactcggcccggcgcctggcgtttgaaagagatttattccttcgtaaaccggtggcaggcgcgaccgatacttcgttcataacacctcctctgacgcggtccggtctagcatgagccgata

SEQ ID NO: 442848 - DNA, 367 bp, Triticum aestivum
atagcatcattgcccagacattgtcatctgcaaagtataaaccataagttgctgttctcagtgattcaaagtgcatatagtgactcacatctccaacaaggtacattgctgatatgagactttgataatgcagtgtccggaagcgacaagcaaaatgttaattctgtgagcatcactgcaccgatgtaatgcatgtagacatgttaacatgtgcttagctatactgtagaaattggtaaccctttgcaatttggttgcatggttgcttgagagagaccatcttcatcctatgccacatactgcatgcttacatcttacgtcatccaatttcaggacacttgcaactgctctacaaacctcagcacat

SEQ ID NO: 442849 - DNA, 118 bp, Triticum aestivum
gaagacaggtccgagtgaagagaaaaaaaaagccatacggaactcaaaatattttccggagatattcattttcctgaagaggcggataagatattaggtggctgtttgataccgccag

SEQ ID NO: 442850 - DNA, 356 bp, Triticum aestivum
cgaagaaaataccagctccgacatgccattaaaatcgcatactcccgttctgcacatccctgctcttcctgagggcaccgtcgtggtctcaacatagcaagaagagcggcacggctggatcggcgaaagagatggcattttcctctgaccacactcacccttgacattctcccattgaaagatctgcggtttacttcagctctggcaccattgagggtgtgcgctaattttctttggcaaaggctgtagcttccagagtgctaatgcgaaagcctgagacttgaaagtgttattgcttcccttgtgataccctaataataaatgcatttggcgacttaagcacttctgcgccgctg

SEQ ID NO: 442851 - DNA, 419 bp, Triticum aestivum
gagaatgaggagaggacggctaggctattggaggaggagaggaaccggaacgactcggctgaccgggccatgtacgatctcttcgtgtccatgtgcgagaagaacggccagacccctccgccgatgccagtcattgctccggcgggcacggtgagtttcatttgaatggtcattagttactagtcttcacatttgagttgcatcatgctaacgatacattggaaataatctttggtgcaacataactcccaacaagcatcgaccgatccttctccgtctgccactggcgcgaccggtcctacacctacacctccgtgatgacgatttgcttaagatcatggaagcttgggttgatggagtgcttgtatttagtttttgttttgaccttatgaaacttgctacctatggatgaaactgtg

SEQ ID NO: 442852 - DNA, 386 bp, Triticum aestivum
attcttacaaattatcggttgattaactgttgttgtatccatgggttagagttaatttgagctagttcgggctcaaatagccctaaagtatatccaaacatgagggctagtttgagctagttgcatctaacccaccccaaaaaactatccaacccaagaggtgctaattggagctagttctcctagtgcatttattgtcaatctaaccctgtcatccaaacacctctttggatggagttagttcagggttagtcatgagctagaaactaactctaacctctagctaagttgagtatccaaacagggctatgttgttgttgttgctgattctcttctacgtatatctagacatcatcaaaacattaaggctcttccttgttgctatg

SEQ ID NO: 442853 - DNA, 445 bp, Triticum aestivum
cccgggccgacggggtgctcaacaaaggtgaaattcatatggatcaaccagggaatgttggtgcgaataatgcatctgggatccaagcattggaaataagatcctgcaaccagtgcgccattttggagtctggcttactaagacgccctatgcgttctcgaggattgcttgctcgcccctacatccattcaatgcttgccatagcagcagtgtgtgtctgtgtctgtgtattcatgcgagctttgctgcggtttaattctggtaggtccttcaagtgggagaggttggatttcggtcccacatagacattggaggatgccttattacttagccgcgtgatgttattaaggaaataccttacaagaaccagagggtgtggaaccagattgcttttaacctttccagtttccatggaactctgcccatggacatggattatgaaatg

SEQ ID NO: 442854 - DNA, 379 bp, Triticum aestivum
gcatttgatgaagcaagttcggttccggcgtttggaggcagagtgtccagcgacaccagcacactggtgaacttccggccgaagctgaggcccgtctgctccatgtgaagacagagatggttgatgggctaccgcacccaccggtgctgttgcagctagcatttggttgtttgggtcctgcggctgctcctatactgctacttactgcttgcgccctgattgtctcctgcttgcttgcaactttgcacgtctcctagaactcataatgttatgttatgctatgatgcgagtactatatgtagtcgtggcgctcttgttaattagagctatatggtgatgctagtatgttagatgtcatgtgttttaatggaacacctgc

SEQ ID NO: 442855 - DNA, 416 bp, Triticum aestivum
gggtcgacggcaatacggatattgatgaggatataggcctgggggtcacccgccaggagggccgggttactccaaggatcattaccagaagcccggagttaagtttcaggataatgggccagagatgggctgagacccggatatagcttaaagcctgtagttacaatcattgttatagtagacttgtagtgtaaggcaagtattgtttagagtccaagccggacactcttatgagccggccggactctaagggctgctgggcgtcagcctccttatataaagggacgacccggcggcggtttggggacaacaatctctccgagagccgggcatagctgtttagctccctggcgatcgtaaccctaatcaataacacctcgaactggacgtaagcttttaccttcaacctaaggggg

SEQ ID NO: 442856 - DNA, 56 bp, Triticum aestivum
  unsure (1)..(56): unsure at all n locations
ttccnntnccccagcccccganatcanaannnnnnnnnnnnnnnnnaanacggana

SEQ ID NO: 442857 - DNA, 138 bp, Triticum aestivum
aacgaacagcagggggcggtagaactccacatctggccgggtgatcagcatcatgtaatgcactgtgcctccgtgtcagatctctctcgttcgtcttcatttctgtaggattcattttatccacttattcagtcatgt

SEQ ID NO: 442858 - DNA, 390 bp, Triticum aestivum
  unsure (1)..(390): unsure at all n locations
ggcctgagtgcaccatgtgtcttaggacgcacatggcttattatgtaagccgagtgccctctcattgtgtttgccgacacggtggggttcccaactgctaccacatgtccaatataaaatgagtctttagctaccgcactcggcttatatataaaccagcacatgtcatttagttctttggcttctataagacgagtactttttctgggccatatggcttacgattttgtaagtcgagtgcttgaaataggtgaccgagttatacgtataatataagccgagcgcattggctcagagacacagcttatataatatacgtcgagtgcttttacctgngcagcccggcttatagtgggtaagcccattactgcactcggcttatatgccaag

SEQ ID NO: 442859 - DNA, 387 bp, Triticum aestivum
ggactctgcctggttcgccaccaccgccgccacccaccccctcatcctcttcctccgctctctgcagctgccgctcatctcggtgggaggtccttaggcgggcaggttcccctagatccccggagtcactcaatcaaatggctgacggtgaggacatccagccccttgtctgcgacaatggaactggcatggtcaaggctggttttgcaggggatgatgcacccagggccgtcttcccaagtatcgttgggcgcccccgccacactggtgtgatggtggggatggggcagaaagatgcatatgttggtgacgaggcccaatccaaaaggggtatcctcaccttgaagtacccgatcgagcatggcatcgtcagcaactgggacgaca

SEQ ID NO: 442860 - DNA, 434 bp, Triticum aestivum
cccgggccgacgggtcaacttatcaacccagggaagtgttccatccttttttccgataattgcatgcagtcggtggcggatgaagtgaaacatattctggagattactcagcaggtttttgagcctaagtatttgggcttaccagtcccggaagggagaatgcacaaagggcagtttgagactactcaagaaagactacggaagaggcttgttgactggagcgagcagtacgtctcgtcaggcaacaaggagatcttgataaaggcagttgcgcaagcaataccaacctatgtcatgagtgttttccgcctccctgcctcggtgtgtgatgatctcacacagatgatgagacaatattggtgggggtggagaaaggcaaaaggaagatggcatggcttagttgggaaaagatgatgctaccaagagtatgggtg

SEQ ID NO: 442861 - DNA, 351 bp, Triticum aestivum
cacgtttacagggggtcaacccgggaagaagccaacccaagggaaaggtcacactgcccgtgacttttggaagcgacctgaacttcaggacgatgtggatcgtgttcgatgttgccaggatcccctggccctacaatgggatccttggctgcccagcgctggccaagttcatggcggcgtcacactacgcctacaacaccctgaagatgccgggacctgtgacgatcatcaccatcccctccgacaagaaagatgcactgatttgtgctgaccaactaaaccagcaagcagttgcagcagccgctgccgctagggcacttgctcttgccgctgagaccccgggggaaaaaa

SEQ ID NO: 442862 - DNA, 412 bp, Triticum aestivum
  unsure (1)..(412): unsure at all n locations
cgtgagacccgggggccggccgggccacgtgggccattggtcccggttcgtctggacctttcggtcccggttggcgggacaaaccgggaccaatgtgccttgctcctggcccaccaccattggtcccggttggaggcatgaaccgggaccaaaggacgcccattagtcccagttcgtaccaccaaccgggactaaagtgttggtcctcgttgcggccagagtttagtcccacctcgccaaccgaagggggctcacaccggtttataagcccctccctctctgccttgttgagctcctctcaaaatgaaaatagatgcccttatacaggaaatttgacctanattcatactgaatttctctgaagttagtagaaatttattatgaatttaggttgaattttctctataagctc

SEQ ID NO: 442863 - DNA, 58 bp, Triticum aestivum
gggccacggcaatgtggtgagtgataccagctgagttgcagttttcagattgttcgcg

SEQ ID NO: 442864 - DNA, 415 bp, Triticum aestivum
ggtccagaatatcgggtcgacgacgaggggaaccgctcaagcggacgagaagagctcgaagaagaggggaacgcttcctcgcatggtacagccgcaagggtggaaataagatggcacatgattgggaaacaaaattgaggccattcgttgagcagtggagaacagcaagctcggttcactggcacgaggaggcgctctttgacctagctgcacacgaggcttacctatggtgtggtcacaaatgagattctgctacataccaagagctgaccctgaggacatggagacggctcagacttcagcttcggagacgcactacagttcttccgtgactagcgtcatagatcactcgggaatttgcaagcccagttgacgctggaggctcaagaagagactgccgcgatagttaaccgac

SEQ ID NO: 442865 - DNA, 383 bp, Triticum aestivum
gagggctggtccaatgtttattacatatggaccgtcgattggagcagcactttctgctctcaaagctccaaaagttagttatttttacatatggaccgtctattggagatgctctgagcagtagatatataagattagtcgggtgcacaacacccctttgttatggacacacatcccttttatggcaccaggaatatgcgtctgtatggcttcccaactttttttgttcacatcaatacagacacaagtgctcatatatgcacacatacactaaccctatcaatacacacacgaacaccctacccctatgagaacctccgagatactgaaccgacatatcatcttgagattttatgaagtcaccgtacgtgcctcatatttga

SEQ ID NO: 442866 - DNA, 393 bp, Triticum aestivum
  unsure (1)..(393): unsure at all n locations
gccttccccagtcaccgattcaaccattcgcatagagagagaaagagagtcaacatccccgattcagcaccgagctcgcaccggtggagatcgtggtgggaggatgtcgtcggactactcgtcgtcgtgggcgcgcgcgctcgtgcatatctcgccctacaccttctccgccatcggcatcgccgtctccatcggcgtctctgtactcggcgcagcatgggggatcttcatcacggggagcagtctcatcggggccgccatcaaggcgcccaggatcacctccaagaacctcattagtgtcatcttctgtgaggccgttgcaatttatggtgtaatcgtggcgatcatcctccanacaaagcttgaaagtgtgccaacatcgcgaatgcatga

SEQ ID NO: 442867 - DNA, 422 bp, Triticum aestivum
  unsure (1)..(422): unsure at all n locations
ggtggtatgaccgaagccggtaatcataacatcatccgccttgtcatcagcagccttcactggacttgacggtttatcagcagccttaactgggcttgacggtttatcagtgtctcggaccgggcttgtcggtttatcagactggcctgttgggtcaacctccacttgttcaacaacaaaatcataatcttgcggcggtgggtcattaagcatggcatcggcatttgtatcctccagatctagagttttttccggttcaatagctacattgtcgtcagccggtttatttaaccgggccttcttgttgggtcaaggtttggcactgaagagaacaaacataaaggtcaatacatcggacaaatataatatatcaaggataaaattaanacataactcaaccaggaaccgtcttgaggggtgga

SEQ ID NO: 442868 - DNA, 90 bp, Triticum aestivum
tacggtccaaaatccggggccacgggaagaaagctattcgaagttgtttgaatcatgcgaggcagaagtggcaatgtccatgcttgggtt

SEQ ID NO: 442869 - DNA, 226 bp, Triticum aestivum
actagactgacgcagatctacttactatcgacacaatgacgtggtaaatgattaagagaatcgggagtccggatttatagtttcacaaattctacaagctcgagattggcttaagcttagggtgtctgcacctccaaatcgttcttggatcaaactacgttgtgatcgagatagagtagaacgcatcaatagagaagatacggagatctagaatctatatactgac

SEQ ID NO: 442870 - DNA, 423 bp, Triticum aestivum
gctcccacagaagactatatcgttggaagggtgcctccaccacatatatctccttttgtggacaacgataaagagggtcatatacctgactatgcagtgaccttggagggatataaatctgctggtcaaaaccaagttatgcctctgccaggtttaggcgatgaagatctgggcaattcgatagtagaggcaatatctgagcataatgaatttgctaaaaagaagaaggagttggagatgcaagagaagaaataccacgaggagctgaagatggaaattgagggaactactttctctaatttgtcaaataagaaggctgatagcgcagccgatgttgctgacgaagatgaggcccaggcagctattgaccaagctgagaaggatgctgatgacattgccaagtctgtcgtttccaggaggaag

SEQ ID NO: 442871 - DNA, 394 bp, Triticum aestivum
gtctataatatccgtgctcaaccggttcccgtcaagcgctttcggccatgacctcaagttctgcagctaggccatgaagtgttggtccttctcaccgtccaccgatgatggtgcccgagagaagtcggggaatgagaaaaggatgttgctgtcatggtcgtcgaaacgacttgccgtggacgcagtcacgcactggatgccatcgacgactagccgtggacaagcacctcgccgcctccgcaaaatatggatgcacgggattctggtactaacattgtggagtgtgtgctatttcggtgttgtgacttatacactctgtggaagaaacccccggcttgatttacaggtgatgctgatttgtctgggatctacttccgatagattaatttggttt

SEQ ID NO: 442872 - DNA, 390 bp, Triticum aestivum
agtctgcaacattctgatccgtgtgtgctttacaaatctctatgtcatcttgtagatgcagctaccacgcgctactacgagctattccaaataactactctactatacgaatccggtttactactcagagtcatacggattagtgtcaaagtttgcatcgacgtaaccctttacgacgaactcttttaccacctccataatcgagaaaattccttagtccactagatactacggacaagttcgaccgctgtcatgtgatccattcccggatcactattgtaccccttgactaactcatggcaaggcacacttcaggtgcggtacacagcatagcatattgtagagcctacgtctaaagcataggggacgaccttcgtcctttctctctct

SEQ ID NO: 442873 - DNA, 383 bp, Triticum aestivum
ggcttcaatttaaatgggtttccttccacctttgattttttaatggccccttaattttgggttttaattgggtttcccaatttgaattggtttttccgttttccattggttcctttttggttcatcacaccttaacgttttttcagtacacagtcatctgaaacatttcttgtatacccggtgaacattttgacatacataattaacgttttctgagaaatgatattttctcagtctacttcttcttatacacactgtatactttgggtatatatctaatacatgtttagcagtgtgaaatacacgattagcattttttaatacattgtcaacaatttttctagacacattgaacattttttaaatgcttgactaacattttc

SEQ ID NO: 442874 - DNA, 426 bp, Triticum aestivum
cgggtccacgggggcccactgaccccgcagaaccctattcagcccccgcccgcatcgacgggacgctactccgccgccggcgatggaggacatcgaggacgtgctgggaccggccgggttttccggcggcggagctcctcccgggctccgcctacccctctccactgtcgccgtcaagcccaagcgcaggtcgtccaagctcgtgcagacgcagccccagcccgatgcccggatcccaggcacccagacgatatacgtcaagacattcgggtgctcacataaccagagtgacagtgagtacatgtcggggcagctctcggcgtttggatatgcaattactgaagagcctgaaggagctgatttgtggctaattaacacatgcactgtgaaaaatccaagtcaatctgccatgtcaactctcatatc

SEQ ID NO: 442875 - DNA, 434 bp, Triticum aestivum
gggtcgacggggagagccaggtgtctcatccggcaccgagatcaacgacaaacaatcatgttgacccctttgggccagcaacagaggaagagatggatgctgatttgatgaggatagatgccatggaagaggatcatgaagtcacttcccgcctccaagatggactcacaatgggagaagtgcagagctcatctattccaaactcggttatcccttccaatgttagatttctttcttatgagattatgaaaaagagtgtcactggttctcccgcggctatgcagcacccttgggtgcagggagctttggctgttacaggaaaactccgcaaggaaataatgaacctcaagcagcaagtcaacaagcttgaggaggaaaatcgtatcttgaagggcatcatcgccaagaacatcacaatcacatccccgaaaaga

SEQ ID NO: 442876 - DNA, 405 bp, Triticum aestivum
cagataaattggcatagtctgacaaatccgtttttctcttccccttattcataaaggcaaattcatccttggcggtatgcttggataaaacaactagattgcctggggcggtatatgccgtgccagtaacaacaacgtcatcatccttggcggggcttgacgggttgatattctccttagcagggcttggcgctttggcagtagggctcggcggcttggtaccatggcttggcggatcagcagtttgatttggaggggtggcatcagttgatgtatcgacctgtatcttcggttcagcctttggcggattagcatcagcacctggattttccagagtagagtggtctgtggcagtctcaggattttcgccctcatcttcaaggctcttctccgaatcaacttcat

SEQ ID NO: 442877 - DNA, 387 bp, Triticum aestivum
atatcacgcttgttaacacagtcgaggtcatgctcatccgccggatacgcccgtgccaacagcggacgttcaacctgtcggagtgtgctccggcacatcaccatcccttgagcaagctcctcgatcctacttacgaagacccctccaacgtgtcgttcaatggcaccaaagctctcgcaaccgcgactgacaatcccggattcagcctgcagcgtcaagccagtgaagtaagcaatttcaccctttacgagacgcatgtagctcaaagtttgaatccatgcatgatctaaactcccccaccttagccaggcctggcacatgaagtccaggtacgttaactgtccggctcccgtagcagacgacccatcagacgcccgattgacgggg

SEQ ID NO: 442878 - DNA, 442 bp, Triticum aestivum
  unsure (1)..(442): unsure at all n locations
ggtccacggcgacccacgaagggcacacgagggtgggggagcgcctaccccctgggcgcgcctccctgcctcgtggccacctcgtcgcttccttgacgtccactccaagtctgctggattgcgtttgttccaaaaatcactctcccgaaggtttcattccgtttggattccgtttgatattccttttctgcgaaacactgaaataggcaaaaaaacagcaatttgcactgggcctttgggtagtaggttagtcccaaaaataatatagaagtgtataataaagcccattaaacatccaaaacagataatataatagcatggaacaatcaaaaattatagatactgtcgtggaattgtcacgtcagatgtcctcgtgcaaggacttantcgtggagccatcgcaactaagaagcttaaaggggtttaaacggacaaaggaaca

SEQ ID NO: 442879 - DNA, 397 bp, Triticum aestivum
ggtccacggcgctgtgtgaagcacacccgttgcacgaaagcagcgaacggagcacgatgagcgtgcgcgcggggtgaccacgcgcccagtccttctagcagaggagtaagatgacaaggggggggggcgttggcgggctgggccaccaggtgagtgccagctacgttctcactctctctttctctgtttttctttttcgatttgatttcctctgttctgatttactttagccactaattcgtattaataaattctgtaggttattatatggcttgctaaaacatataaaaagccactcacgaacttccagaattattggagttacatttagtatataataaatattaatacacagcaaataagtattgggttaattcaaatggccaaaataaatgtt

SEQ ID NO: 442880 - DNA, 408 bp, Triticum aestivum
atctattatgtaatgttgatgtaatgatatccaccttgcaaaagcgtttcaatatgcggttctatccttggtgggaccttcgagtctctttaggatagtatcgcatattgggcgtgacagtttagttgatttggatcacgtgatcacttagattattagagggatatctatctaagtgggagttcttaagtaatatgattaattgaactttaatttatcatgaacttagccctgatagtattttgcaaataatgttgtagatcaatagctcgcgttgttgcttccctgtgttttatatgtgttcctagagaaaactaagttgaaagatgatagtggcaatgatacgaactggacccatgatctgaggtttatcctcattgctgcatagaagaattatgtccttgatgc

SEQ ID NO: 442881 - DNA, 213 bp, Triticum aestivum
gatacgcagtaggtggaccctttcacagccgtccaccactaagcatctacccgcactttcgctcgtcctcttgacgaagacctctatattgtagcaggggtgtggtattaataccttcctcaactcctgaacatacaggtggtttgagacgtactcattagtgaagtgcattgctaaggcccgacaagggtgttgtatgaaaaacttccacaa

SEQ ID NO: 442882 - DNA, 385 bp, Triticum aestivum
gtctcccatttagaaaaacccatgaccatagaaagccaaaaaacttaggctctacatcattgatgaggctgtagctgtctaactgttcagcgaaaattatacctcaaagaagatagcgcctttttcttggtccggaaactcaagcctgcaaagcatgtattctatatgaaaacatctaaattttgagtgtcaaatcttcaagcagtcaattgccttgaagcacattatagagcagaaattcatttgaaataaaataattatctatatatgcatgctcttgaataaccttttttgcatctaatcatcatggatgatatcgtacaacccaaccacccaaataccattactcttgatgcagacataagctaaatagctaacttttttt

SEQ ID NO: 442883 - DNA, 342 bp, Triticum aestivum
gaaaatcaagctccaagcgggacgagatccgcgccgcatccgtagatgacacacggtactggcacattcacggcttacatatcaaagttttggccaccgagcaggactcagtcgagagcttatatatgagaaataatgagacacatacgaccatatgtatgcgtgttatatgataactataaacattggttttcccgaatctcaatatggtctgtttcctttgcaaagtgcttttcttcgattgtagagagataacatagaatttcacatagactgcaatcatatggaaagtaaattcaagtttagaacaaagggattcaacgtacagctgaagtacaaaag

SEQ ID NO: 442884 - DNA, 289 bp, Triticum aestivum
aggatcatccggagatcgcgacgagtttagaatctgcttttactgtaacatttgcaaaacgtagaacaggatattgcggaattgaagtctgcaattaaggagcttgattcacaattgatgccaccatcagtgcaaacaagactattatcgcttgttccaacaattcactaggaatttacacgcttaaatactctggctgaagagatttataggcgggatagtccaaactgcatgaaaatgttgctgcagtcaattctactccatccagcattcataggaagatgctaat

SEQ ID NO: 442885 - DNA, 403 bp, Triticum aestivum
cgggtcgagcgcgtctccttgaccgtaaccccttgtgtgtttggaaatagtaaccgacgttcatcattcaccttaatcccaaaaccccctttttgcgtaaaggaatcaatctggtttctccatgccggatcaaaacctttcatacgcaaagcttgttaaaggaaacgccatttgactttatcatatgctttttcaaaatccactttaaaaactacgccatcaagttttttggagtggatttcatggagcgtttcatgcaagacaacaaccccttccaggatgtttctatcaggcatgaaagcagattgggacggctgaacaaccccttccaggatcgaagtttgtgaagtttgattttttttaatctagacgcactatattgtggaacggaggcagtggtact

SEQ ID NO: 442886 - DNA, 426 bp, Triticum aestivum
cgtgtagcgctgggctgcggaatcttaaaatttgagtgtgcgacgaaacgggccaccgagctggaccgagcgaaaacaggctcggctcggtcgctgaacgggcctatatttccagctcggctcgtcctttttagttgtcgggccgagcccagtcgggccgagctagaacgagcttcgagccgagctaaaatgctcgctcgtacgtccagccctagtcctagggcatgcccacctagccgggaaacggcgtggtgagagacccctagccaagacatcatcagttgctcctaatcagtcttcaagtcacggacgctcctcgattttcctgagctattcttcatacatcagtcattggttttgaaaactggtttaacaagtcatctcgtatccaatttcttgatagtctaattgtacccgaggagtttt

SEQ ID NO: 442887 - DNA, 293 bp, Triticum aestivum
gggacgattaaaccgtcaattcgcctacatccgacgaccaggcgcatctaaaccgcctttgggccacacgttcctcgacctcctctatagacatccatacgttgacgatcgtggcggcggccgaagtgatcgccatgtactaaagatttctagcgacggatgggttcagtgtgtctttgtcagcggaggttttgcggtctgtctgtgtctcaacgtgagggggcaatgtgaagtattatgaagcagcacatgtaactgcagcttttatgatgctaaacacatagtcatggcta

SEQ ID NO: 442888 - DNA, 384 bp, Triticum aestivum
taatcccaatttcaaaccagttttggaatttcaaatttccttaaaaaatacaattgttaagatggtcctccaataaactagttattttaactaaggacaacttaacaaatcgtaattggacaggccctattaggtgtagtttctgtgatcggaatgagacgatcaaacacctttttctagattgcccgctatccaaagttttatggcagacggtccatattacatttaatattactccaccgaattctgtcatcacgttatttgggacgtggcttaacaggatacagcctgacttggcgatacatatacgtgtacgagtttgtgcactgctgttgactgtatcgacctgcatatatgatttggtttttaacaggatatcacata

SEQ ID NO: 442889 - DNA, 345 bp, Triticum aestivum
attaaaaccaatgggttcaaccccggtaaaccttgggccaaaccttaataaaatttaataatctcatatcaagagccaagatatgtaacctgataaggttgtggaccaatgggatgacagtgacactgaaaactcctctggaagtgcatcatatcaagttgttccttacaagaatgcccaaggagaaaacaccttacctgtgctgtctaaaaaaaaggaaattcattattagtacatattctgtgcaatgtagtacttgccagaaatggagagttgtaccatccaaactgaaatatgagcaaatccgagagaatattatacaagttcctttttcttgcaaatatg

SEQ ID NO: 442890 - DNA, 414 bp, Triticum aestivum
  unsure (1)..(414): unsure at all n locations
gctcgcccaggtgggtgcagtccgtcgtgcgctctgagtggactgcggaggtgtttgacatggagctcctgagggaacagagctccgaagaacagatgattcagcttctacaacttgctatagactgcgttgcccaagtcccagacgcccgtccgacgatgtcccatgtcgtcgtgcggatcgaggagatcaagatgtcaggtggaagcaccgaagaaactgatcaacaacagcagagcgccctgaatcagggcgatgagatggtcgagggcccctcctcgccgtgatctctaatggcctgagagaaaggagccggctgcctgtcgctgtagcccacattcattccgttcatagacttgacgaatgctatcttcctcttcgacggcgganccggctgttttttcatctcttcct

SEQ ID NO: 442891 - DNA, 283 bp, Triticum aestivum
gggtcgacgcagagatgagttgcaccctcgcgtcctccacagaaacgagtgccaagagctggctttttagcctgcttgatacattaccgcatgataagtttgtcctactggcggtgaccctatgggcaatatggacagcacgacgaaaggccattcatgaggcgattttccaaactccacatgcaatacaaatgttcatcacccggtttcttgcagacctggaagctatccgtactcctaatcctacacgggctccgttggcaaggacaggtactttgataca

SEQ ID NO: 442892 - DNA, 376 bp, Triticum aestivum
gggtcgacgcgacatcaccagcagacaccaccgttcctccgattccacatctgctcgcagctcgaagaggatcgtcagccatgtccgggcgcggcaaatgaagcaagggactgggcaagggcggcgccaagcgccaccggaaggtgctgcgcgacaacatccagggcatcaccaagccggcgatccggcgcctggcgcggaggggcggcgtgaagcgcatctcggggttcatctacgaggagacccgcggcgtgctcaagatcttcctcgagaacgtcatccgcgacgccgtcacctacactgagcacgcccgccgcaagaccgtcaccgccatggacgtcgtctacgcgctcaagcgccagggccgtaccctcta

SEQ ID NO: 442893 - DNA, 378 bp, Triticum aestivum
tgacgggatccgggacgttgctcaaaagaagaaggccatcaagaaatcgagggactctgtcaagaacaggaacaaggaggctcgccgtggagaggcggatcgcgtcatccccaccttgaaaccgaagcatctcttctctggaaaacgaggagttggaaagacccagaggcgataaaccagtcaatgtggacgttgctgcttgcaatcactcgatcaggaactattggatcactgccatttttcgtgctgggcatcgggggaggcttcagtgtcaatctggcagctggagatactactatctattgcaattttatttttatctggcatttactctgtgttccgctttgtttgttagactacgttgttgttgaactatat

SEQ ID NO: 442894 - DNA, 515 bp, Triticum aestivum
  unsure (1)..(515): unsure at all n locations
tgnnngaacttctccttggacgtgccggtccaccaattnacgggtccacggggggggaccgtcaagcacatccggcaaagatcnagggggatcncgttgttgcatanctcaggtcagagcaaggtgccatcaggcgttcaacaggcagtctcacgatcgggcatgagtgtcctgaagaagaaattgtatactccctttggtcggaaggcggcgggggaaggaaggggacactgggcgggatctttcagcagcgaattccccatacagatagaggcgcctatcaaaaagatactccgaaggcttcgggatcgaggtctcattagccgaagaagacccaggccaatccacgtggcctctttgaccaacgtcagcgacagagacatagtaaattggttcgcgggcatcgcgataagtcttctgtcctactacangtgctgcgacaacctttancaantccgaaacgaattgtcaactancaaattcgcctggtccgccaaaatcaacctaacccaaaa

SEQ ID NO: 442895 - DNA, 386 bp, Triticum aestivum
gggtcgacgggagcaaggtagcggaggtgcagatcacgacgctgatcgagctgctgatgcggcacgcggtgaagctggagagcatacctgccgacgccgacacctcctcgcagaagaacctccaggcgaagcgggtgcagaagtgcgtggaggcgctggacgtgctcaaggtgtcgaacgcgcggctgcagacggtgctggtgaccaccaagtgggagacgttcgacaacagccccccggtcaccaccaagtgggagatcttcgactgatttaagcagcagcagggcagcagcagcagagattttttctttatacagaagagtgtccatttcgttcgtttcgtgccgtcagttttggtgtcttgttccttgcccattattcgtttc

SEQ ID NO: 442896 - DNA, 430 bp, Triticum aestivum
ttcatctttttaatatctttcatgggctgctgactctgttcatacaaacgacaaacttgtgtaaaatctatttcactgtcctgttgacttgtctgaccctgagtgaaattgtggttctgcggtgtgccataattttcttctggctaagttggcacggagcgcgtccaaggacgagacatctttcactctggggatatattttgtgaactcgtaagataagaaagagagtcgcaaaggtcgataaaatcacacacaaagaacatttttttaaactccaggatatttttggaaacacacgattgcgcgcggagaaggactattacatatcttacacgtgggcataattatacattacatcactcaggatatgcgtacataatcctgacatgttatttaaactagtgcactcctccagatcctacatgatgcg

SEQ ID NO: 442897 - DNA, 391 bp, Triticum aestivum
cgggtcgacagggatattgaacacggccaaaacacgaaatgcgccccgatgcaaatcaacttgcctgaaacctggcatgacacgcaaggtcattacattgaatgtacttgcaagctcacaacagacatacgcacgatggtagacaatatcatgataattaatcaagttaaattaatgcaagaaattactacaaatgcaaagctatgcaaagcaaccaaacagcgcatctagtcacacggactcgcttaccagacggttacctcataaccaaatggtgacctcaccggggtcagacctgaaaccaatcactcatgaacacctcgagtgttcaaggttcaccatgaaacaatgcaccacaacaattactagtttgcaagattaattataaaag

SEQ ID NO: 442898 - DNA, 225 bp, Triticum aestivum
gatatcaaactcgagtacacgtcccaaacctcggtccgttctcaacctcgccgccgtccgtcacaactccagaattccctccccatggctctcatcaagatccgcatcaatggctaccgccgggtcggcacgctctgtggacagagttgcgctccaaaaccacgatgtcgaggacgacacggtcaacgacaccttcaacaccaccgactacatgacctacatgtc

SEQ ID NO: 442899 - DNA, 425 bp, Triticum aestivum
gggccgaccgggcaagaaggaaaaaatgaaaaggaccccccggtcttatttataaggtgaaaggataagtgacaggcgtgaaaatcgaggagcccaaaagttggatatgtgacaaagcggtcgcctcgattatcggaggctcattaatgaaggtgaggtatattcaatttttaataacaggtgacgtcgtggcggtttattacgaacctggaagatgacgtcatggcgttttacaggatttatgtgaaggtgtggaaggaggaatttttctatgtgttgaagattgacatgaacaagttcaaatcaatctcgggcctaatgttggagatattactattaagtataaaccggccatgaagggccgggttatgctcacaatgagttagtcgagtttgaaacccatgaagacaagaagtatggcactt

SEQ ID NO: 442900 - DNA, 164 bp, Triticum aestivum
cgggccggccgggctctcagggtgaaagtgataacgagatcctaatgttagatttagtaaaattcacttaacccgaataaaagagagatcagagtccgagagtataggcaaggagtaaaagatcctaataccacccaatggcgaagtgggcccgtaagccacac

SEQ ID NO: 442901 - DNA, 202 bp, Triticum aestivum
attctgaatttccttccatgtatgccagcgtacatgtactacgtatgcactcattttctcttggatggcttggctaatggctatggatgaaagaatccattcaaaaatcatccactgggaacgtcctgtcgttacccaaacaaatatgtttgcaacacatctccctttcactagatgcctcatcagccaacaagtgcacacc

SEQ ID NO: 442902 - DNA, 416 bp, Triticum aestivum
gggtcgaggcaccatgtcaaggtaacaaagttcaaaggcgcggacgtcgtcgtcgagccgagcaccctgcacttcagcagcgcaaaccagaagctcgcctacaaggttacactgaggaccaaggccgctcagaagacacccgagtacggtgccctgtcatggagcgacggcgttcacgtagtccggagccccctggtcctcacatggctgccgccaatgtgagcttttctcctagtactgtatcgttgttctgccttagtcgagggcctgggagcagaagcagctgtgccccggcctcttggtaagcgaggttgatgaatcagttgcgtagcagcagccagctgcacaggactagcacttgccggaagaaagatgttgtgaagctccaactcaaaacaagcttttattccacaaat

SEQ ID NO: 442903 - DNA, 384 bp, Triticum aestivum
gtgacatgaaccttcaagaagaagagatcctaaagttggcttcattgggcaaccatggcaaccttgagaatgctgttgacgttctgaagagatcacttgctctccgcaacaagagctacaaagacttgatggtccaatgcaatcatctgggaagatcagaaagtcgcgctcagcagaggattgagaaggacaaagagctgataaagaagttgagggcaaaggtacttgatcttcagaaggaactggaagaaaaggaaaataatgtcatcagagacttgaggtcttcaaagaaatttaaagctgaccagaaccagacaaatccagtgaatgccaatgctaataatggtttctctagtccaagtgctggatatgggaatcaaacag

SEQ ID NO: 442904 - DNA, 396 bp, Triticum aestivum
tcgacgggtcatccgcatagccaccaccgacttccgcaacctaacccattttgttcaccatagcattagtggttggttgagtactgatttgagtctcctaaggtgtttcggctacttagggataattgcttcttcatcaaccaccaccgccacttccgcataagcgtgcccaccatacacttccgccaccaccaacttaacccaattttgtttgagcttgtttgagttgtggcttgtgtctcctaaggtgtttcggctacttagggacggcaacttcaactcggagacgtatatagccatcattccacttccgcattgccaagtgcaaaccaccaccgcattcccgctaccaccatttgacatttgacatttgagattttgagttcccgggttttc

SEQ ID NO: 442905 - DNA, 380 bp, Triticum aestivum
tgcctagccgggaaacggcccttcgttaatgcggaggaatccctaagactccaataagtcattgagtggttgatcagtctcacgctatatcatgacagtccgttttcggctttctctactgaggtgctcgtctggatgaaccagggagcggaacgtaaggcagcaaaacacaggagccgggcaaacctaacatttgaccaaagacatgatttggagctgatgcatataaggccaaactcgcgacgccgaacactccctaaggtattcggtctttatggtgtaaactgggtctaaatagtaccctttgtaataagcccctggtgtccaggtacgtgcattattctggcgtggccacatgccaagacgtcagcatccttctc

SEQ ID NO: 442906 - DNA, 332 bp, Triticum aestivum
tcacggtctagaatatcccgggccgacgggtacctgtacatctacctcccatcgtacaatactcgatagaccattgctcatccaaccctcgaccatcgactgatcatccagcccgcaatatcacagggtcgtgtccatccacgattcgaccttctaacattcatccaaccctctaacataacactatgtcccgatcatcaagaccacttctacagcgcaccattcatcgaagtactcttcgcctgcattcctgaatattcagcctatctgacgccgtgataggatacagctagtacggatacgccggaaatcgatctatatgccttactttt

SEQ ID NO: 442907 - DNA, 368 bp, Triticum aestivum
  unsure (1)..(368): unsure at all n locations
gggccgaccgggttgccaaatcacaaacagttcattcgagtgaaccgtatgttgtatatcgcacaaaccttcatctggctgcncgtttcttttgttcctcctcatcacaaacaattcatcccagtgaaccgtatgctgtgtatcgcacacaccttcatctggctacccgtttcttttgttcctcctcatcgcaaacagttaattgaaatgaactgtatgcccttcatcacacacgcaactaaaaccttaaccgtgtttgatgcatccgtcatcgcaaacattttatacatttttgacggttttcatacaccactgtttgtgattattgcatcgcacacagtttctcgaaaggtctctgattatagtgt

SEQ ID NO: 442908 - DNA, 432 bp, Triticum aestivum
  unsure (1)..(432): unsure at all n locations
cgggccgacgggcactatcatttgatgaaaaaagaaagaaaaagaatccatatccaaattgcaagaaaaaggaagcaaaaataactgcttgggaaaacctgcagaaacanaagcagaggcagcaattcggaagttggagatgaagcttgaaaagaaaaggtcactatcgatggatagaattttgggcaaactacgttcctgctcaaaaagaaagcagaaggcatgcgcactacagtttctgtgagcggngatcagtgtgctgtcagtgaagatcagtgtgctgtgagggcaaccaagaaggcatccttgagaaggactagcaagcctttcagctgctgtttcacctaccatgctcgctagttgtgatatggttggtatctacaatgattgtagaaactttttgaacctttgcagctcaagtcagccgaccga

SEQ ID NO: 442909 - DNA, 411 bp, Triticum aestivum
atggtctcaggcaactcttgctcgaactcgtagagagcttatgcttgggtcggggtggaacatcttcttcttcatcttggacttcttcattgttggagttgtcgttctcatgttgctgtggagatcgaggttgtttatgttcatcttggtgtgcttccgcagtttctacgtcttggtgtgtcacacatgtggatgcttctgtatcaactcttggttcaacttgtcctgaggtacaaccttacacttggactgacgaggtactctcattcaactccgattgaccaatcatgccatattacactcttggattgcttccgaacgatctttatctcatagatcacttggtaagtgctctacttgccatccattacgttcatcaagcttcagaattaccgtttcgtcaacctttcg

SEQ ID NO: 442910 - DNA, 363 bp, Triticum aestivum
cattttattgatcgctgcactacatgtcaaaaagctgagtcacgactcaatcctcatggtttatatatacctttgcctgtaactaatgttccttgggaggatctatctatggactttactttccgtttacctctaataaacaaggggatggatagcagatttgatgtcttcgatagattctccaaaatggaacactttataccacgacactagagcgatgagcctgtaaaggttgctgatttgtactttcatgaaattatacgcttgcatagtgtgccaaatactagtgtttcagatcataatactaaatttcttagccactttccgagatttcgatggcctacgttggggacaaaacggctt

SEQ ID NO: 442911 - DNA, 168 bp, Triticum aestivum
ccgggtcgacgggttccacacatcgtcctcaaccagacacatgaacggtaccaacccattccgatggaatggagccgtgacatttcattctactttattccccaatcaaacacaccctacatacatagccaacaaccgaaatttccaatggcaccatagtccggcaaa

SEQ ID NO: 442912 - DNA, 359 bp, Triticum aestivum
ggggcggctacggagttggacgaccggttcaaactggatatcgctcaactcgtgccatcgtcgttcgaggacgtgtatggcgggacactcttcgaggagagtatgaccatcctcgactctgagagttaaaagtcattcaatgatgctttatctgcgcatgaccatatgggaatcggcacattattgcgggaatgccatggcttactcaatggcttgcagtcacgcatcgacagtcgaggtggtgatggaatgagatctagggccaatgtatacgccttccctcaaataatatgcatcgtgttggacccttcaaagagtatcaataaagctccaagcgatggcctcgttaacgatatctc

SEQ ID NO: 442913 - DNA, 65 bp, Triticum aestivum
gggacgacgacgtagatgtggacgagtcggatagaaagctcttagatgatgaaaacaacgacgac

SEQ ID NO: 442914 - DNA, 396 bp, Triticum aestivum
agaagagtgcacggagacgatgtggtctctcgccagctctccgtgggctctaaggcatgtcggcaactcggcatagacggacgggcaatcagtttcattagatcgggtgcaaaaagaattgtgtgagagagatgcgcttggcaagtaagcatgtcaatggcgcaggaccggtcaaaatgtgccacatcagcgaaatacattggatacggtagggcttgaccgtagagtgacacatttctgcgacctcaatgaccatattttaacacttttgaattacggtgatgaaagtgaaccctagagtcaagttcaggtactaaagatgtaatttactcgatataatttggtctcatccaacttttatagccattggatgtgatgctataagatgcatgtgtg

SEQ ID NO: 442915 - DNA, 217 bp, Triticum aestivum
atggtggtatagtacgaaagcagctgtaattccagggacgatcaatgatcgaagaatatcaatctatcgatacaccgtggcttacaacctggtcagaattattccgtatatgaagttgaatcagatcatgtggatttacaaaatttgagcgagaatgtgttgcatgtttagaatatgatcccttaccctgcattgaatcaattcgttgcgatctatt

SEQ ID NO: 442916 - DNA, 352 bp, Triticum aestivum
cggatgtaggaggccatctgctctcccaggggcctgttggaaatccaagggcgccgccaaggggaacaacggccggtaggccacattgaaccctaatggaactccaaatgcaaagtgttttcacagcgagctatgacttcgaccatgtcgatgttaacgtcagtcgaaagcgcaaagacgtgaagtcctcctacgtgccacgcaaaatgtcggactctatgatctgcgtgcaagaaactctccaagaactaatgtttgacctcgagggtgttttcttggcaaccaatgacctgacgacaactccgacattatcaggacgagcatactcactcacaccagacatgacggggac

SEQ ID NO: 442917 - DNA, 397 bp, Triticum aestivum
gagacacaaagacacatagatttatactggttcgggccaccgttgtggtgtaataccctcatccagtgtggtgtggtggattgcctcgaggggctatgaatgaactagtacaaggatgaacaagcctgaggaggtgaggtgttcttgagctggtgtggtgctctgcttgttctgattccggtcctcttctatggtggtggctaagtcctatatatagtggccttggtcctcttcccaaatatgagagggaagggattccacaacggcgggatttgaaaggtcacaagtagtacagtctatcctgacaaaagtagtcttcgcctacgaaaagcctctggtcgtgacgctgcggtgggctcggtgatgacctccgtcctgtcgtcctggcggtcttggt

SEQ ID NO: 442918 - DNA, 420 bp, Triticum aestivum
ggtcagatatccgggtcgaccggattccattgtatgccatatagagattcgtgaggaagcggaggatccgaggaaggtaggtggaggctgggatacgccagagtggaagatcgtgcagcggcgctcgtcaccggagacggtgaagaaagagcctgtgccggcgattccgggtacttttctgctgatttcttagcaaggggggattggggaccgagggagggacctcatggaaagaatggaggaggtagggacacatcacagaaagagattgatgcctggtggtcgtctttcccgagtccggtcactgcgaagctagtaatcccatacaaaccagagagcccctacctgattcgctcctccacaagtagtttttcttttagaataatacatccagaagaagtaattggggggctgacagca

SEQ ID NO: 442919 - DNA, 171 bp, Triticum aestivum
cgggctcgacgggacggcaacgtagtcgtgaactagtcctgatagatggtacggatttggtcatgacaccgacgtcccaggacatgaatagggcaacactctacaagatgattttgtgagtcctcgattcttcggattcacagtacttcaacaatttctcctgaactcaag

SEQ ID NO: 442920 - DNA, 359 bp, Triticum aestivum
cgggtcgacgggaattgggaccaagagccttgcacgacctagggttagtttgaagctgccttgggacgtccttccacctccttggccgccgtcccttgcgcctatataggtacatccatctactagcgttttccttgggatttctttaattaaaagttagccatcgcagcgtcatgtacttcgtttgtgtccaccgagcagagcaagaccgcatatggatgcatacaatcatcaataattcagatatatttgcgacattcagattgctttatcatagtcttgctcgttcttcgattgcttggacgaatataccatcgtggtcaggctgaccgtgcttgcggcatcgtcagtaacctcag

SEQ ID NO: 442921 - DNA, 143 bp, Triticum aestivum
gggtcgacggggaggctgagctcaccgccagcgatgacggcgacggcgactacgacttcgccgaccacgactccgacgactcccccgagctcctctctcaccggcagcagcaaaattactgcatattgagtgaagcctggtat

SEQ ID NO: 442922 - DNA, 277 bp, Triticum aestivum
gagtaccacaagggcatctaggacgatggaatctaagccatccgcctcatcgctagcatcaggatcgcacctgacaacaagaggagtagcaggtactgttcaaggatgctactcacgcatcaccattacctaaggttgttgcgttggctaaagttaacgtggatgaattgccatcgaacctacaggtggaatcgtttcttgaatgcagcccccctagtttcggttttccttgcaaggtccccaataattcttatcaacaagttaaggtcaagggttt

SEQ ID NO: 442923 - DNA, 383 bp, Triticum aestivum
tggcctgggacggcgagaagactcgctgatcggggcagcgtcctcggttccgtgaagcaggggaggaagacgtcgatggacttggcatctccggccttggatcgcagaggaacggggtcatggcggcgtctcgatgcgcgtgggtggagatagggtcggcgacgagcttgctacgccggaggaaagcttgagcacgagccggccatggcgtcgggcggaggtgatggggcgaggtggagctacccttacctggctggtggcgcggaggaggaagggaggaggaaggggaaaccctagggagggggcgctggttaaaaaggacgggcgtgggcgccgtggtagccacggtggccatgtgcccctgaatattactgtgagtggag

SEQ ID NO: 442924 - DNA, 410 bp, Triticum aestivum
ggtcagaataccgggtcgacacaagcaatgagaaatacaaaaaggacggtatgatataattcacatatatgacgcttgcctaaacagcatggcattgcataattcacatacataatgccttgcaacaagataacattgcataattcacatatataatgtcttgcaacaagatggcattgcataattcacatatatgataattagacactaaacatgtggcattcacacaaagcatgtctaaactaagcaaatgacatagcaatgcaagataccatacacacaatatgagcaacataaccctgccaagttagggcatgcacctcgggggggggggatatgactggtcatctatctctgaatcctcctctgaggagctatcggtaaccagcaagacatgcgcttcgtcagat

SEQ ID NO: 442925 - DNA, 355 bp, Triticum aestivum
cggtctagaaatccgggtcgaccggtatgtggatcaaagagtaggagacagccctaccaaacacagacacacacagagagagaaagacacagagaaaggaaaaagttaggtctgtcaaaaagatcgtgacatgttatatacttgattccgtatacgtggaaagacaatacacaacatgtttgatgacacagctggagaaacatcgaccataagggaatgatctcatgggttcatggattgacacttttgtgaggtgggagagatggattggtaattttgtgcaccaaacataaggtcgcgggagatgtcaatcagccatcgtcacatcatcctgcgtcaacatgacaccgcattc

SEQ ID NO: 442926 - DNA, 132 bp, Triticum aestivum
gggcgggaggccctcacgggccgcaccgctggccgaccctgatcttctgtgaagggttcgagttggagcacgcctgtcgggaccgaaagttgtgaactatcctgacgggcaaccagaggaacctgtgagctc

SEQ ID NO: 442927 - DNA, 410 bp, Triticum aestivum
  unsure (1)..(410): unsure at all n locations
cgggccgacggggatacaaaattgatcggttacagaagaaagatcgggagaggttgagacaaaagaaaaaataaaataggtttttaaacagggttctatctcctatacaacaaccaattctaacangtattactcctatatttcagactttgtgttaaattcgtggtccaatgtttggtgggaaaatcagaaatactatgcactgacgatagtttgcttgctgtgtaacctgtatcatcagtgtcccacagtatatgctgcttgcaacattttgagtgcagcatcaacatgtttcagctgccttttgtgcatcctggtgtcctgattgtcatgtacatcaattatcaacaaaacattccaattgtctttaagcatacattgttatgatcagatatatgcctttgaacttc

SEQ ID NO: 442928 - DNA, 396 bp, Triticum aestivum
atagaagaacagattcttcaagagttctccctagatgattcgtttcctcttggtgctccattattcatggagacgccacactcttgttcaatgtacgctgaaaaggatgatcactgttttgacgaggatgttattccttgtgagatggatgatgacgatgacatcgtctttgaacatagtggatcgcagtctgacaggaaaacatcaggatctatggcttcatccgatgttctaaatgtgaatcaactgatggaatctgtccatgagacagcaaggcaagttgctaacattccagtctccaccaatcctgtgtcctatgaccaaatgaagagccaatgtgaatccctagtaatggaaaagcagcagaagatgtctgttctcatgagcttcaagcac

SEQ ID NO: 442929 - DNA, 348 bp, Triticum aestivum
tgccaggactagctctctcctaggtggtctcaacctgccctatcattccgcgacaatgtagctgttgggggccgtccttgaactcaagcccaccactacttggagcgagccacttatcctctcagccaccacatcggaatcacttgtgggtactctacgagccgaccctaccttattcaccacatgtatcatataccatgtatgtcattacgtccccgtgatcatctcccaattgatcatggtcctattccatatcatggcagacggacaataatgtatggccactgattgtgacactatcatcctatactaagcatttaagattgtaggtaaaggtaacaacatcta

SEQ ID NO: 442930 - DNA, 387 bp, Triticum aestivum
ataggtcacccaggaagcgaagttacagcaggtctccaccgcctgcccgtgcgcgaagcaccagcaggtctccaccgcctgcccgtgggcgaagcatcagcaggtcaccgccgcctgcccgtgcgcgaagcatcagcaggtcacctccgcctcctcgcaacagaagcatcagcaggtcaccaccgcctcctcgtgccataagcatcagcaagtcaccaccgcctgcccgtgaacggagctatagcaggtccccagcatagccactccagcgcgaggagtccccttatgctgataacgcgtgagcacttggttccacaatgctggaagtgttggggggtgggggcctccgcttgtttccttgaatgttttggtatgactattgaatgg

SEQ ID NO: 442931 - DNA, 342 bp, Triticum aestivum
tctgtttagccatgttccagtttttctactaagtctgaatctgttaacgaaagttactatgttcacatggttgccattgtattttctgatcccttttggcttatggtaagtaagggacttttgttgtatgctttgagtagcttcatgccatgccttgctttgccatgatatgttcatatagcatgttgttatcatgctctaaacattgcatcctgatgttaaattccgggcaagttgttattttctctaagtctgtaacctgatatcttttgcacttttgccatgcttgtttgaacctgctattatgtgagttatccgtagctcagtgttcatcttgtggca

SEQ ID NO: 442932 - DNA, 352 bp, Triticum aestivum
ggctcccaatgtccgggaaggctctgattaccaacttgtaatgccctcgatacggctatatcgcctacgtgtcgagccatgacttacatgcataaccacattcaaagcattgtcgcaagtaaggcactcttcagaacatcccatgtttatagatactacaagggaaggtacatagttggcttacactcgccatatcacacatagtacatatatagcattacatcaaccaatcaatcatggcacgactaccgtgccaaactaagagatcaacccaacatgcgacacagtcccgatcgctccaactgggcaccactactgatcatcagggaaagacacatactaactgcgtgag

SEQ ID NO: 442933 - DNA, 249 bp, Triticum aestivum
cgggtcgaccggaagctgatcgtaatcggcaaatcgagtctcgtcatctgaggtacggttgagatctagggaattctgtgtccagatggtcgctcctcacatagaatgggccaggaggtccgcgaggtcgttcctcgactattagaagttgctcttagacacatggatatccctctgatgggagaacctgactatggccacgaggatcatgcattgattgttaaacctgcagtcgctctagcctgtaac

SEQ ID NO: 442934 - DNA, 413 bp, Triticum aestivum
tccacccattcgtcttcgtgcattggtaactttacttggagctatatttgtatttgctacatgagatgtgttttgcttggatcgtcgtacactatactagtcattgccttttagtttatcacaatcatccttgctgtgcacacctttttgggagaagcctacttggttcgaatttgctagaatacgtctatgtgcgtcacgttagatcttttgagcttgatagtttttgctctattgcttcacttatatctttcagagcacggtggtgtcataattttgaataaattgctaatctgtcatgcttcacttatataattgtgagagtcttttagaccaacatggtgattgctatggtcataaagttggtcctagattgatgagcatcccagttgggtataatgttggctatctta

SEQ ID NO: 442935 - DNA, 242 bp, Triticum aestivum
gggtcgacgcgggccaggaacacatctctcctaagtggtctcaacctgccctatcactccgcgacaaagtaactgttgggggccgtctggaactcatgcccaccacaacctggatggagccacctatcatttctgcccccacatcagtatcacttgtgggtactctacaatccgaccctactttagtcagcacatgtatcacacattatgtatgtaattatctaccggtgctcaactcccta

SEQ ID NO: 442936 - DNA, 171 bp, Triticum aestivum
gaccacaacaaggccgcggaccacaataccaaggacggcgaacacaccaaggacagctagcacactgacggcacgccggagaacatcaacgacaagatcagcggccacggccacagcgaccgcaccaacgacagcgacaaaacaaaaaaccacaaaaaacacagaaaacct

SEQ ID NO: 442937 - DNA, 126 bp, Triticum aestivum
ttaacacctttcttcatggtgtatgaggcagaggcggtcctcccatgtgatattcgtcatgattcgccccgggatgccaattatgttgaagaggacaatgaggaagcacaccaggaggcgttggac

SEQ ID NO: 442938 - DNA, 390 bp, Triticum aestivum
aggctgctcgcactcatcaaatcgagcctcgacatagttgttgcggtggggctcctgcaacttgccccgaaaaaggtcactcctcgcgtcacaggggcctttgggttcgctagctcgctcatcgcctgttaccagttgcttccagccccatccaaatccaagtgatctgcctgcccacctcgggccaggcagctggtgcatcgattggtgaaactgcggtcgctgttgctgatacttgataagaattaaatctggaccaaattgtccgtcctgtaagatataaccgaggattactgttgtgcatgctggcattgcccagagccatctcatagcctggttgatctgccttgccttagacgtgatcatgtagcacccttgtatttggatggt

SEQ ID NO: 442939 - DNA, 393 bp, Triticum aestivum
  unsure (1)..(393): unsure at all n locations
ggagcatcacctggacgagcagaaacgatttcgagtacggggagatcgagaagctgaaggatgatctggcggacgcatacctgacgaccatgactcagcccaggaagaaagaatcatccatatcaaagctctggaagtcatctcgcgcaaagaacagcgacgtctccaagaaggatgccacggaggcactgaacggcagatcatcgaatgtgcggctgtcggtcgggaccaattccaccatcgagagcggcgttcaggatatcggcctcagctcgccgagcgtggggcaatggagctcgccggactcgatgaacatccaattcaaccgcggcttcatgggctgcatggagtaccgcgggcgtcccagaatcacagcctgaanggaaaactcat

SEQ ID NO: 442940 - DNA, 406 bp, Triticum aestivum
cgggccgaccgggaggaaaaagggaaaacactcaactagcaaggaatcggtcacacaagcgctagatcaaagaacacaaagagatacatgagatccaaagtcaacaaaggtaaggatacaaaggtaaccgatcttctccatgaggaggtcttgaatccacaaggggatcttcccacgaggggggatgtttcctatgaaatctagtgcaaatgaatcatatggaaaaattcctatggtttacaatcctacgaatcaaacaaccaagataggaaaaattcctaatgattagaatcctccaaaattcctttgagaatcctttgaatcaaagaagcccttaatctatttgatgattcatggaattgtgtgttgtaaagcataaagtaaaaacaaataatggcaatttaac

SEQ ID NO: 442941 - DNA, 391 bp, Triticum aestivum
tgaagagagtgacaaccatggataagtgtcaaaacctccaaacacaggagactctgatgctgcgcaactcactgaggatgtacatgcaaagctggttgaatagctcagaccttgtgtaggtcttctactcaatattctgtactcgattgtcaccgaacctttcataatcaacatgctgaatcacaagacatattctgctcgctgattgcgatcgctgtctcatctatgatcaagtcttacacttgtgtctaactactctacgatcagtatgttcgtatattattagtgcttatattctttgcattggttcacataactgtcatactatctcagaatctactactgacgatcaatcggtaaccagttagacatatgctgcttgttatatcaa

SEQ ID NO: 442942 - DNA, 381 bp, Triticum aestivum
cgatgagaaagctgcaacagccaataaatgcgcagagggtgccacagtccaagcgccggatgagaaagctatgacagccatggaggactacatggcataggtggctgatgggcatgtggtacaactgaacataaaggctagctagctcacggctaattcttgtttctgtctgtaccaacgtaatcattctgcccaaccggttctcctcatcaggatgtcatgttttgtaaaggaacagactggagcctgtctgaccctagcatcgcatccctgttaggttagctaaggcagtatcatatatttggccactttcacatcagctccatcaatcatctacggtaatggtgtaaccctaaaattgagctgttgcagaacttccgt

SEQ ID NO: 442943 - DNA, 413 bp, Triticum aestivum
gagccgcgcatgctggaggctgtcggcgtgcgagtttggacggccggggaccatcggaatttgttggcagaggggtccttggatcgacgcccatgcgaggtcacaccaggcggatccagcgcctgcaagtcagtggccacgcgaggactccggatttgaagctcgggcgccggcggcagggcgtggaggcttgcagcagtagcagttgtggcgcagtgggaagcgatggcgcttgggcggccgacgagtaacggatctcgtcggatttggctcaggggaggcacaggaccaggaggacctcgccggatctagcttgtgtaggcgctggacccatggaggcgcggctagtcatcgggaacgccgtggggccacgggggctgcaccggagatgaagagtacggtgttcccggggg

SEQ ID NO: 442944 - DNA, 79 bp, Triticum aestivum
gtggtggaggatgcaacagtgatcacagcagggcttcgctgagcttctgcgagagggagaggtgtagcaggggagaggc

SEQ ID NO: 442945 - DNA, 403 bp, Triticum aestivum
gcccgggccgacggggccaattcccaatgatccaaccccggctccaaatggaaatatgcgtcctgcggtcagaaagggagagagcattcgcccaaattaagtatggactaaaccgatgtgccgacggcaaaccggcggttggagccttcccaattgcggtgccaacaaggcgcatttgcagttacacacgcatgtgctcatacgtgtacacctacctgcattgactcggatttcatttgctgcccgtttgtcagaaacgtttagtacatatttctgcagactgcaggtcgatgattattcatggttttgtgaggtgaccaactaaccgttggtggatgaggaacgtttacctgggcaagttcttccactgtgagaacatactgccccacatgtcatcgacact

SEQ ID NO: 442946 - DNA, 330 bp, Triticum aestivum
cgggtcgacgggatgatgcacgacctcatgccgactagtgttcataaatctcggcatatgggcatactggatggaaaacgcacgctaggaggcgaacacatcatatgtatcgacggatattctctcactgaaacacactatacagttctacataaatccgccttggtagctccgtaattggatgaacacaataatttgatacactccatacacccagagcggtctgatcactgcattatacgtgaacaagccaagagtttcgccagctggttgcagacatttaccatgcatgacacctataatgaatatgacatatacttgcagtcccaa

SEQ ID NO: 442947 - DNA, 404 bp, Triticum aestivum
accaagccaatgatgcaaggcttctgttgttgctgctgcaagtcttcatcaacttagttgttccacagggagagatataaatccttcacttgttcactttgtaatctgcagattacttcttccattaatcacctagtgctcctgttagtgagattcatctagtattttttttgcaaagcatgcaatggtctggagtagttgatcatggcctgatggaacctctagctgaacaataagataggttagttagtgtagtagaggaagaaagatgatatatttattatttgcttttgctgcttctatatacacatgtatgtatgtttagttattcgacatgcttctgaaattgattgtgcttttagatcgaaacactatgcttgttcaaagagtgtccatgttgtgtg

SEQ ID NO: 442948 - DNA, 282 bp, Triticum aestivum
actatttcgggtacggtgagatcgagaagctgtccgatgatctggcggacgcataccttacgaccatgactcaggccaagatgaaagagtcagcgatattaaagctctggaagtcatcactcccaaaggggatcgacgtctccaagaaggatgccacggaggcactgaagtgcagatcattcaatgtgcagctgtcgatcgggaacaattccaccatctagagcggcgttcatgatatcggcctcagctcgccgaaccttgggcaattcagctcgccagact

SEQ ID NO: 442949 - DNA, 207 bp, Triticum aestivum
gggtcggccggggaggcaggcgaggccgccgtggccgtggccaagaacatgtcgttcagggaggagagcaaccgcctgggcgacctcaaggacgccgagcggaaggcgctcgccgagctccgcgccaaggtcgaggaggccatcgtcgagggcaagctgttcgacgacgacagcgccagcgtcaaggtcaaggcgaaggcggagccc

SEQ ID NO: 442950 - DNA, 361 bp, Triticum aestivum
gaagggtctaggatacctagggtttatgatgtctcgttgtttttgcatgctagcaagtcactccgggataccactttgaagaattcgcttgtgttgaaagatcttattactactgctgctctgtagcctacctgtgataacgtcaaatgtcgctgattatggaatgccttttatcctgcacataaggcatacgtgtatccctaggctgcgagagcgggcgctccatatgatgcaagcttgtcgtagcctgctagcaaagtcctagcccttctacagggtcaccaaaattcaaggcattggccgtgcgttttacaacatcttgactggtaaagccctgtcattatggaacttattccccttg

SEQ ID NO: 442951 - DNA, 398 bp, Triticum aestivum
aagcggcacgtccaagtgcccactagtttcgatgaaggacacgtcatttgcggtgttctggacaaaggaaggcggggacgaagataatcagacagtccagctgcagccggaagatcttgccactcaggaggagcagttaaatgaattggtggacaatcaaatggaagagattgctgaggtcgccaagaacgttgcctcacgcggcaaggataaattggctgcttgatgacgtgagatcttgtagctcgttggtagaaagttagaaaatttcttactggagattatcctcgacgtggagaactatgcaatgcggattttttgtttcgagaatgttacattgttatactgtttcaacttagtaaccgtaccaacttatgttatttgagtgaaaaacaaat

SEQ ID NO: 442952 - DNA, 103 bp, Triticum aestivum
acggggatgaaaccaaggcggagaagcgggcgccggtgtccaaggaggccggcggcgaggggaatacgacgggcaggaagaaggggagctaggccattaagag

SEQ ID NO: 442953 - DNA, 353 bp, Triticum aestivum
tgtgactgaacagatcccggtcgccgcagtccacctatcaactcaaccaagtcagtactccacgacctcgcagacctcctaacacatacaccgcctctctccgagccttggtcaactcattaatgcacaacatgcaattctcgcgcaacagcgaatccacatttaacttgatacaatcggttggcccataccctttcggcgtagagaatcattccgctcaggagaaacttcattcagggtgcagacagtcaggacattgtcgtcatacgaagtcgatattataccgagtgtcacttaccaaaccattactctcctgatgctgcagtgcaagcacttctctgattactcacagg

SEQ ID NO: 442954 - DNA, 187 bp, Triticum aestivum
acgggtaacttaccacccatgtggtgatcctgggcatggatggtcctatgtagatagacaggcattcgagataccttcgttctttctagagtctgtgctcagagctattatctagggatgtgcttgtgtgtctgtaggacttgagtatcggatcgtatggatcctagactttttgaacatgttgtag

SEQ ID NO: 442955 - DNA, 418 bp, Triticum aestivum
atgcgccccgctggcatggacacgtgtcggagcagggtggagcggcgacggacgggacatgggttagtctccgtccccgataaagtaagggacacctaatggggtgcattaaatgcaccttatcctgtaatggctagcgataagcttagccacgatacaccgatgccacctcctgtgtgccactgtggcaatccccttgactataaaaggaggcccgaggcatccaggagaaggattcggaccctgggacaagttacattcatggtagctagctcaagaactcaaagaacactcagatatacactaaagcaggactagggtgttacgcttccttccggcccggacctgggtaaacgacccgtgtgcttgtgctgattgctggtcctgctctcctcaacaccccgcgctccgcaaccat

SEQ ID NO: 442956 - DNA, 397 bp, Triticum aestivum
agaatgaagaaagacctaaaggtcatgcttatttataaggaaggactgacagagagggcgcgagaaacgaggaggccaggcatggatatccagctactctgacgcctcgatttttgggatggtcattaagataaagatccgttgagatatgacagaataaaatgaatttaatggaagatgacatcatggcgggttatcatgaattcagaagatgacgtcatggcgggttataactttgcacagacaaaagccagaaagtttttcttaaagtattgaagattgacatgaaccggttcaaatcaatctggggcctaatgttggggatataactactggtgtaacccgcccaggaggggctgggttacgctataacaattcattatatgaagcccaatat

SEQ ID NO: 442957 - DNA, 417 bp, Triticum aestivum
aagcaaactgaggataaatctgatgcgccaaaggaagattacattcatataagagctcgaagtggccaggctacaaacagccatagtcttgcagaaagggttcggagggaaaagattagtgaaaggatgaaatttcttcaggaccttgttcctggttgtagcaaagtcattggtaaagccgttatgctggatgagataatcaattatgttcaatcattacagcggcaagttgagtttttgtcgatgaaactttcagctgtcaacccagcactagacttcaacatagagcgcattctatctaaggatttatttcagtctcaaggaactgcatcgtctacctttggcttcttaccagacattggccatcaatttttgcatccaccaaaacattctcaagctgcgttgcacagcattgta

SEQ ID NO: 442958 - DNA, 166 bp, Triticum aestivum
cggggaattcagcgctcactatcatgtcgagcagagcaaggccaatcgctctgaggacaatcattttctcatttacggcggattgtctaacatcgatcatcttgcacacatcggtgcgtgcgccgctcagaactctaccgaggcatcccgatggatgcctcaaact

SEQ ID NO: 442959 - DNA, 373 bp, Triticum aestivum
gtccacaacagcgttgtgccgatcttttaatcgccccctattactgtgcatatggttgtgcaaaaggtctgctttgatgatggcacaatcgattgcacactttacaagctcatgatttgttattacccctgttcctctttctatgcggctgaaaagctagacctggactagtgtatcattatttgtttttgtagtaaaataaaaggcgcagttgtacggtaaactaaataaatgatgtttattttcgtagtgggtggcactatttgtgcagtttgttggcaatgtaaaatgtacacccaagatatcaaatggtttgttgccaaaaaaagaggagaggaggaaaggggaggagaaaaaaaaagcggccgctcta

SEQ ID NO: 442960 - DNA, 423 bp, Triticum aestivum
ttcatcatgagacaccacgtgcatcatctacttcacacattctgctacaccggcaactccatcggctgccacctccaaccgtgatacaataaagcaggcacaatcaccactatctgccaagatcacaccttctgggcctgcaaagagttgttcttcatccatggcatcaacagggcaaacacatgatattatttgtcgatgttgcaagggtggagctcattatgcgagagaatgccaatctaagagtgtgatgattattattgaggatggtgggtatgagtccgctagtgactatgatgaggagtctttggctcttattacacatgaagaacacggtggagatgattctgatcctgagacgcaatacatggctgctgaagatgctgacaggtatgaatgtttagttgctcaacttgttttgag

SEQ ID NO: 442961 - DNA, 401 bp, Triticum aestivum
tctggcatcgtacatcctattcattttaacaaagcgcttcgtgggtagctcagtttttaggaggttttctgtaaatatttttccatgaaaaaatgtccaagaattttctagcaaacatgaactttaacagaagttcatacattttgatcatcaaaatgtgatcttaaaacatgtacaattttttttaaaagcaattcttgtaaagcttaaacttgtttcaaaattttgagaattactaaattcgaaaactgaatttgaattcaattttttcctgaatttaaacattgtttgcacattatagaagtgtatcaaactaaagtacacacatattctagttattttgctaattttgaaatattccaacactaagaaatgttcactacgttcttagaaatgttcat

SEQ ID NO: 442962 - DNA, 167 bp, Triticum aestivum
agccatgttagactcaccgatcagttcctcagcctgaatagagaacgagatgctcgctgtatcggcacagtaagtgtcacagtttttgtggttacacacaacgttatcactgcacgtttcatcgtttcaactgttgctcctcccacttgcgcctccaccgatcttac

SEQ ID NO: 442963 - DNA, 363 bp, Triticum aestivum
gttggtggggctggctctgcctttttggaattctggggaagctcggagttcctttgcgtgatgccaaaggtccattaacgctgccacgtattctcaggtatatagatatgcgcacagtcctgatggcaaagttatagaatcgcactatcacatagggttatagcttgttgggtatgccacacaacacccatgttcaagtcactggtataaacttggattacaatcaagtacgacgtgctggacccattgagaatctacgtctcaaagtgtctggaattgaagacgaggatatcatggcaggtttcgtactttcaagtgttgctaatcctattggtgctttcactgaatttaatgcccagctgc

SEQ ID NO: 442964 - DNA, 375 bp, Triticum aestivum
agtcagtatatctcgatagaaccaattccaatccaggtagtgtgaacagaggatgtggaagttctgtttccttgccttgtcaagcatttcatctgacactctatctgtactatagctagatcaattcctaatcattcttccacgcgactttactccaaagaattttgccttcttagcttgactcgatctcacgatattggattgattggcacaccgcgcatctggcattcgcttctcctatctatctcttccaactaagctgatcactggaaaatatgtcctcctgcatgcaatcattccagagccaactacgacgatacctgatcttccactctgttcactggaggaaagactcgaaagtgaacaattcttcaa

SEQ ID NO: 442965 - DNA, 217 bp, Triticum aestivum
atccatatccatcggatctgggacctatgctatcatgacataaatcgtctccaatctcgcgctggcagccgtcgcaactcatgcttcttgtgcaccgattggatgtactggtggtggcagtcgttctacggcacagtgtctccctgagctctgagttgactggcggtagcatctgtagcatgtgttgaggaatctctcctgcatgaggtctccattc

SEQ ID NO: 442966 - DNA, 246 bp, Triticum aestivum
cagcagcactggtaactcaatgatggttgcgatctctcacaatatatatagtacttttatatgtgtcaactttaaggtttatatgtttgggctgtgcttttgtgatattttgggctgtcagtgctttgactgggttttaccatcccaatgtttggcattcaggtacgttttagcattacttctgcactcgtggtaagttaccttgccatgtcgcaacagtagttttgtctggtcagtggtgtttgt

SEQ ID NO: 442967 - DNA, 339 bp, Triticum aestivum
gaggtatgtacttttggatatgatgatattgtgctttagaaagccttggtttatatcaacgtctgggcagttcggatacatcaactcgagcatgatgtccttcgaccattggtcatcgattacgcgggcaccctctaggacatcctcaatatatcgctctggcttgcggtggtccttgccacctgagtggaccctcaattgcgacgatggcggccttcattttcgcgcagtgcatcttgacacgggcatgggccagacgcgcattttccatacatgacgaacggttgatcatgacaatttgggacagcgcgtcaacgagtcgctgcaccagaccaaaat

SEQ ID NO: 442968 - DNA, 216 bp, Triticum aestivum
ctttcggtttcgtgtcttgttccagttcctgttggcttttgtgttgtcttcttttcatgtttcgggtttagctgttttgggctatgcgcgtttggtctggcccgagcattggcctggctttgcgcatcgcgccgcagtgcatgctcggctagtcacgagcctagtcttggggatgcgccaggcctccgttctttctcctccgttcattggttcctt

SEQ ID NO: 442969 - DNA, 355 bp, Triticum aestivum
cttttggattctcatccgtttgtgcttttgttcgccttggtttattcgtcgtctgggcagttcggcttcatcggctcggtcatgctgtccttcgtgcattggccctctgttgcgcgggcaccctctaggacatcctcaatatagcgctctggattgcggtggtccttgcctccgggtgggccctcaactgccacgatggcggccttcattttcgcccagtgcatcttgatcaccggcttgggccagccgcgcactttctatacatgacgaccgcttgaccatgaccatttggtacacctcttcagcgagtcgctgcaccaggccaaaatatctgcttgcgacgggttcggctggc

SEQ ID NO: 442970 - DNA, 110 bp, Triticum aestivum
acggaatcctcaaggacggagaattcttcatcgccgaggattgcatcgtcttcaaagggggcatgtaattactatcctcggcttctccatctgccgctcactcatgaggg

SEQ ID NO: 442971 - DNA, 175 bp, Triticum aestivum
acgggaaactgtagtacggtccgtttggtttctcgcttgtcttcgtctttgtcagtcggcatgtgactttgggatgcttgttttcagattctggtttctactgaggttgtaagatattcttgtctactgcttgtggccgaatagtcgatcggatcgttttttgcttatttaggtg

SEQ ID NO: 442972 - DNA, 226 bp, Triticum aestivum
ctgcggttgctgcagcgctctcgattgcatcattgtgcaatgcggtatgtggtttccagccgtggtgttcctgtatgtcgattactaaaggcggaagtcgatgtggtatagactccatgtccatgtggtcgctttcttgatgttctacttaggtagccgagcgtagggtctgaaacttcatctgcacagttgcctacatcaagttcttcggcgatcctttcacaaa

SEQ ID NO: 442973 - DNA, 344 bp, Triticum aestivum
actagcaacccaagtggtgatcctggccatggagggccctatgtagatagacaggcttcgagataccttctttctttctagagtctgtactcagactagttgcttccgcatgtgcttgtatgtttgtatgacttgagtgtcgggtcatgtgacccctatctgtatgaacatgttatgtatggctatctggagcctttaaataagtacttgagttgtagagttttgttgtgatgccatgttgtatgtactcatatcgggcatattgtgtgtatgattgaaatgcttggtatgagtgggatccgacaatctagttgtgtaaccttggcagcttttcttatggggaa

SEQ ID NO: 442974 - DNA, 401 bp, Triticum aestivum
gacgggcacggacaaaggagaacagagcacctctcttcttccaggtcagtgagcagcatcaggaggaggagctcaagcacgaccaccaagaggcaccaccgcagcagcagactcgaaggagaccatatgcaaggcacctcctcttcggttgtgagagtgtccaggggtcatgggtgcggctaatgcctatgtctgtggctgcacttgacactgccctctctttaagggcacatatcattttttataactctgctatattttcccaagtctttattatcttgcctagccttgtcttgatatgtattgcttgatgctaattacccaagttagtgcatgatgttaaggataacctgagaacacttgcctaagtttataagatatgacatgtcacagttcaaaaa

SEQ ID NO: 442975 - DNA, 160 bp, Triticum aestivum
acgggaaatgcaataaaggcaatcttgacatcaatgaacttgaatctcttgagaatgtcttgagtgtatatatcatggatggtaaatgttccttctcttcattgcatgattttgaaatcgcgaaaataaaattaaataaaataaaaataaataaacagct

SEQ ID NO: 442976 - DNA, 132 bp, Triticum aestivum
gtgggtttgtttttcctgatgtgccttttcatgatgattttgtttttgttcttctttaggttgtccccggttccttgtatcctgtgcctcggcttgctgtcggggctgtgttgttgtttcgattttgtgggg

SEQ ID NO: 442977 - DNA, 250 bp, Triticum aestivum
gatggcatcagtgactatatctaattctgaggacgatgagatctatatgtatcatggttgttcctcgctcctttcgctcgatgcatgttgtgtactattctgttctaatagcgtccgtgtctgtctgtgtctgtcggtgggctgtagtatataagctggatttagtgtggagaaaacgtcgtgatttgacgagattgtcgactagtctgaattcactggtcgttgttttaaatagtctttgctgggagac

SEQ ID NO: 442978 - DNA, 316 bp, Triticum aestivum
acgggatggcctagttcatcgtcgccgacaagaccatcctatccatggccaggaagcactccttcgacgacgcgccggaccacctcaagaacacctccttcaactaattagactacaatagtagatccattagtagtgctcagcgacggcctgaaagatagtataatgtccagcacttatctgatatcaggccaagttcgcagacagtgagtggtgtagtactgcgcttctctgccgctctgcgtgcaagcacttgtctgatgatgtatccagccagtaatcttgaattaataataacctgcatctgtacaactca

SEQ ID NO: 442979 - DNA, 355 bp, Triticum aestivum
acctgctcatccatacgacctcaaaagacttgtcaactccaacctatagctatcaaagtcatctttccacactaatatgtatcatcactgacatttctagcataaaatgttcctcagattcgtaattcagatagttgaatgatcaaccttctttttctcaagggccatctacgactgatcatggctcttctgcccgttactgtaagacactgcacatgtacaacatgtatgtttatttggcaagcagtttcagtctgttccacccatctttcagcgcacatatatatacattggaaatagttttccttccacacttaaccttatcacacgccatcaaggtagcagcgactcaaga

SEQ ID NO: 442980 - DNA, 263 bp, Triticum aestivum
ctgctgcaaccctgaaggacctggatatacttgttaattccaccttttacatctcaaagtcagctttccacatgtcgaggtactggcactggtatttatgcgctgagacgttgcatacattcgtatttcagatcttcgaaatatgctcctcgtgttctcaagggtcatctctcactgattatagctcttatgctcgcaatcgttatatattgtacgtgtatgacacgtatgtttgtttggcaagcagttaaagtctgttccac

SEQ ID NO: 442981 - DNA, 305 bp, Triticum aestivum
ctgcaaccctaaacgtcgggattctactggacagttcctcctctttcacctctatggaatgtttgcattgctcgttgcattatcactattctctacgtgctccgtcgttgatttgggtcgttactgtggtcttcgactctttcacatcgattttctacgggtcatcactctgtcatttcagttctcctaaaatcattcgtaataaattgctcctggacaacactggattctatacgtaaatcagatcaagctctgcggctccctgtcctaatggctcactggatccctttctagcctggatgctt

SEQ ID NO: 442982 - DNA, 139 bp, Triticum aestivum
aatgtaagagcctcgtgtggtccttcctgcttgcgatgatggaggatagcctcgaggacatcctggactcgagcatcgtgcgttcacggacggcgacgctgctgggggagttggtcgagctggggacgatgtgcttggg

SEQ ID NO: 442983 - DNA, 381 bp, Triticum aestivum
cgaaactccagattgaatgcaagatccagatcgatgttgagagttttgtgaactccttccgccccgacgtgatggaggccgtgtactcgtgggccagagggtccaagttccaccagatcatggagatgacacaggtgttcgagggcagcctgatcagggccatcaggcggctggaggaggtcctgcagcagctgatcctggcatcccagtcgatcggtgagacccagctcgaatccaagctcgaggaggcggtcagcaagattaagagggacatcgtgttcgccgcgtccctgtacttgtgacacctcctgcgtggtttggttccatgacaggagctcatgcgcggggatagagacgttacattgtctgccgttcttgtcc

SEQ ID NO: 442984 - DNA, 62 bp, Triticum aestivum
  unsure (1)..(62): unsure at all n locations
tttntttgttttntttggttgtttttngttttnttttnnnnnnnnnnnnnngggtttttttg

SEQ ID NO: 442985 - DNA, 315 bp, Triticum aestivum
cgggattcgccagtaatgtcatcatcgagaatatgctatttgtggcgaaaagtttttcacaggttcagggacttgatctacgagtgagatcttctcattggtagtcgtcgcttaagtctgtcgggtacaggttaccagtagcttcatttatgagctctggcatatggatgtcaacatgagttaccatagatgtcttcgtcaggacaggttgtctgtgatcgactgattgaggttcagtcaatcctaaggttgctgaggggtatgctagatctagccatagctcgatggactggagtaagtagctatcagttggca

SEQ ID NO: 442986 - DNA, 275 bp, Triticum aestivum
tgaatagctggctcaggattgtgcatccgtgacgagtgcaacgttccctttatatagtgttgtggctttcgcacacctggcgcttgtaactattagtagactatacggtaccatggctacagctcggctgcttgcttgcctgtcctggcatgtactggatttgtactgcgttcgtttgtatgcgtgttcattccatgctatctttctttgcgtgaattatttaatctatgtgtggtttcaatgatacaatttgttggcaatgtaaaatgttcaac

SEQ ID NO: 442987 - DNA, 267 bp, Triticum aestivum
cctgttttcgtgtgccctcgcctgtgtggtgcgcggtgcccaggccgtagcgtcgtagcgtgtctaattgtagtttgctcgtgcggtgagtgcagccctctccaggctccaggccacacgctcgctcagatggtcggagtgacccattacattcagctcggtagatcagctcaggtgcgcagctagggctggcgccctcccatgctttgctccccagtcatcagcagcgtgcaacttatgaagaccatcatctacgtgctaggcgag

SEQ ID NO: 442988 - DNA, 379 bp, Triticum aestivum
cggggtccacgaaggcgttgtgccgatcttttaatcgccccctattactgtgcatatggttgtgcaaaaggtctgctttgatgatggcacaatcgattgcacactttacaagctcatgatttgttattacccctgttcctctttctatgcggctgaaaagctagacctggactagtgtatcattatttgtttttgtagtaaaataaaaggcgcagttgtacggtaaactaaataaatgatgtttattttcgtagtgggtggcactatttgtgcagtttgttggcaatgtaaaatgtacacccaagatatcacatgggtttgttgccaaaaaaaaaaaaaaaaaagaacgacgccaactaaaaaaaaaggggcggcccaa

SEQ ID NO: 442989 - DNA, 409 bp, Triticum aestivum
cgggcacgcgcacttcagatccacgaccaacacgcctcgctcgctcactcctccggctgccgccaacgccgccgttctgcaccagcgaagacgatggcgagcggggagaaggtggactatgtatttaaagtggtgctgatcggggactcggccgtcggcaagtcgcagatcctggcgcggttcgcgcgcaacgagttcagcctcgactccaaggccaccatcggtgtcgagttccagacgcgcacgctcgtcatcgaccacaagtccgtcaaggcccagatctgggacaccgccggccaggagaggtacagagctgtcacgagtgcatattacagaggcgctttgggagctctgctagtctatgacatcaccaagcgccagagctttgaccacatacctcgctggctgg

SEQ ID NO: 442990 - DNA, 205 bp, Triticum aestivum
ggtggtgtctgggccttcttgctatggtgctgcggtgtgctgggatggcctggcccgcttttcctttttcatttcgtctcgtctcgtcttcctgtcctggtcagttcattcgggattgtcttgtatggggactttacgttatactctcatgtcaggtctttctcttatcttatcagattggattagacatgactgttagcttgat

SEQ ID NO: 442991 - DNA, 282 bp, Triticum aestivum
  unsure (1)..(282): unsure at all n locations
ctaccatatatcacaacantatcctccagccggttaggcgtcatgttctaaggatccaagagtcattgtggatcccctgtgaacggagtctgtaaaggtttggaaatctacctttaagacttactagactgattgggcgaagactgggtgtccttacctaaccgggatataggtgaagacgtggtcttctaaattcactctcagtctccctaaccagatatgaagttgtcaaaacaactggaactggtctaccaaatccttgtcttcaccaaactactggtt

SEQ ID NO: 442992 - DNA, 346 bp, Triticum aestivum
cgggaacttcgatcccctatgcgtgccgactgctcattggatttgctgtcgtccatgattacgtgttcatctgctgcttcaacagcttcatggtgttcactcagttgcatctggacatttggatctcctctaatgccatgtctatcacgaagtcctgcatcagctcttgcgacgagaacctcgctagagatgtcgttatgctggtgcgtcacagattgaagggtgccatcacgtcgtgtgacattcaatattccgtactcctcgagatccccgtcgagctcaacatgcacgctctcttcgaagtcaccatggctatcaccatgttcatatcctcataagctgttca

SEQ ID NO: 442993 - DNA, 387 bp, Triticum aestivum
gacggaataatcaagaaggcgattgctgcccggcgaacctcgataaagacgatcatatttccaccatcacacataagggatttcgatgatcttgctgataacgtaaaggagggtctcgaggttcactttgttcacacatatactgaaatatacaacttagctttccacaatgagacatacacgagttatcacgcaagcaattcaaacaggactattcagattgcgcaaggtctttggggcaagactgaatactgaactaattttgcagctacgccattcttttcaacatcaggattaactttttgttatcatgattttttttcctactgccccatgtgactgtttaaggaaattttgactagaatgtccctagatagctgacgatcc

SEQ ID NO: 442994 - DNA, 392 bp, Triticum aestivum
catctacctcgatagagaactttcctcgttgcctgatccttgatcaaaaagaaaaaaggatgaaactcgagaaaaacatgattgtcaatggcaattctatgaacggagagaagatttttgtgggcactaggaacatgcaagattcttttgagatgaattttacgactaggggtattaaaaattgaatggccaatgtgacgtatacccataccttcaccactggccgtatgaatttgatccttgccacgatatttctccttcatggtgactttctcgagctcgttggtgatgtggttggtggcgccgctgtcaacgtaccagtttgtgtcaactccataggagccatcggccgccgcggaaattttctcttcatcttgcgaggagtcaccatc

SEQ ID NO: 442995 - DNA, 388 bp, Triticum aestivum
agtgttgagctacttttccttaatccctagattacaatggctgttcatgaacaaggaaatagcttcagatttgcgttatcatagtggtctatttctattgacgtagcaaatctaatttccctatcttcctaatataaacaatctgggtattgttccattcttttaattctatggcagatgggacctggacgaacagtccggccaccaagaaatgccccgcaatctcaaggtcaacattctgggagtacctcagcatcaaaatccaggaaggtacgtgggataaataagggaaatggcttggagcgtttgatcaaaagggcaggtcatccactaaacttgaccatcttcgaagagagaagacctattggagaaaatactgaactacttt

SEQ ID NO: 442996 - DNA, 366 bp, Triticum aestivum
agcgccggcaagcatttaagtgactgacgcacatgctactctacattgctatgaagtttgagcagcacctcgaagcaaccagaaatagtttccggtgagctttggtcaatgtgtcctgaacaacatgcttctgtgcttactaaatcaggcaccttttgtttcgtatcgatcagacaaggatctttcgcattttggcgtactccaagcaagatatgtgtacactttagtcttaacttgctgcctctatgctgaaaagtagtgtatgatatagtctatgatctttaaactttgttgttatcgctgtgctcagaatcgggttatcatcgcttactccatatatgttaaagccttttccccctctaatcc

SEQ ID NO: 442997 - DNA, 285 bp, Triticum aestivum
cgggggtacctgcatctagtccgaaggcggccgcacgcgctgggtaccgtcgccgatgggccatggtccgcgcgccgtcacctcgtcctccaggcaccggagtctccctttcttccgttcttcttttcctgtgattctgggcagagctctcggcacagctcgtgctgataacgtgttgaatgtacatgagaatgaatcgaacctctatctttcattgatcatcggatggtatttataccaggctttgcgtcataaaacacatagagagactctaccatgcaaaaa

SEQ ID NO: 442998 - DNA, 389 bp, Triticum aestivum
ctacctgaaggcgtgcttgatagcctctcaccagagcaagtcctgaactgcaacacggaggaacaatgtgtggagctggtgagccatattcctgtaacacatgctgcacttctcagctgggttgtagagctcatggctgatgttgtcgaagaagaggagtcgaacaagatgaatgcccggaatatcgctatggttttcgcacccaatatgacacagatgtcagatcctcttactgctctgatgcacgctgttcaagtcatgaacttgctcaagaccctggttctcaaaacactcagagaacgtgaggatgatgaaggatcatattcgaccttttcgtcatcgccaactttatccgatggacttgatgaggtggaccgggagcacgacca

SEQ ID NO: 442999 - DNA, 371 bp, Triticum aestivum
gctcgctgcagtccccgtggacgcagagaatccaacgtgatgttcttgggagaaaatccctgaaagattcatttttctcgagagaagaggtatacttggcttcggacgatctagaggagccaatgtgagattaagcattgtctcagtggcgttgtattcgatccagactcttactggtttcccactcgcaagcctcaagcttatgttcttggcctctcggtcatcacaatgtgcagtcggtgcagaagcagtggagatcactcgatttaggtcgatgcctacgtggttatcgtcaatatcattcatctcaaccgcttgcacggtgtcagtttcaattgcaagagttcgatttcaggagtttccattgttgg

SEQ ID NO: 443000 - DNA, 392 bp, Triticum aestivum
agagatgacgtcgaggatggcgtccaaggacatcatcacgctcaagggctccgccgccatcgtcagcgagttcttcggttacgcggccaacagcatcctgtacaaccgcggggtgtacccggaggagagcttcggcaaggtgaagaagtacggcctccccatgctgctcacgcaggacgaggccgtcaagaccttcctcaccaacctcacctcccagctctcagagtggctggagggtgggaagctgcagaggattgtgctggtcatcatgagcaaggccaccggcgaggtgctcgagcgctggaacttcaacatcatcactgacggggaggtcgtcgagaaaggggcggtgaaggagaagagcgacggggagatcatgagggagaatcagg

SEQ ID NO: 443001 - DNA, 118 bp, Triticum aestivum
aggcattcaaataaggtttctttctcttctttcgtaagagcctagctggcaggaccttcactctgcttcggtggcagtgtcttccttttcggggcaaacgcttgcaggtcgtcccgtg

SEQ ID NO: 443002 - DNA, 133 bp, Triticum aestivum
agtggtattcccagtcgcggtcaggtggctagcgcttaagaacctgcccttgggaggggaacaacacctgggaactgttgctaataccccgtacgctgaggagcaagcatgagagacgagggagagaaccaga

SEQ ID NO: 443003 - DNA, 204 bp, Triticum aestivum
gtgggaactgatgggtacgaccagagcgtgtcggacgacacgagtaccagtgagacctctatcatcttcctctgtcacatcctgaacaggaggcaggcagtcttgagttaatgcggtgatacagctgctagcaacatattctcaggaaggaggaataagtttgccttcactgggctttcaattttcctggctaagcaggcgtaa

SEQ ID NO: 443004 - DNA, 350 bp, Triticum aestivum
cccatcccttggtcatttgacttcgactacgcatcatagaaagagggaatttgttcgtgtacagtcacaaattgatcaaatatgtcgtgagattgctggcaccacagaggtcggtgcccacgtggctacgccacacgtcatcgcggattatttgatacctgagaggcctgatgattttccgtcccacctccaggagcttcagactagatacaccaataggttggctaaggttcctgagtatgtctccatggtacattatctatgtgccgtcttgggcatggatgttctcagtaccgtgactgaagttcaccgcactccagatgactccagttgctgattcctgcaagagc

SEQ ID NO: 443005 - DNA, 202 bp, Triticum aestivum
gggtgggtcggtgcatctgctccattcagccacatgctaggagactttagggccatttgacccccaactacgccacgctaactcagggctcacggatacaaacatggcctatcgacaagggtcgcgtgtaccagtaaccggcgctctctcgggtgtagcccctcgtcaaagccgatcccagtgagaggtcgccgccgcgctg

SEQ ID NO: 443006 - DNA, 182 bp, Triticum aestivum
ctctggtatgtcccttcttctcttctcctttgtccttgccgttgggtcgtccttggcggtgtgcttggccttctccggttgcttgcctggggccttttttcccgtgcccgttcctgtttcgtgcgcttcctttggggggcttgtccggtttcttttctccttcttctgtcttggcgctttgg

SEQ ID NO: 443007 - DNA, 469 bp, Triticum aestivum
  unsure (1)..(469): unsure at all n locations
tntacgtttgacgggnncggtcatactanacggggccccngncattttatnaataaaaaatttggatttttaaacagaaagagaaagatggtgtacaaaggcaatagaagattgattctgtaatgactgtactctgggacggaaggattcgaacctccgaatagcgggaccaaaacccgttgccttaccgcttggctacgccccatttcgctttttattcaagactactaaaagagtaatattcctattggttgttcgtcaattcaaaatgaaatatagattacattggtgctaaagttttaacacgtgtagatagcaaataaaacttactttattgatcattacatagaattcaattaagatattgtatgaaaatattatttctttcattctcataagagaataaaaggatttttgattgagtaagttcancaaagtctttttagactaactttcnttantttttccg

SEQ ID NO: 443008 - DNA, 215 bp, Triticum aestivum
ccggacctcaaatcagtaaaaatgaatttcagagatcctccagtaaaagtggaacctcaatagctcctgctcctaaagtgacgaatacgagagttcaaaggcccaagctaactcctgaattgttgggctcggaggatggtctcggcggtgttcctcacggtttccctaaatccgctcaagtcgcgtggccgacgcgatacacagaagtctttttt

SEQ ID NO: 443009 - DNA, 216 bp, Triticum aestivum
gggcatgcggcagctttgttcccatggacccttctggtgttttgcatccacacgggcgttttccttcgccccgtgcccgtcgtggcgttttggctttctgtctgcgggggggccgtggttggtttcgtcggggccctggggcgccgtctgctgtgggggttcgggtcggggggcctccgtgtgtcgcggcgctgcgtgcctcgcggtctgtcgctc

SEQ ID NO: 443010 - DNA, 272 bp, Triticum aestivum
tcaggtagctcaccgcaagcccggcctaagtggtccatggctgagaatgatttgcttgaaaaacggatcaaaccagagacaatgagatggccagaccgttgccggacttggttcttcgggtctggcggaaccttggaccctgttacagggttttgccagtggacggaccagcatctggcaataccagtcatgaaccttgtttgggaacctagttatttcaaaaatttcctacgttcacgcaagctcatggtgatggcatatccacgagggga

SEQ ID NO: 443011 - DNA, 124 bp, Triticum aestivum
gaggagggggaagaggacgtcgatgtgggctaagcggctgggcccgacttggcccccgcttcgtttcacgactactacgtgtcttctctggccctgcaagatgcggatgtttccgatgtcgccc

SEQ ID NO: 443012 - DNA, 426 bp, Triticum aestivum
cccggccttaaccaaaaaaaaaaaatcaattttgtggttttcttggttaagactggttcaaaccggtttacatgcatgtgttggacgtgtgaaaaaattcaacgtgccgttacgtgcgtccgttgggaaacatgcaaatgttattttggatgacacaaaaaacgttttgctccaacacatgtgagcaataccggatgcgtaaatggtgatttagtccaatacagttgaccggtatcgagccaaatgatattagctttgtccggaatgtggttgtagctacaaatattatccaaaatttacctacaactggtttatcaagtgtatatagaaaaacaatttaaaaagaaaattaataaataatagttttaaaatgttgaagatcataataattctgaataattcttattagaacaaagaaaccaaata

SEQ ID NO: 443013 - DNA, 384 bp, Triticum aestivum
cctgtgcgataaaagaccagtggccatgaattaggattggccggctccatttaaactcgatatactcaatattttttaggctatcacgataaccgtcatacttttgcatcttaattttctagagcaacttattgtactgtccaagatgtgacgatatgcataaacatctagacttaacctatgcaaagatgcatcttaggtactattgtttttatctcggcctctttgagagttatctcatcttagtcattttagaaacatatatcgagttgttacctctaagtatcccttttatccaatccgaacttcgacgtagaaagtatgaaatcactaacatgacagctgggtaaattggcatactctagcagtcgttgcccctctcat

SEQ ID NO: 443014 - DNA, 67 bp, Triticum aestivum
cacgaggcaggaggcgtgccctccacccttgtggggccaggttttggtcccggccgtgcggggtgtt

SEQ ID NO: 443015 - DNA, 247 bp, Triticum aestivum
tcccgaagcctccgggtggctacaagcgtccggactcgttccagtgacgatgtgattcttcttggctgtctgcctccttcttttcctagggcatcaattttcaacctcgttacttggtatttggtgccctgtttgagcttaaacactgtgtctcgatcgcgctttcggcacgatggctaagcatttaaatcgctagcatcattgttgctctccatctgttgtcagatctttaatggtgtcatggacc

SEQ ID NO: 443016 - DNA, 389 bp, Triticum aestivum
tttctccacataagtcaaatcactatccaactgaatcgcttatagcggcactgtatctctcagcggtatatcagccatctctgcgtgacacttcttcaactgggaaacgtggaatacgtcgtgaactcctgacaatccttcgggcaattccaacttgtaggctacttctcccatacgctccaaaactttgtatggtcctacaaaacgtggcgctaagtttcccttaactccaaagcgcttaactcctcgaagtggtgacacacgaagataaactcggtctctgactttgtaaactgtctccttacgtttagaatctgtgtagctcttctgcctggactgggctactttgagtctatcgcgaatcaacttcaccttctgttcagactcct

SEQ ID NO: 443017 - DNA, 428 bp, Triticum aestivum
  unsure (1)..(428): unsure at all n locations
agcgtctcccgcgacgtaccggtcnannaaggccgggnccacgganaaggtttggagnccncgacgtcggctcatcgccacctggagctgtaggtggttccaagggttgggctgttcgcccattaatgcggtacgtgagctgggttcagaacgtcgtnagacagttcggtccatatccggtgtgggcgttagagcattgagaggacctttccctagtacgagaggaccnggaaggacncacctctggtgtaccagttatcgtgcctacggtaaacgctgggtagccaagtgcgganaggatactgctgaaagcatgtnagttntangcccaccccaanatgagttgcctctcctccgactccctagagcctccggtatcacanccgatacagcnacgggttctccacccatntcgggatngngccacc

SEQ ID NO: 443018 - DNA, 387 bp, Triticum aestivum
cccacttccacaatgaataacctttcattcacttctcacgttcgatgaagttgcagtgttgaaattttatctggtgaagcaccagaagagtatgactcgtgaaaactttcgggttcacagggtttagagaaggcatatgttcaacccataggggcttcttagaaacatataccacaagtttcaagagtaaataacacaagcccgaaagcagagcatggttggccaagcagaggatacaacttaacaaaggcattatgtatcaggggaagaactcacaaggtgatcaaatgtgaaggacactgtcggataacaatccaacaaacgacttgatggtccacaaaggatctgatacgagtatcggtactcaactagaggaagaagaatgca

SEQ ID NO: 443019 - DNA, 219 bp, Triticum aestivum
tcacactcgagtggatttctcacttccactccttatgttgatagcatgaacattagcatactccttgggattctgaattgacttccttggaagtcacgtaactttgggaccagacgaagatgcggattgtccttctaagtatctgactttggaattcaacgcctccacttttgcattaaggtcattgtagttgcaggccagcttgtggtgcaattcaga

SEQ ID NO: 443020 - DNA, 413 bp, Triticum aestivum
gacggcggacccgagacctaaatcgccgccaccgttcctcgccactgcggcgaccgccgttctcctccccctcccaccccgcatcggagaggaagatcgccgcgccagcgccaccatacccgaccctcgactccaccactctcggcggtgtgtgctagtctagtctgtctccaccccgacgaatttgcttcgcctgatagcgattaggctgcaatgggtagatgattaatttttgaagcccagctcatcgttaataacaggccgaaagcccagaaacccagcagcagtgtgcaacgagacgatcagattgttctcttttaccatcgtctcggacaaggcaacagagagcaggcagaaggatggatgagcaagatgataaaagtacaaaggctgagctgaaactatgtggggac

SEQ ID NO: 443021 - DNA, 256 bp, Triticum aestivum
cagggggttcggagcggccatggcgcgcagcgtctcggccaacggcgcctgcttcctcgcctacgacgtgacaaggtccctgctctaggcgacctgcaggctgctggccattcttgacttcgttcttgttcctccaccctgatgattcagttgtcgtcctcgggacagtcctgtctctgtcacataaaaccaagccatgtgtgtgaatcgaacgaaatttgcagtttcagaaaggatcgaccggctccgcacttca

SEQ ID NO: 443022 - DNA, 375 bp, Triticum aestivum
ttcccggagtcacgggatactcttagaaatatttttcataccccaaatcaagtacttgtagtgcaaacctcaactcagggggttttggaaaactaaattttgaaaatactatttggccaaattatttttgtaggaaaatactatactgtactatacacatggcatgatcattgggcagaagtttggggcaaggagatgaagtacagaaggtggattagttgactttaaagagcacttgaaaaaaatcactcagagaaaaccaactccaaaataaaagccaaatactgcaaaagtttttgttggtccaatttttttcattttttaataatgaaaatgacatgttacaaaattcacggtgtgactacaccatttccc

SEQ ID NO: 443023 - DNA, 407 bp, Triticum aestivum
cagatcaactacaatagctcggaaagttttccgactgtttaagtttgttaatgatctccaagctctgattagcccccctgccaaaggaactccacttccgctgatcttacgtggaaagtcgaagaacgcgatgctgtcaaggttcctctttctggggcaaattgtttgggctgggagaacaggagtatacaagaacagggagcgagcagagtttcttggcaggatagcattttattgctttctcggatccaatacctgtactacgatcatcgagctagccgagcttcagcggctttccaaatcgattaagacgttagagaaggacctcaagcaccaagagctgtacaagaacgagcagtatcggatgaaggctaagaagtccagggagaggctggttggctcatcaa

SEQ ID NO: 443024 - DNA, 397 bp, Triticum aestivum
ggcatgaggatagtaccaccaagatgtccaagcccgatgagctccaagacgatgctcccaagttcgacttcaccgccatccctctttgtggcattgatgatgccgagtcctccacgattctttttcaagatggtgcggcgacgagtacgactacggagaccttcaaggaccacgctttggaggcaagcgacttggtgacgatcaaggatgatgtttccatgttaggaggcgagagcgatgatgtgccatcttcggccttcatccatggcgacgatgacaagatgatcgagcatgggatttccccttcggtcatggaggagagtgatgatgtgccatcttcggccttcatccatggttgagtatttcacctcgaccactgtgacctatgatgacctga

SEQ ID NO: 443025 - DNA, 264 bp, Triticum aestivum
aacgaatctgttagtttcaactcattttgttgaggttaatgaaatgagaaatcaaaggattaacgaaagttaatatacttagccgcaattaatgatgaacggacggtggatggatatcgaccactaattctccaagtgacccctacaacctcctctacttgtccccctataccacatcctatctggtaaagattaagtcaagacttcccaccaaaacttcacttttaattttgataaaccaaacgtttttaaaaaacaaaatgt

SEQ ID NO: 443026 - DNA, 175 bp, Triticum aestivum
tggcggagaccgcgtgtgggtcttaggctgtggctgggagctggggctcacgtctttgtggcggtcgagtggcggtcgtccgcggctgtcgggtggctggttggttctggggttggttcgttgggcgtgtgtgcttctgctgccttggtgtcttcgctgccggtgtgttgtgttc

SEQ ID NO: 443027 - DNA, 423 bp, Triticum aestivum
atgcacagcccactagtcgtgggactctggtgcacgcacttgctaggctggtcgagtatttaaccaaaaactaccacaattgtcggaaacgtgacgaaaaactaccactttacgtttttgtgcgaaaaactaccaaatttagactaaaccgtggcaaaaaactaccaactcgggaaatcgctcgcttcgcccgcgctaaccccgattctgaccggttgggcccgcgaatcagtcgccacgctggcgaacagacggccgccgcgcgttgacggccgttaacggcccgtccattgtcggaacggcgcctgtcggtgggccaataagtgagagcgagctcaggcactcgctcagtctcctcctcggcgctcgctctcactcgtcctcactccatcctctccctctccctcgcccgggtgctctgac

SEQ ID NO: 443028 - DNA, 380 bp, Triticum aestivum
gaggcgacgatacacggcaggcctctttccgttgacgtgatggcgtccgcgactcctgttcacgtgagcgcttggtcaaaacgtgcagctcgacggagtagaccaagtttggtgtggcttggcattggcgcagaactgcgtccttgttgcggcatgcgttgcacatctcctattcctagcgggttggtttcagctcatgtggagtggtggcgtcaggccagtgattcagttagtttacgtacgtacagtggtcgtacccgatcggatctgagcagcccaggatcacgcagtcgagactctaatgttcgctggcacgttggtgccagtatgcccagttggccgcgatcaagtctggccactcgtcacagtcggttcatcgg

SEQ ID NO: 443029 - DNA, 354 bp, Triticum aestivum
agagctctacctcatcgagtgttcggcgcacaggccatatttcttttattactcactttgcataaattattgattatgcaacaattttattattattcctaatatctccggcttgcactattttccgtgcacaagtagataatccgggcaacgctgtcaacgcggggtatccacgtatcacatcacctcgggtgagccggggggttgtcatcacttcacttacacacacccggggggtttgggttacactaacgggctgctccacaatctccggggtcggactggggtttacactttgcccatcgactatgctgtgtcaccatttcatcaaatcgtgttctttacgcggacatc

SEQ ID NO: 443030 - DNA, 54 bp, Triticum aestivum
ggtgtgggtgagtggagggatggcctggccagctgtgggagtagtatggggggg

SEQ ID NO: 443031 - DNA, 396 bp, Triticum aestivum
ggtcgacggcgcgctgagcaagcatctgttccactggaagcagcatgagctggagcccctctcgtggaagaagaggctcaacatcgcattagatgttgctcgcggaatggagtatcttcacaccctcgcacagcagtgctacattcacagggatcttaagtcggcaaacattctacttggcgatgatttccgagcaaaggtgtcggatttcgggctccttaaatctgcgccggacgggaacttctctgtggcaaccagaccagctggaacttttggatacttggcgcctgaatatgctgtgaccggaaaaatcaccacaaaagcggacgttttcagcttcggggtggtgctgatggagctgataaccggaatgaccgccatcgacgagagacgtat

SEQ ID NO: 443032 - DNA, 408 bp, Triticum aestivum
tggtcattcgggtacgccataaggatgcaaagaggcatcctatatcagcaaggactggttgttccaccaatagctcatctaagagaactctcaagttaactgtgctcaggctggagcagccatcagatgggtgattggatgggaagttttcttaatgttaaattaactaatgggatgggtcatagaggtcaaattaaatgacctctatgatccatctcatcagttaaataaacctcgaggtccttgttttttttaacacatgttaaagaaggtctacttcataactttttgacaatgtgcgatacgtcgcatatagttgatccatccaagttgtttgtgatggaataagttgtgtgtatattgggaaaacgcttgctggtatacaaccgtttgtcattgatgaattca

SEQ ID NO: 443033 - DNA, 357 bp, Triticum aestivum
aatatcagacattcttacatgttatcgagtctgcacatacttgcacacatagtcaactagccattgatgatcacgtatgtcttatgaagtatgttgtcatttgctctagcgcatatcttacatctttgacaccatggaggcattgtaaattttaggacatagatgaacgcacacgaatcacttaaaatattgtgagagtcataaacatcatggtaatttgatgtaaaaactatcatagtatgtgaattgaatgcaatgatcaatttcacacttgatagttgtgttgagataacgatgtagtggtaataaagtcatgctagatgcgtgactacgagtttaatgaatgcttgtgttgaa

SEQ ID NO: 443034 - DNA, 300 bp, Triticum aestivum
gtaccatacaacagcttccaacacatgccatgcactgtacacagtaatcaccatcatgtgaggtcatgcagaacttcacatgatctaatcagcgtcgtaccgggcatttcatgcaacaatggaggtaaacgtgacagagatgcagagtggattcaatttgtctctcagttcgttcgtgtttagccgtgcgacaggatacagacttaagctccttccaggcacaattggagagccacgaaactgacgacgacgtgcaattcaccgtgccatcggatacaccgacgcaactgggatcaccct

SEQ ID NO: 443035 - DNA, 397 bp, Triticum aestivum
cgggtcgacgggccaactggttgcgcagctcttccaaatgcgcgcgcagatgaagaaattgatgggtatgatgcaagggcaagaagcaattgcaggaatgggagatctcatggactcgcttaatgctgacgagaaggcacctcctggcactgcacggcggaggagacggcggagcgagccgccacggcagagggggctggatgcagtgggtggcgccagtaagccttgagttgatgtgcactggagctggaatttttcactgaaagagttgtggattggcatgtagatacgggtcctgctgcatgatgtaatatttcctgtacattttggcataccgactttacaattcgtgggaaatgtgtttagtggacggaacatggagtttgagggtggaggc

SEQ ID NO: 443036 - DNA, 404 bp, Triticum aestivum
tctatacaattcaatagttacaataattgttgaattccaatatgtatacgaggtctatagtacttcacaatatgttcaaactcacataatcccagtcaaatgagaatctaaatgcatttcatagttactactttgtaggatgcaacaaaaccaaccataactctacatcatccattataaaatcaacattttgaacacattccaatgtgtgaatgaagcgtgtagagagagcttgcgaagatggagcagatagggcgggaaagctacatgctaaatagggtttgtgtgtgtgtgtgtgtgtgtgtgcgcgcgcgcgccagatactgagagaaatcaaacctatggagagaaatgtgtgtgtatgtgacggaaagctacatgctaaatagggttttcacgaagag

SEQ ID NO: 443037 - DNA, 280 bp, Triticum aestivum
tattgggttttgctgggatgtgatgatttttttttctggtcatcggtattgtttgtaaacatgtaacccaaaattggattctactagttctgttacacatctgagtcacagaggaggatagttgtgttaatgcaagagtggagacgaactgtttcttgctattaaccgaaaagccatgcggttcagagttgtcacaaaaaattaaaaaatataaaaaaaacaaaaaaaaaaaaacataaaaaaatagaacaaataaggaaaaaaaaactacatgcaaaaa

SEQ ID NO: 443038 - DNA, 390 bp, Triticum aestivum
gggtcgacggcctcggcatgcgccaggtggggttcgtcttcacacaggcggtcgggaggaaggccagcgagacgggcgagtacaccctgtccaacagcgaggtggtccaggccgcccagctgcaggcggagggcgggatcccggagtgggtcaccgccgtggtgaagctggaggtgggggaggacggctcggcggacgtgtccttcgaggcgttccagatgagcgaggtctgcgtcaagctgttcaaggacggcgtgctggagacggagatccaggactccgacgacccccgcctctccaagatgcgcaaggaggtgattgcaggagggaaggacaccatggaggtggacaacgacttcttcctggtgccggtgaagatctccgatcacc

SEQ ID NO: 443039 - DNA, 94 bp, Triticum aestivum
gtcaggaagaagtggggcggtggcgtcatgggctccaattcgcaggccaagaccaaggctagggaaaggttcatcgccaaggaggttccccaaa

SEQ ID NO: 443040 - DNA, 393 bp, Triticum aestivum
gacctaagttttccccaattcatttggctccaatccatccccgaacaaggcaagaacacggacaagccaagaacaacaactccccagcgtctccagcgagcagcatttaactccatccaggctttcgaggtacaagaagaaaggcttctgttcggccatggctttcccagctccagctgctgtattccttgatgagaacctgccaatccatagaggcaagagggctgatgggctgaacgcgaggccactgaaaccatcagcaaagccatcagcaaggaaggccctgcgggatgtgtccaacaccagcaagccccaagcgcctagcattcaaaaaggccaccccttgaaggacaggtccgtcctgaaagacaagtctgctcttcgcaacccaag

SEQ ID NO: 443041 - DNA, 395 bp, Triticum aestivum
atcagcatggactaatggtcgcttaagttttctagtgtcaatgatgaaagagtactcagatgtggggaagtaccgtggccaaaatgggtggacaaaggaaggatggcaggctatgaaagaccgattaaatgcgagacctcctggagctaattttactgttcaacagctgaaagatagggagcaaaggctgaagaaggaactgaatgtcgtcaagtctattgtagacaagagtggatttggttgggatcccaagaacaaagttctaacggctctagatgaaaaatgggaggagctatcaagtgaacaacgcaagtggaggcacaaaccatttccgtactatgatgttctatatgaaattcatgaaggtttgtttctgacaatgattaaatttaaga

SEQ ID NO: 443042 - DNA, 396 bp, Triticum aestivum
actcaatcacacaagcaaccagaaatgacaacctacgacaccacaacagttgctcaaaaaaaaagtacaagtgcattttacttacaaatggctacgaagaatcagagcctcagaagttgaagaaaaagtagatagcatcgtgctcaaaagaaaagcaaaagagtagatagcctcctgtccaagtccttcagacgctggtcgccaactggcatattcagtacacagactcacgaaatcaacatacaactcgcaatctaataaatatcttatcagccggcataaacaaccaagcagcatgcacgcacccaggatcgacggttagcaaggaggatgccatgagagacttaattgtgaagcttcttaattaactgtgcttactttgaaaatacctccctt

SEQ ID NO: 443043 - DNA, 372 bp, Triticum aestivum
cgaatatttgaggcatactctggcatattacagggtataaaaggtccaaaagctcagctgatggtaccttatgcaacccacctattgcagttcactgaagctgtctacaaggatgggagcagggatgagagtgtgacaaaggctgcagttgcagtccttggtgatcttgcagatacacttggcccaatatcaaaagatctgttcaggaaccacctgttccatgtcgaattctttagggagtgccttgattcggacgaagaagtcagggaggctgcatcgtgggcgcagggaatgataaaccaagcagtggttgcttaatatgtgaaatcattttctgttgttggttgtggtggaagtttcctccttgtgcat

SEQ ID NO: 443044 - DNA, 405 bp, Triticum aestivum
agcatcggagaaagggcggtggctggaggcgtgcatgagcttgatttggccatggcagagcgggcgctgagatgagatgtagagagggaccatggtgggtcaacgcttggggaaaagtaacgagtggctgtgcttgctcgagagaagagataagaaggggagggggcggtgcgtgcttgaggtaggtgcctcctcgtgcgtgcgatattgccagatcgtacgcgaccggctcgatgttcggccggcgcgccgagcgcaaacatttcccataaaaaaatgccatccaataaacatattcacgaatttcctttaaacatagtgaaaagagatgttgaaaatcatttaaacattcattttttgacaaatagttgctttaattggattattatgctgatcaaatgtatg

SEQ ID NO: 443045 - DNA, 390 bp, Triticum aestivum
gacactgaagagtttcatgggcatgtcccagctcaacctcagaggcctaatgtcactgttcggaattggaaagacaaggactactcggtggtgaccatccggtgcaaggacaggccgaaacttctgttcgacactgtgtgcaccttgacagacctgcgctatgttgtctaccatgcaaacattgacgccagcaataatcaagcgtaccaggaattctatgtaagacatgtgaatggatctccaatgaacactgaagctgaaagattgagagtcatccagtgccttgaaagtgcaattgagcgcagggtatctgagggtgtgaaacttgagctgtgttcaaatgacaaggtcggcctcctgtctgaggtcaccctcatcttccgggagaac

SEQ ID NO: 443046 - DNA, 402 bp, Triticum aestivum
  unsure (1)..(402): unsure at all n locations
ggggacaacatcgctcgcgtgttggagatcgagagaaggaaaccctagccgccgtcgtccagatctgcttgggttggtggagggtatggctatggcgctgcgcaccatggccgccaagctgaagcataagatccccgccgctgtccagcgggttcgcgtctcttctcgtgctccggcacctgctgatgctgacttcgaccgcttcggcttcggcccaaagtttcgccgggcactggataagattgtagagaaacacatgaagaggcgcaaggatgaggccttggcctgtggtgctggcttcagtcttggagcactcacctttttgcttggggtccatangctcggtttaacggagatggctcaatggttaatgactggaatatctatcctgcaccgcatgtt

SEQ ID NO: 443047 - DNA, 322 bp, Triticum aestivum
  unsure (1)..(322): unsure at all n locations
gggtcgagncgcaagggttgggatattggggcgctggtgggcatcgggcgctggagtgcatcggtgggcatggggtggccgattatgaagactcccaggcggaatcgcgcgcaggtacagcccggagtcagtttgacattttgggtggtaataattccaacatggataaccagagtgaaaataaatactacacggactccaaaaatcccgaagtacattttcaccgtcctctaaaaataggccggacaaagtggaaatttatttggcccgaaaatgcaattttgaaaaaacagattattcctaaatcacataaaatagcgat

SEQ ID NO: 443048 - DNA, 386 bp, Triticum aestivum
gatcacagaaacatgacatgatgcacaaacaagtatgatgcatgtccggtttaaatgaggcatggaatggcaaaatgcaacaaacaacactacaaattaagtggagctcaatatgcaacgagttgcacattgacggaacaccacatcaattatttagttctctctcggttatgtacccaacaatattaaatgttgattaacatggcaagaggtgaagcataagtaaactaactatttaggcaagtttaaatgtggccggaacaacaaacaacaattatggaaaatcctcatgtccatattatagatttggtgctgctctgccctaaaccatatttaaagttgttaaacagcaaaataaagtgcaccatgttaaactaggaattttt

SEQ ID NO: 443049 - DNA, 96 bp, Triticum aestivum
cggaatctacggagatcgggttcgtccacgcactcccgccgccaccaccgccgcgaaccggagagcgaggccgacaccgccgccgcgatgagggcc

SEQ ID NO: 443050 - DNA, 64 bp, Triticum aestivum
atacataacaacttcgccaatccccttcttgagggccatgaggacgcgaggaggagccaggggg

SEQ ID NO: 443051 - DNA, 254 bp, Triticum aestivum
  unsure (1)..(254): unsure at all n locations
cattgaaattgacggggttctcttgttgtatggcaccggaagtggttctagacagatgcttgcttatgtagctgcagaaagtcatgttttagaaaaggaggatgacccccggcctttgcatctgagcgatgcatacggtcactttattaattattctcataagaccttacaaagtaataccacagtaagactaanaaataaaagggaaaaaagagaaaataaccaaaataaaaaaaaaaaaaaaagcggccgct

SEQ ID NO: 443052 - DNA, 268 bp, Triticum aestivum
taaaagttctgtcagcacgactgcgtgctggccatattgatattctaacgtcgcatggcttcgcctatcacaacgcatacaattactattccaagattatttctcgaaagggcatctcataatgcattgagatcaatgatcaattgatatacctatagtgtgcccctgcgcccgtatatcaatgatcaatgaggaagaagtgtcgccaatcacagggcgcaccattacgagtcttactcccaccagtagtatgactcccatccttcca

SEQ ID NO: 443053 - DNA, 373 bp, Triticum aestivum
gagacaaatggttatgacattgacatgatccttagtatcgtcgaagagtatgtgaggcaagatagcaaaaatgctcagaaacataatgctgaggtgaacggtcacgtgcaagcacctagtgcatctatgatcacagtagcaaaaatcgttgatggttatctcaccgaggttgcaaaggacccaaatacccctgttttgaagttcatcaatcttgctgaggcaatttcaggcaattcaaggcctttccatgatgggatatatcgcgccattgacatgtatatgaaggagcacccaagcctaagcaagagcgacaagaagaagctgtgctgcctcatggactgcaagaagttgtcgccagaagcatgcgctcacg

SEQ ID NO: 443054 - DNA, 399 bp, Triticum aestivum
  unsure (1)..(399): unsure at all n locations
acgcaggcatggcatggtggacacgcgtggtcaccgcgcgaactcttccctcgggccagcctacgtccaaaaatcatgtctggcatgttgttcgtggtggttttaaagtttaccacgctttggtttggatccaggtgaagtagaggagtttttacatgccaagtaagtttctcatcagtaactttgagaggttactgaggtcaaatggctgggagttgggggctgtgctttggaggttagccatgatctactaaggtgaagatgcacaagaaaatccaggcacaatggagcaagtaaaatggtagttgctatagaaaccaccatttctgtccagaacagaaaatatttttctgtagcanaaatattccanaaagtgatgaaaatatttttacccaggaa

SEQ ID NO: 443055 - DNA, 375 bp, Triticum aestivum
gggccgaggcggcactttattgacaggttaaattgtcacctggtttctgggtcccacctgacagttggcagagcaaagaaatcagttaaacaaaactttacgcaggcgcgacacgagtccaacccttgcgcgcgaaccgccctggctgtgtatgtgagtgcatgcacgtgtcctccctcggtcttccaacaaagagtgtacatcggctataaaacacagagtgtagtacatgatgtacatctacacttccaatgatttagcctttaatctaaatcgatattgattgactaatgcaccaacttgtgctgtagatataggcgacatgtccaacccttaattacagcaatcaacggccttcaattaatcctcctaacc

SEQ ID NO: 443056 - DNA, 216 bp, Triticum aestivum
cgagtccaagggtgtaagataaactcagccgcagattgccacaggttcagtgcgtttaaagtatgtatatgcacagctggcgtaagctgcgcttgggcggtttatattttccacctgtattaatctacaagggcatttttctgtgcacacctgagatacgagtgtaacgaaaacacaattgtaaaattctggatttctgcttggatagcatcgtag

SEQ ID NO: 443057 - DNA, 372 bp, Triticum aestivum
gtacatcaacacatgcaatgcctttggtcttcgaatgttgttcacttttgagagtgatgttgttcacttgcgtatgagaaaaaaaacatccgacaaaagaaattatgcagctcacttgcctgtctgatgcagtgcagtttttatttctgaagcagtgcggtcggcctatgatgttgttcatcccgtaagtgcaaaaaaattgttacggaaacgaaaaaaaataatgcggttcacttcttgatagtgttgtgattcatttacaccatatgtgaagtgcactctactttctcgtccttgaaaaaatcacgtttgaataaaagaaaccatgcagttctcttacctgtatgatgcagtgcggtttttcatccaatg

SEQ ID NO: 443058 - DNA, 332 bp, Triticum aestivum
ccgggtcgacggggatcttcatccggagatgatggataacgaaacacctccccatgcctccacgccacatgaggcgggcgaacccgtggtgtcggcacacaagatttctcctgatgggctaatgccatagggtaatcctacggcctcgctaagtccgaagtattcggctcctaaatggagcatcagtcgtgctctgtagctgtctagtcagctatgggaagtatagatgagtcctctgaaacatgaggctaactcataatctcatcgtacgcttctaggtatagcggcttacatgatttcagatcgtgaacaccgataggatcaggcatata

SEQ ID NO: 443059 - DNA, 394 bp, Triticum aestivum
  unsure (1)..(394): unsure at all n locations
caacttgacctttcaagtaacaaaatagttggccaacttccagatgcaatcggaaacatgacatctcttcagacactgaggctaggtgacaattacctctcaggtgtaaaatctgaactgttcggaaacttgtgcaacctcagctggctagagctgtggtcaaatgagatcgaccaggatatgtcagattttatggaggggtttccggtgtgtacaaagagtaaattgcggtccctagatctgtctgctaccaaccttactggcaggattccaagcagtattaagcagtggaaaaatttaagtgatcttcaactctctgagagtangcttgtgggattaatacctttgggaattggcaagatgactaatctacggtcattgattctaaacaaca

SEQ ID NO: 443060 - DNA, 395 bp, Triticum aestivum
gaatcagattagacaacttccaaagggagtgaaagggatgacgcttccagttgttaagataaatgctcgggttgtcaaggatcattcctctatcgaaccatgcataaagtccagagcagctgagcggtcactttctagatcttcacgctcccagtcaactggaactgataggaattctgttcatgaaggtttgtctcatttgaagaaacatcatgaacatgatttacaaagtctgcagaagtccaagtctgttccaaacatcccagaggaccatgtttgcactgttgaagaattgtcagtcaaactgggtgactggtactacatggatggaactggacatgagcatggcccattttcttactctgagttgcaaaagttagttaaaaggggcacta

SEQ ID NO: 443061 - DNA, 389 bp, Triticum aestivum
tttctgaagaggtaagttctattaattcctttccttccaaaggcaacgcggactttattcctgcttttaatcttttccttcatctgaggcaaaaggctgaatttgctccttcttttattttcgttccttcccgaggcatggccgaatttccttttttttattccttcctaggggcttttgcaacgattgttgacgcatcttattaattttggatgacataacatatataaattggtggaatgatgtgcatcgaggcgatgtgagactatttaatataagaacatatcttttagtttatatcaaaccatgttgtagtttggtggatcgtaacttttgatacacatgcaggatctgccccagatttaatggatttacttgggccatagagc

SEQ ID NO: 443062 - DNA, 402 bp, Triticum aestivum
cgaagtaatagatgagttccggcagcacgacagcgtggtgacggtgttggtgaagaacaatctccgcagggcttcgcctaagcaccacagaaactatgacggaggataaactagaggggacggggttgccggcacacggcttggtgtttcttgatgtatctttggtgctagcacctacccttctatttatatgttgagccttggggtcgaaacttggtgtaaaagccttcacaaagtcggtttcacccgaaaggcaagagtccttctcggactccagggccagacgctagggttcccgacgtctagacccagacgccagggaccctggcgtctggccccttggactcgccaaaacttccttttgcgctttcaaaaaaccttgtgggctttcccctttggccc

SEQ ID NO: 443063 - DNA, 343 bp, Triticum aestivum
tcagatgatgtccatgagagggcatgccgagcggtttggcatgcccaacccaccaaagcggatcatagcaactggtggggcatcctccaatgagagcatcctcaagttgatcgcgcaaatctttggctgccctgtcttcacagttgagagacctgattcggcctcgctgggtgcagctctgagagccgcccacgggtggctgtgcaaggaggaaggaggttttgttcccatctcccggatgtacacgggcaacctggagaagacctcgctgggcgcaaagctggcggtcccggcgccgggggaggagggcatggagctcctgaagaagtacactgtgctcatg

SEQ ID NO: 443064 - DNA, 374 bp, Triticum aestivum
cgggaatagggatactttatgatatccgaaccagtctgagcctttgcatagtcttttcagtattttgctttgttgaatttgtggttgcatcgtcgtgtctagttgctggtcttagagtctagtcttttagagtttcgagttctagtcataagttgtcacgccaccgccgcaccatcatcatcgcctctgccatctaccatcaccacttatacgcgaccgattcgtcgccatataccaccagcaatctatatccatataccaccaccgctgccatatcctaccaccatatatccacgagcaatccgagttcctttcatattgggtttgtttttgagatccatctaatttccgattcgtgtttccttgcctgagta

SEQ ID NO: 443065 - DNA, 409 bp, Triticum aestivum
gtagaccaggataattttgtgcatggcaggtggatcaggattgtcgacgtcccacatgtcggcgaatgaaagtattctttccgatatagaggacgagcaatgagtattcattgtttatttttgatgaaagctattgtctccattgttactccttgactttgtcaatgcctctctctcctccacataagcggggactacttgctatgcatgcagcgggcagctggcatcttgaggggccagagcggtgagagcgggctccggaagcggtccggactccagcagggcccacctcacattatcaccatatatttcttggagtccgtgcacggcgggcgagcgatctcttctccctcccccatttctctcttctcagtcgatacccgccgagcgattaaatttcggctatcga

SEQ ID NO: 443066 - DNA, 402 bp, Triticum aestivum
ggtcaccatggagcccaaggcagcgtcgccaccagagccttttggcaggcaaagactgcttttgtcaggataagctgtactagctgtcccctttcaaattggtcattgttggctcccttccttgctcaatatttggggagaggaccagggcctctataaataggattagccaccacagtaggaggcaactagtctcaaacgagtctcgaactcattcagagacatctgatctttagccgatccttagtcacacacggagcacaagaacacctcacctcaggaggttgttcttccccttgtaatgtcatccatagcccaagaggcaatccaccaccaccacactcactacaaaaagaagacacttccgtgatgatacgtgtttgtcacagtaggtcatgtttt

SEQ ID NO: 443067 - DNA, 381 bp, Triticum aestivum
acattttagattagctgatcttgtaggttttggcgttgccgttgccactggaaagcaatattataagagttatccagagcgatgttataaatcacgtcttactgaaattatgctcgatgagaacaggacaggtgaatcttctcataggggattttatctttataatgataagcgacaagcttctccagatcctgatatcataaagtatgttgagaaatcaagaaacatggcagctgatgaaattaacagacaaggacattgtagagatggtcatctttcccgtggtgaatgaggcctgccgagtgctggatgagggaattgcactgaaagcatctgaccttgatgtagcatccattatgggaatgggcttcccttcattta

SEQ ID NO: 443068 - DNA, 293 bp, Triticum aestivum
  unsure (1)..(293): unsure at all n locations
gctcctaagaagggattccaaaagcttannnnnnnnnnnnnnnnnnnnnnnnnnnnnnnnnnnnnnnnnnnnnnnnnnnnnnnnnnnnnnnnnnnnnngnnnnnnnnnnnnnnnnnnnnnnnnnnnnnnnnnnnnnnnnnnnnnnnnnnnnnnnnnnnnnnnnnnnnnnnnnnnnnnnnnnnnnnnnnnnnnnnnnnnnnnnnnnnnnnnnnnnnnnnnnnnnnnnnnnnnnnnnnnnnnnnnnnnnnnnnnnnnnnnnnnnnnngaacccnccctgtaaccggngccattaa

SEQ ID NO: 443069 - DNA, 51 bp, Triticum aestivum
acggggtcagagactattttgcgactgtgtgcgtggtttgtgtacagtttg

SEQ ID NO: 443070 - DNA, 415 bp, Triticum aestivum
acacgtgaagataatgcatagtagaagaaaaaagaacaactgaggaatttcaaaaatgaggaaaaactcaaattgaagattttcaacttttgttggtggcgtgacccaccgtataagaatgatgatttcagacaccgcgtacaattttcgtagggctctgagaatcaagttattcgttaatttcttcacacttagagggttaatctttactgattgaagaaaaacgttacgtgtgttgcacatcaaggtcataaattttgcataagtgttaggatgtgtgtccttttcaaaggacattcgaagattataggatattagctcacaccgcaacttgctaaatctcttctcatccaagggctttgtgaagatatcatctagctggtcttcagtcttcacatgctcaatagatatgttg

SEQ ID NO: 443071 - DNA, 420 bp, Triticum aestivum
gggtcgacgggccccaagcagttcattttttttctgcaactatatgtgcacaagtgttgctttggcattccacacagttattagtcttcgaggggcggcacttgaatcttggacggatgacgagattaggatgaatttttttttgcgggtaaagggagttttattgcaaattcatagagttacagtcgagacgccacacatctcaatacaaggaggaactgagcgtagccagacagttgtggctcgctccgtacggctaaagtttgccagacaatcaccaactctattttgagaacgactaagtttctgaggaacaaactccctactaccagctaagtacttgatctccaatactaagtggtcataagctgaacgctggagagcatccatacacaggcgtgacaacgcttcagaagaatc

SEQ ID NO: 443072 - DNA, 414 bp, Triticum aestivum
gggtcgagcggctgctacaggctaagcaagaaccgttcttacctacgcaacaaaaccacaacgatagttcgtcaacttagtgatgttttaaccttctcaaggaccggcgtagccacactcggttcaaataaagttggagaaactgacacccgccagccacctatgtgcaaagcacatcggtagaaccagtctcgcgtaagtgtacgcgtaatgttggtccgggccgcttcatccaacaataccgccgaaccaaagtatgacatgctggtaagcagtatgacttgtatcgcccacaactcacttgtgttctactcgtgcatataacatctacagcttcgaatcgaagatcatcaagacccataggctctgaacttctctcttctcttgttcctgttctctgagtatatgcactgt

SEQ ID NO: 443073 - DNA, 421 bp, Triticum aestivum
  unsure (1)..(421): unsure at all n locations
cgggtcgacgggtacaataaactgcagaaacttctgtgtgatgaccgtgttccctgtcattgagtggcgattttgctaggaaaatatcatagccaaatttcgctgttggatcntggattttgctaggaaaattaagttgatgcttgtgacaactctgctttcctactcaattgaatactgctgtgcgatgaccatcataggcaaatcttgttgttggatcctgtgtgtgcggcgcctctctcaactttggcttcctgagaatgacctttctcaaagttgcccagtcatggaagcgcataatgatcactggccggtttaacgtgggaactaacaaaatgttgccaagcctccaaaaacctctcgcaacatctaatgttatcatgacagaaaaaaataacttttttgaatccaggtggtttga

SEQ ID NO: 443074 - DNA, 430 bp, Triticum aestivum
aattcgccggtcgacgggataattgaataacgatagctggaatatgaggatgaagaattcttctggaatgatggctttcggtgaaataaaatagaaaacaagttctgaagtagtctagatgggcaaggaaagaatactgacaaacggaataattcgagaggataagaagaagctggaaccatgaatcttcgagagaacggacaagatttagagaaactcttcttcgatcttcaaatgacgacgagaaacaccaccaaaattgttgagatactccgggagaatgaaaagaggaaaggttgaacaaacaatgaaaagaatttgaaagcgatcttggagaaggcatgtgactgatggaatccattcttatgtcacacttgaaaagaatttgagaatcactctagaaaattagaaaagtcaggtaagattctgg

SEQ ID NO: 443075 - DNA, 395 bp, Triticum aestivum
ggagcaacaaaatctgagtacagacataagttacacatgttgccataagatggctagcacaagctgggatacagatcgaaagacgggtatgcctcctgccctggatcctcctaaactactcctcgtcgttgtccgcggcctgcacatagcagtaggcacctccagtgtagtatgagtcatcatcgacagtggcgtctggctcctgggctccaacatctggtcgtaacaaccatgtatataaaggggaaaaaagggggagaaaagcaaccgtgagtactcatccaaagcactcgcatgcaaggaactacactacatatgcataggtatcaatgaaaggggtggtatatgtggactgaattgcagaatgccagaataacatggggatagcttgtcct

SEQ ID NO: 443076 - DNA, 438 bp, Triticum aestivum
gggtcgaccggggcaagaaactatatttgggactatacgcgggtgaatgggggtttcagtgaaggagatgaacggagacgatgaagctgatgggagtatacacgggtgtctctttggtttgggcccacttgttaggtgtaacaatgaaatattaggataaaaatgcagcatacattttttaatcaagggataaggaaaatatatgtaaaataacagaaaatgtgcaaaacaccttattttgttggaagttttgcaattaaaatagaatcacaacgtagcagacttgtgggacgtttccatcaatgccatgcatcgagaataaataaagtaactaaattacattcccaaatttcaaaacaaggacttagaaattattctaatgatgtgacagggcattaacaaaatgtttatatatgactctaacacatcgattaaatc

SEQ ID NO: 443077 - DNA, 288 bp, Triticum aestivum
acgggatcactgagaggattcatcgataaattccgccatcagaatatttatctacctgtcacttctcaagagacagctgatcaccatacacagtgtacatctgagctcaagcaagatgtaccaagtgaaggtctgcatgccatcgtcatgactgatcgaccagttgatgatgcccgtgagtacacagatactttacatattgccagatcctgtgtgatcagcacctcacgcaggctggtcatctagcaattggacttgctgagcgtttctcagtcgcagatgcgcatg

SEQ ID NO: 443078 - DNA, 435 bp, Triticum aestivum
cgccggtcgacggggacgacgaagtggatgtggacgagtcggatagagagctcttagatgatgaaaagaaacccgatatcacgaaacgaccacacactcctattggagatgaggtggaatgcaagaagccaaagatagcagaaggctcaaggtgccaaggagaagaacctgaggctggagggataaagaattccgcctgggtctgatgacaggggaatgcagtacacaccagaagcatcaaaactatgatctggaacagtatcctgaataaactattttctggattatgaatgaattctgaagcatggggctataagtgaattatgtatcatggatttgtaactatggtggatgttaagtgaacgttctatcagtgcatcgtgatgacaaggcattaacaaaatgtttatagatgactccaccacatcgattaaa

SEQ ID NO: 443079 - DNA, 431 bp, Triticum aestivum
gacatccatggccaatattctgatcttcttcgattatttgagtatggtggtttcccaccggaggcgaactatttgtttctgggtgactatgttgatcgtggcaaacagagtattgaaacgatatgccttctgcttgcttacaagattaagtacccggagaacttctttctccttaggggaaaccatgaatgtgcctctatcaacagaatctatggattctttgatgaatgcaagaggaggttcaatgttcgtctctggaaggtttttactgactgttttaactgccttcctgtggctgcacttattgatgacaagatcctgtgcatgcatgggggtttatcacctgatttaaagaacatggaccagatacgtaacattgcccgtcctgtggatattccggaccatggtctcccctgtgatctgctatggtc

SEQ ID NO: 443080 - DNA, 421 bp, Triticum aestivum
ggtaccaagaatttggcacagtctgtccaggactctgtttagattggacggtccctctttactacctttaagtggcttcttttgctgatcgggtcgagagcccttgaatccggcatttaccgttgtgttgtccgggctcttttccttgttttgacgtttgtttttattacgccgtggcttcccgttgccatcccttatttcggatgtgctgggatcgctggtgcctttacgggccagccaactatcttcacccgcgcaaaagcgggtcataaggcttgttaaggctgccattgtccttggcttttcttggccgaggtgtctggcaagccactcgtcgggatgctatgtttgaatgccgctaaggcttcggcatccggacaatcgacaatttgattcttcttagtgaggaatctgttccaaa

SEQ ID NO: 443081 - DNA, 422 bp, Triticum aestivum
gcaagcaacggagactttgattatccctgcagttgacatagctaaaacaccaggtgcttaaaccgaatcacaccgaacaagggagtaccttgctctgataccaattgaaagtgctagttatcgactagaggggggtgaataggcgatttttatgaaagtattcaaaacatggaagttttgaagacaaacgatagaaatgaacctattaacatgcagcgaaaggtagactacactaagcaagccatagtcaagtatacaatgaagtgaaagcacgaagactaatagcagctaggcagtatggatcaggatggaagatagtatgaagccaattagaacaaacagtcacacagtgaagacaaacaagtaatgcaagtaggcaatgacttcacaaggaccaactattgattaagaagaaggaaagg

SEQ ID NO: 443082 - DNA, 435 bp, Triticum aestivum
actcgcgggtcgactcaccacgtcaagacgcgttctacgtaccacgtgcacggtagcaacggtcactgttatcgagaggcaacccaacaccagctcgatcggcttcagtaagcagcagcagtgatcgatcgctcgggttcagttagcagctgcagcgaaggaattgctcgggttcagtcagcagcgaattaatcgctcgggttcagttaacacccaagggatcgatcgctctgattcagtaacgtgtgatcgctctgggttcagttagccaatgcctcgcacacacgcatgtacacaagagaaacacacaaaccacactgcatcgctcagccccgaccacccatcgtaaccgggaactccgcgatattttcctcgccctcgcttcaaccacgatttattctatcatggaccgcccaaagaatgtcatgcagctgt

SEQ ID NO: 443083 - DNA, 412 bp, Triticum aestivum
ccggggggccaaagacaatgcggctcgatgcggcgagcgaggccgtggccgtcgggacggaggagaccgggttgtggtcgtcgccgtttttttgggtcgtccgggtcaaatttcccccttttttactattacttagatgcgactcgtcacattagcacgtgataatttgatatgagctagctgactagctcggtttccacgcgggcagtgtgatgattctgatggatttgatgtatgcgctgcggcaacattacctctgattgtctagtagttattaccatccaacttgtttacaatcatcatatgtgatttccttggaagccgcaaacgacaacttcgacggacggctggtgcctggacatatccgaactcctgttgaactcggcgtccttgcgtcggtgtacagacacgc

SEQ ID NO: 443084 - DNA, 85 bp, Triticum aestivum
  unsure (1)..(85): unsure at all n locations
ggggngnngnaattcatctggncggtcggtacaatcncnaattcccnggtcgacggggcggcgganacggtgggagctgggggtg

SEQ ID NO: 443085 - DNA, 405 bp, Triticum aestivum
tattagaatactctatgtgcttcacttatatcttttgagttatatagtttttgctctagtacttcacttatagagcacggtggtaactattgttctctcatgcttcacttagattattttgagaatcctacaaaacagcatggtagtttgccttaacaataataggcattcaagattagaaaaaggaaaaattcttatgagtgtgttgaatgctatgagaagtttgatgcttgataattgttttgagatatggacatgatgatattagagtcatgctagttgagtagttgtgaatttgagaaatacttgtgttaaagtttgtgattcccgtagcatgcacgtatggtgaaccgttatgtgatgaagtcagagcatgatttatttattgattgtcttccttatgag

SEQ ID NO: 443086 - DNA, 71 bp, Triticum aestivum
  unsure (1)..(71): unsure at all n locations
tttctttggncccggccggtaccanaacaagaattcccncggtcgacgggttccncanaagagaggctacc

SEQ ID NO: 443087 - DNA, 341 bp, Triticum aestivum
gggtcgaccgggacactacactcaggatacatccatccgtacgtcggtgacggcgcgtctcgtcacaatgacactacttgcttgcggactcacgacgatcatctgagatatagtacaacgcataagagcagttcgagtacacgggcaactctgtcaactctatcactgatccgcattatgctcgggcaatacgcaagggtggtcacatcgtcatcaaggaacgtcactgacaagttgttgaagtacacagctctataactgtgaagattagtcacacacactcatgattagtagatactgagatcgttaatgaaaaggagcttgaggatcacgttcattca

SEQ ID NO: 443088 - DNA, 257 bp, Triticum aestivum
gacgggggcaacaaggacaggggaagatagcccaaaaccctagtcctcgtcgccggcggcgagatggccgtcaacgaggacacatctgtctacgtcggcggcctgccctacgacgccgacgaggatatgctccgcagctactttgggctctgcggcaccatcctctccgtccaggtgataaatgatgagagaatcaggggcaagtgttaggggtttgtttcttctcgtccgcaaagggctgcccttcctgctctctt

SEQ ID NO: 443089 - DNA, 428 bp, Triticum aestivum
gggtcgaccggttggttgacagctcatgctgatgctgaggatttagtcaaaaggtgtgacgactgtcaaaaatttgcacgtcgcgctcatgttctggctcgggagttgagattattccaatcacttggccgtttgcaacttgggggcttgatatggttggaccctttaagagatccaaggacaaaaagactcacctgttagtggcagttgacaagtttaccaaatgggtagaagtagagccagtcagtaagtgtggtgcggccacgacggttcagttcaccaaaaaggtgatattacggtttggctttccacacagtattataactgataatggtactaatctgtcaaagggtgagatggagtaattttgccaacatgagcacatccggcttgatgtagcatcagtggctcacccccaatctaatggt

SEQ ID NO: 443090 - DNA, 78 bp, Triticum aestivum
caacacaaaaaaaacagaatctgtcaaaaacataacagtctgttgtaatctgtagctaacgcaaacttctggaacccc

SEQ ID NO: 443091 - DNA, 411 bp, Triticum aestivum
tttagtagaacgacaagacaccattgttgagcacgaaataatgacacaattgagctggagcttcggtcgagggagtagatgtgtatttatatgcgcgttcatcggcctctggaacagccaaaggagaccctgccagagttcctgccgggctccccatggacgcaggaagtgtttgtgtcagagaaggtttcaagcgcaggaaggattggatcaaaaattggaacgattgaatgaaagaagaggaaggagattgtgttggatcaaaaagaagagaaagaagacctggtctgccgtggaagggcatcgagctgctgtgctctacaaaggaagaagcaagagaccggatctgttttttttttttgagggatggagaccggatctgctgggtaacgcatcagcgtatcctttttg

SEQ ID NO: 443092 - DNA, 405 bp, Triticum aestivum
cattcaggctcttgcagcgaggcctgggggtccaccattcctaagaatcactggtatagatgactcaaactctgcttatgcccgaggtggtagactggatatggttgggacaagattgcacagtgtgtctgcatcgtgtggcctgccctttgagttcaatgctattcatgctgctagccatgaggtttatattcagcatcttgacataagacctggggaggctattgtagtgaattttgcctatcagctgcaccatactcctgatgaaagtgtgagcatggaaaatcaccgggacaggatcgtaagaatgatcaagagcctgtcccctagggtggtgactcttgttgagcaggagtcgaacacaaacacaagtgcattcttgccaaggtacttggagactctcga

SEQ ID NO: 443093 - DNA, 404 bp, Triticum aestivum
  unsure (1)..(404): unsure at all n locations
ctcagtaaacaaagtgtgtgtcggtgggacagcttgggaggcgcggtattcctccgggtgggtangggcatgtccagaaacaggaggccgcgatcagcatcagcatcgatcaatcaactcacgcattcttgtttcttcatcaagacgcaccgtccgttgcattgcattgcatgcacggacgaccctgcgtgcataactaccattcaaaccgcccgctccgtccgtcggcctcctccgatccgtgtttcttctctccagtaatggtgctacctagaggctatagggcattggttttgttccgtggtggccatgtaactagcaagacttatctaatgaagtcatatcaattcaagatttttgccatcaatggcttaaaacagatgaagtctatcgattgacttcca

SEQ ID NO: 443094 - DNA, 356 bp, Triticum aestivum
ctactccagtgtggtggtggtggattgcctcttgggctgatgatgaacagtacaaggggaagaacatcctcctgaggttgaggtgttcttgcgctctgtgtgtggatgaggatcactcaagatcagatgagatgcctccgaatgagttatctcctacggtggtggctagttcaacttatataggccctggtcctctccccaaatattgagtggaaagggagccaacaatggccaatttgaaaggggacagctagtgtcacgaccggtttttcaataaaataattattgagaaaccaatccctattatggatcagcgaggaagaatccttctcactgatagacaatacattggtcac

SEQ ID NO: 443095 - DNA, 392 bp, Triticum aestivum
gggtcgacgcgaaagtggcaaagactcatgaggccatacaatggagctggcagcacggcgcagcaagcatgagctgcttgagagtgcggatgacaaggcaagaaaggaaaaaggcttttatggtgatcgggatcaataccgcgttcagtagcaagaagcgccgtgattctgtcagggagagatggatgcctcaagatgagaaactcaagaaactggaagaggaaaagggagtcgtcattcgatttatgattgggcatagggtttaaaatgtgagtatgatgtgtgtggagagattgtcatccatgctcagcaccggcctgcaagcaccgtcgtcttgatggatgatgatgatttaatagtcaaggggcttccacagctctctgccatttgtg

SEQ ID NO: 443096 - DNA, 398 bp, Triticum aestivum
caaaaagttccggatgttcccacagaatcaaatgggcaagaagaatctgatgacattgccagtgcttctgatgctacggctgtttctgcggaggaacatgacaagtctgatgaaagccctgcttctacacctgccgaaagtaacgactcgactgctgaaattcttttcaatccaaatgtatttacggagtacaagcttgctggcagtcctgaggagattgaagccgatgaagctttggttaaaaaggttggttcgtatctgctagatacggtgatcccgaagtttgttcaggatctttgctctcttgatgtctcccctatggatggtcaaactttaactgatgtgctgcatagcaatgggataaatgttaggtatctgggcaaagttgcaggcatgat

SEQ ID NO: 443097 - DNA, 412 bp, Triticum aestivum
cggggttcactctcggtgtccagtccagtcccaggtcgccttgccagcttgctcaagtcaatcaacaagttgcctccccgggttgctatgaccggcgatgtcctgcgcatgaaggagacaaagattccagttatagctgaaagctttaagaaagctattctgaaggaacataaagctgctagcgaagctacttatggggtatcaacggtattgtcttccgcaagtgctacttgtaggtcgcgcagcgaaggtctccttagcttactcaatgaagagagctcctacaatatcttgaagtttgaaattggctcgtgtgtcttcatagattcattggggagcagccataatattgagttggatacttttgaaccaccaaaagccgacctgctattgccattctctgcgaagctta

SEQ ID NO: 443098 - DNA, 395 bp, Triticum aestivum
ggtcgacgggtgcgaacgataaagaagctagccgagcctatgaggattcgcttacgtagctggaacgtacggtctcctcctatgaagagcttctcaccattcggtacactcctaagcatgtcttccacgccttcccagaactccctcttggtgttctcattgtggcctacttgcggggcatacgcgctgataacattgagacccaagtcctcatctaccagcttgaccaacataatccgatcgccacgtctcttgacgtctacgactctatacttgaggctcttgttgagtaaaatgcctacgccatttttgtttgcagccgtccccgtgtaccacatcttgaaaccggtatcctccacctccatcgccttctgtattctccatttggtttcttg

SEQ ID NO: 443099 - DNA, 405 bp, Triticum aestivum
atcgatcatcttggcctcctcccggcctcctctttctcgtcctgctacactggagtcattttcgacgtcgatcatctcagctcctctctctcattctactacactgatgttaccatggcgtgagcactgcatttcttctcctctctccactgtctttgtgcaagcactccaactagttcgccgacagggtcgctcgcccatgacttcgtgctcgtcatgtcggacacggcgccacgatcactatccaccgcagtcgccatggtccggtgcacaatgcatttcttctcccctttcctctgctagctcttaaccatgtgtgctaagtgcaagtgctagctcttaatcataccccatgcgggcaaccaaacaacgtgtagttgcagtggcgaacgcaggaataatttc

SEQ ID NO: 443100 - DNA, 139 bp, Triticum aestivum
taagcgagcaaatgtaccagtcttaccctaaagttattccgttcgttatgttggatgctactgcagtacgtggtgttggatgtgatgtgtgtgaactgcgtttgctgctgcttttctgttaatgttagttgcatctggc

SEQ ID NO: 443101 - DNA, 271 bp, Triticum aestivum
tacatggaaagtggcgcttcccttattacccgaaggcgaccgagattttccagaagatgatgcatcctctcaactgtatcccgattttccgttctccctttgagtgtaaacattaagttgtgttggccttgagtgagaaatcggaaataatcttggaaatattgcaccgccatggccgcagtgatatgcaagggagctagagaatgaagaggtgcgtgcttgttgtatggagatatagcgtaaggagctgctttgagcgcgaattttgtgg

SEQ ID NO: 443102 - DNA, 72 bp, Triticum aestivum
ctgcttgccacattggacaagggcgggagcggatgctgctcgagaatcgacgtgtgctgtgtgcggtggtgt

SEQ ID NO: 443103 - DNA, 382 bp, Triticum aestivum
  unsure (1)..(382): unsure at all n locations
cgggccgacgggaaaaccgattagtcatccgcgcatcgtcgtggccgtccgcccgtcccttccacggcacatgatagcctgacggttgccaactttctttggacgtgagaatttgatcgtcctgtgctcagcaattcggcataatgcatgatactggtgttgtcgtcgagctacgtccacctcttcactctgggagttctggaccaccacgcccacatgcacaacacgccagttcagcgagcaatcttgcgaggattggagcttggaaagacttggctcacgtacgtgcgtgcttggccgacttggactcgatggcgtgtgtggctggcggcaaaacaggcagaagacgtgcctgacctggaaggangatgccgtcgtctcg

SEQ ID NO: 443104 - DNA, 328 bp, Triticum aestivum
cgggtcgaccgggatggcctggcgggtaatgttcactatccgaattcgctgtacggtcttgtcggtcaagagcttcatgaccgtgtcttgtgcagtgctgggttcttgtgtcgaggacgagtaccagccgcggggatccgttgtacttcaaataacactacccgttgtaaattgactcctggcgaatgtatggatcaatatccagtgggttgtctgtcatgacaacaatagagcaatccttgaagtacaaacaaagtcttcggaggtttccatcttgatcacactggggttcacctatctgataatccttccttatacttatatgtga

SEQ ID NO: 443105 - DNA, 402 bp, Triticum aestivum
  unsure (1)..(402): unsure at all n locations
ggtaagatggaggtgttgtccgaacagtggttgctcggctgcgaccatatgaccttttcctattgtattatcagctgtgtgacgagaggatagaccgaccaatctgaagctgctactcccttttgtccctaagcagaacaagttggcatggagcagtctgttctaaaagtaatgtatccatatgttactgccaatcaggatagggacatgagttttaacttcctctggttgtgaggagataataaagaagctgagagatcgactgtttgagaagcgggttcaggagatcaaagccaacaacaacctaggctttgaaaaagatgtttacaatgaaaaactgaggaagttgtgatggactgaaagatttgcttgaagcanaggcatccacctgngatatatatg

SEQ ID NO: 443106 - DNA, 402 bp, Triticum aestivum
cagatagagctgctgaaacagaagctcaagatgatatgcctcggcgaggccttcaacgggaagatcaccaagacggcacgatcccatggcaagaagttccaggtctcgatccagcaggagatgtcacgcattctgggtaaccttggctgggcttacatgcagcagaacaactatgaagccgctgaattggtttatcgaaaggcccagactatcgtacctgatgccaacagggcgtgcaacctcgggctgtgcctgattaagcagggcagacatgaggaggcagtgcaagtactcgaggacgtcctacttcgcagaatctcagggttggatgacgacaaggcggttgcccgagccgagcagctcctccgtgagctcggtccgacaacacatgtttcatcgccc

SEQ ID NO: 443107 - DNA, 367 bp, Triticum aestivum
gaagggcaaccgcgcgctgcgcgacgcagcaatgatgggtggccgccatgtcctgcagtgtttcttcagatctgaattatgaacggggtgagaaagaagaaagcgaactggatggacgaggatcctacggctcgtggtgggctaatcgggcggctagggtgcgaccggccgaaattttgggccggcgcaccggcgccgatcagtcgccttttttctggctgatgtatgcatgcttttatagtttgagcgatggtggttcacttttaagctaacttgggtgattcgttacccaaaattgtaccaaaaaaaaaaaaaaaaaaaaaaaaaaaaaaataaaaaaaaaaaacaaaaaaataaaaaatgaaaa

SEQ ID NO: 443108 - DNA, 396 bp, Triticum aestivum
ggccgacgggttattccaccttttgccgacacatgggacatccagcatccaggtcgtgtcatgcaagaaaatagagtggtagttgaagccatgatatgtgcatcttgggttaaactgtaaatagaatcttactactcttgagcaactccaaaagcggccaccgaagatctttattggatttgtttttcatcaccagcacgtcaaggtgaaagatgtgcaggttccgtgggtcctctttgttttcactgacatgtgggaccgcatgtgagcaaacagacgatgggctccgcgcatccgctggctggctgagaagagagatagaggagggctgagcacggactccaggaaatttgttctgcgtaaccaacaccttgatattcgcgtgtggttgtttcg

SEQ ID NO: 443109 - DNA, 415 bp, Triticum aestivum
attcgccggtcgacgggggcagttactcagttgccccttagaggttagtgctaattgagttcatcattttacttcagttaatgccaccgctcatcaagaatactatttaacattggcagggatatgaagcttgtgcctttgttaactggctggatgaagaatggcatggcatggctcggagtgttatcaccaagctcacagaagataacgtaaagctaaagaagaaacctgctgatttgaaatgtacaatcagtacgatgaagcaagaaataatcaatcataggcaaccgatgaaagcagagataagaaggaactagcatgtgtagttgtggttgtcgcattagccatgttctatgcgctgtttgcaatgatgattaggggttttgtttgacagtattgctgaagcacatctaga

SEQ ID NO: 443110 - DNA, 374 bp, Triticum aestivum
gacggggggtgtcattgggtatggtatcctagataggtccatgaccctaccttaggtacataacctcatcattagcccccgaatggatcgaggttcgagtgaggaaggagttgttggttttctccgacctatttcccgtgctttgattatgtcgtatcctggatcagcgatttttctttttggcgttggcatcaacttttctttcagtcgccttgatccattcctttcttctgtcgagtgaacttttgaactttagtgaacttccgagtgacggatcgtaggaaagatatcgtctgacagattgatctgccgttagcggattttgtgggatccgaattttgggaagcgcatgaaacggggcggaccgcggtact

SEQ ID NO: 443111 - DNA, 228 bp, Triticum aestivum
attccgggtcgacaggacaaaatagacggtgcaagcatccgtactatgatgcgatgcacgcgatacgggttcactgtgtcggtggaaacatcaaacttagctgaatttcttttcaccttcgtcagttatatactcactagctgaactctgtcccacagcgcaactgttgtacgtgcatacataggatgtatggcttgtcataactaattatgacttcatatgttgcct

SEQ ID NO: 443112 - DNA, 340 bp, Triticum aestivum
  unsure (1)..(340): unsure at all n locations
gtgcgacgagaacgcgacgcgtacgagttgtaagtgtgccgccttttccttttgaacttgcaaagcgtaacattttcgtgcgatcgattgatagaaatccagaacaaaatgacgagggcggtgctttcccgcgggttaggcgggctagtttgagtgatatgacgtgctacagtgtcatccacttgctccatttttatgtaagcaagagtctacactcttacgtgggaggagtgcgaaacacggcggatctgattttgatcaagggataactgttccctgcgaaataatggagcactgttagcgattatagcatgatagttagggacaaannannaatnng

SEQ ID NO: 443113 - DNA, 269 bp, Triticum aestivum
acgggttgaaagagtcgccgagggtgatggacgagctgctcgccatctccctccggtgcattcgtcttgtaaatgagaggcctaacatgaagactgtctgcgacgatttgtgcgccagaagagcgtgagcttccccgcgttttttctttctttcatcagttcaccagtgtacatgtatccgatttctctcgtcgtcgtcgtcgtggtgcatcccaaatcttttttctgtgggttttccagagccttgtaggtagggtttgttcgactgg

SEQ ID NO: 443114 - DNA, 175 bp, Triticum aestivum
ataagaagtactatgattaaaccggtaaccatcgttgaaaagggttggattaaggttagcaccaataatccggggttggatgcaatggttctaaccaatgtgcagcggggccccttcaaagacataacgaccaacacacgagttacctcatgtgccaccggtttggaatgatggc

SEQ ID NO: 443115 - DNA, 381 bp, Triticum aestivum
aaagtgactctaattagaatcttgttatcgatgcacggagtcgagcttctgcgagcacatcaacgacaagatcagcggctactgtcacggtcactgcaagaatgacggcgagcacaatgagaagaatgccatggagacgctcagggacaactaatcatggctgatgggccatagtgacgacaatggatactgtatcatcagtagatttatcgactgctactgagccagttctggtcgcgttcacttcaggcgatatctgtacccttggtatatcgtgtcttgtgctaacatatttatgtaatgcttgcaatgtcgcatggatcatgtagtctttcagcaccctgccatgcatggtgcctgtgataccaacgttaaagaatt

SEQ ID NO: 443116 - DNA, 94 bp, Triticum aestivum
aacttcacaggagagaagcgacggagttagaagttgtaaatatgcattgttgtatcgcgacctgaatgaaataaacgaaataatgctcttgttc

SEQ ID NO: 443117 - DNA, 408 bp, Triticum aestivum
gcaccacacagcaatcatgtcatggaggaggtggtttggagcagtgagtgagtggggcaaggagtgaccagtaacagggcaggtatttttctgtgcaagggaccactgttggcatgatttatcaacagtctgcaatcaagcaaagcaaaacgtggttactgggtcaatctaaaccatgggagtgttccagaagaagcacaagacactgtgaataaatttattataataattgatcatgaccactaatgaccaaccttagcattctggaacaagaaaaggacataatacagcttacataaaacctacacccatgcgaccatccgatgaatgtaagcacagcatgtcagtttcactttcaacttatccgtgggacatagtatttccttggcagaaaatgggaaaaaagat

SEQ ID NO: 443118 - DNA, 420 bp, Triticum aestivum
attccaggtcgacgggacccggtcagcatctgaaacagctaggtccgcagatgatcatgctgatcaatatgctcatgtgcaatggctttggagttgagctttctagtttcaattgatcagatgcgacgatagatcacgcgtgttgacagtgtcctaggaagcgtttgtccgcagttgtcgatcgatctcacattcggaactcgaggctgaaactctttggcttcggtccggtccgaagatgcgctcgtgcctcaaattatgggcacactccatgttgcagttgcagctgttgctattgttgacaacatcaacactaacacgtacgtgtatacccttagagcatgttaaggaccgcacacaaggaaatgcctccttattacgcacaaaataatgattcctccaactgaaaatctgggaacc

SEQ ID NO: 443119 - DNA, 340 bp, Triticum aestivum
atgacgaaggtcatcccctacgcgtttgtcataggctctatacggtatgccatgccaactaccgcacctgatgtgtgccttgccacatgtctggcaagagggtacatgggtgatccaggagtgggtcaccagataccagtcaaaattgaccctggagtaataacgacatgtttctcgattatggaggtgataaaaagttcggcgtaaagggttacatcgatgcaagctttaacacctatccgactgactctaagtggcataccggatatgtataatggagcaactagttggaatagctccaagtggagcgtggaagcagcatttataatatgccaaagca

SEQ ID NO: 443120 - DNA, 281 bp, Triticum aestivum
tcgacgggggccactaggtctacaacgccatttgtcggctgtgtcctaaaattgtcaacgctcttataaaagtttacagagggagtgtcagacgtcttggcagttcacattgtactgccatgacctcaaatatttatgagcagactgagtattatttagctctaccttgggttgccgatcaggtccggaatttctactcacttgtttagacactatgttacagtaggttctactacaaggttctgcccatacatatctggttgcaaacagattggaaattt

SEQ ID NO: 443121 - DNA, 393 bp, Triticum aestivum
aattggtcggagcaacaagaccaaacaaaactccaaaacaaccaattaaaaaaccaacattttgaacaatacccaattaggttgaaaaaaacatgcaaaaagaccttgcaaagatggagcagatagggtgggaaagattgtatgtatgtggatgagagagtaagagacaaacctaacgagacagggggggggagatatagagagaggaagagagagtaagaagttaggtctgtgagaaagatggagacatgtaatatacttgagatgcgtgtgcatccagattttgtatacgtggaacgagaagagacaacatgtttgatgagagagctggaaaaacatggacgagacgggaaggatctcgcgggttgagggattgataattttgtgtggggg

SEQ ID NO: 443122 - DNA, 394 bp, Triticum aestivum
attcgaaatttcgggaagcgcgcgggacggagaggaccgcagtaaacggagcggattaggcaggggcgcctcgattcttgcgccacctttttcaccacgtaccgagcgcgcgactgttgcgggatttgacgggattgccttggcccacaagtcagtcactcggcgaataggcctatataaggcgtctgggccggtgttttttgcacagtgagtcccattttctttctcctcctctacttctccactgcatccgcctccactctcggcgccatcgcccagcctgagcgcaacccgctgcgatggcgaaggacaagacggcggctctggagcgtgcgaagaaggcgaccgcgaaggcgaagggcaagaaaacgagccggggagggtcgtcgtccag

SEQ ID NO: 443123 - DNA, 194 bp, Triticum aestivum
ccataagggtttcccttaaagtcggctatatcattctcacaaaaaattgtggaagggggcaccgcaaatggcgaaggacacattcacctggatcaccttgttgcatctttggtgcaatccctgcccaactatttatatgttgatccccggggtcgaaacttggtgcagaagcctcctcaaagtcggtttttccc

SEQ ID NO: 443124 - DNA, 174 bp, Triticum aestivum
tggggtcaaaccgtaacctggtgtcgaaggcctcctttgaagccaaaaggaataaagaccgggttgccactaacctttgggttaatggcaatgattttaaggacaaccatggcagttaacatgggcctggcggttaacggacaaaaaagccattgacgcacccattccattttg

SEQ ID NO: 443125 - DNA, 142 bp, Triticum aestivum
cataagatggatcaatgcgcggctgcaggtacactcggagacggatctgacacgccagtggcagacattctattgccgtagacaacggtctgtgacggatacttcataagctgtcatttcctatcaaccctctgaaccagta

SEQ ID NO: 443126 - DNA, 349 bp, Triticum aestivum
taaagacagagatggaggacggcgatacatggacaatacaacggctaaggtgatctgggagaggatatgagatgcagatggcacacaatgtactgcgggacatacaggtttgtgatgggtacttggtaagctgacatttgcgtatactccccggcaacagtgccagaaatccttcttgctacctcatgagcactgcattggttttcccttcaagatgaaacggtgatgcaccaaaatagcgtaagtatttccctcaatttttgagaaccaatgtatcaatccactaggaggccacgcacaagtccctcgcacctacacatacaaataaaatcctcgcaatcaatgcaat

SEQ ID NO: 443127 - DNA, 267 bp, Triticum aestivum
agacgggactacggtacctagggtttatggcgtctcgttgtttttgcaagctagcatgtgactccgagatgcctgttttaagattaggatttcgcttgtgttgagagatattattattcactgcttgtagcctacctgggataccatcatattttgctgattatggaacagcttttatcctgcttaagctctgtattttgcccgaaatgaatcatatttacatcctcgacatcgacgtcaccacaggcagtcacaaacacaacatag

SEQ ID NO: 443128 - DNA, 358 bp, Triticum aestivum
attcctagtcgacggggacttcaatgactttcagaggattggcctggggtctggaaacagcttcccactacctgagaattggaaggctgatgtcttacaggcacagcgacctggacataccccatcccatgaggttttacaggtttatttaacctcttggcttgctaatgtgaacatcaagacgagtagaattgacgagatatttgagcttgttgaggaagagatgcagatcaaattgcgttgaagatttcgattcatagaatttaagtgggaaccattcgggaatgttcaggggttctttttcattaacggaagtgatttacgcgaaaatcatccacttagactcaaaacaaaaaga

SEQ ID NO: 443129 - DNA, 75 bp, Triticum aestivum
caagcacctcaacaatttcaataagggcctcccctcccaagccccaaatagatggcgcgcaccgccattcgagat

SEQ ID NO: 443130 - DNA, 336 bp, Triticum aestivum
ttcgcgggcccacaaacatagccataggcccccggatcccgatgccccgtgaactgtggaaaaaaaaagggaaccagttaaattgaaggcaacaaccagagtggcaaacctgtgtaatgcccagagctcgtctctctcgggtcaaagatccacagttcgctcgcgacggcgagctagctcagctcagctcgcgctctagctccatgcatgcttggatcgatgcgctggtgtttactgcattttggttcgcatttcgcttatgtttgtactatgatgagatgatgttcgtgagattaaactctgtttggtgctcccgtcgtgagctgtatgatgatg

SEQ ID NO: 443131 - DNA, 121 bp, Triticum aestivum
gtctggtgacatcttctcactacctgacaattgctcagctgatgtcttacatgcacaacgacctggtgataccccatcccatgagcgttttacaagtttatttaacctcttggcttgctaa

SEQ ID NO: 443132 - DNA, 297 bp, Triticum aestivum
attccaggtcgacggggccgtagaaatagctgctagctaggtagcaccactagctagccgcgccgcaggctgatctatcggcccggccgccacctccacggccggatcgctcgtcgtcagccagccagccagtccgtccgtccgttcgtccgtccgtccgtggctcgtccgtcaccagtacatctctccctgtagtttcttgctctcctccgctccttgaacgttactttttgttctctgttgtccatttgttatgtcgttatttgatccgaattaaattagaaaacttgtcacgtc

SEQ ID NO: 443133 - DNA, 317 bp, Triticum aestivum
aaatgataatataaagtatgctgctgttgcatgagttaagtcctctcagcgtgatccaaacaaatccaaaaacaattaatttggaatggaggtaatacaaaccaaagtaatttgcccaacaatcaccaagccacatacatgcaacattgtaccgagtaggcaatcaaactttcttttgacattgattaggaaaaaaatggcatgacttcatgtgcgaccactaaaactgtgtgagatacccttttttgtaatagatgatgcgtcatcaacacatcctgatagtgagctgtgtttgaccctagggatattgcctctgt

SEQ ID NO: 443134 - DNA, 424 bp, Triticum aestivum
gccccgtaccctgggcgtccggattcatcgaagatttgtgtccgccagccggtagagctaacgtcgagctccccaacaaaccacccgtacttggaattgatgcagtcatgtcttatctctgttagaagctactaggtgccatggatctcaggctctcagctcaagctccgtgtcgggacgagctctggtgcccttgctcggcgagtactttcagatatgcacgtcgtcgatagtggtgaatccatgctgcaatgaacacaacaacattataggaccccgactgttagcttttttgacaaaggggatatactaatatcgtgaagatatcaattacacccagcctttgcatcaacacagacaataagcatgcacacaaccaaggagaagaaggatttttcgggacaaataaaaaaggggccgctct

SEQ ID NO: 443135 - DNA, 221 bp, Triticum aestivum
tcgtcgtcgcacacggggctgccgccgggctggatctagggcgattggatccagtcttcggtccgacaggaggatctggatgaactggaggagtccgggctgattgccaagggggcggcgaggctgccaaagggggagacggaaccttaacctcgaccggctgagtgtgttctgcttgccactcacgtcgaccggggtttctcgctccctccgcaccctgc

SEQ ID NO: 443136 - DNA, 394 bp, Triticum aestivum
ttccaggtcgacgggggcgcgtggggtttcaaggattttggtggcctcggtgtacgaatggggggtgacgaaggggaaggtagggggagccatggcttagggacgcgcttgtctgaaatgtagggtaagttaccagcgtacccccaccggttttgacaccgcgacgtcgagccggcatttctggctgaggggtcgaaggggaatttcgcgtgtctgggctgcgggaccaatttcggatgaggagggagttttcgtgcgcgtcgaaatttcggggtaacaaggcgcggcgcgggttgaagaggcgggagtttcaaagcagatgagacaaaagatactcgagcttgaaaattttgggataacaaggcgcggattccttgttcggcagaacaaactt

SEQ ID NO: 443137 - DNA, 305 bp, Triticum aestivum
acggggggccggagcgtttttttagcgcaatatagaggcccttctggtgggtcccagctgtcaaatggaggaatcattattttgcgcgtaaagtcaacggccgatggatgtcgttcgttggccacgttgacaaggccgcgccgatagcaccatggaggtggacgacggcgaggcctaagaatggaactacacggagccggggaagactcggcactggttgcccatgcggtggggagtacgaaggtttacaggtccagctgccgtcgcccgaaaataacatgaggtgtgggtgagtagatgaatgg

SEQ ID NO: 443138 - DNA, 133 bp, Triticum aestivum
gatgtggtccaaaaacacaatggtgggaaagggttcccctttggaaaccaattttgccaaattaacaacttccttaattttcaatccaaggaagttaagaaattccaaaccctccaaattccggcccaagctt

SEQ ID NO: 443139 - DNA, 337 bp, Triticum aestivum
ctccagcagcgctgcgccggatagcgtatgacggatagggccggaagaggccagcagcatgatcatgagcatggccgctggtacgttgcttggcgccatattttcttgttaagctgcacggtttgaatgctccaataccttcttgcttaattagaacaagaaggtcccctggtacttcattttcttggtatgaataatacattacgagcgatcaacctgtatgatggttatccttggatggacgcgtctcaatataatctctctctcagtgcacatttagacactctatcatggatagataacaatgtcctactcgtgtctctttttctttcccttt

SEQ ID NO: 443140 - DNA, 334 bp, Triticum aestivum
  unsure (1)..(334): unsure at all n locations
ccccttctcccctccggaaaaggccttccggcgtttcccctttaatttctccggaaccaacttgcccggcgggaatggtggtcccctcggccgccttctcaactccggtggggcgcataccagtgcatttggctgcaagccaaagaagttgatctcaaacagaaattacttgcagctagcagctccctcaaattcccaaaatgcagatctttatgggaagttgaccgtctgcagagcagaaagtgaagattctaaaggcgggggaggattcttgactggatttctcatanggggagcagtctttggaacgctgggttatgtctttgctcctcag

SEQ ID NO: 443141 - DNA, 148 bp, Triticum aestivum
ttgaatgtcatctcctacgtctgtcctagagtccaggaaacacactcgaagttgtcgcttggcaaacttgtcagtgttaaaaccatggacagtgcctgtttaaaccatgggcagtgtataaccgttcgacagctggcgtaatagagca

SEQ ID NO: 443142 - DNA, 58 bp, Triticum aestivum
  unsure (1)..(58): unsure at all n locations
gacaagggcgccatcaaggaggagtagacanccggaaaccgtctcgcccancagaatc

SEQ ID NO: 443143 - DNA, 398 bp, Triticum aestivum
ttccaggtcgacgggacagtcgcacttcgttaacgcgccgtgatgctcgtgtggatgtgcccgcttattatcaggccggcagctttgtgtgtcgcgggggcgccacctactgaaataaatggattgcgataaatgatgaaataaatttggttggataattttgcggagtgtcttatcatacctcgcgtgctctcgcctattatgctttggttaaattttttccttttcacgataatacgtttctcatttatatcataagcgtcgtagtacaagtcacgtatacatccacctaataaaactgaaaaaactgcagaacactagtttttaggtaaaggaagaccagccaattacaatcaagactgaaaaaaacatctaagcttgacaccaatgctggggcc

SEQ ID NO: 443144 - DNA, 259 bp, Triticum aestivum
gccgtagaaatagctgctagctaggtagcaccactagctagccgcgccgcaggctgatctatcggcccggccgccacctccacggccggatcgctcgtcgtcagccagccagccagtccgtccgtccgttcgtccgtccgtccgtggctcgtccgtcaccagtacatctctccctgtagtttcttgctctcctcctctccttgaacgttattttttgttctctgttgtccatttgttatgtcgttatttgatccgaatt

SEQ ID NO: 443145 - DNA, 108 bp, Triticum aestivum
atggattgaatggcaacctccacggccggccaagaacccaagaacccgaaactggaattggcccctgggaaaactggccggggttgaaacaagggaaattgcttgttg

SEQ ID NO: 443146 - DNA, 224 bp, Triticum aestivum
tccaagtccactccttacaggcgggtttgggtccaaaagatcggtaatagtcccaatcaacgtttacctcaggatatcaatgggattaactaggataagttttaggagcggccacctcatgaggtaaaccggcctttcaagtcaaacgattactttcttcagaacaaggaacttttttacaagacctcctttcggtgtgccattgaaaattattacccgtagga

SEQ ID NO: 443147 - DNA, 336 bp, Triticum aestivum
acccgtccctcaaccggcagatagcaacaattaagccgccaattaatccccttccggggtccattcacgaacggacttgaaggcattgggtgtgcccccctggccggacattggcaagaatcattccggctgcacttgcaacggaaggttcacaccagtttggggctccaggataggggacggttcaggaacaataggatgataaatcccacccctgaatgatacagttgccctgctgaatggccggtaaaactgcagtaatacttctgttacacatgtcattaacactgcttataattcctactacttgggatgtaacgataggacatcatgggg

SEQ ID NO: 443148 - DNA, 342 bp, Triticum aestivum
tctggacaggaaacaaaggcataatgggaattggcggaggcattgggatcctcatccactcctccaccgtcgagaggctctacgcctgggataagaagctgtttctcgaggtcaagaactacgacggacataagcaggagcatgacaggaacgtggggctgctgaggaagcaggaggtgaggggcgtggactacctcaagatggagaagaacaggatggagatggagagcctcgagtccaatatgctggtggccacccagtccatcgacaccaccacctccgagattatcacgctcagagaatccgagctgttccctcagctacttgagctggttgctggct

SEQ ID NO: 443149 - DNA, 406 bp, Triticum aestivum
  unsure (1)..(406): unsure at all n locations
cgcctgtggtacggctcgtagaattccaggtcgacttggtaccctgctcaacatgccaaagaggagcaaagatgggccgaaagcaagggcagacttgaaatcaatgggcattangcaggagcttcatgctaatgatgatgataatgatgatgatgatgatgatgaggcgaagcaggacacagaaactcctcgcaaaggcaaaaaggctaagaataccggaaatgactaccctcccgcgtccttcactctaagtcatgaggagatcgagcagtttttcacctgctatcggggaaaccgatccacgaacacctatgggaccagcggaccgagcccctttcggttcggcgggagcggagatcgcatgaagagcggatcgaggcgaagcacacgagcagtttacccagct

SEQ ID NO: 443150 - DNA, 446 bp, Triticum aestivum
aattccaggtcgacgggaaccacaaacaagcagagcgaagtaagctccgagattgtggaaatggaggacgatcaacctgaactgaaatctgaaaccaaggcactggaggacatacatgaagaagaagaagaaggtgcagagttattgaaatgataaagagtcttgtgttcttgggcaggtagatcttgtggttttactctctggtggattgagtttgtcaacatctggttgaaatgtattgcttgtagtgcctgaacttaactctgctggtgctgtgatatggccatgtgggtcattcatatctgtcctgccgtaggacaccaccaggattcactgctgtatggtcaaacagtgttgtatggaaatgactgcattagtgtgcactcgatgttaaaaaaaaaaaaaagaaggaagggagaggggagagaggaggggggggaggagag

SEQ ID NO: 443151 - DNA, 386 bp, Triticum aestivum
attccaggtcgacgggacattctgacaaaattgagaaaaatggctggttttttgcaagatgatgatgtcgaactttacgaggaaattaagttcgagccaaatgtgatgtgtgaatacattgataataggattatatttcgcacttgccagctggaagatggtgatatcgtttgttttcaaatatcgccaaagccagatactgctgaccactttagataccctgatgtcacatcgtttctggtgtatatacgtaacagacaggttgtcgacttccggtcgttggataatcccaaggaggatgatttttgcctatagatgtcaaagattttcacgtacgatgaagttgtacaaaaagtcgctcaacagcttggtgttgatgacccatc

SEQ ID NO: 443152 - DNA, 424 bp, Triticum aestivum
cgggctcaaattccatcgacacgaagcaaaagaacactaccggcggcgatgaggggcatcttgagggcggtcgatccccagcggcgacagcgacaaggtgcggctcttctcaacggatctgcagggatggtgcggcctagcggtgattgagggtgcaaaatgcctcgccgacgctattccaccggctgatttggccggaatcggtggcggaggacgggcggaacttgtggcgggcggcggcggaaggaggtgggcaaaggggcacgggctgaaatgtccctccagccaaatgcttcactgcgatatggggcaccgcagggacgaggcggaaacccgcgaacacgcgggttagggccgagtttttgtcgcgcccctcaaaaaatttttgcggggccaacggttgtttccggggtcggtttgggtg

SEQ ID NO: 443153 - DNA, 382 bp, Triticum aestivum
aggcatgcacaaggggaatcaggcgacttgccgtacgcggtaggttgccctgcgttcagtcgtgagctgcgcaagtctagtggcccagcacgaagaatttcaagcgagacgtaccagagatgtatgacggcaagtcgcatccgtcggagttcctgagcatctacaccatcgcggtgcaagctgccggggggcgggacgacaagatgctggccaacgacttcccgctggtgctcaagcccaatgtcagatgctggctcatgcacgtgccggacaactccatatcctcatgggtagacttatgcgatcagtttgtcagcgcctttacaagcggtcacaagcctcatggccaagagagcgaccttcatctgctcgcccagaagga

SEQ ID NO: 443154 - DNA, 432 bp, Triticum aestivum
acgcctccaactccagggcgtccatggcgcacctaaaggcagtctacttcctccgcccgtcctctgacaacgtccagaagcttcgctgccacctctctgcgccgcgattcgccgagtgccacctcttcttctcaaatatattgaagattccacagattcaggtgcttgccgattctgatgagcaggaggttgtgcagcaaattcaggagttctatgctgacttttgtgccattgatcctttccatttcactctgaatatacacaataaccacatctacatgcttccaacggtggttgatcctcctggtatgcaaagcttctgcgatcgagctgttgacggcatcgcttctgtcttcctggctctgaagcgtcgccctgttattagattacaaagggacatcaaaggtcgcaaaaaggattgcacaagaaact

SEQ ID NO: 443155 - DNA, 235 bp, Triticum aestivum
acgacgtagaagacgaagatgaagaagacgaagaagaaggagaagaagaagaagaagaagaagaagaagaagaagaagaagaagaagatgaagaagaagaagaagaagaagaagatgaagaagaagaagaagaagaagaagaagaagatgaagaatttgaagtagatgaagtagaagaagaagtagaagaatatgaagaataatcagtagtagaagaagatgaagttgattaatt

SEQ ID NO: 443156 - DNA, 261 bp, Triticum aestivum
gatattactacggcattgcaaccttatgatatgagaaagaagaacgcggtggaagtctctcatggtgaaggtttgctagtcaagggtgggcagtggcagaagggatatgaggcagggaagaacaagatcaagaaaaagaatatacagtgtcacaagtgtaagcagtggggacatatgagaaaggactgtccagaactcaatggtggggcaagtgctaataaggcaactcatggtgatgactcagatagcagtagtgatgtt

SEQ ID NO: 443157 - DNA, 91 bp, Triticum aestivum
  unsure (1)..(91): unsure at all n locations
tggntacctacacacacacaccttgcacattcagatggtcatgcagcatnatcaaatgccactttggttacgaacttnantgggggaacca

SEQ ID NO: 443158 - DNA, 386 bp, Triticum aestivum
gtcgacggggctcgtcaacggggtatactactacaccatgtgggcggtgggcagcaccgacgagctgcaggtcaccatcgacaagtttgaggacctgaagaagaaggaggaggccgcctccgcaagctcctccaccccaggatcatcataaacaagcacgcccttaactttgaaactagctactgcctgcctctcccaggaccatgggttcggtttgtatttgataataatgggtgctgttagttagatggagcattttcattcatggcatggatggagcttggagttgatgatgctttttgtttgtgtgaatcgtaactgcggtgtctggaaattatgatatgatattgcctccgcttcagaatataaggcgtactgtttttgcc

SEQ ID NO: 443159 - DNA, 85 bp, Triticum aestivum
taacctggctatattaaagcaaacgtgttttggctcaaatcaaaggcaatgtttaaagatgagggtattagtcaggagcttctta

SEQ ID NO: 443160 - DNA, 305 bp, Triticum aestivum
ctctggtattgtcgtctatgagtctaaaagtcattgtgtgggagattcataaaagatataacacagaaaaaaaaaaattaaagaaataaatagagctaaaaaaataataaatcaaacgatcattcagataacaagagattcaaagtgtataatagataatggaaccacgattgccagtaaaacaaaaatagattaacaaaagaattggtccacacgtaggttccctatcaactctatggttatatcctacttaaacgcctttcagtggtcataccatattctaatctggggtcaatttttttaaa

SEQ ID NO: 443161 - DNA, 185 bp, Triticum aestivum
aatggggaagtaatgggactagtaatagtgtatctagggtaatgcgtctgaaaggatcaggcaatgggtctttctgttattatccttcttctacctggaaactcctgcatctactgctgtggctccatctagtgattgtgatgggcaacagaccagaaaccctcttgaacattgtttacctctat

SEQ ID NO: 443162 - DNA, 397 bp, Triticum aestivum
ctggctatattaaagcaaacgtgtggtgtttcggccgtcaggactttcagagacttcagagagtttcgccggctgaagcaagctgcagctctgctcatctgctttcctttcttgctttgtactgctccttgctactccctccgtcccaaagtaaatgtctcgactttgtattagcattagtctaaaattgtactaagcttgagacacttattttgtgacggagggagtaattaacagctgttaacactgagagcaggaatgaatggatggtgcttgcattagttacctggcacatcaaggagggaagcttggaacttggcctggcactaacatgtatggtcatgccacactagacttgtcagttcttctcactggtttctctttccctccgctgttg

SEQ ID NO: 443163 - DNA, 138 bp, Triticum aestivum
taaagattaaggaaaatttccaacgttagaaatccacaaatggaaaaaaaaaagggcaaaaataaaaaaaaaaacgggcggcccaaaaggttcaaagctaacttaaccgtgaatgcaacttaatactcctccaaaagg

SEQ ID NO: 443164 - DNA, 379 bp, Triticum aestivum
gcctcttctcacagagtatcttggttcgccacagcggcacattgcagcttctgaaagtaattcagaagttaatggtacaggaaaaaaagaggatatagttggtggtgcagagaataatggtaaaagtacggagagcttaacagaaaaaaatgagagtggtgagataaatgaggacttggatgatggggttagcaaagagttggaaggtggacatgagcaatgcaatgaggttgttcgtaaccaaaatagcgaggaagcatcatcattggtcaatgaggagtctgttgatgtaaaagcagctgactgttcagagcacagcaaaacacgcgaggaaggttcttcgatttctaaaaatgatgtgcttgcagctactgcatgt

SEQ ID NO: 443165 - DNA, 312 bp, Triticum aestivum
  unsure (1)..(312): unsure at all n locations
gcatcgtcctgggcgacagcggggtccggaagacgtcgctgatgaaccaatatgttcacaacaagtttagtcagcagtacaaagctaccaatggcgccgatttcgtcaacaagggagtcctcaatggagacaaggttggcaaaatggagatttgggaaaaccgcgggcaaggagagatccaagagtcctgggtgtcgcattctacagaaggggcagattgttgtgtgcnttgttatgatgtcaatgttaacaggtcaattgatacgctcaacacatggcatgatgagttcctcaatcaggctagcccctcag

SEQ ID NO: 443166 - DNA, 257 bp, Triticum aestivum
acggaactcacgataatgagtcgcattatcatcgtgctgtgcgagacagtagtcgggaatacgtcgctgatgaacgtataagttcagatcaagtttaatcagcatgtacagttcgaccattgcatgcggagtttcgtcaccaacgaagtcctcattgaagagaggcttgtcacattgcaaatctgggacaccgccgggcatgagagattccagagtcttggtgtcgcattcaacagaatggcagattattgtgtgct

SEQ ID NO: 443167 - DNA, 330 bp, Triticum aestivum
  unsure (1)..(330): unsure at all n locations
tcccgggacgacggaggccatcacagcctatgagctgattatgaacgctatcacggtcctgaggcagaagctggacgccgttcgtctgcatcacgatcaaagggagcctggccagctcagcccacaccttaacggctgctaaccacttggctgggaaagaaatcgccaaccgtatctttgtttctccgtatctaggctctaactagcttgcctgtggcaagaggtagtggatgcttcctttgatatccagtaccaaaactctacggtaatcgcctttgtatccgtctgtttatgccctgacctctgccggaactctgtacgtacaanana

SEQ ID NO: 443168 - DNA, 429 bp, Triticum aestivum
ctcgaggagcttcagtcgtggtagaaaaagagcgtgcacgttattaagggggatggcagttcatgaaattggcgaggcgcagcgtgggcgcgaaggggagtgccgacgttggcagcgagcgcatatgtccatcattaaaacagagatcctcgagctgatcaagggcgggggatcggaaccactcctcaagcttggctcggtcattgccgttggaacagaacttgccgtgccaaggcctctgattgggccatggtgactgccgaggatctgggagaacgcatccaagcttttgcaatagccatggcagagctcgtgggtgtcaaggaggtcgagatgggtggggagccatcgggggcgccacgccgggaaaggacggttggtctcgccccaaaatttgattggaaggagatttatgatgactgtcaacat

SEQ ID NO: 443169 - DNA, 420 bp, Triticum aestivum
  unsure (1)..(420): unsure at all n locations
gaatggtcaaggtggatttatcacactcacgttttcttcangagtttggcaataaaaaattaggcgcaacccctagtatctgaactagtgtgctgtaaacacctgatggatacgaacctattcattgcataatgcggaaaaaatcgctaaagatttgaaacctccgaacagctgaccgattcacgccgcatcatgatagtcagttttcggctttctctactaaggtgctcatccggataaactaggtcacaatcgtagtagttctccctttactaccctagccgatattgcggaatgtatggtagtaagcacaggagccgggcaacccaactattgaccaaagacatgattcggagccaatgcatataatgccaaattcgtggtgggcaactatactgtaaaaagtgttcggactttttg

SEQ ID NO: 443170 - DNA, 262 bp, Triticum aestivum
tgaaatgcatttttgttaaagtctggcaccctgcacaacggacctgttcctttgagttttggttattatcttgctggagttatagattgtgttatcgggattatgtgccgtgctggcatttggatattgatcttaatccgttcgtctggcaaaaaaaaaaaaaaaaaaaaaaaaaaaaaaaaaacaaaacaaaaaaatattaaaaacaaatccggaaaaaggacaagctaatgagacaaaacaaggggccgaccaagaggat

SEQ ID NO: 443171 - DNA, 424 bp, Triticum aestivum
ctgctatcacaatggtgatgagcattgggaagatcccagtatcgttcagcctcttggatgtgagtggaagtatcagggcctgcaagaatgccgcgctggagtgcgaagaaccgaagtttgatcagtacaagctggcagctggtgatcgtatgacgcacgagatcatcgaatccgtgcagagttgcgttgccaaacttaaaggattacacagttagtaaattaagtttgttccatgccagcagtctcgaaaagaaccagtaatctacacaaactgcattgtcgttgcactgtccaatggcgccgcaagaatgcagcttccatgcccaaaacaggcccattctggaaggagcttatggaaaatgatgttcttgtggaagaaatgttgtgtaactaatcatgattaagccagcatctggtatggcac

SEQ ID NO: 443172 - DNA, 419 bp, Triticum aestivum
  unsure (1)..(419): unsure at all n locations
gggctacaatgcatttacatgaatcaaacaaatgattatgatcgtattaacatcaaagctcatttctcactcatacgtccgggcatgttcggacatcaaataggcgcccaacgggctcctcaaaattcaactggcaggacaatctgggctccccatattattgatagtaaatgggaaaatcccattcatttgtctgccaaattatcaaaatatgaagaatccatcgtgaccattttttcggaaggatgcaaccgtcattttctagtgtaacaagcagtcaaattatttgatggttaacaaatatttccgttttaagggaccgcaatgaacataactcatggcaaagttccttcatttcccaatattaaaacaaccccataggccagtgtgttaggcatcatctaataaaanaattaaat

SEQ ID NO: 443173 - DNA, 413 bp, Triticum aestivum
tgaagatacagaaaagagaagctacttctttttgtttgtttgtttgtttgttccgaaataagggggacagctgagttcatcctccattgtagttgtaggttaacaaacaggcagatttcatttgggaacatagatgaggggaaatcaatcaatcaagcaaagaaagaaagaaagaaacagatatcatcacgcacctaatcaatcaatcaatcgatggatcaatcaaagaaattaagcacgatgagacagatggagagagggacgacgggagagagacgaactgtctttgggcccgtggaagtggacgaagaactcgtgcatcgcgtcgttgatcatgtccaccttgtaatcgctcatcatcctgaccaatcaatagaagcaagctagctattaaacatgaatcaacaatcctc

SEQ ID NO: 443174 - DNA, 318 bp, Triticum aestivum
agggggcaagagcgccgtgcagaagggttccaagggcccaaggattggcggcggcggcgggaagcgttgaaagtgcgttgatagtcgattacgccagtagacagagagttgtgctgcctagccttgtttcgaaccctgctatcgggaacctttgccatgttattacgccggcctcttgaatttgcaccctacctgcgcggctgcatgctgtcaatgttttggtatgtctcgatcatgattcttgatgacaaatgtggattgaggtacgtcgtgacacagaccagctgtctttgggcccgtggaagtggctgacgatct

SEQ ID NO: 443175 - DNA, 431 bp, Triticum aestivum
  unsure (1)..(431): unsure at all n locations
gattcccaaggcaccccaagtaaatatgcaaggagactcaagcgtctaagcttggggatgccccagaaggcatcccatatttcttcctcgacaattatcggtatgtctcggtttttgctttcttcacatgacatgcgtaaattcctggagtgtcgtgtgctttttatttttatttttagtaatgcactgttctggcatgagatagtccttggtttatttatagaattctctttgcacttcacttatatcttttgagtgtggctttatagaatgcttcgtgtgcttcacttatatattttgaagtttggatgctcgtttctctacattggagcaccattatttgtagaatgctcttttgctttagttatatttgttagagcgtagaagagtcttttgtagaagaattaaacttgcatgcttcaattanatat

SEQ ID NO: 443176 - DNA, 406 bp, Triticum aestivum
  unsure (1)..(406): unsure at all n locations
acatagttcaattgcaggtacgtaatcgagcttgcgtgtttcctgatatggagacaaaggagatgcatangcagaagtgtggctcttgctccccattgtttgagatcgacctgccatctcacctacaagccatgaaagttttctcgtagctagcaagccagccaagtaggtanggtatgttacaaatgtatttaccacgaccttgatcgagtggtgcttgattagtccatactagattttattttatcatatcatgcaagcacatgaatacatggtccactgagtaatataaagtcaacgcgacatcgcataaattccatatatacattatagaacaaggatggatattttatatctatacaagtgtatgcatgtcccatgcaatcaagaaagttcgatcataccg

SEQ ID NO: 443177 - DNA, 415 bp, Triticum aestivum
acgaagcaaatgcggcgtgtgcatagtcattgccgaaaaagaacacaatgacggggaacaccacgtacctaattttgggagcttctgttccgtgccttaaccgcccgaacatttccctcgcgctcacacatccacactggtgggccggcacaagaagaaggcgagcggcttgatcgtctgttcacgagaaaatgtgagcaccattttttaactgtaatttctcttttggagttagagcatctaatatggatgctgataggttagccaagtttgcacattctcttgatcaggggctgacatgtctggctagaacaaacccatgttccgaattgtaatccacatcatgtggactttgagtcataaagcttggtttaacacttacaaaatgagacaatgtgaacggcctcgttcgttc

SEQ ID NO: 443178 - DNA, 410 bp, Triticum aestivum
tcgacgggtgctgcacacttgttacaccaaggtgtctccctcggcgcccgtggagaaccctaagctcgtggcgtggtccgaatccgtggctgacctcctcgatctggatcacaaagagtttgaaaggcctgattttcctcggttcttctcaggagaaactccgttggtgggaagtgtgccttatgcccagtgttacggtggacaccagtttggttcatgggctggtcagttgggggatggacgagcaataactctcggagaggttctcaattctcgaagtgagaagtgggagttgcagctcaagggtgctggaaagactccttacagccgatttgcagatggcctcgctgtcctgcgcagcagcatccgtgaattcttatgcagtgaagctatgcatggtctaggcattc

SEQ ID NO: 443179 - DNA, 427 bp, Triticum aestivum
  unsure (1)..(427): unsure at all n locations
gggtcgacggggaatttgactctggcagagaggccggaatgccagaaggcgatgaggctcattctgagcctgtgcttgcctgagggatttgataccttcccgacattgctatgtgctgatggttgctgcatgatagatcgtaggatgggtgtgtatggctaccccattgaaattcaatcccttttcttcatggcactaaggtgtgctcttctaatgcttaaacatgacgctgaagggaaagattttgtggagcggattgcaactcgtcttcatgctttaagttatcacatgcggagttatttttggctagatttccagcagctaaatgatatttatcgttacaagacggaagaatattctcatacagctgtcaacanatttaatgttattccagattctattccggactggctatttgatttcatgc

SEQ ID NO: 443180 - DNA, 414 bp, Triticum aestivum
tggaaggccgccaaggtgctcgtccgcaggggcgccaactggaagatcagcgacaggaagcactccgagatctcagaaactgaggatctcagcaagggcaagaggagggccggccttgttgccaaggtactgagagataaaaagaaggggaaaggcgctgccttgccgggaaacattcatcctagtagtggaattctgattaaggtaccggatgatgctgccattgaagcaccaaaaagaccaagaagctgcgaaccagtaccaatagcccaaagtgcacctattcttcagttaccaagttcaagtacctgtagccagccttgaaggtggctttaaaacagaaatgaaggcatgaagccaggaatcgcatagcaacatattttcattactttgggattaacaaatttaacaaac

SEQ ID NO: 443181 - DNA, 434 bp, Triticum aestivum
aagaataatcatgaagaaacaaatcatataaccgaggaagagcgcaagagagatcatagaaatgctcttaggagagcatcttatcggaggaaaaaggataagataaaagcagatgaaaatgtacggccacgacctaagacaggtacgtaccagcatttttagatatgcacggtgcataccttatcataccaacagtttctttatgttcacgttgactgacaaatcatttgctcacaaagcctaccgtcatatgcttgatcttactaaaggaatgttcttcttttcattagtcactaaaatagactttttctaatgatcatttcacatctactttcataaaggcacctctgatagcgctaactatccagacttgttgcatgatgatgcaacattaccaaactcatcattagacgcctccggtgttacccttaatt

SEQ ID NO: 443182 - DNA, 253 bp, Triticum aestivum
ctgcaggacacgcaagatcacctccctctgggcgcaacctgaaatctcacccacatcatctctcctaatatttgacaaagtcatgatgcagttccggctccatcgacgaccagcattccttcctacgtatgctgaaaggagtcatcgcaaaatcgccttctctgccttgcatggattcatgcaaatgatacatctccgggcaatgtatgtgttgaacccgcaagtgacgtacgttcggcactaagatcctccg

SEQ ID NO: 443183 - DNA, 413 bp, Triticum aestivum
ggaggctattacttggcatgtccgcacactttttaagctgaaaactatgattactcctgtttataatctgtcagtaacgagttctacttgtgtttttatttgatgttatgtgtgattatgatttcatatttaagctttccttgtatgtactttttctgttctaaatactttactcaggataacaatactcctgcctactatatatttggtgctatctctgatcactacattctacttttgaatctttgtagacaccgtgtggccacaacttctgtttgaaatgccttgagaagtgggttaatagtggaaaaaggacctgtggaaaatgtcggggaccaatcacatccaaaatggcttcgcagccaatgattaaagcagcgttggttgcggatatccgtatggctaggactgca

SEQ ID NO: 443184 - DNA, 136 bp, Triticum aestivum
gggtcgacggggtacgctataacaagtcatatcatcatattttcgtatcagcaagtcgtcgagacacggattaacaacctgtcaatgaccacttccatgcacgtaggaaatcgcccttaagtgtgaatgagaattt

SEQ ID NO: 443185 - DNA, 387 bp, Triticum aestivum
cgtgcaccacattaccaattcttccaagccagcagacctgcggtcaatcttttgctggtgctgttgctgttgttgcatgttctgtggtaataatgttgaatgaaacagtaactaaagcgttcttttagtaaagagaaaaaaaggtaaagagactataaagatatagtatatttgacttaactgaaaacttaagaaggatataaacaaataagctggtattgcactaacatcgttagatgaaacaaacattttccataaattccaaatggttccatccgtgaaggacggaattatagagcaccatagtttagtgtactttaaaatacaagtggtttctcatgctatgcttataatcaacctagaaagctgaatatgctacaacacaaa

SEQ ID NO: 443186 - DNA, 277 bp, Triticum aestivum
cgggtcgacaaggttagaaatagtaaatatgcatagttgtatcgcgacctgaatgaatgaaataaacgaaataacgctcatgttcaaaaaaaaaagaggaaaacaaaaaaacagaaaatcaaaaaagacaaaaaagacaaaaaaagaaaaaaaaaaaacaaagataaaaaaaaaaaggggcggcccaaaaggatcaaacctaagtaacccgtgaagggaatgtcaaaccccctccaaaagggccaccaaaatcaattcaacggccggccgtttaaaa

SEQ ID NO: 443187 - DNA, 445 bp, Triticum aestivum
  unsure (1)..(445): unsure at all n locations
cgggtcgacagggctaacaaaaaactgctctaaaagtcttgttgcccccgttcgatgtgactccttcgatcttgatgatatactcagctccttccccgccaaccgcacctccttcccaatgaaatatcttgggctgccgttgtcaaccaagaggctcaaaacaatccattttcagcctctcgaagataagattgctgctcaacttaccccttggatgggcaagcatgttgcgcagccgggacgggctgtgttggtcaagtcggtcatcacggcaattgccatttactacttgacggcgctagacctacggctcaggttatgaagaagatcgactcccttaggcgtgcctatctttgggcaagttgtgacaaggtcacangtgtcaaatgcaagatcaattgggaccaggtgtgcaaatcaaaagtgcatggtgggttgggcattc

SEQ ID NO: 443188 - DNA, 172 bp, Triticum aestivum
gatcgaggtgcactacctaggagtacgtggtgcagctggacgagacgacgctgaccgagcagtaccccagcgacaacttggtgctcaaggacccaatggcaatcaacaagcaggggtggaacccgctcaaaacaacttacttcaacaaccaaaacgtccggccgaacctcgg

SEQ ID NO: 443189 - DNA, 367 bp, Triticum aestivum
  unsure (1)..(367): unsure at all n locations
cgggaacctcaacaagctcatctggatcagtgggatcagaagcgtgccccgtacggttcgcgtgatgattgcccgcaggaggaacgatcaagaggaccccaaggaggagctctactcacttgtcaccgttgccgaagtgcctgctgacggtttgaacgtgctgggaaccaacgtcgtcgatgacactgagtacactcatttctttatctacatcgttagaatgagctgttatttggaattgcaccagcatgcattttgtatcccgcagacattttagagtatggaatatccggagctatctattttccttcanaaataatgtacaaaattgatgcagaggacaagtgtctataacctttactcgatt

SEQ ID NO: 443190 - DNA, 287 bp, Triticum aestivum
cagctcaaagcgtaggcgtcaactgttatgtactcaacatgttacccacccattggctggcgttgtcacggattgttgcagtagcatttgtagggttccatgcggcgctctgacccggagctaaagttccaccataggaagtttgaccaatttgaactttaacagtatgctaattgcctgccctcaaatttgggagcctatggttcaaccgccggtacctctaagtggacaatcgtgttgcgtgtttgtaatcaccatctggtaccaatcccattcacgatcacggt

SEQ ID NO: 443191 - DNA, 129 bp, Triticum aestivum
  unsure (1)..(129): unsure at all n locations
ggggnnnttngcaagcnctacccggnccganaccggtcannanttcccgggtcgacgggttgtaatnaatagaagtgtgatgatcatcatttttagagcattgcccaaagaaaaaaaagaagaaaggcc

SEQ ID NO: 443192 - DNA, 432 bp, Triticum aestivum
ataaagaacttcaagcacatccggatgagctaattgaaagtttctccgtgatgtgggaaaccatgctccagtgccgtcggcgccaacacgcgatcatcaagtcactatcagcggctgcaaactagaaacaccattcgactccgagcctcgacgccaagccgccctctttctgtcgatcgagctcggcaaactatgctcaaacctccgaaactggatcgcatcccgcagggcctacctgggcagcctcaacctgggccttttcggaaatttcagtgcagaaataccttgatctgcagaaaggcgtctgtgcggctaaatacaggcttctgagataagcttgaggtagtgattactgcagcctgcgggtgtactgtactgtatatcggctgggtgaaacactgcgacttcatccttgtcaattttccaagtaca

SEQ ID NO: 443193 - DNA, 430 bp, Triticum aestivum
  unsure (1)..(430): unsure at all n locations
gcgcaggaagtggcacgtacaaccaccatggagtcatcttgaaggtgtaactggagtctgatggacgacttcagtctgtgctgttggagggggtacggagagtcgaagcttatttcagcgggatagcgagaaacacacagatcggactagggcccaatggtctgatggaggcgtgatactcggcatcggtcggtgatgttcggtggttctctgcagtaggggtttgagtggtgtggttcgcgatccaggagactcgaccgggacagcagaggctcgacgcggctatagcggcgaggcgtgcggtaagcacaggacacagcgacaggccaggacactggtggtcagacatgtggtcggacaaattgtgcanggggtgctgaagcagtgttgacgagtaacggattcaagttggtgaacgggtccaaccggt

SEQ ID NO: 443194 - DNA, 383 bp, Triticum aestivum
acggggacgaggaggccgaggacgagctaggagctgaatatctagtgcagccgcgtggtcgtgctgaagatgaacagcattccagtgactttgatccggaacattctggtgatggtgctgaggatgaggatattgatgatgatgatgctgaggatagtgaggattctgtcaatccggattcctcagctactatgaagacgtctgctgcagaggataagaataattctgacggtgatgatgatggtgatgatgatgataatcctccatcagatcgatagtcaatttgttcatgctgatctggtaccatttctgcttgcgcctagaatgacaatactcctctgggagaggattgttggtaaatgctgtaacattaggacatctgt

SEQ ID NO: 443195 - DNA, 391 bp, Triticum aestivum
acagtgttctgagaccttcacatcaaacaatgcaaggaaacgaacgctccgcaaccttgccgaagtctaccaagtagcaacaataaacccatggagtgacacggctataacctttaatgccagtgacgaacctaaattccggacagcccgagcaccagccgcattggtcctcagtccgatagtggacggcttccgacttacaaaggtactcatggatggcggcagcggactcaacctcatctacgaggaaaccctgcgaaaaatggaaattgactggagccgcattgagtgaagcaacacaacctttaggggaataatcccaagccgggaagcgtggtgttcaggaaaaatcacactagatgtggtgttcggcacgccggataattacaga

SEQ ID NO: 443196 - DNA, 392 bp, Triticum aestivum
gcagcagactcagcttcgcattggaggcctgcctccatggatgcttagccacctcaacgcttgaggaaggaagaggtttaatttccaaagcagctgaaacagcattaatcggcacactagcaattaagctgctatggttatgtttgcttgcccctacccttatatatatgatttgcaaggtaaaaaaatgagcagagagatcaggaatgctggttcactgtataattttgttgcatgttcagcaacacgtaccagttgatgcaaaaaaaaaaaaaaaaaaaaaaaaaaaaaaaaaaaaaacaaaaaaaaaaaaaaaaaaaaaaaaaaaaaaaaaaaaaaaaaaaacccaaaaaaaaaaaaaaaaaaaaaaaaaaaaaacgggccccccaaaa

SEQ ID NO: 443197 - DNA, 223 bp, Triticum aestivum
gagggggaagctgcatttggttgaatttttggtcaaagttagtaatggcgcaccgtgagtgtggtgtgccattactagtacgacaccgacgatgcgccattactaactttggaaaaaaatttaaaaaaattgttagtagtggcgcaccgagggtgtggtgcgccattagtagttaaaactagtaatggcgcaccaggggatagtgcgccattactagttttgg

SEQ ID NO: 443198 - DNA, 261 bp, Triticum aestivum
  unsure (1)..(261): unsure at all n locations
acggggacgaagaaataggttgaatgcgcgaacaaaaagctgcagtcgcatcctcagctagatcagtcacctcctgttgtgtaactcaaatctttgttcggtgctctctagtcgtctcatgttcgaagattaggtaaattagcgacttgagaagggaaaaaacggaactctgtctcatgtttgttcatctgctgatagttgtanggtcgtactttcctgtgatggagaattcagcaattttagggttggtttgctttggtc

SEQ ID NO: 443199 - DNA, 388 bp, Triticum aestivum
  unsure (1)..(388): unsure at all n locations
tgcgatcataccagcactaaagcaccggatcccatcagaactccgaagttaagcgtgcttgggcgagagtagcactaggatgggtgacctcctgngaagtcctcgtgttgcattccttttataattattttttgcgccttgtgagaaacatgtcgcacgtgcgcgatatatatcaatcccgttatattatgtttgacgtttgcgatatgtttaagctcgatgctcattgctcgcgcgtcttggggcggctttgtggcgcgaagagcgcgttctgaaaggggtggaaaaaactcgtgttgttgcggtatggagggaggggtggaaaccgtggaaaactcgtctccgtgattgagcgggagagtaagtagtataggacattatccattgt

SEQ ID NO: 443200 - DNA, 417 bp, Triticum aestivum
atcattgatgcttcttcagtcaagaaaataaaagtgaatgtcgtcgtaaaaaaaaaaaaaaaaaaaaaaaaaaaaaaaaaaaaaaaaaaaaaaaaaaaaaaaaaaaaaaaaaaaaaaaaaaaaaaaaaaaaaaaaaaatttaaaaaaaaaaaaaaaaaaaaaaaaaaaagggggccccccaaagggttcaagcctaatttacccttgaaggcaagttaaaacccctccaaaggggcccccaaattccattccaggggccttcttttaaaaacttctgacggggaaaaccccggggtttcccaatttaaacccctttgaaaaaaacccccttttcccaagtggggttaataccaaaagggcccgcccgattgccctttccaaaaatttgcccaccctaaatggcaaaggggaaccccc

SEQ ID NO: 443201 - DNA, 416 bp, Triticum aestivum
  unsure (1)..(416): unsure at all n locations
tggagaagaccgggagaangtgtccacggagtggaccgcgggccgcggcactacgacccgaaggagcgactgttggggaacgtagcatgcaattttaaaaaaattcctatgctcgcgcaagatttatctaggagatgcatatcaactataggaggagagtgtgtctacgtaccctcgtagaccgaaagcggaagcgtttgacaatgcgtttgacttagtcgaacttcttctcgttccgaccgatcaagcaccgaacgtacgactccttcgagttctgcacatgttcagctcgatgacgtccctcaaactcttgatccagcagagtgtcgaggaagtagatgagtttcgtcagcacgacggcgtggcgacggtgatggtgcaatgatccccgcaaggcttcgcctaagcactacgag

SEQ ID NO: 443202 - DNA, 357 bp, Triticum aestivum
ctctaaactgagtcgtatgaaatttcatttgagattatcatacatgtctattactattccgctcgggcacatctcatgagggtgttccttactctcatgctgtgtcttgtacacttttgctattctggtgcagaggtcgtgatatttgattgtttactgaagatgttttctgcgtggacatcgcgagtgaatatgtctctacggttacgtctttaggtcattagttaagccggtgttttgttgcatgtcttggttttactgatcctagctcgtctgtagactagttaagttcagtcttctgagtttcggtattagacgtgtgtctatcaaattcttttaatctgccatcaccttttt

SEQ ID NO: 443203 - DNA, 419 bp, Triticum aestivum
  unsure (1)..(419): unsure at all n locations
tcgcgggtcgacacaatgcacaagacattatctcactacaggatggtactaactattataccttgcatttttaattcctttgccccatttccaatatagggaagatatttatgcacatccttattttcaggcctttccaaaccagttcactgacgattacctctcaaaccacctgtatggtcaggaggcgaggaaggtattcatacaacacccatggttcaatattgaagtgttcctaaagaggacgaaggatggacggtcaatcatccacatgttgtcagcgtcctgngaacgggggtcnccagacttgcctgcctgtggcccacaacgtggattctccagcggccctgtacgaaccatcttcnacagcaaacactcaagaacctcgcgaagggccaagcctcgcgaggcggacgacg

SEQ ID NO: 443204 - DNA, 404 bp, Triticum aestivum
gaatgccaagaccggtgatacagtgtcctccgacgccaacttgggttcctccccgaagcaagaactggaccaaaccaagcaaaaactgcaaacgctgaaagatcctcaaaaaaagggccaagattcctcaaacaacctcctccaaattaagaagatgacttccgaaataaaacaactcaaggatgctgcaaatgcctccaaatccgaaaccaagaagttaaccggccaaaattaacaaaacaaaggcaacatccggaactggctaaatgagatgtcttggcagcaaagaggatggaagaagctgcaagagcagctgaagctcttgcactagctgagatcaaggccctgctctgcagtgaagcctcagctcaagatctccaggacacagatggagtgagcctttc

SEQ ID NO: 443205 - DNA, 392 bp, Triticum aestivum
aatgccaggacgggtggtacctacagtggaaccttgccagatggatgcaaattagcaattaagagattgaagagatccagcctacagaggaaaaaggatttcgactctgagatcagtagagttgcaaagctctatcatcctaatttagtggctgtcaaaggatgttgttatgatcatggcgaccgctttattgtctacgagtttgttgccaatgggccgttagatgtgtggctgcatcagattcccagaggagggcggagccttgagtgggcaacgagaatgagagttgccacaactcttgcacaggggattgcatttctgcatgacaaggtgaagccccaggtactccaccgtgatatccgtgcgagcaacgtccttctcgacgaggaatt

SEQ ID NO: 443206 - DNA, 337 bp, Triticum aestivum
gggcaagagcgccgtgcagaagggttccaagggcccaaagattggcggtggcggcgggaagcgttgaaagtcgattacgccatagacatagaattgtgctgcctagccttgtttcctatcctactatcatagacctttgtcaagttattaccccgccatcttgaatttgcaccttatctgtgaggctgaatggtgttaacgttttggattgtctcgatgagtttatttataatgaatggtacttatgttggttctaaaaaaaatataatgggaaaacaaaaaaaaaagaggccaaaagtcttggagaaaggaggtggatctagaggatataaggtta

SEQ ID NO: 443207 - DNA, 399 bp, Triticum aestivum
gatctaagcaccctaaaagtctttgacaactaaactgctggctatatgatgttggccatatatattgtacgtatataatgtgaagaaacgagtggtagtactataccaactaaaagatgaaatgtaagaaatactagtatgtacgtactgaagagttaaagtaacgagaagaaacataacatagttctgctgggggctcagcacaacacacccctcaaattaaattaagcacacctgaaattaaactttgcaactattccggtagacactgcattagaaccaccatgagcaacgacactgccaccttactcagagtcctcgtccacgtcctcgacttcgtccttgtccctcttcctctaggccgatacttctttgcttgaaccgcacacttggctgttg

SEQ ID NO: 443208 - DNA, 126 bp, Triticum aestivum
  unsure (1)..(126): unsure at all n locations
taccggtcaaancattcgcgggtcgacagggaanggttattcttattcctactgataattatcttttcgagattatcctactcggaagttacatattcccgtctgtcacatagatatagaacgtgt

SEQ ID NO: 443209 - DNA, 395 bp, Triticum aestivum
ttactgaaaagactatccaaggacattcaagccttaatatactggtgacttaaagtcaaaagccagggcgggttatcaaacctcgcatatttatataaacaggaaaacatacctgtagaattgacttatactgctggcttacatcaccacaggcagtgaaggtaacaatccaatgatttataagcgcatgatttcaatggcgcaatccaaaatataatggcgacttaacgtccaaagccagggcggtttttcaaacctcgcatattcatccaataatataaaaagggccaattctagttctgcccctaactcgaacccaccactcagttttgcccctaattttcaggtatgctcagttttgcacctccgccgttagtgtcacttatagaaatgcc

SEQ ID NO: 443210 - DNA, 73 bp, Triticum aestivum
ggtcgagaatagcgggtcgacgggcatcgctaaaacgagtccacggaggcggaacgaagcacggcctcgcaaa

SEQ ID NO: 443211 - DNA, 410 bp, Triticum aestivum
gaatctcatgagcttgctgtacaacagagcgctcatcagtcatcttgtagtcatagaattgctccatgacgtacaactcgctgccggcgtccgagtcaccaaacttggcctcgagcgcaacccacatgtccttgccgttgtcaaacgacatatacgaatccacaatggagtcatcaaaaacacttagaagagcacctttaaagagagtatcgatcttctcgaaagcttccagctgtgctgcattaagatcgccctcagtcttgcccttagtggcgtcatagcagcacatggtctgaaaccagtaaactgccctcgtgcgccacctcttatattggacccccttaaaggcggatggcttcaaatgcgcagcgaaaccactcggagtaaattgcctataatcaggtttttgg

SEQ ID NO: 443212 - DNA, 324 bp, Triticum aestivum
atggtcatttactaccgactacaatgcattagcggtcagcgaacttgtcttgctagctcactttgatcattgttcacgagatatggtgattatagggtcactatctcagcgtagatctccgtagttgtatggttgaccagtcagacattccgcatgtgcctcattagctcgtgttctttatcaatctaagggctcacctgtcaatggacattgactgtataaaaatttatgcatacgtggggaatcatgccacagactcatcgctgcatcgcaccctcatcagccacactcagtgtgaaataccttgcgtcagaccctcatgct

SEQ ID NO: 443213 - DNA, 141 bp, Triticum aestivum
tccctccaaatccccaacgaagaataactccggaacggcaaaaattgccggattcttgaaaacaaacgcctggaaaccagtttaaaaggcaagccttcaatcctccgttccaaaggatcgtccatggccggtcccaaggat

SEQ ID NO: 443214 - DNA, 343 bp, Triticum aestivum
ataacgatgtgtgggtcaatgaaccaacacatggaggtccctaatccggaatccctaaacctcaatccggcaggtataaaaccggccacaacattatattaaggacatatatatattgcatgcaatatgaacaaaatggggtaaaaataaatcacttacagaacgtaccaactgatgatagatttgtcgagctcgcgcagattgaaaagctggaacaattcactcagatgaatttgcacatagtaatgtttgaagtgatgctcatatttaacttccgcataaatatattctttggcgtttttattttttatgtaacccttgtaccatttcagcagacctttca

SEQ ID NO: 443215 - DNA, 401 bp, Triticum aestivum
cgggacacttcattccgatccattctatatatacaactcactagtactattgaaaaaaaaaaaaaaaaaaaaaaaaaaaaaaaaaaaaaaaaaaaaaaaaaaaaaaaaagaaacactaaaagaataaaacaataaaataaacatacataaaaaatcaaaaaaacttaaaaaatatcaacaaaaaacggggccccccaaaggggtttaaccttatcttgcctgggaaggaattttaaatccccttcaataggccccctaaattacatcccccggccgccattttaaatatttttgacggggaaaaccccggttttccccaccttaactcccttgacataaaatcccctttgccaagtgggtgttaatgccaaaaggcccccaccgtttttccttgccaaaat

SEQ ID NO: 443216 - DNA, 414 bp, Triticum aestivum
ggtcgacggcgcactataaacatatactcaaaacatgttcaatgtgtcttcgacaaatgttcaacttgtatttcagaaaaatgttcaaggtgtatatgaaaaatgttcaacctgtatgcgaaaatatggtccacatgtattgaaaaataaaaaaaaagggggaaatgtattagataaaataaaaagataaaccaatacataacacgtgaaaaagaagaaaaaaaccacatgaaagattctagaaccagttcatacaactttccccaatccgttcctagaagcgaaacgaacgcatttatgggtcaaccattaatgggagcgccggaggcaagacaagcttatgtctcgtgatcataaccgagctttcttccctatagacaggtctactcaatcagccccataccaatgttcgta

SEQ ID NO: 443217 - DNA, 161 bp, Triticum aestivum
agcagacgagatacgctacagggagggagggaaagatgcgacgcgggactcgccgaccgtgagggtttttatagcaggctggtaagcagtgggatggggggggatgatacgtccactttgcggcatgcgtctagagcgacatgtagtgcattatgggctgt

SEQ ID NO: 443218 - DNA, 251 bp, Triticum aestivum
acaggcgctccggattgggacttggttctcctccacgcgggggcggtttacccttacgacgccgaccattaccctgcgcattggtattagccacagaatctgaactgttatccgccttacggcttaccgttgtttccatgacccgccgggttatgctgctgccctttggtgctgccgcccttctttccctttcctgtcttctcatcatcatactcagggtccttggtactatcggagtcggcatacttcac

SEQ ID NO: 443219 - DNA, 281 bp, Triticum aestivum
  unsure (1)..(281): unsure at all n locations
tatcgctacgataagtcgacagctaggaatagccatctcaatttgtgctgttgtactaaaactgagctgtgtacatttgaatgcgcacaatgaaattatatggagatagacatccctgtttgcgcaaatatgacatacgggtatctaaatagtgacagatatttgtaatggcatatgantaacatcaacatccaatgtgttaaatttgcaacaaaatgacagtatgaaagtgcccttaagtaagtagcatcacatcacatcaacactgccactagattaag

SEQ ID NO: 443220 - DNA, 402 bp, Triticum aestivum
  unsure (1)..(402): unsure at all n locations
aattcgtactacattgagctagaggagatggtgcaggtggcgctgctgtgcacccagtatctccccggtcacaggccaaagatgtcggaggtggtcaggatgctcgaaggtgacgggctcgcagagcggtgggaggcgtcgcagcgtactgactcgcacaagttcaaggtgcctgacttcaccttcgggcgttgctactccgacctgacagacgactcgtcgttgctggtgcaagcagttgagctctctggaccgagatgataacacgacagagagttgaagaaggaaacgtcatcagttgtttccagcaggacctgtacagcaaaacctgcttaaaatggcanacaacataatgtagccaacatctaatgatgcattctgtcacgaagtgtagcacatctc

SEQ ID NO: 443221 - DNA, 215 bp, Triticum aestivum
agaggaacacggtagcggctcccgagacattgaacgatcagtgatacgaccttaattactatgatagggaattatttgcgattccattacagatccagcctcatgtgatcacaacaaagttctggatccgcagatcacaaatgccccccaacactccaatccaatccatctcacgtctctgctccacattgcgcattcttatcgaagtcccgctg

SEQ ID NO: 443222 - DNA, 225 bp, Triticum aestivum
acagtatcaccacttttccatggatggttggagcgctgcgccactagatgctcgactcgtgaaggtgttaggcgatgttcgtcccattgggaatgttgcccgtgggtcgtctcgaggcatgcgtgagggatctcagcaggatcctcaggtgcccagaggggtctaagctcgcattaggactcgggcatgccgtctcgtgtcggttctattcgatggcggacgcgg

SEQ ID NO: 443223 - DNA, 344 bp, Triticum aestivum
gtcgataggacacactagagtgagtcgaattatattctttggctcaccttgtgtaaaatcaataaatttacgtgaaatactacgctcgaagactgatgcggtccctatatttgtgtgtcatccggcaacaagaggttgaagaaaactgatggctcaagcctcccatcaatccactggattagatgacaaagaggaataaattgttgtggagaatggacgagccaccatggcactgaataactgggcaatgatctgaaacaagtgggagaaggggagcaccgcccgtgacgtcacggcaagtacaatgtccatcacatggactagaatttttcacgagggtggat

SEQ ID NO: 443224 - DNA, 159 bp, Triticum aestivum
atccctatactaagtcgtattatgtcggcaattttcagttttatggtaagcatcagtgctagtctgagatactccttgggttacttatatgaatgctctatgcacctcagttacatcgggtgtgtttgggtttatataaagcatcatgtgtttcactta

SEQ ID NO: 443225 - DNA, 430 bp, Triticum aestivum
cgggtcgaccggcatccctcaaatacggttccatgccctgtagtgggtttttgcttttttgtaattgagtcgggtgactaatgagagtgcacccttttagttcagactggggattttgtcagagccagattgtcccaaaattgtgtttgggtttttcaggcgctttccatcgcacagtatttccatactatggctgccaagtcagcgaagtgtgctatgtcacggcgacttatggctttagggattcccttatccattccattgttgcaaaagaacgaaattgcgtcttcctcgcgacaatccttgaccttgttcattacaaggaggaatctgaccccgtcttcctcgcgaaattctgtttttcgtgtgttgtttgcttattttgatgaatctatggccagtaatagagtttatgaaccatagaaaagtt

SEQ ID NO: 443226 - DNA, 366 bp, Triticum aestivum
atagggatgccaaacgtgaggtaggccccggagccgaacgtgattccaaaggccaaccgaacccggtccttcaagggcgtttcttagagccctggagcatttcggctccaacagggcgacctctctggccaatgaggtccggaagctttgccggggtgccatgaccaatgtcctcaccaaggtggcgtactggaaccccaacctcgacttcgatgccgcgctggagagcttgccggaggatgcggaccttgcgacgctcgaggagcgtatcaagcccatcatcagccgcggcgacggagttcggagggtatagggccagcgctgagattatgcaccccatttctcatcgccgctgcaagttcttga

SEQ ID NO: 443227 - DNA, 301 bp, Triticum aestivum
ggacactatagacagtcgttttagaccactgctcccctcgagaataatcctggaatggagatgaatggatgacgatatctgtatatactgtgatggatcacgtcattgttggtaactagtccacggtaatatagcgttataatcctggttgcgaattaaataagttgtactccacactagttgattgctagcagtctaccttagttgatgatgcactgccttcgtcgatcaatatatattggcaagtgtatagattttgactgtaactattgttgatttctttgccacacaattgtttgcc

SEQ ID NO: 443228 - DNA, 324 bp, Triticum aestivum
aacccgtggttaaggtaccactaagaagtccgtgcacgatgaaatctgccgtgactaatctatgacacttggatctcatcgtggagctaactcacgatggggtcacgatcgtggtcggcaagttcaccggaggcaaatgagatgtcgtgcggcgcatgaccaataatcttgcgcgaacgatggacaccaatcacgtatgatagagtcccgaggactattcgatctaatatgggtatcgggtccccgttgatggcatagacgtttccattgccaatacagcacagccttctgccaagccggacactcggacagacttcatccaca

SEQ ID NO: 443229 - DNA, 400 bp, Triticum aestivum
ccggggtccctaaaatgagtcatagtagctcgggtgaagttggatctcgtccaggagggctgtggaggtcaaattgaagcctgggttagatcactgggtgctctgggagactactgacaaggtttgggtggcggggatggcctcaccggagtggatcgagctggtggctgaggcggatcggggcggccggagttgggggaggagacctcctcggggtcctcctggtggcttggcagggttctggtgaggagtagaggtggtgcgtgcttgagaacaagctcgggacccctttttagaggtgatccgaagcggtggccgtgaacggggatctccggcgatggttacggcggtgcagtgcttggtcaggagattatgggacatccgagaatttcgatcgctt

SEQ ID NO: 443230 - DNA, 449 bp, Triticum aestivum
ggtcctagaatagcgggtcgacggcaagtctcaacatgcttagacagcggattacattgagcgaagactaatgatcaacatttaacttagtaatgcagatgtccaggtgaacctccttgaagtccccatgcacattgttgggggtcaaataataccatgcgtcttccatttccacatcggcgggaaggtcccagctcggcagagtccaagtcagcttgacgtagccagtgtcgccgcccacgtacctccgaggggtagtaacagtgagcacgcacccgtacatcggcctcgtgtcagtgtcagcgtcagcggcgtcgcccctgacgcacactacatagatgacgcagtggcctgcacgggcctcgccggtgggcacgatcaagacgaagacgctgccgtcctcctccgagactagcatggggcgctaatcctccagtgactccgggacg

SEQ ID NO: 443231 - DNA, 66 bp, Triticum aestivum
  unsure (1)..(66): unsure at all n locations
ggnnnnngnaactgttacgtntccngggccggtccaaaatacacgggtcgacggggtacttgattg

SEQ ID NO: 443232 - DNA, 134 bp, Triticum aestivum
tctcaaaagcaaatctctgttctacaagaccgattgcatcagccagtactattgcacccccttcatcacatcgtccatcgctctcacgcagcactataggagctggtatctgcgtgggcggggtggtggtctcc

SEQ ID NO: 443233 - DNA, 254 bp, Triticum aestivum
attgccatgtcttcaggattcagtagctgttgtcgggtatcctcttggtggagatactatatctgtgacaaaaggcgttgtgtcacgcagtgaggtcagaccagatgcgcatggaagatcagatcgtcgtggggttcacattgatgcagtagtgaaggcaggaaacagtcgtggatcggcttttaatgagcagggcgaatgcgttggagtaccatttgacgtgttcaggtgagatgaagctgaaagtattggat

SEQ ID NO: 443234 - DNA, 388 bp, Triticum aestivum
gatctgtatcataagtcgtctgatgcatctgctgttaagcatatggctctgggagttgctggcttgggttgtgaggatgctcttgtccatttgcttaactatatctggcccaacatattcgagacatctccccatgttataaatgccgtcatggaggctattgaggggatgtgagttgctctaggtgcagctgtggttctgaattattgcctccaaggccttttccatccagcaaggaaagtacgtgaagtatattggaagatctataactcgctgtatattggtgcacaagatgcacttgttgcttcttatcccgcactaagcgatgatggagacaatatcttcagccgtccagagctagccatgtttgtgtgatcaatatttacat

SEQ ID NO: 443235 - DNA, 375 bp, Triticum aestivum
acggtaaattgtgtgtaatgtctggattttgtgtggaggctatatatacccctccaccccttctccatttgagagagagccatcagaacgtgcctacacttccattactcattttctgagattgaaccacctacgcatgtgttgagaccaatatattccaatagtaccacaggattcctaatctctatccttccccgagttgatttccactcaaagaatctttccaccatatccagatctctgagagagagttgagtgttggggagactatcatttgaagcacaagagcaaggagttcatcaacaacacagcatcgattaccttttggagaatggtgtctcctagattgggtaggtgtcactttgggagctccgt

SEQ ID NO: 443236 - DNA, 327 bp, Triticum aestivum
gaccggcatggctaaacagtcttggacaaactgacttgatcatgggtcaataactgattgccacatgttcaaattattcgtgaagtcatcgctgaaccacaatcggtagtccagcagtgtccttatcatgcatcgctcgaccgtacacgaaggggtcgtgacacatgttatagcatcttcacgtccctgaatatctacagatagcaccagcttacgatagactactgtccctgacctcaggactgtctcggacccgtgtagaagcaatataggcggatggaccagcatacttacagcagatcacacaatcattcgtacatcatgaga

SEQ ID NO: 443237 - DNA, 406 bp, Triticum aestivum
ccggaatcccaaaagtgagtcatagtaggtgttggcaagggcttgtatccccaataacccctccggaaattaagcaacaacaatcaaatgaaatcattctcggcctttcaatcatatctacagctattctggcctttttggaattcttgcaacaaccagcccagattttgcctcgaatgctgtggatttggcagctggggaacttcttgaatttgccactcctggaaatgttacacaaggacagcttgattaagctaaacatgcagcaaagtgtaaagttttgatggacttggaatcaagagctgttgcatgtgaagacattgggaggcaggttatgacttatagtgaaaggaaacccatcgagaaattcttgaacgatgtcgaagcaattaccctgaatgacatt

SEQ ID NO: 443238 - DNA, 414 bp, Triticum aestivum
  unsure (1)..(414): unsure at all n locations
gaacttcacgcattaactatgaagaaaggagttagcttggtacttcatggagcatctggcctccctcatgaacttgtaaaggagtgcatagatttgggggtgaggaaattcaacgtgaacacggaggtccgcaacagctacctgcagtcactcaagaagccagaaaaggacctggttcaggtcatggagtctgccaaggaagcaatgaaagttgttgtagcagagaagatgcgcctcttcggatccgcaggcaaagcctgaatatagcgatacaatgaaaactggagccagcaacactccatcattaagtgttgcatgcccattttagcgatcctgctangcttgtgacagcgaattgccggaaccagtttcttaataaagcactgatacagttgcctgaagaaattaagttgc

SEQ ID NO: 443239 - DNA, 162 bp, Triticum aestivum
gggtcgacgacaaccccgaacactaatgaggttcctacgagtacgtgtcgaccgctgcccattaccgggagtggtctaagacgatcccactcatgagggacggtcaccattcgctcaggaccccatgttgtacccaccttctggacgtcacatctgacgtca

SEQ ID NO: 443240 - DNA, 286 bp, Triticum aestivum
aatacgcctgcgtctaacgaggtgaacacaacggggaatactacaggccgatacaaggcaagatggccagtcatgatgtgatcaggtacacaatttacatcagcaatgtgctcgacccagtgcacgcggacatctgcatctcctccaatgccacgtccagcaacaagtccatcatcaagcacatcatcgacaaactcacaggggactccgccaatctcgcccgctacaacaaaaatcccatcatcacatagctgtacatccagacctccgtcgtcctcgtcctccc

SEQ ID NO: 443241 - DNA, 280 bp, Triticum aestivum
atctcccgcacatggagatcacgtcaaacatccggaagcctgagatggtcatgtgagcccagagcacagatatgcatttaggaaggatgttgtgtggcgtcattgttcgagtggacactgtggacatcttaatctatgtggaacttgcgggacttgttggtctgatgataatgtatgtgcattagtcactaccactgttggttcccattgagatccacgtccagcgttattacatcgttgtggggatatctgcctgttgacttcattttctcggttcgca

SEQ ID NO: 443242 - DNA, 356 bp, Triticum aestivum
aggcttggtaagtaactatctcatctgaagggtgtagcagatggacggtcttagtggtgcaaacgattgaagcagtatgcgcttttaaccaattcattcccagaatgagatcaatgctacaggacttcagtacgataggagagacaagaaattccagcccttcaatttcaacagtaacatcgtgactaaccatagaggtttgacattggcccgcaggggtgtgtaccactagcggagtgtttatctcttcgtaatggatgccatgcaggaatgcaaattctgctgatatgaatgaatgggatgctcctgtatcagataaaacggatgcgggtactgaatttacgaagagtgtaccc

SEQ ID NO: 443243 - DNA, 377 bp, Triticum aestivum
attggctcaagtttcttcaaaatttattactaaattaatataacgttgagtgacttgttttgaaatgaagggattagatgaacaatgtaaaatttaaaataaacacattgtattagtattgtttggcccctgttatcaaacaaaattaagtcatttggccccccttgatctttaattcctggtaccaccacaggtcccggtatacgatgccccgagggaccgagccaaggcgatgcatctacataggggacctcctatacggcgatgtgtgcgttgggaaagagagaagcgtgttgcgcctcgctcgccacacatgaccttgggccggcgcaggtgcgggggctcccctgttttaatcatcattactttttagtttt

SEQ ID NO: 443244 - DNA, 271 bp, Triticum aestivum
cggtcgacggcggtcacacagccaatctacacgggtgcggactagcacatgaatgggggggaaagagacaaacacagtgcacgcgcactgtgccgttggccggaccgtgctcatgctcgctgcggcgagctccggcatcggcgagccgcagggtggagttattgacgtggagacgaggattgttgcgaggggtgactgccgctggccgtccgtgcagcgagcagaggctcaacagatgtgctggggagcgtcgcagatcatacggttcggc

SEQ ID NO: 443245 - DNA, 418 bp, Triticum aestivum
  unsure (1)..(418): unsure at all n locations
cgggtcgagcccatgatttaagtcaatagggctcttcttgacctgnggcgccttgctttccgtagcgcttttgggctggcagaatctgctgcctggcgtgagttgcttgattgtgtcgcgttgcacgagccattggtggatggcaggtcggaccgtgtccagtggcggctggagccgtcgggcctgttctccaccaagtcgctttactcggccattgccccttcctccgcccccctccccttatcgatggtttggtccgtccgcgtaccattgaagattcgcatcttcatgtggcagtggattcacggtcgggtcncgtctggagtggaggtctgcaagcgcaatggcccgggcaccggtatctgcccgctctgtggagtccctgaggactcgaaccacatcttgttctcctgcgttt

SEQ ID NO: 443246 - DNA, 385 bp, Triticum aestivum
ctccctcacgtgagtcgtactagcggcgcacggtgctgcagatgctgggagaccgcgggtactcggtgaaggacgaggaaatcaagctgtccctgcacgagttcgtcgagcgctacggagaccccgtccgccgggacgagatcgtcatccattgcgagaagcacggcgaccccaacgacaaggtcaacgtcttcttcctcgacgagtccaataccggcctggccgtggtcaggagctgcgtcgagaagatgaagctggggaacgccaccaatggcatcttcgtcctgcagaaggcgctgaccggcccggccaggaccgaggtcgcacagagcaagaagtaccacctcgaggttttccaggtcgcactcctccgcacccctgtctg

SEQ ID NO: 443247 - DNA, 150 bp, Triticum aestivum
caacaccctaaattgagtcatatgacagatgttgagtgtcttgaaaactttctgataattgtgggatttgctttgtaatggtaatcttgaaattggtgtaaaaaaaagaacaaaacgaacaccaataaagttaaacaaaaattaaccatc

SEQ ID NO: 443248 - DNA, 289 bp, Triticum aestivum
acgacccctactacaccggaggtgcctactactacgtgcagcccgctgacgacgaccgggagtagtttaggaggatcccaggcaggaggcctgcgcctctttcgatctgtatcccattttgtgctagccttcttaaggcaacttgtttaacttaggtcggtacccaaatattgttccttcggctaaccctccaataattaaccacttgtatccaaccctccaaggccccggccttgaataagaatccttgaagaactaatttaattggtaaatttgtgttgtaaaacct

SEQ ID NO: 443249 - DNA, 383 bp, Triticum aestivum
aatgtggaatgggtgcagcgcaaagttatccagcacaagacgatgctccgcactcgtggcctctcgacaccacctgaggtcgttggcttcgcggacggccacggactcgttttcattaggacaggcaacacggtgttctccatggatctcaagtcaggccatgtccgtaaggtatacacctgcaggtcaagaaactacgacgtcaccgttgttccctacatgagcttctgcactccagatcgtgctatgggcagactgccatcgccatgaggacccactgtcatcctgtaacaaggacctgctgctcttggcttgttgcatagatgacgctccaagtgttttgcttccaagctggactgtctaagtagttaccatggtcaatg

SEQ ID NO: 443250 - DNA, 321 bp, Triticum aestivum
actcttgtagcatacaagtcggcccaggacatcgcgcttgctgacttgcctaccacccacccgataaggcttggacttgcactcaacttctcagtgttctactatgagatcctgaactctccagaccgtgcttgcaaccttgccaatcaggcatttgatgaagccattgctgagctggactccctcggctaggaatcctacacggacagcaccttgatcatgcaacttcttcgtgacaacttgactctctggacctccgataactcagaggagggtgggtgatgggatcaaggaagccgcttcaaattcttgagggagagg

SEQ ID NO: 443251 - DNA, 266 bp, Triticum aestivum
ggtcgacgggcgaaccaactgttcatcgccacatttttgcttgtttctaagaatagcaggtgacagacaggggtgttgctgaatttcctttctgaatctcgtgtgcaaattttgctagtataacaaatctgcagccctgttttggtttgggtttaaaaaaaaaaaaaaaaaaaaaaaaaaaaaaaaaaaaaaaaaaaaaaaaaaaaaaaaaaaaaaaaaaaggaagcacaaaaagataaaagactaaaataagcatacatgaaaca

SEQ ID NO: 443252 - DNA, 142 bp, Triticum aestivum
tatgttctcgcctctttttgcttgtttctcgagtcgccggtgattggcttgggtgttgctgcttttcgtttctgtctctcgtgtgtatgttttgcttgttttgcgggtctgctgtcttgttttggtttgggtttgtggtctg

SEQ ID NO: 443253 - DNA, 409 bp, Triticum aestivum
ccgggtcgaccgggctcgtgaaagagtgtcgtatcacgaaacagacaacgggaaaaaggaccggatgcaatttttgaaaacatgatgatgcacagcatatgatgacatggaaaaatgcaacacacaagcacatgacatggcaatgactacgaataaacggaaggcacctcgcgcatcggatccggggcgttgcaatttttctgagttgcagaagtttgtgttagatccaaattactacagactgttctgtttttgacagattctgttttcgtgtgttgtttgcttattttgatgaatctatggctagtatcggaggttatgaaccatatagaagctggaatacactaggtttaacaccaatataaataaagaatgagttcattacagtacctttaactggtggtttgtt

SEQ ID NO: 443254 - DNA, 407 bp, Triticum aestivum
actccttagactgagtcgtactcagaactactagtactactacttctcacatgctggccagacgccgtcgttctccttccccgctttgtcggcgacctctccgcagcagcgcgtacttggatctccaccgacctctccgtagcagcgcgtgcgtccttttctttcttgcggcggcgggcctctcttttcttgagtgctttctaacttttcctctccctctgtgcggctttggccgcctcttgctctaccgcccattcggccttggcatcttcaaattcctcccacatagttgtgaggtcgcgagcggcgatgaactcggcacatcaggatgccattgcttccctaccattttgtgtgcagtcgtgggcagcgaggaactcggcgcggcgggatgccatcgctgcctt

SEQ ID NO: 443255 - DNA, 433 bp, Triticum aestivum
gggtcgacggcacgtacgatcatggtctcagctgggtgtcctacctttgatgggacggactacccctactggaaaaacaagatgcgaatgcatctcgaggcaattgacaacgatctctggtatgttgtggaaaatggtgttccctctgtctcaccttcactgaacgctaccgatgtgaagagattcaagcaactcgattctcaagcgaagaatatcatatgtggccatctgagtaaaggacagtatggaagagtgagtgctttggaaactactaagcttatctgggataggctgtccaaagtgaatgaacgagtctcaattcagcgtgactctcgagttgatgttcttcggaatctcttcaaccacttcataagactcgacaatgaaaatgtccaacaaacctttgatcgcctcactgacatctcaaatgagc

SEQ ID NO: 443256 - DNA, 465 bp, Triticum aestivum
ggtcgacgacacagcggagctctaaatgaaagcatcaatgtcggtgtcaaaaccggcagatctcgggtaggggccctaagctatatgtctgaggaccgaaggtaactatgaacaaaggacaccgtgttttacccaggtttgggccttcttaatggaggtaagaccctactcctgcttgattatattcaagggtataggggttacaagagttgatctacctcgagatcgattcggctaaccctagatcagctagcctagcaatgttgtgatcctgcctccgatataccctccggtttatatagacaccagaggggcttaaggttgtaacaaagacggttttaccaaaaggaataacatatccgaacacctatacttgccatccacgcatacaggagtccttccagacatgagaagtgatctactatcttgtatcccgaatggccatcaaatctggcccgcatccaa

SEQ ID NO: 443257 - DNA, 385 bp, Triticum aestivum
agaacaaaaacatcaatccttgtctgaggcagacttttcaagattagctgctatagtgaaagtattgagaaatacatcattttatcacacaagcaagcttgcagatgctgacatcgtgttgttactaaaaatattgaagtcttggccttcacagatgatgtttccagttgttgattttctgatggtgtttgtgttgcatcctgacggggctactttacgtcttaagaccatcgaaagtggaaacgatgtagccatggaaaccttccgtaaggctgtagcaatacctgtgcactcaccgaatgtgcttacaatcctcaaagcagttactaacttatttgacaactcatgcttacaccaatggttgaaaacccattgtgctgagatt

SEQ ID NO: 443258 - DNA, 76 bp, Triticum aestivum
  unsure (1)..(76): unsure at all n locations
tctctcgggacggcacgtaccganaccngcattcgcgnggcnccgggaataaaaggaccagttcttccttgatttc

SEQ ID NO: 443259 - DNA, 420 bp, Triticum aestivum
gggtccttcttcattctttctcttcttcttcttctttcctttcttcttcttcttctttcatcttttttctacttcttttacttcttttcgtttcttcttttcttcttcttctacttcttttcttcttcttctacttcttttcttctttttttacttcttttcttttcttcctttcttcttcttctacttcttttcttcttcttcttttttcattttttttctacttcttttcttttcttcttttcttcttcttctacttcttctacttcttttcttcttcttcttcttttcttctacatattctttttttcttctacttcttttcttcttttcttctaacactaacactatataacacatatctagcactaaatctatcactaacaattaaacagtagaaagtagcaataggagtgtgat

SEQ ID NO: 443260 - DNA, 446 bp, Triticum aestivum
cgggtttccaaatattctatcataaaatgttgtttttgatgtaaattattttgcagtcttgcatggtgcatggattgaatcaataatcagtcgtagtttggttacttacatatgaaagttcactatgcgtatgaacaagataaaaaccctaaatttattagcatcagttgaaaattcactatgctcaagactcctattttatgtctccaactattcatttcaaaattcttatttccgatgtatattttgcagtcttgcatggtgcatgtatcgaatcaataatcggttgtagcttggttgcatatatgcaattatgcccgtgaagtagatacaaattctaaatatctcagcattagttgacaatttaacatgcttaagaatcctttattagaaattggtgtttccaatgtatattttcgaggctttctatgcatgttggttactta

SEQ ID NO: 443261 - DNA, 333 bp, Triticum aestivum
gccacgggtacggatgcaagacgggacttcaacgacgttttgaacgtcatggagcatatgagatgttccaggagttgaagttaatatttcaagcaaatgcccggattgagagatatgaagtctccaataagttctacagctgcaagatggaggagaatagttctgtcagtgagcatatactcaaaatgtctgggtataacaatcacttgattcaactgggagttaatcttcctgatgatagtgtcattgacagaattcttcaatcactgccaccaagctacaagagcttcgtgatgaactataacatgcaaaggaatggatagacattcccga

SEQ ID NO: 443262 - DNA, 465 bp, Triticum aestivum
gaataagtgaacgttcccaaaagagcaaaggttttgcgcgaagagatgcgatgagatgggacgcccaaaaatgaaaagacagcggcccaattccagagctattggcaggcaccgactgtactagctcgattttgtttgttcaaaacaagtatttgattaaaaacattaatcaaaaaaaaaaaaaaaataaaaaaaaacataaaaaaaaaaaaaacaaaaaaaaaaaaaaaacaaaaaaagaaaacaaatagaaaaaaaagataaaaaaatttaaagcaaataccaaaaaaaaaaaaaaaaaagggggccccccaaaatgttaaaccattttaccccggtaagagcatttaaaacccctcaaaagggtcccccaaatttaaatacaggggccgcttttttaaaaattcttgtggggaaaaacccggggtttccaaaattaaccccccttgaaaaaaaacccctctt

SEQ ID NO: 443263 - DNA, 405 bp, Triticum aestivum
  unsure (1)..(405): unsure at all n locations
cgggggacaggaagatatcggaggcagctgccccaaccctaggctctcacagtaaaagtgtaccaaatggaccatgggagttccccaacgaagatatgtaagtctgttgtggatgaagatatcatcagcaatctacccgaagctctcagagacaaaatcctttgttgtctgccaataaaagaagctgttggaacatgcctcttgtcaaggacttggaggtacacatgggcttcaatgaccgaactgatgttcaggacagctgatttcgcttcaggaaatgatagtgcagacgatgaccgcagacttcttaagttcactgatatgtttctcttcctccacaacggcccaattctgaagttttgcctgaataccgtancgaatgaaatggtatccactggaggacac

SEQ ID NO: 443264 - DNA, 438 bp, Triticum aestivum
  unsure (1)..(438): unsure at all n locations
agctcgacatggacatggacctcgacatcggcgacgacttcctggagatgcccggctgcgacttcggccgaggcatggatgatttcctgcnatacgtcgatttctgcgtgtgaatcaagagaggtttaaggtttatctttaagtagtaaaatgctggtgtgatgggcctcctgtgagtgtaatcaatccgtgtgcgttgggagggaggagatcatcttgggtttttccccgggcagctcaaccagctcgtgcccaaggtggtgtccgttttccctagtctcccgagcacattancgttatggtggtgagagtgagtgagtgagagtatttttgatagcaggttacatttgtgataagttatagtagctgctggttatgttatgttcctccttccatgttatctgtcaatgttggtccagacattgtagctagctcaag

SEQ ID NO: 443265 - DNA, 448 bp, Triticum aestivum
acgggccacaaaggacagaagttaacacttcggctgcctgaagtttggactattcggctcccaaggagaacgatataaagagtctggggatgtccggcatagacccggacacactgatgggtctgctagggcgagcggctatctcaatgacacattgtaatttaatgggtacggtaattgataggatttcatccgccataagtggattgactgaagcctttacaagtctgcatgagcggctttgaggtacccaacataatatatgtatttctgactgtaccgcacatgctacgtgtgctctgtatatatactagcccctgagactctggttgccactcggaagtggcaaacagaggatcgtaatcccaggtcataatcgtgctgctacgtatgtgcatgcggttgattgtccagccgctgaccagactgctgattttgccgaactgaa

SEQ ID NO: 443266 - DNA, 472 bp, Triticum aestivum
  unsure (1)..(472): unsure at all n locations
ttccgggtccacgggcgctctgcaaaacttagtagaaaggccacacacacaccacacggactttcttcagatgacaagcgcgcgcagaacccacctagaaagagacgatggaatttacaatgggatggggctagctagattattcaggcgattcggaaaaattattaagtcgtgcaatgtactagtactagtacactaagcagtctagcactatgtaagctgctctctgatgtgagaaaaataagagtgtgtaagcgatcccgcgtgagctcttaaatttcctcgagagaacgttgtcgcagcagactagcagaggagtcccgcgtaatcgattgtcagttaaagaagtaactggacagagttcgcggcggggtacttacatgcggcgtatccagccaggcattccgtcgagcaggtantgagccgagtcctgcacaaggagttgggcatggtctgacgagagtatacccga

SEQ ID NO: 443267 - DNA, 201 bp, Triticum aestivum
atggagttaaccactttgctccatcgtgtgtgtccgcgcaagaaattgacctgccccatggcctaacaagtgaccttcatccctgttagcttcttctaagttgctcctgcaaccgtgcagcgctcctagtgcccagcaccggcatagaaatgtgaattcattcagtctatataaaggaccaaataaattatgtgttgtcat

SEQ ID NO: 443268 - DNA, 349 bp, Triticum aestivum
  unsure (1)..(349): unsure at all n locations
ggagcggcactgctgatgctggttcttgtttcgctgacgctgggcccggcgtttgcctgagcaaccttangatggagggtggggtcacttgtcangctgtccaccgtccgctgttactaccgctgccactgttattaccactgttaccgtcggcgccactgttccaactactaggctactccactaatttttgcttggaccctgtgaactgcatctgatccgctgcacaccgttgctacttccttcccacgattattattatcttgtcaccatgctctctaaatcgtcactangttgatactgttgctttgcaatggatacttttgatgtgtgttatatagttgtgcgc

SEQ ID NO: 443269 - DNA, 406 bp, Triticum aestivum
gaaaggatacggccgcggcagcgcggcctaccgcgagaaatgcggccccggccgggccgtggacgtgggatatggaggatgagaaagacgatcccttcgccgcggctgtgcttgatgtgggggtcgaggggatcgcggatgagggtgcccagatcgaggagctcgttgatgggaaagaagaagaagatgcggagcgtcagcggcaggaggacaaggcgagggagcagcatctgatggagactctcaaaggtcctgatcgtgcatttggggatctcatttctgcctctgggattacggaggagatgattgacagtttgatcctcttgaaggatgccaggggaataccaggattgcctcctctaagtgaaatacaagatagagctatccagataatgaatgcaacatc

SEQ ID NO: 443270 - DNA, 254 bp, Triticum aestivum
cgagagtcaaccaatgctgtcctgattgttcccctctgcgacatatgagtgtttccatactcagcagaggaagcttgcgcttcagaagcttccgttcagtaatgtcattggttagatgtaagtaatgtgtacaggtttctttctcggcactgaatcatcatgaacctgtgtgattagtgtagatctgcactgattgtactcctcaagtgacgatgtgtttctgaaaagaacaagaaaaagacatggtcagataa

SEQ ID NO: 443271 - DNA, 165 bp, Triticum aestivum
gtccacggggatgtaagcatcgtctcgttagcatgtgtctgatcttgcatcgtggtagggagatccctcgttcgtgccagtatggctgtgttatgttctagtgtgtactgtctgatgttaccctcttgttgccatcagcaatgtgaaagttggctcgcagatcat

SEQ ID NO: 443272 - DNA, 357 bp, Triticum aestivum
cgggcatcaacgaagtgcctgtctgcaattatagtagctcgtcctctaatgttgtctaagatgtatcacgaggcttgtccaaagttaattgacggctttatggaaagagaggacattgtaaagatggtcatcttcaacacatttattgagttgttacactaaactggcactatgacaaatcgacagggcgacattgatgagtccagccctacatggttgctgaatcacgaagtacaccacgttgtcaactcgatcaataggcacttgcctgaacaatcaatcaagactaaagttgaagcattcccagtatggacggaacttgtttttgtcttactagattgacttgctgatcatttt

SEQ ID NO: 443273 - DNA, 368 bp, Triticum aestivum
ggggccagtcaatcgcgctaaccagaccgtttatttgtacgggatccaacgcctggcagcggaccggccgaaacttcggccggtgcgccggcgcctagcagcatgcatacatcgtattcgactaaagaggcggcgtggtgcattataccgttcgcgagctgatcctagcaaatgaggtgatcgagtgtgttgcagtttgtcaactaaaaaaaaaaaaaaaaaaaaaaaaaaaaaaaaaaaaaaaaaaaaaaaaaacaaaaaaaaaaaaaaaaaaaaaaaaaaaaattacaaaaaaaaaaaaggatttgaaaaaaagcataaataaaaaaaaaaaaaagggggccccccaagggtttcaacctttattt

SEQ ID NO: 443274 - DNA, 457 bp, Triticum aestivum
ttcccggcggtcacgggttccatccaaatccacgcctttgttgttatctaacatacttgtgtctctccatcttattaaaaatctagtttgcattcattcttttactggtgaaaatcctgtcatcgttgagtttgacatgtgtgttttttccgttaaggacgcccgtacccggatggtgctccacggatgtgatagccctgacagctttacctgatccacccacccgcctccaccaacacctctctggtcgccctttccatcgatgtagacctctggcatgctcgcttgggacatcccaaccacgccaccctttgtcatattcttccgagtttttttcacgtgtaataagaccgatggtcacacttgtcatgtgtgtcatcctggaaaacatactcgtcttccttttagtgcatcctcctcgattgcatcgtatccatttgaactacttcatagtgat

SEQ ID NO: 443275 - DNA, 443 bp, Triticum aestivum
aagactaccgatcttattaacaattgcctaagataattcctcacaccaatccatcattacccacactcgctatttataagatatagtaatatattctaaatttatgataacagcacctatttttatattttagttctatgatatcatgcgaagttatcctcttcatacccacaacgtagttttatttctcggttctagatggaagcaaacgtttggtgtatgtagagtcatatcagtggcagataggacttgagagaacattgatcttacctttagctccttgtgggttcgacactccatacttatcacttccacctttggaaatttctatgatgattccttgcacttagggattatcactatccaacatgcatcttaaagtattaatgtggagatattatatattatcttcaccctgcattcgaaggacaaatacacaatca

SEQ ID NO: 443276 - DNA, 432 bp, Triticum aestivum
ttcgcgcggccacggggtacaatttaggtgcagcagtatgggcatgaagcttgattatgcgtccgtcgatcatccgcatgcgaatggtcaagttgagctatcaactggtcttatcatgagcggcattaaagccggagtagtgcgatccttgagcgaatccgatacgcattgggtagaggagctcgactccgtacaatgggggctgctgaccatgcctaatcacactaacggatacacaccatttttagggtgtacggctcataggcggtgcagccctgcgacataattcacgactcacctaaagtgcacatgtgagtaaagaaataagccgaacttgatcggcatgacagtttggacgccctgaacgacgatcgtgacgtgcgaaaagcccgttctgcattctatcagcaccaggctcgattgtatcaaatc

SEQ ID NO: 443277 - DNA, 430 bp, Triticum aestivum
gggccacgggaaagagaaaagaaatgacccttcggtcctatttataaagaaagggatatgtcagacgcgagaatcaaggagccgtgagtttggaaatgaagctgcggccttaattgtcacaggcttgttaacaggataaggttctttataaccagtgacgtcacaccggtccaccgcgagcagagaagatgacatcacggcggttcaacaaaatacaagaagatgttgaagatgaagatttttgctaaggattgatatgaacctgttcaaatcaatttggggcctaatgttggggatattactacggggcgtaaaccggccaggacaggccgggttaacttcatcagtagttgagtatgataaaagcccatgagggcagatgagggctaaaggcccataatcggtttaaggcctatagctataaaccggc

SEQ ID NO: 443278 - DNA, 459 bp, Triticum aestivum
cgggttcttaaatagttttctttagttttgtttcactcctgtaagaaactcttgtattgtaagttgtaagaaagagccattataccaattcagaatttctactagaaatgacgaatggttaaaaaaagttctagacataagaaaattagactttcttccacggaactattcacggcatatcacacattttccatttccttttactttttactatagtctattcttactagtatttttctttccttccatggattctttggtcaagaattgtcgtagttttttttattttgacctgattgagattaagtggatgcaatgaagaaagaaattgaattagactacttaactatttcaatctactaatctagtctattctatgtagattcaaagatcatataatagagagaatctaaagtgtcgtatacaaaactatatgtagttctttctaccacactttaa

SEQ ID NO: 443279 - DNA, 353 bp, Triticum aestivum
gagccgacaccacttgacaataaaacgacaataccgcagaccaaggagtagaatgtctgaagaggctttcttctgttgaagttgttcagttgggctggtttgtgaatgtgtacatgaaggttttcttttatcttagagagacaccttgcttcagctgtaaacttaagagcgtgcatatttacctgaatgtagatgtggcgctgctatttgcaaatcttccatgtgccagaattgttgcttggaaaaaaaaaaaaagaaaaaaaaaaaaaagaaaaaaaaaaaaaaagaaaaaaaaaaagagagaaaaaagaaaaaaaaaaagatagatataagaaaaaaaataattgagtaag

SEQ ID NO: 443280 - DNA, 461 bp, Triticum aestivum
tgcatgggattgaaccccagacaattgaatccctgaatctcttgaaaagtcgagatgcagtatttatcgttgctttgaacaaggttgatcgtctttatggttggaagacctgccccaatgctcctatcgggaaagccttgagacaacaaaatgatgatgtcaagttggagttcaatacaaggcttactgatattgtgacacaattcaagatgcaaggtgtgaatactgctttgtactacaagaacaaagagatggaagatacatttaacattgtgcctaccagtgcagtaagtggtgaaggcattcctgatctgcttctactattggtgcaatgggcgcaaaagacgatggaagaaaagcttacttttgttgatgaagtccagtgtactgtcctggaagtcaaggttatcgaaggtcatggcactacagttgatgttgtgctggtcaatggtatgctccat

SEQ ID NO: 443281 - DNA, 259 bp, Triticum aestivum
  unsure (1)..(259): unsure at all n locations
tcactagaggtggaagaatgaaagtagggggcttggttcgccggaatcgaagtgagcagaggcggcggccatggcggcaatggggggcacagagagctccgggagctcgggctagtggtcaaggaggggaagaggagggtggtgaggctgtggtgtgctcgancgaggcaggggatggctatttatagccggggcgagagggatgggctcgggtgctgtcgtgcgcatccggccgacacccgagctcggcctcgctcgc

SEQ ID NO: 443282 - DNA, 442 bp, Triticum aestivum
ccattcattataacctgaaggacggggcatatactcaatatcataacgttcccaagtcagacctttggataccatcctagtacccagacagaaagctgcatcagttcgcggtgaagccgccaatgggtaatatgagtaagctagtttggactgtctcgctcgccaaccgcgagggccgtagtcgagttcaccctttggtatacttatagctttaactatgggacagtcttggtcatcggagctaggttcatatagtttctgttgcttggctagctcgacaagggatagtcgatgtgagggaaccgtgggcgaattctgcgccatctctatacaagaaaaatatacgtgtgttggtacagttacaagccatgttcaaaacagcaaaaacaagtgaccatggtaaatgaatggaaattttaccacggaggcaatagtccgagcg

SEQ ID NO: 443283 - DNA, 266 bp, Triticum aestivum
cggggagctattcatggtctcatgttaggagcatcactacaatatcataatgttccaaagtacagagtttgtcgaccatcctagatgtgcacatacatatctacaagtctacgctgtaaataccacatatttctacgatgtctcagctatcattcaaagacacgatcttgaatctcgtcggcagtcgtatagtaggtgcttttttatatgtctatcttatattataatacttacttgacttaggttgcgagccatatattatttct

SEQ ID NO: 443284 - DNA, 123 bp, Triticum aestivum
tccacggggcattaagcattgtcgcagtcggttgctgaaacccatggcatttgagcagcctcttctgcttatctgtgatgcagatggtccctagctaataatgacatgacttgttttgtgagg

SEQ ID NO: 443285 - DNA, 427 bp, Triticum aestivum
gggtccacgggggtaaagattgatatataggactatgatattcagacaccgaaagagattctgagtgcaccggtaatgaggacattacctatgtaaataccagcaaagatattaggtgcacgtacattacttaggattattgaaggcatttgcaaaataaatatcatgatgaaagattatgcacttgaagtttacacgagctatacaagtgcaccatgcacatgtagccaaggaaatgctcctctacatgcatgcgacagaaagatggaaggaggagccacccttgcatgctacgatgctcatgtacatcacgttggggccacacatcttgtcaaccgaaggaaacatcaattccgactgaggcgtgcagaagttggactccatacgacctgcgttccataaacaaggacccaacgcggccgccaat

SEQ ID NO: 443286 - DNA, 460 bp, Triticum aestivum
taccggtacgacattcgcggggccacgggatgctgtggaaagtgacacttttgagccttcacgatcacgcacgactgatgcaagccctggtgcattccgtagaacctcaggtgctcagagaagcccaccggttgattctgcagaaccacagcgttcctcttcggctcggcattcatctaacccgaagaactacgagtctgccctcaaaggtattgaaggtcttaatttcgatggcgatgagagggctcagtactagtagcactgagaaaacgattcctcttctacgtgtgctgtgtataaattataatctgaagataagcacagcatttcctgttgagttttggattacaggagatgttacgaggaggatgtgaagtgctattgccagatgatggtggtggtcttctggacacggtaaataagtggtcagcccgaggcacaaggaatgtagctctcataa

SEQ ID NO: 443287 - DNA, 453 bp, Triticum aestivum
ccacgccagctacgacactcagttggaccagatgatcgttgccaccaccaacaagttcgccgtcgtctagaagctcatggatgacattgctgtactcctcccgcttgcccgggctcctcattgcctgccaccctaattggcctccatggtcggaacctcttttaagcattggtggccctgcgactgcccgccgatgccacgaagaatgtccacctggaggtcgcgctcgccacgaggtgcctcgccctgcaagaattcatcgacctacacatcaacgtgtacgagcaaatcgtgtacataggtatctacaaggacaacgaggacgctatgatgtttgccctcttcaactggttggatgccttggatgcctttgctgagaagcaccttgactttgccacaaaagccgacaatccttagccgctggtcggtggcctggcacactgagttgaggag

SEQ ID NO: 443288 - DNA, 447 bp, Triticum aestivum
gggtccacgggtactgctggatctgtgactgatgcttcccgcactgagcgatcaccctctacacagtcaggtacaccctcatgggttctggactctggagcttcttttcatatgtcttctcattcttccattttgtcctctcttagatcacccgattctcctattcatgtcctcactgctgatggtactcccctttctgttgctagtagaggcaatcttattactccttattctgttcctgatgttgctcatgttcctcgacttaccatgaatttgttttctgctggtcaacttacggattctggttgtcgcgttatccttgacgttgactcttgttctgtccaggaccgtcatacgcacactctggttggggctggccctcgccgccgtgattctcaaggtctttgggagttggactggcttcatgttccctctgctgcaacaaca

SEQ ID NO: 443289 - DNA, 440 bp, Triticum aestivum
aactgccgccagaatgccttctccgcctcatggccctccaattggttgaagtgctatacaacctctgtcacactctccaggagatctgcgaaggcctctgcagaatgccacagttgggtgagcttgatgcaccctttgcagccaaacacacactacaataaatatggcttacccgcgggtatttgctccacttgctggtgcatctcacagtcggcccgggccacggtctggagctcggagtgcgctagctggagcttcttgagctcttctttcgcttgcttctccttggactgaagtttatcgcgtgcttagaacatgcctttcagggtctggtcgatctccaggacccacgctaggtccttctctcaaccaccttcttggcaacttgggccttctctgccttcgcggccgcaaccttttgctgctccacctcctaccga

SEQ ID NO: 443290 - DNA, 441 bp, Triticum aestivum
gcggggtcacttcgatggcaggatcaacgctgctccaacggccccctctccggcgggatgtactacttggatttcatcccctacgtcaactcatacacagagatctacatttctctttctcttctaaagaaatcccctctgcctcgccgctgagctgagtgtatgttgaaacttttcgtccatcaagcgccgcctcgccgcctccggccgccccgatgacgccctctccttcgccaatccccactcctccatgaggtaatttgtctcttggaatttggaagaggaagatgatgtagcgtggttgttatctatcaatatgccttgtgttctggttgttcttcatagctagttacattgtattctgtactggtctggttgtatgaacactatgaaaatgtgagaaatacaaagctgatgagttggacctaaaaaaaaggagga

SEQ ID NO: 443291 - DNA, 388 bp, Triticum aestivum
gggtccacggctggttatacatcgtaaccttgttgaaggcattgctcggatatgctcggacaatttcttcaggatgaaaacttagattccggtgttgactgctggatccagtgacgacgacgtttcaacgttgctcctttcctgaagacgttgctgttgacgaatcacgatgttcatatggtgtcgtgagacggttggtgcggatatattctttcctatagtttgccgatcactgaactgatcactttagttttatttctttcgattgctcgctcaggcataactttggtcttatatgactttgccaattgctggcatggtttttgtgtgggttggtgcttgctgtgtgcatcctaactgtgcagatgccgggtatgtgctcatcatg

SEQ ID NO: 443292 - DNA, 457 bp, Triticum aestivum
ttcccgcgtccaccatttacaacgaaatcaaaacctacaccatagcttttttgttactttcaggtacgaattgatgtgtgcggcacggtaggcagtccaagttcatcctcctgcaccaacagacaaaagtaagcagagcaaattagtatactggttgacaagtgttgacattacaatcagggggggaatccatgaataaatcatgagcgtgacatggacatcattgataacacactaattacgatctaacagagcatgtactacgcacatagtagaaacatctacgcatatcgctagtactgctacaacagaaagaaacatgagaggaataagcgatgtataccgcggcggcggtgacgcagcagccgcgtcatcctcggcggcggcacggtcggtgtcggtcaacatggtgatgacgaaggtagatgaacagacgcgtgtggagagacgtggcgag

SEQ ID NO: 443293 - DNA, 201 bp, Triticum aestivum
ggggatgaatcgttgtctgcagaggctgtgggtatctgaagggtgtagtcatgtgaccctttcgagactgttttgttttgtgtttgacttagctggaacttagccttaggagctgttgaatgcgttatcgagtacgtactgtcgtattttcgacttaaaggagacctctatatatcataatctggcgatatctatgacaac

SEQ ID NO: 443294 - DNA, 442 bp, Triticum aestivum
  unsure (1)..(442): unsure at all n locations
agctctgcaacttcccgttcttgcatggctgtgtcacactttctgtcagcgggcgtggttgctctgtctggactacagttttctattgcttgttttccttagcggttttctatattttcagcgtatcatccccatgtatgtagggtttgtggatgcacacacctcatttgtatttctgtcacctagaggaattgaataaaaggcttccgtttggggaaaaaacaacgtggctgctcccggaaatggttgtattgagggagatgattggtggccctgagcctcgaagtgaataaatgataagttcatggtgctaataacggggcaaagtctcatccatgctagagtaatcttgattagtaatagcaggagtctacgtggtgtttgatattgtntgagctagctctacgtgttgtagtagcattggagttgcctgtatgtgtcc

SEQ ID NO: 443295 - DNA, 450 bp, Triticum aestivum
  unsure (1)..(450): unsure at all n locations
cgggtctcaagaaaatgagacatagagagagagattaaacacttagctactggtacaaaccctcagccctgagggtggattactccctcctcatcgtggtggccgtcgggatgatgaggatggccaccggtgatgattcccccctccggcagggtgccggaacggggtcgagattggatctcgtggatacagaggccttgcggcggtggaacttctgatctagggctaccccgaagggttttggaatatttggaattttatagggtgaagaaggggtgcgggaggtcaccgaggtgggcacaacccacatgggcacgcctgggggcccaggcgcgccctggtgggtgctgctctagcccatcctgggtgttctggtcnaaaaaaattgtcctangagttacgcggtgtttggtctccgtttgatattgatttcctgcgatgtaaaaaaca

SEQ ID NO: 443296 - DNA, 434 bp, Triticum aestivum
gattggtagaggtttgagaagacctggtgaggctgctctgtctggttttgcttgttggcacaccctacagcacttcacatagtgtttgacatgggttttcatcttaggccaggcaaacaaacaattaattcgacgataagtgactgggaacccggagtgactgcccatagcactgtcgtggaaggctgccatgatttgttgcagaagagaagtcaacccgcccaaccaaatctggccacggaaacacaggataccttgttgtaaggaaaaccgccccttggggtctgctcggatagctagtcgagtaagtaatttctgcgctcgaggattgctcttgtagctgttcagttcatcttccaaccaggctggctgacaaacagatacaagggtcaatgtctctgtcgctggacctctcgaaagagcatctgccgctg

SEQ ID NO: 443297 - DNA, 447 bp, Triticum aestivum
  unsure (1)..(447): unsure at all n locations
gataaaattatgtgtagaacgcactctctatttcgagcctgtaaagtgccttctccctcagccttcgaccaccggcatgtcaaatagcccgggttgtggcgttattatctgtaagatggcaattgacatataaatcaggttccagtgaacataatccgtattcagtgtttgctttttctaaagaactgaattttgcttcttcggttgtttcacacacgcacctcggcacaaattgccaggggctcgatacggcaacaaatgagttgccgacaagtccgaacagctttatagcacacttcgacgtcacgagtttggccttatatgcaccagctccgaatcatgtctttggtcaatagttgggttgcccggctcttgtgcttactatcttacgttccgctatatcggctaaggtagtaaanggagaactactgtgattgtgtcctggtt

SEQ ID NO: 443298 - DNA, 322 bp, Triticum aestivum
gggtcgccgggatctgattcaagtgtcagtttcacggcgacattcgttaccacgtaacggtcaaaatgtggactccgccctacgcgggcccactacacagagtgatcgggcaagccactgacccgacggcaacatcggcgaagacgagttcagacggttcccggcaggggacgagggaaaatgttcagagttgagaccgaggcgagccaatgctcgatccaacgatccaatggcacatgcataacggtcacttgaatgccattagacccggactaacgccgttttcagcaggtctaccatagagctggttttgtgcaagaat

SEQ ID NO: 443299 - DNA, 445 bp, Triticum aestivum
caggtaaataaaaatgagaatgctctggttgatgagcccgagatgcataagaatgccgcttcccttcagacatgggcagagaagctgagtgggcagggtgcagagatcacatcatcgcaactaaagaattggctgaacaacagaaaagctaagctcgctcgtatcgcgaaagaaagaggagtgccatacgagggcgagggtgctgacaagtcatctacaccagctaattctcagttgggtgactcctcagagagtgccggcgaggagagctatttgccgccttcaagggtgctgaatgctctaggcttatccaactccaagggcagcagcaggctcgttaccccagactccagcgagccaagtacacaagacatgatgacgagccgcccgttcacaagatcattgtcattcgagcctggccgccccgttctgctgattgacaacg

SEQ ID NO: 443300 - DNA, 404 bp, Triticum aestivum
tgaggccggggcgtctcagccggctccaggcgatgacttggcatccgctctgccaggcacgctgccaggaattcgacctccgtctgcgatcacgcagcaagagactctaacttcgccggctgcggcgccagaatatgatttgcctctgcctccacgccctcgactgatgcagcatgaggaggatggaacgcgataagatgatctgtctctgcctccacctccaccactgccccatcatgaggctggagcgccacgttcagcgccagatgcaggaaccgtcgatgacaagtgtgcaagatgtggcgatgacaattgggtcaggaggcccggatgacaagtgggtcaagtggttgcatacggcgtggaatcgaactgaactgaactggctgtacatagatgctcgt

SEQ ID NO: 443301 - DNA, 417 bp, Triticum aestivum
  unsure (1)..(417): unsure at all n locations
cgatgaagaggtcagaggcgctggatcggcagccaatatgtctgcaacgacggcaagacggcggagatcgggcacgaccggtgctaaaggaattggcatcgtcagttgataattaagtttgcctcgttatttaatctgctgggcatattgactctgtggctaaggggcgtgtttagacggcctcggggaatgtatttttgtgcagaggatcatggtgaaatgatgttcatggtgtacaactggccagctgattagctatgcattggttcttgtccattcattgatttggtattctgtagttcaactcttccagtgtgtcttaaagggcgtcgttcttgccttcgagctgtctgtcacgccgtcgccatcacctattcnctcgccacgcgggacacagagatgggtgaggacgccaat

SEQ ID NO: 443302 - DNA, 220 bp, Triticum aestivum
gatgaaaattaacacgtggactctcgttatgcggtacgccacaccccaccgccccgttgcgaccgtcgggctctaacagagatccgtttcgtcgaattagcggtacacaacacccctcccgatcaacatggacactgtttcgagcgtaagacgtcggtagcgaccgtactgcagcaggccatacacgtccctaatatcacgaaacaggtgtcagctgtac

SEQ ID NO: 443303 - DNA, 336 bp, Triticum aestivum
caccgatttcacgatactcctcaacatcacccactacagcctcagtatcgacggacagtatcaccgtttgttagagagaggcgctccggagtcaactccgataccacaactggcatcatgcgatcctattaagtgcacgacgtaggcactctcgtcttcgatgcaattaactttatgactccgtcagttgatcgagtttgacaagctttacggttgccgtcacgcgctcgatgactgtcttaagacggccactgatgttatgatcgacagcagggttgctgtagtctgtagttaggctgcatttcgccatggccggttcgcttaacctagacacgc

SEQ ID NO: 443304 - DNA, 395 bp, Triticum aestivum
ggcgaaagccgagcagtgggctctcgtcagccagtgacgtgtcttggtaatataaccacgtcagattccagtcctttgggtgactcggtggctcgacgtaagggaaaagacagtctctccgtctctgaatggagatgccgcctacttccaaacttggcccgttggcgcactcgttctgggggttcaggtagaaaatctctctgaagagcaacaggctgggctcttcgccaagataaacctcgcagaacacttggaaattgcatatgttggacaccgagttgggtcctatatcttgtggccgcacgtcaaagaagttcagcacgtctctaaagaactttgagccgggcggtgcgaagccccggctcaagtgatccgcaaaaatgaccacctccccg

SEQ ID NO: 443305 - DNA, 115 bp, Triticum aestivum
  unsure (1)..(115): unsure at all n locations
tantgtgtgtgtcagcattaccnatccaaggattgacacttatgcatagagatnaatactggttccgaaggtctgggtcgnctacacggaccggagggggaccttcccctaangc

SEQ ID NO: 443306 - DNA, 350 bp, Triticum aestivum
aactcagaaacagacaccaccctgtcccctcgtcttcctcggccctcgcttcgttctccgcgggagccggcgagccgccgccccactcactctctctccccccgtctaccgcacgcctccgccaggccattcccatatgctcttctccggcgagggcaacagagcatgattctgtggcagggttgaatggcggtgagttcgggatatacgagactgtgcggagcaggggttattaataaattgtgcaagaggcgatccttggccgagatggatgccgttgttgatgttgccgatgctatgggcgctgtgactatatagaacggggcgaagctggagttgcctgacagtgt

SEQ ID NO: 443307 - DNA, 354 bp, Triticum aestivum
  unsure (1)..(354): unsure at all n locations
ggggccccgcggaggaggagatgtacgaggacgaggacgacgccgacctccaggagtangggcgagcgagcgaggtctgtgttcctccgtgatcgtgtgcgtgctcggtcaggggctatttctgatggctccatgtcgctactagtagtgtgtgtttcgcgcttgctggccccaatcttcggggggttgtggacttgttgctggttgtgtagttggtctgtgtcgggttaattcggtagtcagtttgttgcgccttacggtggacttgagatcttagtagcaggtttgtaatatggctctgaatcctaatgcaacgtttgctgtttcttcacaatgaacagagtttgtgattac

SEQ ID NO: 443308 - DNA, 332 bp, Triticum aestivum
gttcactacagtgagtctgattagatcgcttgtaatcatgcgtcatacggacgaagtgcagtacacgagggagcgccatgtgattgtccgcaatgcttcagctgaactgaaccgatggagctaccgtggagctctcaggcctgctgatgtgtgtgtataggtattgctaagagtgcatcccgtttcatgaagaagtttgttgcttcgatgaaacatgagttgtagttgtatcagctagagctgtagctgtagccctgagttatcttgtcgaactgacaatgtaacaccgtatatgcattcatgaatcaattgggcgttctgcatctgagcag

SEQ ID NO: 443309 - DNA, 470 bp, Triticum aestivum
ggtccgagataacggggccacgggtgatagtaaaaagacccggttcatcttgaaaagataaaccggtccttaagggctacacagggaaaattgaagtattttctacaaagccccggttcatatcaatactataaaccggcccttggggactactggaattagtagcactaaaccggttataaggaagagtagttatacagaaatcagcagtgtttacctcatatcgctccttcatcatgttcaataacccggcttcataatcacagctggtgtacaaccagtttaaaaacccagagtggatatcttgggcgctgagatgggcataactttctggatccaccttccacttgcccttgtctatagcagaaaattcttctttggcgctatgttttgacagagcagtggggttgctgggggccgtatagccgacgccggtaatgacaacatcatccgttttatcatcagcagct

SEQ ID NO: 443310 - DNA, 362 bp, Triticum aestivum
gacgccgaaactcaatatttatttttcttgcgttccggtccccaggcttggagttatttcctagtctggtgctcgctcgtctcgcgaggcggcggcggagggtttgcgtcggcgctcttgcgagctagggtttcgggtcgaggaagagcgagatggaggaggtgacagagggggtcaagaacctggccgtgacggagccgcacaagaagatccggatccaggtctccaacacgaagaagccgctcttcttctatgtcaacctcgccaagaggtacatgcagatgcataacgaggtggaactctccgacctcggcatggctatcgccactgtggtgacagttgccgaaattctgaaaaataat

SEQ ID NO: 443311 - DNA, 276 bp, Triticum aestivum
gtccctaccgaaaccatgaggcctgttgtgagaagctctggtttgtgaaaagcttatataccccaacttgccccaaatgggacattattttaacaacggcatgtggatgccttccaaggcaaccaggtcaggttccataatttccaaacgcgttttggattaactaaattataaaacccatgtataccagtgtcaggggccgagagacggtggcagggtttttgacacacactcacatctcgtgcatgagacatacccatgtacacaacgaaacac

SEQ ID NO: 443312 - DNA, 470 bp, Triticum aestivum
ggggcgccgggattacctctataagcattgttattaaaattatttcgcgagacaaaattcacatctacggaatcactattttgctcaatcaaagtagacaaaggcacatcattaagatcaataggagaattttaattagcaaccaatttcataagagcatcaactttttcactcaaagaatttatttcttcaaccaaattaacctttttactagtaggtgctctttcggtatgctattgtgaataatttgccataatattatcaagcaatttagtagcttcacccaaagtaatttccataaaagtaccacccgcggcggaatctaaaagatttttagaaacaaaattcaatcccgcataatttttttgtataatcatccaaagatttaaaccatgtgtaggacaatttcttagcatcagtttcattctttcccaagattgtgcaacatgttcaagcctgaaattgcctaa

SEQ ID NO: 443313 - DNA, 468 bp, Triticum aestivum
ggtcggaataccggggccacgggtagtacgcaattcaatttgcttgttagaaactgactaaaaaaacatccaatcaagtaaaaaaggatgtacaacgttatttttctaacagaaaagaaaaaagaaaaatgagagagatgtgaaacccctctgtcaaaaatttataatcgcagtatcaaattaccttttattttttagttttttgcaggaaaatttaccttttattgaattagagcataggtgaattattgtgtgagatagaaatggaagttaaggtagtaagtgactgatcaagttacctgcggtcttgcaggtactgattaatgttgcaaaccagctcctgctcatcctggtcctcgccatcttctgacatggtgatttcggatgtccccgtagatattgacgctggtgctatagctgcttgtttgtcgatctggcaaagaatgtgtctcagaagcaccttgatgc

SEQ ID NO: 443314 - DNA, 400 bp, Triticum aestivum
gttgaatgaatccattgtgagaagagcccttgtgatcatgcaccagagggacgaagtggagtacaagagggagcgccatgtgattgtccgcaaggcttgagctgaactgaaccgatggaactaccatggaaccctctggccatctgatgtgtgtgtataagtagtgctgacactgcagcctgtttcctgaggaaatttgttgcttcgttgaaattgagttgtagttgtactacttaaagctgtagctgtagccctgaattatcttgtcgaactgaagatgtaccacagtaagttcattcatgaatcatttgggcgttctgcagctgagcagagtatgcctaggaaactgaaaaaagtacgaggcccatttagaggatctagcttgaagtaaacgatgcat

SEQ ID NO: 443315 - DNA, 416 bp, Triticum aestivum
cacagaaacaatccatcgccacccacccacgaccccctcaccctggctagggttcctagcccctcctcctcagccgccgctgcatgttcctcgctggcctcgcccgagcgccttccggacctcgccgggagaagtcagccagcgccattccgatctcgctgggagaagccagcaggaccccgccgccatgcctccctctcccccttctcctcttttccgctacctatctctttcctctgaacctgattggggcactgcgactggcctccactccagatccgtccgcctttgatcccgtatcctccttcccgacggggtctgtcctccgacactgcgcacgggtgctacgggattcaccactctagcgagcaggagtagcacggtggctgtggtctgctcagacccccgaccaacga

SEQ ID NO: 443316 - DNA, 303 bp, Triticum aestivum
  unsure (1)..(303): unsure at all n locations
gatgctcttgaaagtanggcttcagcttcttggcggtcaagtacacgccgtaacacatcttttggtantgcgggtagttctgctttgaagcggacatcacctcgctcaagtaatacatcggcctctagaccggctgggctcggccttcttctgggcgttggactacgatgacggtgctgaccacccgactggttgtggcaatgtaagggagcatgggctctttctcagtcggtgccgctangacgggcggcgtggctagcatcttcttcagctcgtgaaaagcttgatcggcctggtcgttgg

SEQ ID NO: 443317 - DNA, 310 bp, Triticum aestivum
gggggcctaccgaacaacatcctggtgtacttgccattagtcgcaatcatgcgcatatgatattttaggttcagtcatggattgtcaagaccattcaggttcagcgagatggttctctgaaacatgagtaggtagcagatcgcatgccttgccggctgacagacaagaccactaattgtcctgcggctctactactgtaccatgtgttcctactagtagctctagtcgtggatgctgggtaactccatgttttctctgtatttacgtaatcttttctctgtaaaattatattagcatacgtaatcgaaaa

SEQ ID NO: 443318 - DNA, 396 bp, Triticum aestivum
tgggcatgcattgaccagccacttcacgagtctaaaatagctgctgggtacaggcttggcgggcaaaagtcggactatgacgtccttcatggccaacccaaccaccctatgcagcacggtcagctacttcagctgatcactcaggggtgccgaatgctctagcggaaggtactgcgaccaaaacagctcctccattgagctcccctcttcggctcagaagaactctgcggtgtcagcaacactcctcggcagatccgcaaacgcgcctgaagaactccaaactcgggtcagcatgatatatctcttactggcaaatttactctgcagaagaaaatccttaccagccgctatctgcttcgcctgctggatctcctggccggcgctctgggactcaac

SEQ ID NO: 443319 - DNA, 455 bp, Triticum aestivum
  unsure (1)..(455): unsure at all n locations
ggtccgtaatatccggggccacgcgaggcccaccaacgggagccgtctgggtgatgcgggcggcgagagcagcccgacgctcagcacgaacttagcgagtgtcagccatggatgcgatgatcgatcgaacgcggaacagcanaagaaagattccggcgcacccctacctggcgcgccaaatgtcagatatcgggttccgtctaaacccttaaggttcgaactctggggtgcgcgcggagatctcctcctaccaatccatgcccgaactcctcgctacgaatctagactacccgatgaacaacacaagggacacgaggtttatactagctcaggccaccgttgtggtgtaataccctactctagtttgtggtgtggtggattgcctctgggactgatgatgaatagtacaagggaagaacagcctcgcgagggatgtgttggtgttctgcttgggg

SEQ ID NO: 443320 - DNA, 80 bp, Triticum aestivum
ctgtttgtgcgtcgacattggatctgttatgaccactgatctctgtttggtcgcgtcgcttttaaaagtattgtggttgt

SEQ ID NO: 443321 - DNA, 390 bp, Triticum aestivum
aagtatgttgccattttgcgtaagcagatccagaacattgaggtgtctcagcactcaaggtacttcagtgaattcggcgggaattttccggtgaagaggaaagctgtgggaatttggggatgcatcgactgtgtcaaggtcaaggctggcggcgcctatacatgaacactgctaactgcagtcaccgtcacgagcacgatccgtcgcttgtgggagcataccgaagcatgattgccctactgttgtcttgacgaatccaggggttctgtagtggagtgaacacttaacaatctctgtactttggctatctagctatggatatctgttagtaattttggttctgattttaggatccttgaaacttgacagtatatccctaaagctgccctg

SEQ ID NO: 443322 - DNA, 342 bp, Triticum aestivum
gtctggaatcagcattgcacgagatgtcatctgaatccagagaggcgcacgatatatacctcatcaatcaggaagagatagatcatgctcgggcacatgtagacgatctcaacaatagtctgcataatgacaaggtgagctatgaggtgatgctcaatgaagtaaactacgagatagtttgcctcaagaagtccgttgagagaatggatgcagacgctaataacgtgtctgatgaatgtcagtcgccagagctaggttttgtcaactcaattatgaagtcgtaagatgagatcgtcacgatcagagtgcataggttgaactacttgggcgtggtgtatgaaa

SEQ ID NO: 443323 - DNA, 443 bp, Triticum aestivum
  unsure (1)..(443): unsure at all n locations
ggtttaatgatgaactcttgtgttgatactcactcccatagttcatttcccaagaatcttacaatgtcatctcgacagtttgtgttgcacctttcttctcaagcattctgagtctgagttatcctgacaccaatcagatctgaatctcggtcagatatgatgattggaacatattcccaagagttataacaatggtttttatgtgacccggtaaggtgttttcatgcctagcacacttggctggaggacctattgttatagcttacttctagcaaggttatctattcttccacgaggaaatggtaagacttattctataagttcttcctgatgaatcctttgtgtatccaaagtccgacctttgcttgaagaccatgttaatgctatctcgaaacatgtcaaaggtactccgattttcaacaaganaatttaaagcccaatgc

SEQ ID NO: 443324 - DNA, 346 bp, Triticum aestivum
cggggccaggcgataccatgtacgaaatcgtagaaagcgtcacggcaaaaaagaaaaaactatgtacagaaaattaagattaaatagaagacaacagatacagcagaaaagactaaaatatataaaaaaattactcaaaaatagatacaagaaaataaataatgcagaaaagataaaaattatataaagcagaaatattcacaaagaaacgaaatacagcaaaaaaaaattactcagaaataaatggaagaaaacaaataaagcagaaaagaaaaaaatataaaaaaattactcaagaataagtagaagaaaataaataatgcagaagaaagaagaaaggagctac

SEQ ID NO: 443325 - DNA, 514 bp, Triticum aestivum
  unsure (1)..(514): unsure at all n locations
gngaacgtntcntgnnnnnccggtccgaaaaaaccgggtccagggcgctctccatggcgtcnaccttcgttggcaactccgacctccaaccaagaaaatttccngaaggttanccaacaattnaatggcaatgttcaaggagaaaggtttccttgcattgggaaactgggtaaaggatggaccaaaatggaattcaaccaagggggagaacaacaagaaagaactcgtccccggagtaccaacaataccaaggatgncactgctgacgaagaaggcgaantacgaagatgaggatnaagagcctgaagaagacatgtaaggtgggatgtccangtcntgcctttgctgggtgggggttctgggggcaaaatttgattngtttggtgccttgtaaaaatccgtttaacatcgcaactaacgccttgtaacgccaacgncaatccttcctggcctttcccaaanctcctgtaattcccaaagttaaggcancntttccggaattgtancacctnta

SEQ ID NO: 443326 - DNA, 440 bp, Triticum aestivum
cgggtgcacggcgcaagaattgaaggaacgggaaaagggaaagggcggtgacggaccaaggaactggctaaagacggaaaaaggaattaacctgcggttcaaaatgtaaagaaagagaaagagaaagatgggaaaaccgggattggatggaaaaaccaattggactgcggaaacaattggtggtggacaaggatagttttgcaaaatgattttgtgacagaatttgcactaaaaaagctaaaacgacatatatttaggtacaaagggagtattaccgaaaaaggctttcgccccgcttaatattataaagccaaccgcacattaagcatccaacaaatccaacacacaacagacacacacacggaggtccacaggagccaaaatagtacaacaaagggtcacaactgagggcacatcacaacaagccctaaacccaaaaa

SEQ ID NO: 443327 - DNA, 223 bp, Triticum aestivum
gacacacccttcaatggctagctctagctttgcaagcgcgaaaaaatgtatgcgtgccccatccatgcatgcgcatgaataagtttttagtaattgatgaataaatgctggcatgtcgagcatcagcatggcatggatttgtgtaaaaaaaaaataaacaaaagccaagtaaatcaacccaaatacgtaacaccaacatagactacacaaatgtcaagaaaag

SEQ ID NO: 443328 - DNA, 326 bp, Triticum aestivum
ggggacgacaataaggaggatgaggaagatgaggaccagccgccggccaagaagaagaaatgatctgctttcctgctgtcgtgtttcagtcccttagtttatctgctgtctagatgatgattgagcgggtctggtacacaccgacctatgtagcttctgtgtcgtggtggtttgatgtctcatacggtagaacattgaacttctaatgttgtttcctgcgttgtgcaagtagtcttaacatttcggtgttgatgtccgtgtttattggactgtgatacattacagaagcaaaggttcccaaaaaataaaaaattggccgccctaaa

SEQ ID NO: 443329 - DNA, 421 bp, Triticum aestivum
  unsure (1)..(421): unsure at all n locations
tttttgggaaacaaatcatgaaaaatagaagtctttgtaacagtttgcattgggagagaataagcgaaaatttttttaacattaatagcaagacgggaccggatatccacatcaaccgcatcaaaatgttcttgcatanataatcactctctcttatctgatanacatcttttttagacacctgattcttttgcgcttgattctgttatttcttttacaggctggaggaaacactaattaacatgtatttatcaggatactctaatatagaggtcaacactganaatttactaagagaatcacagataagtgaggaaagcanaagtgatgcagttgagaacaaactcagtaacgtggcttcagataatgcatcagactctctgaatgatgctacattacagcaaataaaagataaaatgca

SEQ ID NO: 443330 - DNA, 435 bp, Triticum aestivum
gcggtggaactcagaggctggcgacgcgaggaagatgaagaaggcacgaaaggagaaaagaaatgacccttcggtcctatttataaggcgaaagaacatgagtcaggtgcgacaatcaaggggccataaaacggagctgtcgcctcgatttccgctgatctattaaacaaagaagcataacggatagcttcgttatgacaggtgacatcactccggtttacaacaatcagagaagatgacatcatggcggtttaccaatttataagaagatgttgaagatgaagcttttattaaaggattgacatgaacccgttcaaatcaatctagggcctaatcttggggatattactactgggcgtaaaccggcttatctgggccgggttaacttcatcagtagttaagtaagttaaagcccaagaagacagaagagggctc

SEQ ID NO: 443331 - DNA, 420 bp, Triticum aestivum
cggctctctatctcctcctcgtttcctctcgtcaattgtgatcgagagggcagcgatagagaagaaaggcggggaggagaaacaaggattgcccaagaggttctttctgatcagttcatcgccaggcatcatcatcgtcatcatcatcattatttcttaatggccgtgagtacctatctcactacgcttacatctcctcttttgtggttaccgatgctttactactgtctactcagtgcatgcatgcacgcatgatttcgacactgttatggccgcttgatcatgtatttgttttgtttttataattttggctcatgattgctgcgtctgcgtaatggtttctctatatatttttcaagcactctgtaatacacgtatggccgtattgaattgaccatggtttggtgggtgtggaacgat

SEQ ID NO: 443332 - DNA, 344 bp, Triticum aestivum
gatctggacgaaatcatcttctattcacgcatgctgtaatgtgatacgcaaacagtgcacatagctcctcttgaaatgtatgaggagaccataccaagtgctctgggacatgaacttcgtgatagaacgactgcttcattcacaacatcatgtctgatcgggtttcactgcattcagtattctctcaatcacggcaccgatgttgaaaacctcagcatctgtcgtgtaaattgcacttcttattctaccacaacacatgcgtataatgtttctaacgcagaccgctatcctgaacttcaagtgtagtgtggctcatgaatggagattcagatttgagctgatcc

SEQ ID NO: 443333 - DNA, 97 bp, Triticum aestivum
ggggtcacaaaacaaacaaacccaaggaaaaaaaaaaaaaaaaaaaaaaaaaaaaagcggcggcccaaaaggtcaagcctaagttacccttgaaggc

SEQ ID NO: 443334 - DNA, 430 bp, Triticum aestivum
  unsure (1)..(430): unsure at all n locations
gagacaaataaaattacaaccacaaaggcaactgataattgaattacaaaaggacatgctcctggcaaaggcaaaacaatttaaatccaagaatcctttccggcctcaaaatatgaaaggatcctaagtaaaagttggatttttcctgaatccaacctgtgaaattgttaaggagtgtcttcccccgtgccacaagaagttaaagctctggaatccacaaagaaagtcttgggatgttaactatgtctactacagcgaacgctgtggtggcggtttgagtggttgctggggcaagttttctctagacaataatctggagaagttcgacgtgtgcgtcttcgagctcttctcgaaggacaacataaaagtacacatctacagagtcgtcncagaaataacccattcctccctggtcctggcaagaaataac

SEQ ID NO: 443335 - DNA, 196 bp, Triticum aestivum
tcccaacccattacaaaccgtaaaggtaccaaaggctgacggggatccgatcgcattcaagggggctaatgctctcaaccctatgatcgtaatccggcttgacaccccatttctgacaatcaggcggcatcaccaagcaaggagctagcttaaacagatccggcctgaggtctttgagtaaacggtacagccccga

SEQ ID NO: 443336 - DNA, 169 bp, Triticum aestivum
  unsure (1)..(169): unsure at all n locations
gncngaatcantccatggaccaaccttgccttccagaggtngagcttgaagctctgttctcctgacatccatcatggaatcttggantgctgttgcctgcttanttgttttttgctgagtggttaaatggaactatgtaatggtntgtgcttcttgtggtgtcganttc

SEQ ID NO: 443337 - DNA, 403 bp, Triticum aestivum
  unsure (1)..(403): unsure at all n locations
gcggacatgactgagagtggagtggagaggggagagtgagggacggccggttggagaagataagatggctttagaattagcgcgcgttaggataaagcgctactactaaatgccataatagtagcacattttactccagacgcgctactgctatacctatagcagtagcgccttcttcgaaagagcgctactactaaggctaagcatgtaaaaataaacataaaatacatttctcatcaatgatctctttgtgtagaatctgagttgtcaatatgagtcctgcccggtttaagaaccggtgtagacttatattgagtccacaaatcctacacatagagttcaatgaagaacaagtggctgtgatagtttgagaagtaacatatttaaggtggtanacaccctg

SEQ ID NO: 443338 - DNA, 408 bp, Triticum aestivum
gataagtaaccaaaggatgacgtatcgaagatggtgtggcattataacgttcatggtgtttatgataataacacggtctcaaagaaattaaatgaatggaggagtaatgatgaagctgtcaatggggacacacaactattgttggataagtagtcctagattccatatcatttgtagagataatgatgggtgatagatcgattgcacacaagcagatatcctgttttgaacaaaacacagttttggacaaatagacctaattgtgtgtgcagaatactaatggttgatgtatcaacgacctaccagctaaagaccaagaaatgtatcattgggcaaatatttggatgttcaagagtacatgtttgaacatgtactacaatactacacctgatctcaaggtaaactatg

SEQ ID NO: 443339 - DNA, 417 bp, Triticum aestivum
tgacgggaatgttcattatgtatttatcaaattttcattatgtatttccaaacaaaatgttcacaccatcccaagaaatgttcttcatgcatttaaaaaattatcctgtgtttattaaatgtcgtcctgtgtatctgattttttatattaaaaaacgtttttccaatttgtgaactttttgcaaattcatgaacatttttttaagttctcaatcatttttcaaattcataaatattttttatatcaaaaatatttttcaaattcgtgaccagttttagaatttttcgagttgatgaacattttttaaattttggagctctcttttgcaatttctcgaaatttttaaatttgtgatgttttttaaaattcattaacattttcatgtttgcatttaaaaaaagagtcaggaacacattt

SEQ ID NO: 443340 - DNA, 443 bp, Triticum aestivum
ggtccaggcgtgaagcagacagtcatctggaatgaagggctctccgagggaagtagttgcaaaaacctagaattagagtcagtaaaatcctataacctgaatagaagagatatcagaatcccagagtaaggacgaggaataaatgatcctaataccacccaatggcgacatgggcccataagacacacatccatgttagtaaaactgttttggatgactagactcaacttcggccaatgagttggaaatggggctacctacaggcagtcggctctaataccaacttgtgacgccctcgattcaatcgcacactaatcatacacgcaaatatgtacaatcaagatcaagaactcacgggaagatacacaacacaactctagacacaaattaaaataatacaagccacgggcctccaaggctcgaatacataagctcgaatacac

SEQ ID NO: 443341 - DNA, 76 bp, Triticum aestivum
caacctccgccagaatgtggccagcgcgacttccctcgcgatgcacttctttcctaatgcggagcgtgccaactga

SEQ ID NO: 443342 - DNA, 137 bp, Triticum aestivum
aacaaatatgatgacttgtattcggagactaaaatgatgaattgtatttagagactaatcttctattgtattcgatgaatctgttgttggtgtgtgctgtctatattttgtccaattatacattttgtaacctgtac

SEQ ID NO: 443343 - DNA, 441 bp, Triticum aestivum
tacggtacgaaattccgggtgcccggggcggattcgagacggtgagccatgagcgcgattgcatgcgccggtccggtcgtggtctctcgtggtgccttgacaatgccgagtcggagaggtactgccttggctgcaccgttggaaaccatcgcctggtcttcgtcgtccacggctccaggccatgacgagcttgcacattgatatttcgtagcgtcgctccgtcagctcatggacagggatgtggtattacggagtgacgtgaacacgatgtcatgcatacatcgtggagggatatcactgcaggcacaaggggattgtctcaagagaatgtccaaagtcatctttcgtctagacaagtgcgcactcgatcgactctgcacggagattgtctcaaggtccccgccgttaatggttcagccttcttggggagtgggatgtttt

SEQ ID NO: 443344 - DNA, 304 bp, Triticum aestivum
  unsure (1)..(304): unsure at all n locations
ggacggggcgtgacggaccgctaaatctagacanatctcgttgaaaatggagcttggaggtcnagtttcgagaggagaaagcttaactagtgttgctcgggcatttcgtcgaacacctcatgtgcatangaggtgaactatagcaaccaaatgccctcccctcaccggcttgacaaaaagagagaaccgtggagtgctctgcccagcggtgggtatatgtaggcaagttatttgtcccggttcgtggcatgaacagggactaaagccaacccttctatcccggttcaagccacgaactgggacc

SEQ ID NO: 443345 - DNA, 391 bp, Triticum aestivum
ggggccacggggaggcagcgacggcggcagaaccagcggatggcaagccaaagattcccctcgcacggcttggtgccggcaaggcccggcccccggcagagtctgatgccaccaaggcagtgcccgcgcagtcgagtgaggtggtgcagaagaagaagatgatgtagcacccggtttactttgtcagctccctcttgcagggggctaggtcgaggtattcgggtgtgcaaaagttgctcttcggcctccttatggcctcgaggaagctgcgtcataaattccaagccgaccagatcactgtcgtcacccgccacctgttgcaacggacgctgcataacctagatgcaaccggaacgattgtggactgggccttggagataacaagtttcgg

SEQ ID NO: 443346 - DNA, 131 bp, Triticum aestivum
acgaagtgtaacggttggcaacatctgcactgctcgcatttaacgagtatcatgctagtcgactctagcctggagacgacctgtggaatgtcgctcagacaatgcgtgcaactctccaagtagctgtcaag

SEQ ID NO: 443347 - DNA, 115 bp, Triticum aestivum
ccccctccgaatgaatggaagccaaggccttgggccttcaattggtcctttttttccggttttgcccgtaccggtccgggtaaacttaaacaataggattccgggttaatttaat

SEQ ID NO: 443348 - DNA, 263 bp, Triticum aestivum
  unsure (1)..(263): unsure at all n locations
aaacgccctcaatgcctcgacaacttcacgggcgtcggaattgtaaactgacatcatacttataactattcattttaccgataaaccctacattttagttttttgctaggtgtcctatatgcacttttaattttttataggtgtggataacttcttgaaagctaaatcagcccatattgtatgtgattttccgtgaggcagactaaattggcatcttgaggattcaaaanaacaacaaagtacaacatcaggaaaaggcaaaa

SEQ ID NO: 443349 - DNA, 162 bp, Triticum aestivum
gggttggaatctattctgtacgctggctactttggcgacgtctcttgtcttgtctggtctcgaatctcagcccgactttcgggggaatcataatccccttcatcctttcatcactgaggcaatgctctcgctatgtggattatcagacttttatgtacttac

SEQ ID NO: 443350 - DNA, 283 bp, Triticum aestivum
gggtctgtcacgaggtagcagatttccaggttgctcggtgacatttgacagttcttcgtagtttatattgagtctgttcttcatagttagagtcgaagagaaagccatgcaccgtatgagggttagttcagctcatccgaagcaatctgagccttgcataatcatttcggtaattgctatgtcgaagttgcggttgcatcgtcgtgtcaagttgatggtcttagcgtcaagtcttttagagttacgagttctgtacacaggttgtgacgtcgccgctgcgata

SEQ ID NO: 443351 - DNA, 266 bp, Triticum aestivum
ggcatagtgatgtattacaaggatgcactgttgaggataagctttgttggttgggagcacctgttaaatggtgttgttgtggaaaagcatgggatggttgctgctggagcccttgtaagacagaacacgaggatgccttgtggagaggtatggggtggaaaccctgcaagatttctgaggaagctcacagacgaggagatcacttttattgcggaatcagctgccaactattccaacggaaccaaggcacatgctgtttagaatgc

SEQ ID NO: 443352 - DNA, 438 bp, Triticum aestivum
cgggtccaaataatgaggccacatttgatgaaccgccccctcaagatcataatgctgatgaacaagcagaaattgatactgctgtgccaggtgataaaccggcaagtccaatccgggttgatgacggaccttctaatctagtgaagactactgacactccatcaactccagaaaaggctgctggagataatgaagatgagcctatcattaccggtattggccacacctctgctggccatcctgttgtattgccaaaacatagtgccaaagaagagcgtgctgccatggagaaagacaagtggagcaccgatttatcaagctatgcccacttcagtgctcaagaactccactctggctttctaaaccgtctgcacacaacccgtgaccatgaatccagtttggtgaacctgatgaaggagcgctatgaggtaatgacat

SEQ ID NO: 443353 - DNA, 56 bp, Triticum aestivum
gccacatttgatgcaccgcccccacaacatcatagtgctgatgaacattcagacat

SEQ ID NO: 443354 - DNA, 392 bp, Triticum aestivum
  unsure (1)..(392): unsure at all n locations
ctccgccctcctttgcgcgtagaactcgcgctcgttgatgatgtcctacgggaagtgttggcgccacaacgccatggcttcctcgtccatcttgcgatgtcgagacggtgatctcgcctccggttgtcgcgacgatcctcgtcggtgctaagccacggcagaggcgcgagctcctgcgcccactcccgcgtcggcacgttggggatgttcaatgttctatgaggccaccggaggcgccacgccgccgcgtcgtacgcgcaggcagccttgttggaggtgttgaaattgccgaggctgaggcgcatcccacggaaccggatctcggcggagaagccgccggaggggcgcgtgccgcggtatcnccaagtttcccgatgacgcatcggcatggt

SEQ ID NO: 443355 - DNA, 419 bp, Triticum aestivum
gtacagtctagcgggtcgacggctcattccttctctctcatatggggaataatttgaggtgtcttttccccgcagcaacgggcgcgccgtccttatcgttctttacccgcaagtctcccacgccgtgtattttgacccttccagagactacgagaaaaaagactacacccacataatgaatattctagatgatgctctccaaggcttcagctttagaggtggccatgtgcagatcaagaaacaaaggaacaagaagatgggtttcgcgcataaaactaacttctcctgcatccatgtcccaaaaccaagcacgaaggatggattctacatcgtccatctcatgattcagttcaacacggatcaccaaaagcttcgcattaacagcagaaatgatgatcgtaaccacaagtggctagaat

SEQ ID NO: 443356 - DNA, 439 bp, Triticum aestivum
  unsure (1)..(439): unsure at all n locations
gggtccacggggagggccactagagctcagctggaaaacggctggaggaggttaaggtaccaagagagcgaccccctcccggcaccgtctctaagagaccggcgatgattgtgcttgggagggaggggaagagcggaaagatgaggcagctggctggcagtacgagatgaaggtgtcggtgccatcgtactccgacctgacgacctgccacccaccttctccatcctccctcgtttttccccatcaccactgctccaaggagatgccggacccccagcccgtcaccttccctggataggcagctggcgactatgacgtccaaggcgcacgaagagcaccgttccccaacttggcaggcangaaggtgccgctgtcttcagcaccaaccctagctccgctggaaggagcagtgctgggattcgccatgatcccgaacact

SEQ ID NO: 443357 - DNA, 450 bp, Triticum aestivum
gggtcgacggggagactgcgtcccagcttcctgacgctgtccgcaaacaaaaagagaaggtcacacaaccttcgacaagcgaatctgcacagagaactgctgtagcggaatccgttgacgacgacgacgatgatctagagaagataagagaaaggctcgccaaagtgaggtcgtaaaagagaatcgatgtgctgacatgtgtataatagtccatttggtaatgtacgatacacaacttggcagatgtcgcccttctcactcacaaactgcccagagtcaccaacgtacaagtcgttcgatctctgttgtaatctgtatgtgaggatcgtcacgtgtgatcaaggtgtcctgtattttgtttatttctacctgttgcgaacacataaatattctggttacatacagatatcatgtcagtaaagctggatgcacacagctagctatctatgc

SEQ ID NO: 443358 - DNA, 439 bp, Triticum aestivum
gggtccacgggaagttcaccacgcatcatgtagtggacacccacgtgagggggaaggccctctcggtggtgtacacgaacgatccggtctcggtggagagctccatccaaactatggggcagttccttgccgatgacaagtaccgagtggtcggcttcgacctcgagtacaccatcggtcgtgcctggcacgatcagaaggttgtcgtcgcccagttgtgcgtgcgacatgacgtccacgtctaccacttccaccttgccacaaggccttgcgagcgtttctccaggtttatcaacagctccgactacagtttcgctacggtggacaccaccaacgatctaaaagcgctcaaggtttcggacttgaaatgcccgaatcttgtcaacatcccagcacactacaaggtctggggcagtgacaaaagcaaactgaactccct

SEQ ID NO: 443359 - DNA, 176 bp, Triticum aestivum
ggtccacgggatgatgttgaggggacatccaacaacaacaataagaagaagaaggactaaattaagtagactgtatatatctctatttttgttagctcatattaattcgttatctcaatttcccctgtcaatctcatcacagacaattagtaatacgtattcgacagagatgtttc

SEQ ID NO: 443360 - DNA, 380 bp, Triticum aestivum
cgggtccacgtctaccagacacatgcgctacaagtaaatgggtctacctcttcgcccatgaccctacccatgggcataggagcagacccatgcgcatacccattgggtaaccctacacaatgggttacccatcgggcatgcactagtaatatttttattaggccactgtgtcctacatcttgctaactttgctaaagcacttccgaacgaatgcttacaacatcaacatcaagttcttttacacgcagagctctacctccagtgtgcttcgcttggctacgtggtactaactaagctgcctctagccgtgcacacagtgcacccatgcatgacaaaagctatattggcttatatggctttatacgcccaacgggctagcg

SEQ ID NO: 443361 - DNA, 368 bp, Triticum aestivum
  unsure (1)..(368): unsure at all n locations
aagggcatacatcgtgccggcgcaggacagggccatgtgatgggcgcatgcaattgttgcggtatgattactttggttcagatcccggcggggccaaatgtcggttgtaccggtaccattggcttcaataccgttggcgttgaaaagcgaccacatgatctgtttgatattcggcatctcacgtggtgacatgagtacatatcttgaatagaaccaaaccaaacctatcttgttgacatgagtacatatgtaagcctatgtggttcagtagaggcagctgctcatctgataatgatcaccagctatgtgtaacctgttgacaataagacggcactgctcaaacagaccatcanctaaaggctggggct

SEQ ID NO: 443362 - DNA, 378 bp, Triticum aestivum
gccacccaagacccaacagagccgcaccactccccacctcgacctctctctctccccgcgacccttctccgccgccgccacccacgccggtgattcctgcagcttccggcgattccggctgctgccgacgatgccaagcacactcgcatgatcgcctccgtccgctccgtcttcccttccgagcagattcgtcgctcgcgtcctctaccggttacccgcgaccgtcccctaagctagggtttcggccaccgcgtcgccggcgtggctccggcggctcagatcgagcacgccaatgtcgccgtcgtttcgcttgcgctggaacagcaaagggaaggccatggacgacgccgctccagcccttctccgacgccatcaagc

SEQ ID NO: 443363 - DNA, 263 bp, Triticum aestivum
gtagcgacgacggacgccgagacgagcacgtgacaccactgccaccctgtcctagcgtaacgcgagtcgaggaggacgtcgtcgcggtagcgagaacggacgccgagacgagcacgtgacaccactgccaccctgtcttagtgtaacgcgagtcgaggcgacatcgtcgcggtagcgacgacggacgccgagacgagcacgtgacaccactgccaccctgtcttagtgtaacgcgagtcgaggcggacgtcgtcgcggtagcc

SEQ ID NO: 443364 - DNA, 409 bp, Triticum aestivum
ggtccgaatatccgggtccacggggacatgttcgagagcatcgtgtgcccggccaacggcagcgtgaagctcccggcgacgagcgaggtgtttgcgtgcaccgtggggaagaagccgagcatggccaagtactacctggacgacacggtggacgtgatcaagatgctgcaggggctcgcgagcgcgccgtcgcagcagcggccgtggcccgtgcagctccgggtcaccttcgaggaaggaaacggggtatgagcaaaccgacgtgatgatgtcaataaccgatgaaaaaagaaggacgacgacgatgatgtcaataaccgatgaaaaaaggaggacgacgacgatgatgatgatgattcaggaagtcagttggtgtggttttaggattagctgcagttacaggataaac

SEQ ID NO: 443365 - DNA, 272 bp, Triticum aestivum
aggaaacgttgggcgacatcaatgcaaacgatttcacgttctgatgtagaagatctagatcctcaacgtgctgatgtatgttctttgctagatcgacatctcgtccatcgtcatatcaagcattaagtcgttcatgatggatatcatcgagaacctcaccagcgttgtcatggtgcttttttcgtaagcaccgaatctagtatcagatcataggagattaaatctccgtgcttgttcatctttcccggtaatttccccaactacgtattctc

SEQ ID NO: 443366 - DNA, 439 bp, Triticum aestivum
  unsure (1)..(439): unsure at all n locations
aaagcggcggtgaacctgatgaagctcacccttttccgccagtactacgtggttgtcatctgctacatttacttcacgcgtgttgtggtgtatgcgttggtgaccatcacctcgtaccggtacctctggactagcgtcgtggctggagagattgccacccttgcattctatgtgttcactgggtacaggttccggcctgaggtgcacaacccatactttgcgattgatgatgatgaggaagaggctgcagctgaagcactcaagttggatgatgaatttgagctatgagtactataatttggcggcctattccctgccagtgctacacaggtgttatatgtgcttctacaggacaagtgcttttcacaagacanatgcgatagactggtatctagtccatacccttttgtttttcatttgaagttagttaacattttgc

SEQ ID NO: 443367 - DNA, 295 bp, Triticum aestivum
gggtccaggcgaagcagaaatggaactggtggaactcacccttttcagcagtataagtgattatcatcagcaagatgtagatcacgcatatgtataatatgaacattaataagaatcacctcaatacgaggaactctagagaaacgtcgtagatgaagaagattaccaagcttacgttcaagatgttcactaagatgaagttacgaactagagtacgcagaccgagaatgacaatgggatgatgatgatgaagaagctgaagctgaagcagacgaatatgaataataagtttaat

SEQ ID NO: 443368 - DNA, 396 bp, Triticum aestivum
cggagcagaagaaggagatggccactattgctgtcggctggcaggtgggccagcagacgacggtggcaacaacccaatggaggacgaggcggcgccaccctcctcgccggtgcatgcggacctccccatcggcgagtcccgtgcgcactacacggacatgccacaggaggaggaggaggccaagttccagcaggcgtaggccgaccaggcctactacctccgcctcctcgaggagccccggcgtgcggaggagctgctcaccgcccgcacatccatcatgcctgacgtggacgtgcccaagcaggagacgttgctcgagtcctaccgctccgcacgcgagattcgtcacgaccgctggtggtaccgccaacgtcaggcggagttagaagccgccta

SEQ ID NO: 443369 - DNA, 131 bp, Triticum aestivum
  unsure (1)..(131): unsure at all n locations
gttgttggtngcctgtttgttaattgccngtttgcctggttgcctaattgctgtccggtgtttgttggttgttgttgntgttggttgtngttggttgttggttgttgttgttgttnttgttgttgncgttg

SEQ ID NO: 443370 - DNA, 64 bp, Triticum aestivum
tcgacggggcgaggcaaaccgacgaagggcggcaacacgtgatgctgggtgccagaggagacag

SEQ ID NO: 443371 - DNA, 397 bp, Triticum aestivum
tggcggaagcgtatacaatacaagtgaccaatatccgggatcgcgcaggactgactgggactcctctaggcgtcggacacgctatcaaactcttcatccaagagatcgccttcgtcaacatctggccaaatcaacaagccaggtgagtactatgaaagtactcgcaaggcagttcggacataagatataacaaatgcaaacatgaagcatatgaacaagttaaccagtgcgatcagacatagagataataaatactggatgccaagcgagggtctgaatgacgcctcgagcggaaactgcagaatagtaatactggtgccaaacgagtgtctgaaagactcctcgagcggaaaatgcggagtaataatacaggtgtcaaacgagtgtctgaaagact

SEQ ID NO: 443372 - DNA, 192 bp, Triticum aestivum
tgacggtggtgtcgctcttgaatggtggcagcggcatggcgcagttgagcgtgcggccaacgacagcaaacagacgggaaaagatgtctaagaggtagagtgaggcgagcgaacttgtctggtagaaggaatttggagggggtgctcacctacggcgacggttggcgaaaaacagtagagatggggctgtat

SEQ ID NO: 443373 - DNA, 79 bp, Triticum aestivum
  unsure (1)..(79): unsure at all n locations
gggnngnantgtttactcngnctggtccggtccanactanacgggtccacggcggaacaatgtaggaaagggaagtcgg

SEQ ID NO: 443374 - DNA, 235 bp, Triticum aestivum
ttatagtgtatctaaggtaatgcgtccgaaaggatcagccaatggagctttctgttcttctcctacctgggaacaactgcaactactgctgtgagtcactggatctagtgttagtgctgggtaacataccataacccgtttaatccttttgagacttgtccatctttgggctgaatgcaggaaccacatagtcaaaacctgcttctcacacagacggataacgcaactaacttca

SEQ ID NO: 443375 - DNA, 426 bp, Triticum aestivum
cgggaatcacctagttgtgtatgtgtctgtcagggcctgatgtgtgcgcacgcacgtgtaggttgagcacttgagcgtgagagtgtgtgttggtggtgtggtgtactggtgtgtgcatgcatgcgtgcgtgtgtgcgtgtgagtgttgcgtgcgtgcgtggctgcgtgtatacgtgtgagtgttgcgtgtgtgcgtgggtgcatgtgtttgtgtgagtgttgcgtggatgcagttcgcgtgcatgcgtgcatgtgtgtataatcaccacaccagctcctgtgtgttaaaacagacgactcagcataccaatacaaggccaccttatccgttgtgcccgcgatcatgacttcgaaccaccgtccagatattttttgtcgtttggtttcattcttaccagcaagatgcccgtgcgttgtatgtaacat

SEQ ID NO: 443376 - DNA, 421 bp, Triticum aestivum
cgggttgacgtgattgagctcgtagtagatgtcgtttgtcgtcgtcttgcacatgttgcttggaggtgaattgcccttcatgacgatgtgtatcacgaacgtgatggtggtcgccatggagatgtggacgtggacgacttgagcttgcatcttgtttgcgctccgaagacttgtaacttgaatgtcgccgccttgaggatgatgaaggggaagtagtgatgaggacatgactaccttggatatgaccaaaaatattgcatatatgcatatttgtcacgtgatttctagtgcaaactattcaataatctatttatgttatccagaacataaatacttcacacacttttgtgttttgtctaattgcaggtgtatgcgacatttgtacaatccacatatgaagataaggaagaaagatatgttt

SEQ ID NO: 443377 - DNA, 289 bp, Triticum aestivum
cagagtgactataattaaatatttgaaatatatgatgcatgattacccaaatcaatacgaactaaatacaataagaaagcacgatagcgggagagccacccaacaagcaccgcggccacgccgccctcttccggactcccctctctccctcgccctgcggccaacatggccacgccaccttcgttcgacctcccgtctctccatgccctccagccaccgcggccaggaatgacacgtcaccctcgtccagcatcccctctctccctcgcctccaccttcctatgtcatt

SEQ ID NO: 443378 - DNA, 436 bp, Triticum aestivum
  unsure (1)..(436): unsure at all n locations
gggtcgacgggggtggagagctcctcctacaatagactgtgtgcctctgatttntcttcagcattccaagttttagcagccatggcacttacgcttgtgttctcctctctcctcgttttctgtctcaatggcgtgagctccgattcaagctacttcacctccttgtttactctcggagattcctactttgacactggcaatttcctgatcatggctgatccggcgatacccgagtataatggcaacccaccctacggcatgaccttctttggccgccccactggccgcctctgtgatgggagagtcaccgtcgatttcatcgccgagcagtttggtctgccacttcttcaagcctccatgttgaatagctcggacgtgtctaaaggcgtaaattttgctgtgggtggcgcgacagcgatcgacatcgacttctatg

SEQ ID NO: 443379 - DNA, 203 bp, Triticum aestivum
aactttcttgacatttgtgtactctatcatgtgagttacggttcgggtcgatctacatgggcacagaaaatttctggcttaacaaggatgactgtgcaatgctctgtccactgcacatgaatcaatatacactcgtactagctttgaatcttctgctgtgaggctgtggtggattcattgatgcgttccaaaaatgagaaccc

SEQ ID NO: 443380 - DNA, 443 bp, Triticum aestivum
cacttccaccaaaaagatggccaccatctcatcgacagatcgggcccctcacctctgtcaagtggtatccaatttccaggttgctcggtgagattttacagctttttgtagtttagatcgactctgttcttcatacctatagctcacaaaaaagccaaaaaaattagggttcgttcatcctatccgaaccaatctgagcctttgcataatcttttctgtatttgctttgttgaatttgcggttgcatcatcgtgtcaagttgctcgtcttagcgtctagtcctttagagtttcgagttctgttcataggttgtcatgtcgccgctgccatatatcacaaccgcatcatcatcatcgatgctgccatataccacctccgcaccaacttcatcgccgctgccatataccaccaccacatattagtcgccatcacaccaatctgag

SEQ ID NO: 443381 - DNA, 409 bp, Triticum aestivum
attaatgaactgagtgagtccacgagatcatattatgcattgtctggtgtagctggaacagccgtatcaacaggaatccagattgcgcttggagagtccaacgaacggttgtcaacaccatgtgggaggcgatatcgtggtcgatgtgtgactgatccatcgacgcgtgcgatcccatatgagcgaaccacaaggccctctgaaactgggcgacgtataaatcttcgtggtgggaattttatgggtacatggcgacgaatccaagttggtagatacgcagtaatgcataacgatgggccttgatcatcatctgtgggatgcgggagacaatcacagtagcattataacgttgtagtggatggggagcttgcttcatggaggtgggtgaatgcaaactggggggtgctgc

SEQ ID NO: 443382 - DNA, 118 bp, Triticum aestivum
  unsure (1)..(118): unsure at all n locations
gtccaaaataccgggtccacggcaangaggggcaggacctcaggcaggagggcaccagctagtaagatgccccagtcgacgccggcaacagaaccagctacccagtagtccggggagc

SEQ ID NO: 443383 - DNA, 451 bp, Triticum aestivum
gggtccacggcgttgaagaaattgatctagcatggactccaagaaataatatggtgtcagatggatgtcgtggtggtggcgtgtgccgtactcctggacgtgaatgcttgttctggcccatgctaccctactactcctactacttactcctatcagtatatactatactattatcgaggattcgatgtgctggttacgtacaacgaacacattaacatatggctacagtataaacccgcccgacgcgcgatgcatgtgaagctagtactacaaatttagagaagtgactcgaaagccattcattaatttattaagtttatcacacgcatatcattttattacatacaacacgtcatcaagccacatcgacaacgatgatacattataaatactaaaattttcaccacacattagataacacgctatgacatgaacttcaacttaaccaatc

SEQ ID NO: 443384 - DNA, 295 bp, Triticum aestivum
agatggatgtcatttttttcagggatactagatgggtgtcgaaatcgtgtctaatatgctaatcgaacggatgctaagattgcgggtgcatgtggttccgatcgaaaatgccttgctcctttggttggacccgccgcttactatcggttccttggatggttgcctctgtcatttccatcttggtgtccatgtacgtgcatgcctcagactccttgtagtcctgaggccctttgaacggggcaagccactggggtagcgcaatcgtcacaattggccgtggcttcatagatgatga

SEQ ID NO: 443385 - DNA, 66 bp, Triticum aestivum
tgagacctagaaaaacccataagtaaatgctagcatgtcgagcatcagcatggcatggattggtac

SEQ ID NO: 443386 - DNA, 57 bp, Triticum aestivum
ctctccaatgttatgtcggtaactatcagatgttgagtgtcctgaaaactttctggc

SEQ ID NO: 443387 - DNA, 498 bp, Triticum aestivum
  unsure (1)..(498): unsure at all n locations
gggnnnnngnaacttctacntcggtcgtcccggtccacaaatncccgggtccacgggaaggtttggaacctcgatgtcggctcttcgccacctggagctgtaggtggttccaagggttgggctgttcgcccattaatgcggtacgtgagctgggttcagaacgtcgtgagacagttcggtccatatccggtgtgggcgttagagcattgagaggacctttccctagtacgagaggaccgggaaggacgcacctctggtgtaccagttatcgtgcctacggtaaacgctgggtagccaagtgcggagaggataactgctgaaagcatataagtagtaagcccaccccaagatgagtgctctctcctccgacttccctagagcctccggtatcacanccgagacagcgacgggttctccacccatacggggatgggagcgacagaagtatggaaatangataaggtancggcgaaacgagccgtttaaatangtgtcaag

SEQ ID NO: 443388 - DNA, 442 bp, Triticum aestivum
  unsure (1)..(442): unsure at all n locations
gggtccacggcttgcagctacagaacacatatcacagttcaatgaggaagcacgatcaccttttgtaaagaagtacaagactatcattcaccctggagaggtaaaccgaatcagggagcttccacagaacagtacgatcatcgccactcatacggacagtccagatgtgcttatttgggatgttgaggcccagccaaatagacatgctgtcctangagctactgattctcgccctgatttgattttaagaggacatcaggaaaatgctgagtttgctcttgccatgtgtccagcagaaccatatgtgctctcaggagggaaggacaagtctgtggtttggtggagcatccaagatcacatatctggacttggagactcctcanaaagtgagacttccccagggggatcaggcatcaagcatagcaaaactgcaaatgaaaag

SEQ ID NO: 443389 - DNA, 428 bp, Triticum aestivum
actgaggaatttattgaatacgagtgaagagaggggtattgggatgctgactttcccaaaagtcatcgttcattgctggtgtagtgcatccaatatccacatcttcatcttctttttcaatttcctcaacaccagcctcttcagctgtgaactgaggcatacgtgaggaaatgactggcattgaagggaatgcttccacttcaatttcttcatcaaactgttctgaggtagtaacagaatgattttcttcatcagatccgcttgggatcttgtagtcttcttcataaggaacaatttccttaaacgacatggacgaaatgggaacgacatcaatacgattttcaatcgagctggtcattggcttcattttcttcgcgaccgaagaatttgccgcagctgatgccttccttttcttcacagcagcacct

SEQ ID NO: 443390 - DNA, 319 bp, Triticum aestivum
ctgcaaggcagaggctgatgacggatttcaaacgactgatgcatgatcctcctgcgggcataactggtacacctcaggataacactataatgccgtggtatgctgtatattttggtcctgatgatactccctgcgatggtgtgtcgttcatgctgatacttcagtttactgaagattatcctaaaaagccacctacagtccggtttgattcacgaatgtttcatcccaatatttatgcagatggcaccatctgtatagatactcctcttcaccactggttcccgatttattatgttactgttatactgtaatccattca

SEQ ID NO: 443391 - DNA, 183 bp, Triticum aestivum
gggtccacgggcggtgtgtatctttttcaggtgtttctcttggctgtccttcgcgtggtctccgtcctgttgctgtgcatgctcaagaccctcccatggttgccattgtgctacggtgagctttgggctcttggtgttgtcttggttcacctttgctcaatgatgacacaatgatgcctcccc

SEQ ID NO: 443392 - DNA, 390 bp, Triticum aestivum
ggggcactacttgtatctatcgtcccgttcatgcctagctatgggcgtatcacgacatcgctaattgagaggcaccccaatttcatttgtaatttcatgtcattattttctgtctagtaatcacttttgcaactaccctatgtttacacgtgtctttacatcttacttactgtttgtgccatgtcaacactacacgataacctatcatcatagtctgatttaattctgcagacatacagatactttgcactcacacaattacttctgttaaatcccacacatgtgaggttgccttgattctttttacttccaatccatagactcattttccacaacttcccacattgttaggatttgtacagatccataaatttacctcagttacagatt

SEQ ID NO: 443393 - DNA, 439 bp, Triticum aestivum
  unsure (1)..(439): unsure at all n locations
gggtccacggccagtcgaggaaccgcagggtccttcggaatctaagcatgatgattcaaatggggcggtcagaccagaagctgcagataatgaaggggcgatcaagccagaagctacggtggatgaaggagatgggactggtctgattgtanggatgtgcacagatgtacagaaaggctacttccgtctcacggggcctccagatgcaacaaagataagaccaaagcctgtacttgtagaagccctgaagtttgtccaggtctcaagtaaagactataattttaaaacagatcaactgaaatcaattcgtcaagatatgactatccagaacatagaggatgaactttctgtgcangtttatgagtatcatgcaagacttgcgttgtgcaatcgagatatggctgaacttaacttgtgcctcacgaaactgcactgcctc

SEQ ID NO: 443394 - DNA, 424 bp, Triticum aestivum
  unsure (1)..(424): unsure at all n locations
atagacgatgatttatcatccatttgcaaggatatcttagtgggtgtcaacttacttaattcaagtctacggtacaaggaaagaggcataacactaacaccggctcctaaagcacataaagcagttttaacataattcctttttatggagcatggtatggtgggtactccgggatcaccaagtttcttaggtattccatccttaaaggtatagttagcgagcatggtggagatttcagcttcatgtattttccttttattagtgatgatatctttcatatatttagcataagggtttgttttaagcatatcagttaagcgcatgcgtaagaaaatacgtctaatcatttcagcaaaacgctcaaagtcctcatcatcctttgtcatggatggtttacgangaaaaagcatgggtttctcaaccc

SEQ ID NO: 443395 - DNA, 401 bp, Triticum aestivum
ctgattgcaataattccctagaaaagtcagaatgtgataaaatgttgaaacattttgcatattaatctatgataaatttactacactgggaattttctttaataatttttgcagctaagtaagtatggatgttgctgcaatctttacatactgtcgtgtttatgcagaatgctgttaggtttgcattgtttgcatatgtttgcttcgtaagtgattctagttgaggatatgactattaatcaagcatatgcatttaatatgcaatgttgactaataattttactgatttgctatactagagtatgataatgttttggcaatggtttatactaacttatctcacgagtccttgttgacttttgtgtgcatgaaccttttgagatttagggagaccttgatat

SEQ ID NO: 443396 - DNA, 512 bp, Triticum aestivum
  unsure (1)..(512): unsure at all n locations
tgnnnnngnaacgtcnagttgnncggcccggtccagaatnaacgggtccacggggattcttgcaatttcactgcaggcagcgtagcaattctcgcgggaatctcggtcttgtttggggccgattccttaacgaagagcctagtccaaaagcgcccataaaaagagtaaatcgttttcggtatgggtacgctggcccctacgangggcggtaagcaaggtagagaccagggagcangaccgcgaagggtcttcccatctcttcttgttattgtctttgtccgagatgcccggttcaccaaatgagaattcaaatcgagattgtgtgaagtaaagatctttttcttgaaagcggatttctcccttcaaaatatcatccatctaatttgttaaagtatggaattctcaaccaaagctgcggaacttacgactccaataaaaaagtagaatgaccaacttttacacgaatttcaagttggattaaattcgtcccaatgggccncaanttggnaatg

SEQ ID NO: 443397 - DNA, 270 bp, Triticum aestivum
cggggataaactagtgctaagacaagaaactaaaagattctattgcagcatctaaagatataccttcaggcacacacctccccggaactggggcccgaaacttcttgatgtctactacacaaccttcttcctgtgcacgttgttgggcctccaagtgtagaagtttgtccgacagtatcaccattcgcgcaactggcagacccaaggtttgtaaatccgtcgcaggtgaatcatgaagacgggctctctcaaacaagcatgcaaccaaat

SEQ ID NO: 443398 - DNA, 174 bp, Triticum aestivum
ggcgaaataaaatccatgataagtcacttaacggtaatgatggaacagcatctatatatttgatcaatacactgtgggaagatgtcaagactaagcttggagatgctgcttcctctggtaacgatatgatagattctacaatgaagcatgctttgcgttcgaatgattatagct

SEQ ID NO: 443399 - DNA, 213 bp, Triticum aestivum
  unsure (1)..(213): unsure at all n locations
gcagcagctcatcacagttgctttctcatgctaattcgatctgggacctctcnaacctatcgatggctgcagacatcggaagtccggcagttccctcgctctgggtctctcaacagggcacgcggtcggttcgcataggtcgggataactcgtgtgcttcgatgtccttcgtaaactgaccatatcttgttcactccgtgggtatatctgcgt

SEQ ID NO: 443400 - DNA, 348 bp, Triticum aestivum
agtgccaaccaaggggtcaactccggggaagatgagaagagggaacctggtcctcctggagcagcagcggccagtgctaatggattccaagaaagcggcgtggaggagcacaacctgcctgacagcccctttgcatctcccacatagacgaatgatgctgctgctgcttcttcctctgcaaaaccagcccacgctggtaccatcattggcaacaatagcagccctcatctggtggcctcgtctctgttccctcctatgccaactgcccttgagctgcccccatacaaatcctgcttcttccaagtgcccaggttctctcctggccatggatccatcgggctgtaaata

SEQ ID NO: 443401 - DNA, 100 bp, Triticum aestivum
cgctcgtgatcgtggaggcaggggagcttggagcctcgggcctggatcgatggatggaatgggtggagctgctggctagatgggtggatcgaagagagcc

SEQ ID NO: 443402 - DNA, 445 bp, Triticum aestivum
atcacctcgacagacgacgcctgaattcacagaccatggccatcgcccataataatttgtatgtatataagagaaatctgtcataaacaaaagggatttcacctttacacagttaatacaaaagaatgacctaaaatcaaatgcctctagattaaacaaaaatcgagaacagaattgttcacccatcagcatgaaaggaatggtgtgctttatacagaaaggaatgatgtgctttataaaagtgagcacactacatggatgcaatggtcgtgtggtgataatctgcatcgagattggtcattcatatttcatctatgatctgtaaatagtcgaaaaagaaattccacttcaagatgaaaaacacaatagcatgggtattgaattgcaagatgggccttgtttcaaaactaaatcacatcccaatggtggtaatggtttcccttta

SEQ ID NO: 443403 - DNA, 202 bp, Triticum aestivum
ggggtgagggagttcgaggggcagcagcacggcttcttcaccatcgacccatggtccgccgcgtctgcggagctcatgcgcgcgctcaagcgcttcatcgacaccgacgggcgcttcgactagatccgttccatcgcctccgactcctcagtctatgtctttctgctgctttaccaagtctacagatggcattgcaatatcg

SEQ ID NO: 443404 - DNA, 372 bp, Triticum aestivum
gacgccaccagtcgatcccttccttctgccggtgcgcgtcgagatccgttaacaggcgcccccctccggctccggcgacagagagggaggccaccgacggcggccggcgaccgaagatgttccttgtggactggttctacggggtgctcgcgtcgctcggactgtggcagaaggaggccaagatcctcttcctcggcctcgacaacgccggcaagaccacgctcctccacatgctcaaggacgagaggttggttcagcatcagcctacacagtatccaacttctgaagagctgagcatcggaaagatcaagttcaaggcatttgatttaggaggccatcagattgcccgccgtgtgtggaaggattactatg

SEQ ID NO: 443405 - DNA, 428 bp, Triticum aestivum
tatgtggccggtcagtagggtgcaatatggtgctctatgatgagctagtgatcgtataatcgccgcagaactatttctagtgaccttaaagagcgtattgttacatactttgaccttctgtgtatttttctcatttcaaattaagccatattaatcagaaaggacgcagtatggactactactactagtactagtactgctttgatgtgtcccgtcaactcgccgaacgaggagaagcttgcttactacgcctctccctcgcccacgcacgcggtggttcgcaggacgaggagagggttttgactacagcaccctctccctctccctcaccctcgccctcgccctcgcggtggacgtgcaacagttcaatcggtgtcagattgccagaagcatattgtactgtaatatcatcattgttggaccttccg

SEQ ID NO: 443406 - DNA, 245 bp, Triticum aestivum
aggctcaaagcttaggctgcgacagatcttatcccatactgttaccagctttttttcttgctttgtggcagattgtttgggtatccgtttatgcattgcaattgcaactctgagctgctgcgaatgttccaactgatgaggtttatgcattttgaactttatagtaatgctatttgcatgccttcatgaataaagaactcacaaaacaaaaatacaatcaaaaaaataaaaacctgactaatatt

SEQ ID NO: 443407 - DNA, 353 bp, Triticum aestivum
tttcctcatcttcttcgcctcctctcctcttttttcttctgcatcttcctcttcttcttttttcttctcgtcctcatcctcatcttcgtccgttcgtttttcctcatcttcggctactcatctcctggttacgtcttctacgtctttccgaaaattgaagtaaacggaaatgtaaagctaaaactaaaactatggctaaaactaaaacgaaatcgaaggtaaacatagaccgaacactaaaaatacagattgtaaggaaaaaacgaaatctaaagctaaaactaaagtaaaactaaagctaaatgtaaaactaaacctaaaactaaaattaaaaggaaatcgaaactagacat

SEQ ID NO: 443408 - DNA, 358 bp, Triticum aestivum
atatgtatgggtatgatcttcatgaaacgaatgaacaacctataaagactatagaaaaagagatatttgcatcggagagcaggttgattggaatctgaaaattgtattaccttcttccagtaatcatgcacagcagccgaaaaccatgattagaatacatggacgggggcacagtcaagcttgggtctgattcgtttgccatatagggcgccaggattgttttcctggccattcagcagttgcaatttcggatcccagagtcatgtgtggcatccatgaaggatattgcgtcgagcagttgcacttttttctccatatacgagatacgagattagacttcaaaggcagcgagcgcact

SEQ ID NO: 443409 - DNA, 415 bp, Triticum aestivum
accatacagctccgctttgaagacgggcgaccgcattgcgagcacgatcttgtgggcaggaaaagcctctccttcaacctcgagaaccacgtcggtgccatctttctcccgcaacaactttccaagatgctccgcgatgtcggaaggcggcaccttagcaatcgacttcacatcgttgacgagggcgatctccgcgacgcactcgatggtgaggcgatcatcgcgaaggtaaggcgacccttccagctcacttcttttcatgaacttgtgaaggccgacgcatgttttatcggtggtattcagctctgttgcccccgttgtcaaggtacgcggcggcgcagacccggtgacgtccaccaggctgagctggaaggatgccctcacgctgatgtccttgttcttgctctctaagaag

SEQ ID NO: 443410 - DNA, 364 bp, Triticum aestivum
gggcgacgagggtttctgcgctcgaacaacccgggacccggcggcgaggaagagagagcggcggagatggcggtgatggacacggcgttcaaggcgctgacggcggggctgggcgtggcgacgctctacctggccggctccttctccttcaacgtctaccgcggcctcgcctggcactccgagcaatccaagctagaaaaagaaaatgagaagagccaagattgagagggaaggacggcaagttagtgtcggacattaccaatcaaaaggatctgcaagaaatctcatcttttgatgatgagtggtcattcgtggttgattttcggacagttcctttgatgtaatatagattcagggatttgga

SEQ ID NO: 443411 - DNA, 445 bp, Triticum aestivum
  unsure (1)..(445): unsure at all n locations
ctcgtttaaaagaatatttttggtgtagaaagtctcaaattcaggatcttccgctgcatggatttcctgggaaacaaagtcataggcacgtaagttcagagccaagccaactacgccaatagcactcatccataaaccggtgacgggtacaaatagcataaagaaatgtaaccaacgtttattggaaaaagcaacaccaaagatttgggaccaaaagcggttagcagtgaccattgaataagtttcttcagcttgagttgggttaaaagcacggaaggtatttgcaccatcaccgtcctcaaatagagtgttttctacggtcgctccatgaatagcgcatagcagagccgcacctaatactccggcaactcccatcatatgaaatgggttcaacgtccaattatgaaatcccttgaaagaaaaggatgaatcnnaatatcccggc

SEQ ID NO: 443412 - DNA, 369 bp, Triticum aestivum
tcacttcaccaggccgaagtagctactaggaatgggttcggttggccacagctggactatgacgtccttcatggccaagtcggacatcctatgcagctccgccagttgcttcatctggttgttcaaaagcaccgggtgttccggtgccaggaactgtgaccagaagagcttctccgttgagctcccctcctgtgctcggaagaactatgcggtgtcggcggcactcctcggaagatccgcaaaggcatttggagaactccacagtcgagtgagcaaggcatatatttgacccccaaaatagacaatgcaagagaaagggcttaccagccgcgatctcctcccgagcactccaggattaggtgcgcgcct

SEQ ID NO: 443413 - DNA, 404 bp, Triticum aestivum
tttggagctctagtcttctcaggcttcatcgtctacgacaccgagaacttgataaagcgccacacttatgacgagtacatctgggcgtctgttgagctttacctcgacattctcaacctgttcctgaccatcctacagatgctcaggcagaatgacaactgatgggtcctgtctgaaccaccaggaaccctgtgccaacccaggcatatgtcctacatttatcaagtcttttgaattgctatctacataactcggaagacatggtagtgagtttttgccatcatccagagatgaggccaaagtacaaccatatgtataggcgttctattgtgagtttatgtgcctgagtgttgagtgttgttaaactgccaacaatcagtgatcgtatgaaccgttttaatgcc

SEQ ID NO: 443414 - DNA, 427 bp, Triticum aestivum
gctggagttaattttggctttcccgcgaggtgataagttttgttatgtcctaaggctaatgtttccctgcactaacaatgcagctaaatatgcggcttgattccatggcctcaggatggctaaagagatgaacctaagctgggtcaggtgttttggcgattaagatctagtggcccagcaattctcaggaacttgggattccaaggacccgctcattgtggcttatcgctgggcggttgatgatattgttgggcatttcaagggttatcaggtggaacatattggtcgcaggaaaaaaatgacgcggctgatgctttaagccggttggggtctcagcgtaagccaatgccacctaatgtctttcttgatgttctgagtaatccttcagtttaattgcctacacaagaggatcttgctatccctgacc

SEQ ID NO: 443415 - DNA, 185 bp, Triticum aestivum
cggtcctacaatccgggtcgaccgggtgcaccattgagtatcctcaaaacaaacaatatcaattgaaaatatcctcttcttttcttctgccggttgtattcaagaaataaatccctcccttgtacttcactaataatcatgtacgtgcaatgcacgtattaaataatataaataaaattaaggac

SEQ ID NO: 443416 - DNA, 437 bp, Triticum aestivum
caccatatccagcccccaagtagcaaatgaccaagtgattggaatcatccttagctcttgagctggaacatgagctcggcgtgaaaatttctaacaagcatcacaccattttatcaagtcctcagcatcagcatgagccgtcagccaatagaagccatgacaaaaagctttagcaaccaaggattttgaaccggcgtggtgaccacagtctccttcgtggatcttatgcagaatctcacagacttcttcaggagaaacacagcgctggaacacacccgagacactgcagtggtgtaactcgccattgtgaatagccatggacttggatcgccggattatctgtatggccaaaacttcatcttctggtaactcgcctcggttcatatatgccgaatatggaaccgtccaatccggaataatatccccaacagtatatg

SEQ ID NO: 443417 - DNA, 98 bp, Triticum aestivum
aggatgggaatctagcaatctccattgctgatgttgtagtatctgttaatctgcagctgacgatgtacattctattaatgaaccattctttatgtgac

SEQ ID NO: 443418 - DNA, 404 bp, Triticum aestivum
atcttcagccccatcaacgaatcagtaaccgcttacttcccctcatcagcaatatagtgcctgcaaagtttcgaccaactggtccatctgttgttaggcaggattttttgctcggttgaagctagcagtttaccacttcaaatttagagtcttgaatctcaaggcatgtgagaactgagtttggttctccatttagtacagttgaaaatgtttgttttggctgtgtggcaatgccgtagcgtgtttgataattaggtgcaacttttaagatgactgaatgccttgcctgattgtttttttacctctgttgttatcattgctctaaattttaggtctgctcacgctgcatatcttataagttttgtattgtctgtagtatttctcaatcaagatgttcgaaggaa

SEQ ID NO: 443419 - DNA, 428 bp, Triticum aestivum
ttgtagatgtctgtactcagacatgttaagctttcgcatgtgttttaacttgtatgctatgaatgttgggtcatgagacccgtgtttgtattatctggcaactcggagcctaatgaataaatactctgagtcatagagtcttgttgtgatgccatgttgtatttgcacatatcgagcatattgtgtgtatgattggaatgcttggtatgtgtgggatccgacaacctagttgtttatccttggtagcctctcttatggggaaatgtagtctggtgcttccactgagccttggtagtctgctacagcccggtttaccggagtcctgctagcccggtactactgctccggaacacttagactggccggcatgtgattcactttgttcatgtgtctatcccttcaaggaaatgtcacgcggtgacttccgg

SEQ ID NO: 443420 - DNA, 255 bp, Triticum aestivum
  unsure (1)..(255): unsure at all n locations
acgacaacaacaacaacaacaacgacgacaacgacgacaataacaacaacaacaacaacaacaacaacgacgacaacaacgacaacaataacaacancaacaacaacaacaacaacaacaacaacaacaacaacaacaacaacaacaacaacaacaacgacaacaaccaancaacaacaacgacaacaacaacaacgacaaagacaacaacaacaacaacaacaacgacgacaacggcaacaacaacgacgacca

SEQ ID NO: 443421 - DNA, 322 bp, Triticum aestivum
ccgggtcgaccggggcgatcttcccagctacgctggaaacaatttcgaatgtggggaaggttgtcgagagcctttacatgaggtcagcaaagatcatggcctgaggagatgttttgttcttacccggcgtctccagttaaatcttacacttgagctctgctagtgtctcgaggacatgaaatctctgcgtgttgccattgtttcttccttgcaaattgtcttctgttagctctataaaatttctagcctcgtggacaagaagataccgttgtttctgcgtgatggaaatacagttagcacttgctgatatcaaccatttccg

SEQ ID NO: 443422 - DNA, 387 bp, Triticum aestivum
cccgttcacgtccatcttcctcatcgtctactgcttcctgccggcgctgtcgctcttctcggggcagttcatcgtcaaggagctggacgtgaccttcctcacctacctgctggtgatcaccctgacgctgtgcatgctggcggtgctggagatcaagtggtcgggcatcaacctggaggagtggtggaggaacgagcagttctggctcatcggcggcaccagcgcgcacctggccgccgtgctgcaggggctcctcaaggtgatcgccggcatcgagatctccttcacgctcacctccaagtcgggcgccgacgacgagaacgacgagttcgccgacctctacatcgtcaagtggacgtcgctcatgatcccgcccatcgtcatcat

SEQ ID NO: 443423 - DNA, 390 bp, Triticum aestivum
cgggtcgaccgggaggacgacggcacgagggaggtcgccgggttctgggggtacctgctgcagatcatctatcagacaaatgcaggggccgtgatgcttacagactgcgtcttctggttcatcattttcccattcctcaccataaaagattacagcatgaattttctattgataggaatgcactcggtcaacgctgttttcttgctcggcgaagcatctctaaatagcctgcgcttcccgtggttccggatcacgtatttcttcctttataccgcgctatacgtagtcttccagtggattgttcatgcatctactccaacctggtggccctacgcgttcctcgacctctcctctaatctcgcgcctctgtggtacgttgccgtcccgttc

SEQ ID NO: 443424 - DNA, 426 bp, Triticum aestivum
ccgggtcgaccggcttccatttacacaaggagtacttctgatgggaagaagcattgttcttctgatctgcatagcgttaggcaccggtaaagaaggaggaattttttgcacagaaacaaagcaaactgacctctctctcttcctgatctggaactgtacatagtataaagaagaacagcctgttaggggagggtagttagtgccatttatatattattaacaaaaaagaaagtaaagcaaggctgctgtatccaaaaggagaaggaaggaggcagggtaaagagttgggttaaatttcagatatactaatatacatgtacacagtatagttttaggtagttacgtatgaaatgctagctaaagcatatttacaagggccggatgctgccattctgaatgtaaatcttccgggcattcattcaggtg

SEQ ID NO: 443425 - DNA, 431 bp, Triticum aestivum
cgggtcgaccggtcctaggtctgacagtctcatgaagctcaggaaggttctacatggccgaagggatgtcctgcaagatgcatctggcagatcaaaaactacttgtatccctggaggtgttgttcgagcagaaagataaagcgtgacggcagctggggcgtacgaactagcttaggcacaatgactgaaatacaagtttttctagaatcatacatgtgagtgacagagaaggaacaccatcttagcttttagattttaacaaattgtggaacctaatgatgaattgccaaacatgattttgaattttaacaaattctttacttccgaattaaatgaacctaataatgatgtgctagacaaagtacatgtcagtctaactatgggtatgaatgaaatattcttcacgccatatatacttgaagaactaaaaa

SEQ ID NO: 443426 - DNA, 363 bp, Triticum aestivum
  unsure (1)..(363): unsure at all n locations
gccacatcagatgagatcctcaaggagatcgcgaggatcgacgccgccggcgtccagcgccacgcggcgagcatcaagcaaatcaccgatctcgcgaccaaggtcatcggctacacggaggctgtggcgacgaagaaatacgagaagacggtcgaggttangcagacgtccctcaaggtccctttgctggtgctcgccgccgctggtcatcgggtcaacttcactgtccttgatccactaccccggaaggaccgccgtgaccgacaaggccaagaacctggtgaataagaagaccgctgagatcaagatgtccttggaggacaacctgatgaagatcctgacagaggacgaccaggtgggcat

SEQ ID NO: 443427 - DNA, 429 bp, Triticum aestivum
caacaatgaccaagattattaaggagatgctaccgcctgatgttcgagtagcaagagatacacaagatcttcttgttgaatgctgtgtagagttcatcaatcttctttcttcggaatccaatgacgtgtgcagccgggacgacaagaagactattgttcctgaacatgttattagggctctgcaggatcttggcttcaaggagtacgttgaagaagtttatgcagcctacgaacagcacaagcttgaaactctggactctccaaaagcaaccaagttcactggtatagagatgactgaagaagaagctgttgcggaacagcagagaatgtttgctgaagcccgagcaaggatgaacaatggagctgccaaaccaaaggagcctgcattagaaccacagaatcaaccccaacagcccccacaacctcaac

SEQ ID NO: 443428 - DNA, 435 bp, Triticum aestivum
gaggtagcattttacttatgttaagtcatggactggtttcttcagccctttttctatgtgttggtgttctatatgaccgacataagactcgacttgttagatattatggaggtttagtgagcaccatgccgaatttctctaccattttcttctttttcactttagccaatatgagtttacccggcactagcagctttatcggggaatttctaatcttagtaggagctttccaaagaaatagcttagtagccacattagctgcgcttgggatgattttaggcgcggcgtattccctgtggctatataatcgtgtggtttctggaaatttaaaacccgatttcctctataaattctccgatctaaatggcagagaagttttcatatttctaccttttcttgttggagttgtttggatgggtgtttaccccaaagtgt

SEQ ID NO: 443429 - DNA, 360 bp, Triticum aestivum
ggcagcacctgctggaaaggcggcccagactgcggcggcggccaagttgccgacaaaatctgctcccccggcgcaggctgggagggatgcgaggagcggaggcccaccatcacgtggaggatttggccgtggtgaacctggccgcggcagaggtggcggccgatacggccagaaccgtgactttggcagtgagaacacgaatggctaccagggaggttatggtggggtaggttctggagatggcgctgtaactggaggcggggatggggagagaggccctcgaccataccgtggaggcggtggtagacgtggtggttaccgcaacggtgagtttggtgatgactctgagagaccacctcg

SEQ ID NO: 443430 - DNA, 404 bp, Triticum aestivum
tgggccgcgacccagtacctgccgccagtgccggattccacccattggcggatgcacttcgacagctcaaagatgcgcaccagtttgggagccggcattgtcctcgcctctctcaaaggcgacaagctcaagcacacgccgcaaattcactttgccgcctccaacaacgtggccgagtacgaagcgctcatacacggactctggctggccaaggagattggcatccgccggattctatgctatggcgactcggacttggtgctccatcagtcgtcaggcgactaggtcgccaaggatgcaaacatggcgagctaccgcttcctcgtctagcagatcagtggacacttcaacgggtgcgagttcctccatgtgccatgggccgacaacgagcaagctgatgccct

SEQ ID NO: 443431 - DNA, 428 bp, Triticum aestivum
cggtccgacgatccgggtcgaccggggtgcgagcaatgtgacagtcagtcatgccagcgcggtcaatgaggtcggagaggtactgacgttgtgagagaaacatgccagcagaggagcgcgtgacattaatgcctaagaagtgatgaagagctccaagatcggtcatggagaattctgaccgaagagaggttataagagagttaggaaggcagtggaggagcaggttaggatgatgtcatcgacatataagaggaggtaagcggtggcgttgtcagagtgataagtaaacatggaagagtcagactttgaagagaggaagccaagggtctgaatgtatgtggcaaaccttgttggaaatatgccctagaggcaataataaatggttattattagatttctttgttcatggtaattgtcgagtagtcatg

SEQ ID NO: 443432 - DNA, 413 bp, Triticum aestivum
ccttatctttctttcataaaaaggaatgaatggctcggctagatggaataaccgagccagaacagaaaaaaagtagaacaggtataaataagaaaatcttagttaagagggttcatgtaaagaacaggttccaaatcacgatcgattcccttttcaaaacctgctgcagcagctcgggctcttcctgcatgccataaatggcccacaaaaaagaagaatcctagaacaaaatgagaagttgataaccaacttctaggagagacataattaactgcattgatctcggtagctacgccacccacggaatttaaagagcctaaaggagcgtgggtcatatattctgctgagcgtcgttcttgccaaggttgtatgtcttttttcaacctactcaagtccaaaccgttggggcccct

SEQ ID NO: 443433 - DNA, 437 bp, Triticum aestivum
ggtgacgaagacgaaagtgggggcagttcgagcttgtcgctgccggagaccctggagaggtgcgcgaagagacctggttagatttgttggccaccactggtaaactgcactaataacaaatcggatgtcatctctcatgttgcggattcaaccctggacgatgttgcgtggcctgcggccatggacgatgtgctgttggacaacgacacaaggccgaggcagccaatgcgaatgaccactggaaatcatttacctttcaatcttggaaggccctaagctgaaggagagcatcaattgtcatgagagataagcaatatctattagacatgcatactatcaggctaacgcaaaccactcgggaatgaagtatacttaccgtaactttctatgtgttgacctgagttttcctattagtaaaagaaacattgcattttttt

SEQ ID NO: 443434 - DNA, 404 bp, Triticum aestivum
  unsure (1)..(404): unsure at all n locations
gacgacgacgtggatgtggacgagtcggatagaaagctcttagatgatgaaaagagacccgatatcacgaaacgaccacacactcctattggagatgaggtggaatgcaagaagccaaagatagcagaaggctcaaggtgccaaggagaagaacctgaggctggagggataaagaattcctcctgggtctgatgacaggggaatgcagtaaacaccagaagcatcaaaactatgatctggaacagtatcctgaataaactattttctggattatgaatgaattctgaagcatggggctataagtgaattatgtaacatggatttgtaactatggtggatgttaagttaacgttctatcagtacaaaanaaaaaaaaaaaaaaaaaaaaaaaaagcggccgctct

SEQ ID NO: 443435 - DNA, 323 bp, Triticum aestivum
ttttatgtacatcgctagacaacttacgcaggacttcatagttttgtaggatttttaaagttccagagctagtcgaaagttacaaattgctacaaagtgttctttatttgacagattcagatctttcgtgtgttgattgctgagtttcacgaatctatgagcactaccagggggtatcaaccatagacaccttcatctatatcatgttcaacaccatcatcgataaatcatgcattcagtacagtaccttatgtggtggattatcattcctgcactaatggagcttacgatatttcccgtctacttctgtgatctcaaatttt

SEQ ID NO: 443436 - DNA, 361 bp, Triticum aestivum
tggcagaggaagacaatcgaaaggggacataatgatcagatgcagttcgactctagatataacgtacaaggtctaacaggtgggagtcaaaaatgaagataccaacaacttggttatcgagctgctcaggcgcctcaattctcgggacggttactaaatatacagatctgttgagatatgtgggatattgtgtgaattaatgacacgtgacatcattgtgggttactacaaatcgagaagatgatgccatggcgggttatgagtgctcacacaaataaagaagggaagatattttctaaatgttgaagattgacatgaaccagttcaaatcaacatgggtcctaatgttggagatataact

SEQ ID NO: 443437 - DNA, 259 bp, Triticum aestivum
tgtgaatatcatgaattgtttgtgatgtgtcgtattcgcacctctgtagatttatctgcaagcagtggtggtgattagtcatgttacccatatctgttactaataaaacacaagggctgtgtgggcaaatgtatctttttagtggttatgattatttgttgggagattggttttcaatcagattcagaaatcatggaaatacctacgttttttgtactctatcactatgaatgctgaattgtcagtggtaccattttgt

SEQ ID NO: 443438 - DNA, 320 bp, Triticum aestivum
gatagtaagccactttcatgcctataacgctgaccaaagccatggacacaagatccaacatgacgatcagtaaagcttgactatgtacgaccgcatgcttctgtaggacatgcatgatcgatccgtgcccgcaacaagttgattctcattcctcatctctcaacttgatgcttcactagtattgattactcagtacttatctggaaatcctagcattgacgatatatcaagcaggttgctcatctagagcaaactgggcattacttaaccgtaaaggataatcaggttgtccatcttcatccctcgaattgcatgggcca

SEQ ID NO: 443439 - DNA, 352 bp, Triticum aestivum
cgggtcgacgggaactgttagtcacagcaaagatagcaatttgctgtttccattggctgataaaatgtattggtttcgatttcatggtgtatgtaatccttcatacttcagtttgtcgcggaggcaacgtaacgatttccactagaaagattttgtgcagaatgtttcgctggtgtaatgtcacttgagatgccaaaaaaaaaaaaaaaaaaaaaacaaaaaaacaaataaaaaaaaaaaaaaagaagaaaaaaaaaaaataaacaaaaaataaacacaatacaaaaaatcccccttaaaacaacctgaaataaaaataaacaaagaacaaaaaagagggcccccccaaaga

SEQ ID NO: 443440 - DNA, 91 bp, Triticum aestivum
aaagagagggcgaataaaacggcaagggtgaagtgggggagaggaaaacgagaggcaactggcaaataatgtaatgcgagggagatgaggg

SEQ ID NO: 443441 - DNA, 92 bp, Triticum aestivum
gatttgtcaaggttttttagcgtaacaagatcatgtgatgggtgtcgaaaacaaatactgcattgtttatctaattaattatgattatgatc

SEQ ID NO: 443442 - DNA, 373 bp, Triticum aestivum
  unsure (1)..(373): unsure at all n locations
cggtccagnctatccgggtcgacggggagggtcactgagtacagcttgctcgcgttcggcattgccgtttcaccacgacgactgctcaattgtcttatgaagttggtctgaactgtacctcgtcgatgtagatcagtatttggagtttgcgtcatttgagtgtgttgcgtcggatgtaattcaaggcacagtggatcagtatgtggagtttgactcatttgagtgtattgcgtctgatgtaattcatggcatagtgtgatggaagactcgtgatcacactgacatgacatggctttgttgtctgatacaatttgattttatatatcaaaatgaaaacatgtatatcgtgttttaagtattgtataacatgcat

SEQ ID NO: 443443 - DNA, 331 bp, Triticum aestivum
cgggtcgacgggggactacacctacaacacactgggtcaaaatgcagtgccaccgcagtgagaagcttatgtgcgacaggtgatgaaggaagagcatgcatggctttgttggaagcacctgtgcagcatatttgtagtatctggttatattccatggtgtaatgcgcactatataatttgtgcatccagccaatctcgaactcattgtacatagttccatcattagtgaagatcatgtatgtgtgaccctggctggctagttggaaaggacttgttgtcaacatttcgttggatgtttgttaagctagctggtgatagcagtttatgatgt

SEQ ID NO: 443444 - DNA, 274 bp, Triticum aestivum
gagttccaagagtttagtcaacatgtcaggtgacatatggatgccaatgttgactgtcagtaagatggactttgtgctcgtcaggatatatgaccgtcctccctggtctgtcaaagcagggtgtatatcctgtgatcattttggaaacgcatatattactacaaaaactaccatgaaatatactttcgttcatgctatatattggagcctgagatagtgcagagtgatggtaatgcagtgtcagtcacacagaggccgctgaacggcacctatc

SEQ ID NO: 443445 - DNA, 434 bp, Triticum aestivum
  unsure (1)..(434): unsure at all n locations
gagactcaagtcacaactcaaataaccactaatgctatggggatcaatatgggttaggttgcggaaggctatggtggttttgcggaagttatggcggaagccctaggcaaagatgccaaagtgccaaaatttgatggagtaaaatggcgttgaaacctatctagatggatagaggatgtcaatagctactcaacgagctaaagaacgcgaaaatcagactccggatgtgaaagttacgaccaaaacggtgaaacaccgaaggctgaaatgccaggggccggacatccgggggtgggggccggatatccggggtcagtgttcagaaccatgcagatttggtgctccaggagccggattgatgaggacatgactaccttggatatgaacaaaaatattgcatataagcatatttgtcanggtgattctagtgcaaa

SEQ ID NO: 443446 - DNA, 181 bp, Triticum aestivum
ctgggatgagacaagaggacgggatgcaaggatcccggtgcgaagccgtggatgagagaggtcgatcgcttgtaatgtccgacggcgtctgggtatcagctccggcatggtggatgaggacggcggtggatggcgtggcggaccgaggagattaaagcttacatacgcttgcatgcaacct

SEQ ID NO: 443447 - DNA, 378 bp, Triticum aestivum
gtcagaattatcttggccaatttccgatagcgatacactgtcatcttaggaagtacaatcgcgtcacattgttggtgtaggcacacataacactggttctaagcaccttaaatgatagcactatttatgctacacacgtatgggcaatattcttgatgtggccaccgtgcccctatgtatttaccttcatgtagaatctcttgatgattcaagtcaagcttcagctgaagctcccggggggaagaagaagacagcgtccggtctaaacgatgaaacctaatctagccatcgaagctatttcgaatgccgtccaaactttcatcacgcttcatctagctcgacgtccttttacaacatcatgattgcaactccactcga

SEQ ID NO: 443448 - DNA, 54 bp, Triticum aestivum
gggcgatgatgaaaacacatgtagaaagccgtccgcctcgctcatctcccaaaa

SEQ ID NO: 443449 - DNA, 333 bp, Triticum aestivum
aagatcaagaggttatggctttgtttccttcaggaatcaacaggatgcacagagtgccataaatgacttaaatggtcaatggcttgggaatcggcagattcgttgcaactgggcaacaaaaggtgccaacagtggcgaggaccagctaacatcagattcgaaaagtatagctgatgtaaataacgattttacagaaaatgcaaagcagaagtcaaatgaagatgctcctgaaaataatccactgtacagaactgtttatgttgggaaccttgctcacgaggttactcaagacgtgcttcatcgtttcttccatgcacttggtgctggagccat

SEQ ID NO: 443450 - DNA, 417 bp, Triticum aestivum
gaagtggattcgggcggagagcgaagaagcttctcctcgtgtggccgagaagtgagcggggggatatggtacgcgcgagctaccaaggaagatggcgcgggcgggcgagcagtgagtgagggtaaatggtgtgaggccgacgatggggaagagaggaggaagaagaagagaggaggaagaagagtggaagacggggaagaaagtgcattaaatctcaattctactagtactactaccaggatataccggacttcggagtgtaaatagttactccgatgacatgtgggtctaccacaagagggtccatatgtcaattaatggaggacagaggtgcgtaggcgtatttgcggaagcgtgctctactggcaaacatgatggcagtactaggttacgctgatttagtaacaccaacacact

SEQ ID NO: 443451 - DNA, 374 bp, Triticum aestivum
  unsure (1)..(374): unsure at all n locations
attcgncggtcgacgggcccttccccagaccctgcgcaagcgggagctacatgcactggggctgccctttaacaatatgctatctcccagtgatattatctcagctggttctgcaagttctgcgtgcactgccggtggtcgtgggcagctgtatgtgtggggaaagttgaagaactggggcgatgagtgcatgtatccaaagccagttagagatttaagcggttggaacatccgctgcatggcttctggcgacatgcaccatattgttggtgcagaggattcttgcataagttggggtctttctgaatatggagagcttggttatggccctacacattagtcatctgtaaatcctaaaaaggttgacattcttg

SEQ ID NO: 443452 - DNA, 427 bp, Triticum aestivum
  unsure (1)..(427): unsure at all n locations
attccgggtcgacgacgtcgtcctcatcgagcggcttgccggcggctgcaagttcgtcggtgatgcccttcatcttggtgaagaaggccacagcggagaggtcacccttgcgggtgtgctcgagctgtgagcggagctggatcaccctcgccctagactgcgacgagaagctctacaggagcgccgcccagagagtgctgacctgcatcaggacctctcgagacagagatgcgatcagaaaagtaagaacctgctgatcctgggtgacccatacggcatgctcggggttgggcgtggaggtggtctccttcttgccagcgacgtccttcttcgtgacgatcacagcggggggctcccgaagggagccgtcgatgtagcctgtcatcnctgccgccttgatgtgcggcaggacttgtgccttccacac

SEQ ID NO: 443453 - DNA, 384 bp, Triticum aestivum
gatacagtgaggctcagctgaaggagtgcctggaggagtatgcatccttgaacgtgtggcagatccacccaagcaccttcgacatccacttcatcgacgcctgatctgggaagtgaacattccatcataatcagatgattgtgatgcgcgactagggtgtctgatgcccttgtctgggatataacaagattgaaagacttcagtggtagcgtgaaatgtactagtctagtagagctgttgctatttgttcctgtgaaccatgcaggagcctttctccttcagcaatttcattggttgacactggagtgtagtaaatgtaactctgttatgtttgtttacccattagttgtacgctttccgacaatgatgaatttgttctgctcc

SEQ ID NO: 443454 - DNA, 348 bp, Triticum aestivum
gtagcgtaactactgtaccctctgaccctcgccgtcgtctacgtcctcgacttcgtcttcggctggtcataggctcatgcttctagtctggacacacgcttgagtttgaccctgtcgtgatttttgactcattgtaatttatctgtctagacttggaggtgtttattgtgttcatatccacggtgtgcattgtgtatccatgaatctatcttaaggtctcgtctgggcgtagcgtttttgtgtgttctcttctcttcggtaatggtgtattaaacatatccggaggatactgggagctacatgctagaaataagcttgagattattaacctattttatctggataaaa

SEQ ID NO: 443455 - DNA, 343 bp, Triticum aestivum
gaagcggccgtcgatcttaggccactgacgatggaggacctgaggcaggccaaaaatcaggtgagctgcttgctgccctgacttgcattttcgcatgttggcattgatagaaacggggccactgaaccgtttgtgatggtttgcaggtcgccgcgagcttcgccgcggagggcgctgtcatgaacgagctgaagcagtggaacgacctctacggcgaaggagggtcgaggaagaaggagcagctgacctactttttgtagaaccggaaggatggtggatgtgtcgtgttgggcaaatcgctgaagccttggcagagcatgagcatacatatgtgggtgggaaa

SEQ ID NO: 443456 - DNA, 317 bp, Triticum aestivum
tcgacgggctctggtgttgtcgtctatgaatctaaaagtcattgtgtgggagattcaaaaaaaaaaaaaaaaaaaaaaaaaaaaaaaaaaaaaaaaaaaaaaaaaaaaaaaaaaaaaaaaaaaaaaaaaaaaaaaaaaaaaaaaaaaaaaaaaaaaaaaaaaaaaaggaagataaaaaaggataaaaatataaaaaaaaaaaaaaaaaaaggtaaaacctaatgaataaaggtcaacaaaattaaaataaaaggccaaagatttaaaaaatgataacgggaaaaacattgaagtaaccaactttaaaacactagaaa

SEQ ID NO: 443457 - DNA, 397 bp, Triticum aestivum
gcatgccaatttttgtgggaaacatgacatgctatttagggacttctatccaggcacagcacagctggtcggtagatacctatgctagagcctagagcctagagcaatgcccgtctgcttctgctgacttctctcgcctggtgctggtggtgaactgatgatcgctactggccatgcgtgatccctaacctgtgtcctgccaggtgcccgaaaaatcacgtacgtacgtgctactctcgcgtaggacctgtaccgcgcatgccgttccctcgctattgcgcaacagcagagtttttggtcgcacatgtcactgatataaaagttgcctcgctattgcgcaacagcagagtttttggtcgcacatgtcactgatataaaagttgttcgttccgttgcc

SEQ ID NO: 443458 - DNA, 352 bp, Triticum aestivum
acggggctcaataatagagtaggagtattccgtactagtactactcctactagtaccaagtttttactcctaatactatattactagtactaccactatacaactagtaggtacgtgcacgacataacatcgtatgaacaaaaaacgggaagatcttgttttgggtgatttatctatttttcaatcaacgtagtatgaataatatgatgtggggggcacacatgaagcttatgtggcttggttgcatggctacggcaggttacagaaaattatatagataatgtgtttagagtgtacttcactcaactccatatttatacattggatccattgcagcggcctggcacatcta

SEQ ID NO: 443459 - DNA, 423 bp, Triticum aestivum
ggcctctaaaaaaaaaaaatatccgttctcctacccgtgagctcgtggccttcccaaagcgctcgtcactttccccaatttggccggacggcagcctccaaatctccgattcgtcgtcgcctttgcctccggccaacaccaccacttctcggcggctcgccctctccgtgtccagttaatcactgctcgtccccaactcgtagaagccacagctcgcctcccctctgccatggacgacatggcacacgcgcgacgccggcggtcgatttccctcgatgcctaggttgccgcctctatctccacttcgtccgttcttgcataggctttgtacggctttggtagtcagcccgccggagcccaaaataaggacacggacatcggtctcgcctgcgtcgtcgtcaagcgcaagctcctggtggatgc

SEQ ID NO: 443460 - DNA, 227 bp, Triticum aestivum
aaagagcttaacttttttactctgaatttgaccggtgatgtgtgtgtatatatgctacatgctgcttttcaaaagaccctgacatgactaatggtgggtcctaagatggctgagactgtttctggatgtttgttccgacaatgttgttgaattagtatgtgataaacaacgtttaccttctactaaaacaaaaactaattacaaaaaaaagaaaaaatattatttac

SEQ ID NO: 443461 - DNA, 317 bp, Triticum aestivum
ggagaactctacaagaaaagctctaccggagtacttcaaagatatatctctgatgaagaagggcggcatctcttggctcgtacttctctgctttgatacctgcgggcctgttgttgataaaattcggaacgagctttcgcaatgtcgcgcttctcctccagggcatctaatctatcctgccgatcaagctcggtctctcactccacacacatgtccaatctatgtcaattcttttgaattgctaacgatataactcggtctacatggtactgaatttttgccagcatccagagatgatgctgattgggcgtagtccg

SEQ ID NO: 443462 - DNA, 413 bp, Triticum aestivum
gagcgtcaccccattcagcaatggtggcatgaagcgtgcgaaaacaggccagtagggaaggagccacccctcatcgttaccggtattgtccaggtgccttatgtgccccccaatggggacgccatgtctccgggcaacgtttgccgcgggcgcacttgaaggaagcgacgccctgcatttcgctagacgagtcagtatgagtctgcggtctctcctgcggacaaggagaagccgctgggacagtggaagtagtagagtcctgggtcggtgggtcggcccagctttggttgctgtaaggtcctagaacattcgctttatttgttaattgactgttaaccctagtaatgtggtgctatgatggtaggtgatctccatgacagacagactatagaggcccgagtatgtgagctttc

SEQ ID NO: 443463 - DNA, 342 bp, Triticum aestivum
gaggatgaataccaggattaacgcgaagaccaagcccaccacgaggactaaacatgacgagcgaagcgagtatgatgaatgactacgttatgacgcacgcatcagcatggacagtgcatatgacgttcttttggattaatgcttctgcctgataaattcatcacctttataggtcgcaggctgtaaaatctctgcatgttgctgcttgcttgttctgccactcgatatgctcaaatcctatttcaacttagcatactacattctattccttacaaagtgtcatcaaagttcattacattggactgcgtttaaaatcatgatttctgacaaaattctgttcta

SEQ ID NO: 443464 - DNA, 53 bp, Triticum aestivum
gattgctgtttggatgtagttctggggtggaattgaaattgaagtggtttacc

SEQ ID NO: 443465 - DNA, 153 bp, Triticum aestivum
cggtctagactatccgggtcgacgggatagggctcgaatagctgtaccacgagaactgcatggactgagcagtccatgacttatagcaggaccgcgtcatagccatacatacgtgtaccaagagagatctagatgtacaagtcgtcccaggtg

SEQ ID NO: 443466 - DNA, 292 bp, Triticum aestivum
cccgaccggagaagaatacatgaggcatcctttttaacgcaacttgtgagtttggtacagattcgtgagacactgtgagttgggtcacgggatagagatacatgattttcatttctcattggacagatactatgtgagacgtgcgagcttgagatactacggtcatgagagagttatatctgagtttttttgttgattttcttctcacagagtctatctacatcgtcaaattaccgcctcatcagattaactgcccgtataatccagttaacatggtaatttctatggactc

SEQ ID NO: 443467 - DNA, 403 bp, Triticum aestivum
aagcgtcacaatacacttcataatctttgtgttgatctggtagaatcaacactggtgatgtaaccaagcgtcttttcaactcctgaaaactggcctcacattcctcagtccaattgaatttggtgtccttcttcaacaattccgtcataggctttgcaatctttgagaaattctcaatgaacctccggtagtatcctgcgagtccaaagaaactccggatctctccaactgtcgtgggtgactcccaatttgtcacagtgttaaccttggtgggatctactgctattccttctccggatataacatgtccaaggaatccaacttcctttaaccaaaactcgcacttgctgaacttggcatataactaatgttctccgagcttttcaagttccaaacgcaaatg

SEQ ID NO: 443468 - DNA, 291 bp, Triticum aestivum
gggacttgacgacatggatgttgcaagtctcaagaagatgaacaagaacaagcagcttgttaaaaagctagccaataagtaccatgctttcctggcatcagagggcataatcaagcaaatcccacgtctccttgggccgtgacctaacaatggaggcaactttctcactcaagatatgccacgtcaagtccttcaaaagaaggtaccaccccatcataccacatcataaacatagctagagcatgttccttgcaagggtgtagcagtaggccacatgtctaagcgagcata

SEQ ID NO: 443469 - DNA, 401 bp, Triticum aestivum
ttatttcaatcattattaactatatctcggcctatttagttcgtcatttcctgatatgaactatttttaataacccctttattaattttctttgccggcggacagggcttgggcaaagtacatcaaggtgactccaggaaaatggcgacaaaagctatgttggtatcgacccaaggtaagtaattaagtagtactagctagctaccatctctttaattcttgtttcaataccattaattaattaacatgcttgattaattattatctgattaaattctattgtcgtaaaggccctcaagcaggcgccggggactaaagtgtgtgcatactacgtttgcgagaacattagcatgatggcgtccgaaaggagcagatctaatagacaggactgggtacgtttg

SEQ ID NO: 443470 - DNA, 331 bp, Triticum aestivum
ggtttaccacaaccccaacccgcacctcgggagctccggatccagccaccagaccaaccactaccctgcgccaacgcggacatgaggcccccacgccgtctcaccacggcatcgcggagtgaggacagtgtcacgcccaatatgcgatactatcctaaagagactcgaaggtcccaccaaggatagaaccgcatattaaaacgctttggcaaggtggatatcattacatcaacattacataatagatggggatacatacagaaggcatacaatgccacacgaatacaacatcatcttacataagagcaccatcttactacggatgagacac

SEQ ID NO: 443471 - DNA, 176 bp, Triticum aestivum
ggtcagctatcgggtcgacgggaattaagtaagtgaagaaagcacgggcttttctgaaatttttgtaaatctcgtttttatccagtcctttcctgtcacacacagtaagtgatgtcaatactcctaaaaaatccttggtcaaacccaagaatcttaaacgtagatctcaagtgaat

SEQ ID NO: 443472 - DNA, 374 bp, Triticum aestivum
ggttgatatggcagatatgacttctttgaaaaagacaactacggagcacgatccggtgttgaagtttaaatcggccacagacactaaggtggttgactttgttcccggcgattcatccaagcagttcaacatcagcactaacctggatcccaaataggaaagtgcgctcatcgagttcatccgtgagaaccaggacatctttgcatggatgccttctgacatgctaggtgtaccaagggaactcgttgagcacacacttaatattgatcctatgtttaaaccggtcagacaatttctccgccacttcaacgaagaaaggcacaaggctattggtgaagaggtagctcggttgttggctgcaaggtttatcgtgg

SEQ ID NO: 443473 - DNA, 377 bp, Triticum aestivum
gggggacatggaagagcgcggcagacgtcttgtgctggacgaggagtagcggaccctgcgaggcgagggttgaggaagacagcggggggcgagcccggtatgcgcggcaggcagcgcggagggcgaagatgtcctcgagggtcgtcaagcggcttgcgatcaacgggatcagctccggtaggaagtagggcgatggcgaggtggtttcttcggggtttgtggaggatgacgacgaggacgtggtgattgtggacgcgagggcagtggccgcaggcaagcaccttgtccggcgcttccccgacttccccaacgaacccattcctcgccgccgcatcttcaccgagtgcgacgctgcgtgcggtactggaggtgaatgt

SEQ ID NO: 443474 - DNA, 403 bp, Triticum aestivum
tccgggtcgacgggctttagtaaatggaggaagaaacaaccatagtaactatctatgaaattgattgatggatatgagagtggtgcaagaccgggacagaggaaccataggaatgttatgtcaggttccttgctcacttctcaagcccaatatcattcctccaactcggactttcatgctagaattaagaacccccctaaacaatgacagcgtaccgagcgggccctacgtctatcggggagctcaaatcctcactagagtgaggcacgtctcgatcaatacatctcgaatctaaagatagaatgttattgttatgctgtcgccactctggagtatgattgaccatatcatccagcgagtggtcttaagcgctcagtgcatccatactgaactcgaatgtgcg

SEQ ID NO: 443475 - DNA, 383 bp, Triticum aestivum
acgggtgcctcggtcatagacaagcgtggcctggccgttgctgctgccaacataaccgcgcacagtgtgacatccacattgtatacgttgagccacctagcgatggagctcaattctttcatcgattactacaagtatatggttgatttgatagtgagcgtcattcatgacttgcacgcgggatgagatgctcaagtgatataccaaaagttatatgatgcctcattgtctcattgatgcccctaagttgccatatggcattgttgcagggatccgggaagaatcctgtgtgggaagagaacatagaaaacgaagagttggcccaaatagccagtagcatcacatttttcgaaataggctttcaccctgcttttaagtctcgg

SEQ ID NO: 443476 - DNA, 429 bp, Triticum aestivum
gctccagtgcggcgtacgaggtcgtcgatgaggcagatgcgctgcggtggacaacatgctcaaactcacataatcccagtcaaatgagaatctaaatgcatttcatagttattactttgtaggatgcaacaaaaacaaccataacgctacatcagccattatataagcaacattttgacatatcccaatgtgtgaatgaaacgtgcagagagagcttttgaagatggagcagatagggcgggaaagattgtatgtatgtgggcgagagagtacgagacaaacctaacgagacagagagagagatacagtagagaaagagagaggaagaagttaggtctgtgagacagatggatacatgtaatagacatgagatgcgtgtacatctggattctggtagacgtggaaagagaagagacgacatgtttgatg

SEQ ID NO: 443477 - DNA, 379 bp, Triticum aestivum
aatgatgcgtagcttgaaggcgtccctcgcgacgacgaagtgtggatgtcatgtcgcgccggataagtcaatgaagaattgctcgctttccacgccgacctggttgtgttgatgccgcaagagctcgatggagtcggcctggtggagatcgcatccgtgcgcgtgcagtgtagtcgatgcacgtcgcttgcagatggttctatcgctcggtgcagtctgccggcgccgcgccgatcgttgttggcgtagtcgcgaaaactgaagaagtcgatgtagcgactcgagtcacagctgacgagggcagatctgatcgatcgcgatcgaagccgccggtgcgtctgtagacgcgtacgtgtaagctcatattgatgcatgcacg

SEQ ID NO: 443478 - DNA, 370 bp, Triticum aestivum
attggaatgcttaagttcccctctcgacttattaatcaacccgatctctgtccaggagttgcaactagtttctgttgtttgtaggttatgttagtagtctatcacgtggcacccggtacaggtgggcttgggacagactatgcaccatggcacggtgtaccaagtgtagatccatccgtcgaggtgggcttgggaaccctgcacacatcatttagggccatgagcgacaccccggccggatctccttgcggattgatgtgaccatagaccgtgctattccatgtacactgcagattgggtgtttctgtattaaggcgccatcgacacaaccatagaagcaagagatcaaaccaacctttagaacaccatg

SEQ ID NO: 443479 - DNA, 282 bp, Triticum aestivum
tctggcatgtttgcctccgtgcaatagctgttgccacacagcaatggcgcgtctagtgtcgtcctcggcgatggcttctagcttggccccatacatgtcttcaaggttatgattggcgtcgagacgtacatgatgtgcatcttcatggtgctgaatcaggtgcatcctgacatcggcatctcccctacggacatgtccatcatgaagtccttcatcaaccacatcttcaacaagctcgccggggagtccgctaagctgggccgcttgaatccgatccccatt

SEQ ID NO: 443480 - DNA, 403 bp, Triticum aestivum
agaggcctagcagctggtcggcacgtgcaatggcctcctctgcctgtgcaacaactaggagaggctcggtggcgctctcaccctgttcaacccggccaccggcgaggcgctgtcacttcccccgatgccgtacgccggcctcttctctgagagctctcattggcggaactggaacgagacttacaccttcgcgcaccatccgacgtccgggtggtacaagctgttgcgcgtcccctgcattttcgaccgggtgtttgagccggaagccgtgcacgtgctcacgctgggggaggcgtcatggcggaaggtgctcaccggcatcaacggctgggcggggtgccgcctcggtccgggcatcgtcagcattgacggcacgacgtactgggtcacgcgtgatgctccg

SEQ ID NO: 443481 - DNA, 331 bp, Triticum aestivum
tacggaccagaattcgcgcggtcgacggggatcaaggtgtcaagccggcgacgatggagatcatgactgtgctttggagatggagatcacaggcacaagttgatgatgaccatatcatgtcagatattttgattgcatgtgatgtttatcttttatgcatattattttgcttagtacggcgatagcattataagatgatccctaactaaatttcaatgtacaagtgttctccctaaggtatcaccagtactagagttcgtcgtgttgagacagcacgtgatcatcgggtgtgataagctctacgtcgacagacaatgggtgtaagctagtt

SEQ ID NO: 443482 - DNA, 440 bp, Triticum aestivum
  unsure (1)..(440): unsure at all n locations
attcgncggtcgacgggttggacgatgagatgggcgtagcttgataagtctgtgttccacttgccttcgcctatagcagaaagttcatccttggcactatgcttggataaagcaacaggattgccaggggcagtgtggccaaagccagtaatcatgatgtcatcttccttgtcaccagcagccttcactggagttggcggtttatcaatagccttagctggacttgccggtttatcagtgtctcggactgggcttgttgttttttcggactggcctgatggagcaacttctacttgttcaacaacgaagtcataatcttgtggtggcagatcatcaagcagagcgtcagtatttgtttctactggatctggagtcttctccggtttaatgactacattatcgtccgccggtttatttaatcaggccttcttgctgggtct

SEQ ID NO: 443483 - DNA, 308 bp, Triticum aestivum
cgggtcgaccgggagcatttggatactggatctagccgatgggagacggtatcacgggctaacttcaaccggtttggatggctgtcatgtaataggataggtgtcaagtttcctagcggttgttttgcctgccggttgtggttgtcctacatttgctttcttgctccttgtgagcattattgcctgtcgtctgaaagcttgacacttatgtaggagcattggtcttgtccataaaatcgacctatccatgagtccgatttataggacgttgcatcgtgggctattaaacttttggcatctttatatca

SEQ ID NO: 443484 - DNA, 145 bp, Triticum aestivum
ggatacggagaaaaagacatatcgagtatgtctgagcgaggcacagagacacaatgtttgagggagaaaccaattgacagattaagatcagatcgagttgtcatccttttgctgtcattggtggggtgggggaggggagggaggc

SEQ ID NO: 443485 - DNA, 375 bp, Triticum aestivum
ccgggtcgacgggctgtatgcccaggccgacaagtgcgcacatgctgaagaggggaggaggctcctcggagagaatgcagaagcggcaggatcagatagtgatgggaccgccgcggcaaagagaaaccggcggcgcaacaacaggaagaagaaaggcaaagacgtgctagtcgttgaacagtccgtcaatggagccagcgccaaggaagccaaagttggtagctctagcaaggaggttgccgcggccgccgacaagcagggcggcaacgacaagcagtactgcaagatccaccgcaccaagggccatgatctccagagttgcaagaatgttgagcagcttgttgagctgcagaaggccggatacgagcgacgcga

SEQ ID NO: 443486 - DNA, 360 bp, Triticum aestivum
  unsure (1)..(360): unsure at all n locations
ggtcgaccggtcctttcaggtaggccgtgttgggcccctttctttttcccttctgtcaagtggtcaaagccgtggatccgtgcacggtgcgaccttggaaactaaagcgaccactatgagcatcaagacgatgagtactccggcgcaatccgcgaaagggcggctgcngctgccaaaacagcagctgctgcagctcagagtccattcacgccaaaagtacgcgtaacctcttgtaaacattttccagatttagttgatttcaatcatctttagtacttgcaactaaattttaccaagtaacatttgtcaaacccatctgaaaaaaaaaaaaaaaaaaaaaaaaaaaaaagcggccgctct

SEQ ID NO: 443487 - DNA, 430 bp, Triticum aestivum
  unsure (1)..(430): unsure at all n locations
acggcagctatatgtaatatgcttaaggaaaagaaggcgggcagcttttgttccttgtggtcatcttgtctgctgttgcaactgcgcgaaaagggtggaactcatggatgaaccattgtgccctgtgtgtangcaagacatccaatacatgctcagggtttacgactcttaaggctccttgctgatgtggcccaagcaccggcagagttgcgactccaacggcccatcctcctgtcctgggtgctctccgttttttgttcctagcttacgttactgctaccctgaaagtatgtgaatatatgactgcgctatctaaccctcagaaactaggttaccagtacttgctagttcagcctgtgaatatggattatgtatgatcttagatgaccccgtgaacttgccaagttttttgttggtgttgcatggatac

SEQ ID NO: 443488 - DNA, 397 bp, Triticum aestivum
ggagacatgtgatgacaactacaatgagtcaccttctgcagaagactggaaaaagttggaagctgcctgcaactatttgaaattactgtatgattctgcacatagcatcatggttgcggcaaatccaacttccaacttatttttccatgaggcgtggaaacttcagctggaactgtcaaatgccataacccatgaagatccagttttcagtagcatcgccaaagaaatgcatgagaggtttgacaagtactggtaggattgcaaccttgttctatccattggtgttgtcatggaccctcgtttcaagatgaaacttgtataattcagttattctaaaatctatggtgtggaggcatcaaagtatcttaatgtggtggattatgctcttcatgacctt

SEQ ID NO: 443489 - DNA, 438 bp, Triticum aestivum
caagaagaaacaatctctagggctagacacaaagagccggtttaccggcgactccctcgtgatcataatgagacctagcctcaaacagtatgtagggttgttacgggatgatgtttcccagggcccgaagctgtctaaatccttgtcttgtgttgcgtctctcgattccgctcaacccctctcaagctaccacatagatgtgttagcctcgcgactaagtcctgacaaaaccacgacattacttgcttatgctaaccatcatgacatcactttatatcaaatggatgtgaaaagtgcgttcctcaatggtaagcttgaggaagaagtatatgttgctcaacccccaggttttgaagatccaaagcatcctgatagagtcttcagacttaataagggcctctatggcctcaagcatgcccctcgggcgtggtatgatac

SEQ ID NO: 443490 - DNA, 402 bp, Triticum aestivum
gagacgcacggaggtcgggccggcaccgccacccagaacgggtcacggatgttcacgtccccgaatttcttgggcgaacatgccgctgcggccggcgcaggcagccggagaaaggaagccacccactgagctgagccggagatgactatttaacgggacatcaatggacggtgagatgtgcgacttggggaagatcgacggtggtcatatcagcttgaccggtcagagtcaatgctctatttcttttccatttccgtctttttaaacagtttcccttagatttctgggatgccgttggacagccgcaatgccatggcgactgccaggagctcccgacatggaccgccaaagcgaacgcgaccgcttgccaaccagccattaattttgcattgctcgctacac

SEQ ID NO: 443491 - DNA, 419 bp, Triticum aestivum
cgggtcgaccggtcctcacaaacgcgacgttaccggaaccaacccgaagaagcagacaccggaaagaagcacacaacatagtaaacaaccaacacatgaacatggtatgatatgcgggatgcggtatgcgatgcatatgcatgatttgcaaaggaatgattgaacctggcctcagcttggaaatccaagagtgccactggtaaggtgaggtgatttcggttgaaatcgatataaagaacactggaatcggatgcacggtttggaaaaggcaagcaaaacaaatatggcaccggtctgcgataatcagcaagtagccatctaaatgcatcaagataattatgctacaacactcaaacatgacaacaaaatacatggcagggattcactcatgatgcttgacacaagatgaacactgagct

SEQ ID NO: 443492 - DNA, 345 bp, Triticum aestivum
gccatccggactccgcgcaacagagcggtcgggcacgatgggaagtattcgccgtaggcagcaacggcatgaaggccgcgaatggagtggctcacgtgctcctactaagatgtgtcgcgtgatgtcgaaggtacactccagcgtatgcatcacatgaagggccatatcgatcagtgcagtgatcatatcgaagtgcttatagaacatgccaaggaagtcctggatgataagtcgatggtactcgaggacgacaatgaaatgttccaaaatgtagacctcgctgtgctcaatatcctgagcggtggtatctgaagcctgcatcactttaggcacaagagagatcat

SEQ ID NO: 443493 - DNA, 421 bp, Triticum aestivum
gtcgacggggggacacggatgcaacatatctcaaagctgttgcaaaggcaaacaatttctccatggattcaaattcaagtgattggtaaaagagcggaatctctttcaacggatgacttggaacataaaaagattaacttattattgggcgaaccattttattgtggcagtgaagggatgcttccatggcaaaacctgcgtttctggaatgcaagaactctgtttgattcaatgctatctgaggatgcactcataatgccttgcaaaggagtattaaagttatgtgccatgtctcttccggacttgtggaagagtcgtcgcagccttaaagatgtcgagggtttcgaccacttggttgttaacgagactttaagagcctgcggtgatcttcctggagagcagcaaggtccttgtctgccct

SEQ ID NO: 443494 - DNA, 406 bp, Triticum aestivum
gggaaagaaggcttgaggctggtgccatggttcttgctgatcgtggcgttgtctgcattgatgaatttgataagatgaatgatcaagaccgagttgctatacatgaagttatggaacagcaaactgtgaccattgccaaggcaggaatacatgcatcgctaaatgcaagatgtagtgtaattgctgcagcaaatccaatatatggatcttatgatcgttcaataacaccaacaaagaacattgggcttccagattcactgctctctcgttttgatttgctttttattgttctggatcaaatggatgctgagatcgatcgccagatttcagaacatgttgcacggatgcatagatactgtgctgatgatggaggagcaaggtcttttgataaagcaggatatgctga

SEQ ID NO: 443495 - DNA, 400 bp, Triticum aestivum
gagcgcagtcggcagaacatcccgacggagaaacaggccgaggatcccttccggcaggcgcagatcgtggagggcggggtccggtaccagcagacggtggtggtgcgctcctacgaggtcggccctgacagaacggccacactcgagaccatactgaatcttctccaggtacgcactactctatctatcttgtttagctaggctcatttctgacgttgagggcacataacatatgcatgcacgtacgcacgcaggagacagcattgaaccacgtgtggatgtcgggcctgcttggcgacggcttcggcgcgacgcacggcatgatcaagagcaacctcatctgggtcgtgtccaggatgcacgtccaagtcgatcactacccattatggggtgatgtgct

SEQ ID NO: 443496 - DNA, 433 bp, Triticum aestivum
acagtgcatagagtgatggaccatgacatcaaagaatgacgatgggaaagacatctctatgttgcacaatattcttgcaatatcatcttgcatatgatccaactcttcatgatttaacctttctgccatagatggttgaagaaatcatacaggtcattgactgtgtttcttatatccttgtcaatcagattcatgatggctagcaaggggatttgtgtcaacattacgttgcagtcatgtgacttcatgtgtcacaacttcatttaagctgagctcatatcgaccggacatgtgatgtttgcgcattaggaagacggtgtcttaactgataacaatgttgtgtagacctgtgtcgcttctcttgtactgaaatttgtaatctggggagctttcatgaattttggatcaacttctgcttcagtcatgtgttttg

SEQ ID NO: 443497 - DNA, 443 bp, Triticum aestivum
  unsure (1)..(443): unsure at all n locations
gtgtgtgattcagggcatacggtttagttaaattaaccgttttcgatgaggaggaacaaaagaaacgggcagccagatgaaggtgtgtgcgatgtacaacatatggttcactcggatgaactgtttgtgattaggcaacacaaaagaaacggtaagccagatgaaggtgtttgtgatatacggcatgaggttcactcggacgaactgtttgcgttgacacaagagaacagaaacggttcaacttaacaagacatgtgtgttgtgcgatgggattgcatacagaacaacaacatacacacacacacacacacacacacttataaggacatgcttgcataaccaaattaaacatccacttagataggtggctactacaaccatggcatttgcacacaccaaaagtnaactattacatgcataattacatangtggctaccnacac

SEQ ID NO: 443498 - DNA, 449 bp, Triticum aestivum
  unsure (1)..(449): unsure at all n locations
cgggtcgacgcccgccggcttacagagtcccgatgccggtttatacacataccggcccggtctctactttgtcataccttacaatacaagacatgtactacatgacggtttatagctacatgccttaatctacctttgggccttgggccttcgagtctctgtagtaaactgctttattccttgtcttcatgggcttttaagtataaacaatccattatggggataacccggcttccttggccggtttacacctagtagtaatatccccaacagggtcctcgggcatccggcctatgtgacgtgggccggactgatgggctatgaagacacaagacagaagactctctcccgtgtccggataggactctcctttgcgtggatggcaagcttagcgtccagatatgaagattcctttctctgtaaccgactttgtacaancctaatcccct

SEQ ID NO: 443499 - DNA, 440 bp, Triticum aestivum
  unsure (1)..(440): unsure at all n locations
ggtctgccctcatttcggtttcccccattccccttcgcacccccgcggcggcggagccttcccgggcgctcaccggacacgcgcaacaacactatgaggaggtacagccccccacaccgtagtcccccgaggaggggatatggtggcagccccgcgcatcgtagtcccccaaggaggggatatggtggcagccccccgcaccgcagccccccaaggaggggatatggtggcagaggaagaagcccccctaggaggggtggatatggaggacgaaaggagcagggttctggaagtctcttggtccgcaacatcccattaagcgccagagcggaggatctccgtgttccttttgaaaggtttggtcctgttagggatgtttaccttccaaaggattattacagcggggagccccgnaggtttgcctttgtggagtttgttga

SEQ ID NO: 443500 - DNA, 330 bp, Triticum aestivum
tcgacggggagtgtggatgagctctgggcggtgaccgatggcaatgtcgccccgttcccaggcacgttcaaggagtacaagaagatgctcacgacataaaccttgaaaaaggacggggcatacgggaaggtgctcacacagacatacagagactatatgtatgatatgtactccctggcattggaaactgatgtaatattatgcttgtggcctacctgaggtttgaatgtttgagcagaactatgctactacatacaattttgttccagcctgcctgacgatatgtatcgagcttgcgattttcttggacaaaaaaaatgtaaagaaaag

SEQ ID NO: 443501 - DNA, 111 bp, Triticum aestivum
caatttaggcaattaaccaaagctagttaaacgccttgtatccagccaaggacaaaggaaaatgcaacgggaataaaaaaaacaaccagtatcaaaaaaaaaaaacgggcg

SEQ ID NO: 443502 - DNA, 430 bp, Triticum aestivum
atatctcataactgaaaccatgaacaacaagtgctttggttctggtggtggcgatccattgcttgaggcgacatcgtgtgcaagattatccttgtggaggccgttggcacggtggcaccctcctcgacctgctgatcccattacccaggttgcctgttgcgcctaaaggttggatatatggtgatatggtaatgccgatttgggaaagcaggtgtacagtgtgtgtaaattaagaaaacaatttataatctgtgatgtgatcattgcattttaatttagtatatgcgactcaagtagggaagtattgagtgcacctctctggcaagtgcacgcataaggtaccattttttactcaatcgatttcaaaacaaggcatgagactgacatacactcttttattgcatcgtgtaaagatatgtggtgtgaaggg

SEQ ID NO: 443503 - DNA, 229 bp, Triticum aestivum
gtcgacggggctcccaaaccctagcgccggcgcctccacttctctgctctctcctctcatctcgcgcatggcccggcgaaagggaagcaatatgtacaccgccagtaagattatccagatggacaagggcgtcaacccctcctatttcaaggacaccgtctcgcaggctttctttgacctgcaaaatggcatccaggagctcaggagcgacctcagggacctgtacatc

SEQ ID NO: 443504 - DNA, 389 bp, Triticum aestivum
ttgaatggattcattccttgttcgtgtattacgccacaatatgcaccatgttgacttaagtgttccgcaagctgggttgtgataacccacaagtgtacgggattgcaatagttttcgagggtagagtattcaacccaaatttattgattcgacacaaagggagccaaagaatattctcaagtattaacagttgagttgtcaattcaaccacacctggataacttactatctgtaccaaagtgtttagtatcaaagtactatggaagtaacggtaacgatagcaatagtaatatttttgggttatgtagtgattgtaacagtagcaacggaaaagtaaatagtcagagaacaatatatgaaaagctcgtatgcattggatcggtgatgga

SEQ ID NO: 443505 - DNA, 331 bp, Triticum aestivum
aacgtgaaaggcaccgtccacaagggcatgccgcacaagttctaccacggccgcaccggccgcgtctggaacgtcaccaagcgcgccatcggcgtcgagatcaacacgcaggtcggcaacaggatcatcacgaagaggatccatgtgcgtgtggagcacgtgcagccatccacgtgcgaaccagggtttctccacaaggaactccacaattgcaaaccgaaaggggggggcaaagcgccttgcgaaggcctcagcaccaaaaagcagcccacaagggcccaacctggggtcaagggggagggcgacaccatccagacagggacccccatcg

SEQ ID NO: 443506 - DNA, 416 bp, Triticum aestivum
cgggtcgacattaataaaatagtatttctttctaacattcggcgtaatagacttcgtttctcactattgtcctcaaaagtgttgcaaaatttaggttctttttcagctgcggaggattgatcccttttagaagaaggccttctttcttgcctgagcttggtaacgaaacttcattagtggttagcttccttcttcaacagtgggtctaattggggaagctcatattcctcaagatttaaggccaaagggaaatctggcaatggaggcggcggtgtgatgatccggctgactccggtatttgatgttctttcttgggtgttaaggtcctggttattctggagcttgcttaatgtctcttgtgggatcatgtccaagagatgtttggttgttccgaaaggagttgagatccttgatgt

SEQ ID NO: 443507 - DNA, 428 bp, Triticum aestivum
gggaaaacgtaatcgtttgtgcagttcactgggagaaaaaattgctgaacttaagaatgaagcagaaggtattcaaagaacaatcgtggaaaagaacggtcagaaaagcaagttagttaaagatcgatgcgaccttgaacagaaaatagcagattcgaagagaaaacgagaacctgaggagtattgtttagagaaaaaaatactggaacttgatgacgccaagagagcttttgctgaaattaatagatatggtgctgtggataacactgaactagaggaggacataaagaaagagaagaatatcattgtggagagggaactattacttaataagattaatacaaagttagcagcagcttcacgagaagtgaacgatagaagagaagcttacaagacctttatggattctgtgaatgaggagacagggg

SEQ ID NO: 443508 - DNA, 272 bp, Triticum aestivum
ggtgagaggcgccgtccacatcggcatgccgcacaagttctaccacggacgcaccggacgcgtctggaacgtcacgaagcgcgccatctgtttccagatcaacacgcaagtccgtaagatgattatcgcgttgaagatccatgttcgtctcgatcaccttcatccatccaggtgcatcgaagactttttccctcaagaccccactttccgtggtcgacgcgttgtgaccttcgacagtcacctggtctctatactattccgtcatcaaaagt

SEQ ID NO: 443509 - DNA, 410 bp, Triticum aestivum
tctgccttaaagaaacataatctgctgatgtatcaagtcccgaggcaagcaatgtacttgtacatgttaaaacaatcaagaaaagaagcagaagcttgcggagcacccgaggactgtgcgtgcgcgtggactggcggagtactacaacaagtttatcatcacgtcaagagaaaaggaaggagtgcctcacgttcggatcagctaccatatccgaattctactaaatgttggtacaagtccaacacaacaaatacagatcggatagctgcctaattatgtgatggtgcatgctgccaaagcaaccccgtgtactgatcgaacacatacctctagcaacagtacttgcatggtttccacagcacagcgggagaccaaaagtactgcttggctaataagtgtatcaaagaaac

SEQ ID NO: 443510 - DNA, 435 bp, Triticum aestivum
tgtactctcccttgcatccctcgcgaggggcctgaacaggtaccctcgtgagcttcctccttctgtcttttcatgaggcaccctcgttcgagccaacaagccggcgcacctctcctggtccgggccccacgggtatcgtgacgagaagcatgctgctactttgaagcacaagtgtggaaaaaaaggatagtagcattgccccttttttgggacaatgctctattaatgatgatcatcacacttctatttatttacaactcaatgattacaactcgatactagaacaaagtatgaatctgtatgaatgccttcggcggtgtatcgggaagggcaatgaatcaagagtgacatgtatgaaaaattatgaacggtggctttgccacaaatacggtgtcaactacgtgatcatgcaaggcaatatgacaatgatgatgt

SEQ ID NO: 443511 - DNA, 354 bp, Triticum aestivum
cggggaaacaggagaagaagtagaacgagaagaagtagaggagcgagaagaagtagaagtacaagaagtgcaagaagcagacgacgaagaagtagaagaagtggaagaagacgcagaacaaagaggaagaggaagaagacgaagaagaagaagaagaagaagaagaagacgaagacgaagaagacgaagacgcagaacgacgaagaagaagaagaagaagaacacgcagaagacgaagaagacgaagaagaagcacaagaagaacaacaatcacatgacgaaaagtccaggaacaagaagacgacgacgacgacgaagaagacgaacaagaacacgatgacgaagaggaagaag

SEQ ID NO: 443512 - DNA, 202 bp, Triticum aestivum
gtcgacgggctcattgatcttgggctaacctattttgccattacagttccaattggattcagaaaagttatgttagccaaccatcctcactgggagtaactacagcaagccaaattggacatcaatgcaatagagcaattcagttcaatgctcaacacaagttctgaatgtcatttcaccccagagtggcagcatcacccca

SEQ ID NO: 443513 - DNA, 287 bp, Triticum aestivum
cgggtcgaccggttattgaatttaaaatattactttctgtgcatccgtttatcaaaaaattgagagatggccagtcgtcggcttctgcccccatgccactagtgctagggtgttcggcataaacctgggcgctctttttcccatagttgggtccttcgagggagtcgctcagcacaacgaaccaggcaatctgactataatgcttgaacactctcacttagccatagaactctataattttaaatttcggcgaagcccctggtgttcggaaggccgaaattggggag

SEQ ID NO: 443514 - DNA, 105 bp, Triticum aestivum
cgggtcgacggggagtccgaatcgatgatcgagtggcggtgatgatgacgtcaaatcgtgcctaactagtcgaaacaccttaggacacgagagaaaccgcaaccc

SEQ ID NO: 443515 - DNA, 408 bp, Triticum aestivum
gtcgacggggataatgaatgctaggctgtagtagctgatgccgacctcgacaactgtagatgacactgttgcgtctcatacatacacggttaccatacgttcttcagcagagtgcgttaggccagaggtctgctgtcactctcggtctgcgtgagcgcgctcgttatagtacagttaacccatggaatcgaggatgctgctcatgatacttggtaaacatcaggtacactctgagtatcatccgaaacccagttgcataccacagtcaatttagtgagtcggctgtgttcggtcgtagagcgatcacatccatatctggagatcgctcaagtggcatccttattaactgttgtactagagtgacttgggtttatgtgttgaagaacatgaacgatgtctttgaatgct

SEQ ID NO: 443516 - DNA, 372 bp, Triticum aestivum
gagcattttggttttcttccgaccaaattctcagttctgcctggtgcagtagatttcttcagctagaccgctgtgctatttcttcctgtaggatttcgacgaacagaagacgcatgatccttggcagacttgctctgtccacctagtcaatttgttgtgacatagatcaccacgttcgtcctcctgttacgctagcttaagatggcacgacaatcgggttgctcgacttactcatcttctggtcaggtagtacgtacatgaaacacagtagttgctgcgcggaagcacccaccatgtaaattctatgcctgtacgcacgcagcatataatagtcagtcgttggtgttcatacacaagctgtagaatcacagc

SEQ ID NO: 443517 - DNA, 426 bp, Triticum aestivum
acattattcatagccaaatttatcttttttgaatctctaactgtagatcgagttttgagttgatttttttaagttatagacctaccccgcaggtatgttgtacattttttcatatttttttaggattacctaaatatgaaatgtttgggttgattctacgatcttaccgtggcccagtgtcttttttagggacgtgccatcattcccctcatgatcgttgttctgcctaacaatttatttcttgtttaatttggctaccccacaacgtggttacgtaataatcatggcttacatgattccgttcaaacacatagccttttgctaataacaagtccagtaatctaacccttacacttacacgttcaacccatatccaatatggtttgatgcaacctttagaacaataaagaccgggaaattaccttt

SEQ ID NO: 443518 - DNA, 240 bp, Triticum aestivum
ttttagcatttatagtacagtattgcataaacagtttcacctgatccctggttcgatgtgggttagtgttttccttactgatgatccaaaatgagacctttgggatacttaacggtgatgatagatttgatcttgctgaaacacagaaacttttgatccgagtgaaattaatttgcaggtgcatcagaaccgtgactacaatcgggccgactttttccatcggatgagcaaacaaatttc

SEQ ID NO: 443519 - DNA, 321 bp, Triticum aestivum
  unsure (1)..(321): unsure at all n locations
attcngggaatcatcactcaacatcgctatgtactcctagatggggaggtgggctatatctggcagagatgcagcgtctccgatgaatgcaatacgggcatacggtggacgaaacaactgcggtggacgcggcactacaccagccgttggggctgggcggcgctgtgcattgctgcctgtctagatctgtttcagattcagaaaagttgcccaatacgtgtctccttgcggtcccacccgtcagcaggcaacactcagacgaggactcggccccactcatcatcaattaacggtcaacggacggtcaagatgacaaacgcc

SEQ ID NO: 443520 - DNA, 410 bp, Triticum aestivum
gatggaggcgcaggctcgccatggcgtcctgccaacagggaggcagcagcacctccatggccatggccaggctcaccatcaacctcccgcgggagaagatgagtggtgggagtacttcccatgccccttctgctacattgaggtggaggtccccttcctctgtgaccacctgcaggaggagcactgcttcgacatgaggaatgctgtgtgcccgatctgcgccgacaacctcggggccaacacggccgggcatttcagggaacggcactcacaacaactcaagatgaggaagtcttcttcttccagggcaggagcagcagatgacaaggaagcgtatgaagatgatgactcctactatgaagaatcatcatacatcatgggcaggccagtacctgatgatcattcacctg

SEQ ID NO: 443521 - DNA, 390 bp, Triticum aestivum
attcgccggtcgacgggcttaacatgaaatctctttgcaaaagaagagatggaacaggccctggttgtacaaatgtatgtcaccattcttctgcaaatgcagaaacggaagggacttcaatggtgcgtagagctgttctgtaacaatctagttagccttacagtctaccgtgttgttgagaaattcttcactattgatttccattcaaatatcccttttgtaatccaactgtcatttcaactaccttactgaaactgcctgacattgtatattgccacaatctagaatgttcttttgcgggtgaaaaaaaaacaaaaaaaaaaacattaagcaaacaagaaaaaggtgtaaaacactacatcgaacgagatcgaaacatcaaagcacatt

SEQ ID NO: 443522 - DNA, 182 bp, Triticum aestivum
atcaccgataagtttacagtcaatacaatgtcctactcatgttcgatggctctcatctccgaataaaggggttcaatgggttaagatctatacgaactgacacatctattgccttcactggatgcaatatatttcatccaacgagctaaatagatgcttgatatgttcctctctgaaatgtc

SEQ ID NO: 443523 - DNA, 331 bp, Triticum aestivum
gggtccacgggttgactttaaaacgtgggcatgttcatgtcagagcgacactgcacgtctgagcagctgtcggcgtgacctcgatcatgatatgttacagtggatgattcttgcatgaggtcgatcttcgcacatctgtgcgtctatctttggcgttcgagctctaacttgctattcttgtatgtcactcaatgctgtcctgtgtcgttgtcgtgtgcatagtgtcggataggaggtcatggagagtattggaattccactggcatgtttgtgtcttggattgcagtgtcccagttgggttatgttgatggatccgaacggttcctaagtc

SEQ ID NO: 443524 - DNA, 294 bp, Triticum aestivum
catgccatatggtaattgttgcgtaataggaatacttgtgttgaagattgtgtttcccgtagcatgcacgtatggtgaaccgttatcaacttccttctcaacttcaaggaaataaagagtgtcttacttatcaagttgtccacccaagaaaagggcatgtcttccgaacaggctaaccccttaagggcatgcccagtagtactttgcttcaagggctaataaacttttgcaatgaatatgtgaattctttaacactaatgttgactccacggattaaacgcactctcgtgctcc

SEQ ID NO: 443525 - DNA, 254 bp, Triticum aestivum
actgctgagttcaacgaactgagatttgccaaacgttccttcgtgtgatctggccgattggccttaactgatggtctggccggttgaagggtttgcgttttgtggttgggttaaaaacctgtggtaagtttgaacctggttcgcaccctgggcaataagcatgttatacgggtttccgaaaatgcttgttgaatttgcggttgcaaagcgggcgctctaaagggtttcaaattaaataactcgggctcgcacgt

SEQ ID NO: 443526 - DNA, 425 bp, Triticum aestivum
agactcttgaaaaacactttgagtcctcttcatttaacattggcagctctggtgcgacacctgaagttactgattcctcggttgctccaagcacgaaagttgaagagttgagctccagccagcaggacgtattccttcttccattaagatcacatgataactcagcaaagttagagtatgggacatactcatccatgctaggaaagcttcgtgatcaggtcctggcgaggccgttgaggccgttctcgaagaacctcacagagcgcgactggctgaggagctcggccaagatgtgggacatggtgaggagatctcccgtcgcctcggactactgcaaggcgctccagagttcaggattgttcaggaagtagccacatgtgcgttgtaatgtcctcgattcaaccgacctgagacacaatttgaat

SEQ ID NO: 443527 - DNA, 422 bp, Triticum aestivum
gggtcgacgggtacggcggaagtgctagagataggagacagcagtacgagatagaaaggatgggcggagactctgtttcatgtgcgtttccattacgtctgggtagatgttctgtttcccgtgaaaatcgctggaaagttgcctttcccaacgaaagtgttacgctctttcctttgtcccgaacgcctccaaaagaaaatatccataggaaaggaaagttgtatgattcctgtgataaatccttcgtcgcgaatatggcctgagagacacagggctgggataccgcagatcgggagtggtaaggtcaaaggaaccgattgacagtggactcacgttcaggggtttttttccagcggaaaatcaacgtgggggagaacgctatcgggtgcccgaagggattaaccattcgggccacatttttt

SEQ ID NO: 443528 - DNA, 360 bp, Triticum aestivum
cgggtcgaccatttggttcaatttgatgaggaacctattccaaaatttgcgcgctgactctccgggctgttcagtttacgagtaacatcagctgcatccggagggcggacataagtcccgtgaaaatctgctctaaacgcgtcctcgagctcatcgcagcttcccatagtgttttctgggatgcttttaagccaatgcacgctggccctttgagcttgaggggtacgtatcttatggcgtcgacatcagctcctctggccatgtgtaaatgtactatataatcttctatccagactccaaagtccgttgttccagcataggtctctatgctcatggagttaaatcctgcagggaattcat

SEQ ID NO: 443529 - DNA, 363 bp, Triticum aestivum
gtgtggaacaattcgctgcggtacgggatcagtgagggaagcgacgtcttcctgctggtccctgacaagctgcccggcgtcgagaatggctgtgccgtggaggtgtgcattcgcaaggtggtggctggtaactagctcaagctgtgcgccgatctggaccgtcattgtcgttctggctgcagcattgcctgcgagagttctgctcatatccgagtaaacttgaacggcatccgtattggtgaattccttagtcgttgatgggtcttctggtactgagatggaagcataggcatctcgcgcatcgctgatgcatgaaactgtctggatatcgtcttttctgaggagggtgaatttggatatgct

SEQ ID NO: 443530 - DNA, 285 bp, Triticum aestivum
gcctgccttccaggatttattagttgtctctcattatgatgttcccctttttgtgatcagaaacttgacaagttagttactgtgtgtagaagaacaacatcaccgtgggatctttgtagcgcttttgtagtccaatttttaccggaagggaactttatagtcgttaaacgagcaaaaaataaaaaaaaaatcgtgcacttgtctgtctgcaaaaaaaaaaaaaagtaaaggaggtttatccccaccaaaattcaagagttgggaaaaaccaatctgggtttccaa

SEQ ID NO: 443531 - DNA, 420 bp, Triticum aestivum
ctcatagggttcagtggcatcaacatgtggaaggccaccttgacgtaatcggtcaagcattgacaggtcatctgcagcagtaacatcttcttgttccagctcttcttgttcctcctctagggtgatgtgggattcactatcactgtctacttcaatgttttggggtgaagtatagcggttcttgaaatgctttttgaaaagacgtgtctcttggaagaactctccttcatatgtgtctgggttaatgtgaggttcataatcctcttcctttgggggagatagtctagcacgtggcgacacttcataaacgacgtcccaacctttcagatttggattagtttggcaggcccacggtagatagaatacttgggtcgcctgttgaaccgtaatatagacatccggaacatctaaatgggtgct

SEQ ID NO: 443532 - DNA, 305 bp, Triticum aestivum
tccgggtcgacgggtcaattcaaatcaactcagcggaagatcgggaccctcgcctctatcaagtggtatcagaattccaggttggcccgtgagattttaaagtttttccgaggttagattgaatccggtccgcaaaactaatgtccaagttagagccaagaaatagaatatgggtaggtcaacacatctgaagtaatccaagccatgcacaatccagtacgtacacgctttgcagaaggtgctgttgcaacgacgggttcacttgatggccttaccatcaattgcgcaacctgaatggctaatgg

SEQ ID NO: 443533 - DNA, 124 bp, Triticum aestivum
ataaaggggatgggaaccgtgggctcggtaaggcttccagatcaagtggagcaggggatcgtatcgcaaatgactcaatatagaaaaaaaaagcggcccttctaaacgatacaagcatagtttc

SEQ ID NO: 443534 - DNA, 119 bp, Triticum aestivum
cggtggaatcacactcaacctggatttggttgctggatatcgggggttgatacaataccaacaaagttttgaagctttgaaccccagggcatttgccgtcttgatcgatcccatccaaa

SEQ ID NO: 443535 - DNA, 393 bp, Triticum aestivum
  unsure (1)..(393): unsure at all n locations
tcctcctcaccggcgtgctggagcacacgctcgtcctattcttcgtacgctacatgcatagacacggctccaccagctgctcgcgtgcttggcagcgctgcggcatggcgaggtcggactgcagatgacgtgagcgggcgagccttcagcttcaaggcacanggatggcggcgacacggcggtgatgggcgagaaattgttggccggagcaggctggtgccgacatgcgcaacggtggcggcggcatgttgatgagtgcgtgtatgggagcttactttagttttatataaggttggtcaaccctttttttcctagtacacgtaaacattagacttaggcaacccttttttttgaagttagtaccacaaccacgatacggaaatcctgtgcaag

SEQ ID NO: 443536 - DNA, 360 bp, Triticum aestivum
  unsure (1)..(360): unsure at all n locations
gggtcgagtcgagaggaggagtggataggccaaagtggtcggggggtgcgtggcgtctccagccagcctacaactttggtggaaccatgaggtggcttgggcgcttgctggcgcccggcgtccgtcttgcgggagctggacgacgactggtagcgccaggtggtgggttgggccgtgctgggctaggccaggtgagcgccaggtgataaacacctctctctctctcctgtttcctttctgttttctgttttctgttttcttttgtttgttttatttgatttgaagcatcaaatcatttanaatatttttgtaaatttttatgtgagctcaggaaaccaaanaatgatggaacccttgacc

SEQ ID NO: 443537 - DNA, 414 bp, Triticum aestivum
tccatcgtctcaaggttcgacatgatccaagccgaggcgacacctagccactccctcggagccctggctgtgccaggctgccagcggccagttggaaaaggaggaaggcgccgcaccatccctgcatgcgacgtcttggggctggagccggcaaccgcgcgctgcgacccttggctttctatcgagttggtgggctccgtgatggagatgggggccgatggaggcgccgcgtgagggctcagcagccgcgagctttacgatgctccgttgtactgtagcagcgatgtactagtgctatccagtggaatccagctttacgatgctgctgcagcactgtggggacgtacgacggtacgagcaatatctatttgctaggaataactgtgctatccagtggatgttaaccttttgcgc

SEQ ID NO: 443538 - DNA, 419 bp, Triticum aestivum
  unsure (1)..(419): unsure at all n locations
gtcgacggggcagctccatggaggtggaggacggggcggctgatctggcgggacgacgagatcgacgacggatcctcatccggtgcggtggatgagggacggcgagctattgcggtggacgacgtcgtcggggaagagtctccggctgggcggcagtcgggaggccaacggaggagcgtggggtttcgcgggttttggcggcctcggtttatgaatggggaggcgaaggggaaggtaggggaccatggctcagggacgtgcgtgtccgaaatgtanggtaagttaccagagtacccccaccggttttgacaccgtgatgtcgaaccggcatttccggctgaggggtaaaagggggatttcgcatgtctgggccgccggaccgatttcggatgacgagggagttttcgcgcgcgtccaaa

SEQ ID NO: 443539 - DNA, 284 bp, Triticum aestivum
tcgacaggcacatgatagggacttactagagtatactatgtgcttcacttaaatccttggggctagagatgttttgctcgaatgattcacgtatggctatacgatcatggaggtggtctgattatgaagtaattattgatcgcccaagctacacgtagatgactttgaaaatcttattgaacatcctagcaatctatatccttaggggcatggttataagaagattgccacacaggctaagtatcttttgcaatatcttagtaagttaattgagagcaatgttc

SEQ ID NO: 443540 - DNA, 270 bp, Triticum aestivum
atgtgctacaagttatagaacatgcatttatagatggatatgattcttcgcagtatatccggctgtcaatgatcggctcatcatggtctgcgcttctgcattcaactagtaccctacgatatgttgctgttgtaagatgtctagcctgagtattactatggtaaccttgtggtatacattttgtaacctgtaaggcaatttcatacctggtccattgccgggtatttggtcgccaagatgctgctggaggatccttcgcatcttggtatg

SEQ ID NO: 443541 - DNA, 434 bp, Triticum aestivum
  unsure (1)..(434): unsure at all n locations
tacacctaccgtggccgtgatattagatacatggcgaccgcagaaatggggaggaagccgaacaaaaagaggtgcgcaggcgtaaggtctcggagctgacccacgatctcctcgggcccgagcctcctccccgccacaaccacggtggctgcggccattggtatggtaatcatggctaagaagttgtctacgaccagcttgtanacacatttgaggtgcttgcaaattcctgatgaactcatggtgtcgaagccaacatgtgtttctatgcgtgtgtatgcgaggagagaccggtcttacatataacaattgattttattgctaccaactaccaactaactaattgtacaaatggaatatggcacatgttgtagcattatgcgatcacatgtntttttctctaatatgtacactcaactaataaccatatagtg

SEQ ID NO: 443542 - DNA, 400 bp, Triticum aestivum
tctgcaacattcagatccatatgtacttcgcaaatttctatgtcatcttgtagatgcaactactacgctacatttggagctattccaaacaactgttctactatatgaatccagtttactattcagaataatctagattagtgtcaaagtttgcatcggcgtaaccctttacgatgaactcttttacacctccataatcgagaaaattccttagtccactagttactaaggataactttgaccgctgtcttgtgatccattcttggatcactcttgtaccccttgactgactaatggcaaggcacacttcaggtgcggtacacagcataccatactgtaaagagcccatgataaaagcataggggacgaccttcgtccttcgtctttcttctgccgtggt

SEQ ID NO: 443543 - DNA, 330 bp, Triticum aestivum
gtcgacgggaggattatgcgcattttgtctatgaaagtaactgcagtcctaacgaagatatgggtgagatcttcaacgactcagatgatgactaggatggtgtctctactaccgttctgcggctcgcatctcatgcatcacggtggtcgagcttggaatcattcatctggtatacgtggcatctcaattctggacacatcgtgacttgcatcgtctagggggtcacggctgatgcgacctctcactgcatccgccatttgaaacagcgcaccggcctatggcgccacccgctgcactcccacttgtaactgcctcctccccgcattcaaa

SEQ ID NO: 443544 - DNA, 396 bp, Triticum aestivum
ggccgacgggaggatgctgtcaagaagatattccaaagagccttgcagtattgtgatcccaaaaaggtgcacttggctcttcttggaatgtacgagaggactaaacagaatgaactggcagatgaactttttgatagaatgaccaaaagattcaaaacttcgtgcaagatctggttgcgccgcattcagttttctctcactcaaggcaaggatgttgaatacatcaaatctgtcgtaaaccgtgcgcttcttagtctgccacaaagcaagcgtataaagtttctcacgcagactgctatcctggagttcaagtgtggggtggctgaggaagggagatccagatttgagctgatcctaagggagtatccgaaaagaacagatatttggagtgtttac

SEQ ID NO: 443545 - DNA, 305 bp, Triticum aestivum
ggtaatgagccagcccagtggcagccagcttgatcagtatcacccagtgtcacagtagacgaatgggcttgtagcaatctaacaatgtggtctacaaagatggtcacatggcatcatattaactgctgaactgttctagttgtttatgaatcttgttactctagttttctatgggattagctgatggactgattaacatgctactagcaatgcaactaggcagtgtttgactaaatctaatgcttatcattttactgcgttcaaaaaaaaaaacaaaaaaaaaaaaaaaaaactacaactcaaaa

SEQ ID NO: 443546 - DNA, 170 bp, Triticum aestivum
ctggtggatgcgtgcctgctggttgaagtcatcaagcattccgcctgtattgaaagtgtccatcgggcccatgcccgtgtaaaggtgcactggggcaagatggatgcccataagctcgtgacagacccaccaccatatggcaatgagcatcgcactcccgagatgtatta

SEQ ID NO: 443547 - DNA, 374 bp, Triticum aestivum
cggtcaacattccgggtcgagggggttgttatgagcccaacgttagtgttaaaaatcactcaaccccaacggggaaaccaaccgcaacgcaaccttcaaaacaatgaagggggaacaatccccaatggcccaacaaaatccggcctttaattaaccaacgtccaagttaaaacaatcaaactcaaagttcaacctgcaagctcctaagttaataaccaaacaatgttttggttcaaatgccttggcctaattcaaacctttgattccacgattaaaaaatggagttaatccttggtaatttttaatggaaaaacgctcggatgggtgaagccttttcttaagggcatgaaaaatgttccttaaacctttggtcc

SEQ ID NO: 443548 - DNA, 391 bp, Triticum aestivum
attcgccggccgacggggggcataacgcacgaaggctccagaattaagcatccttgtctatcccagcatggtcgtcacccatggagggcttgcctcactcgggtagatgttcaccaagtatgcaagtctccggtgcacgttacagcacttcttcggttcaactctacatattgtcggaggctcccaagctacaccgaacaaatctagaagacaccactctccaaaaagtaatacattgtgtgttgatgatgaactcctcgatcttgtgcttcaaatgataatctccccaccaatcaactcagtttcacagatttggctatggtggaagaaagatttgtgtggaaagcaacttggggaatgctacaaatcaatgttcaaatggtaagaatgg

SEQ ID NO: 443549 - DNA, 392 bp, Triticum aestivum
atgaattacatcgcatttccaaagttgaccttctccccttctgcatactgaccttcttcctctcgcagcacacgcggggagcaggatacagagcggcatctcctccacgccggtgttcgcacaaaaccgaactaccccagtctcctcctcaacaccgctgtttcgccctcaatttccatcggcctcttctacatcggcgtcagctctctccgaccttcctcgtcaactctctctgaccttccccgcacctttcctctgctgccgcgcatggtgcttcgtggcatcccaagtgcctctccaaaacagtcgtgtgtagtgctcccctgaaatcctcatgtgtggaaagctatggcatccagctactacggctgtttctaattaacaattttcct

SEQ ID NO: 443550 - DNA, 392 bp, Triticum aestivum
acactggctgacacagtagcacgcactcttgcagaggagaacggacgggatgtacctgttgtcaagccactgactgttttgggcccgatgagtcaacaaaggctcaatgctaacatgggtatgtttcgtcacctaccatatcggctgcactgacgactacaccgacttcatcattgagccaatccacgtcgaacacgtcacagttaacccatatcacactgttcaagatttcgtcgttgtccaggaggcaactctgattcgcacacatctctaacttgcaacgatgtcacatctaaagtcacctagctctattctgatgacaacgtctcaaaattctcctctgacaagtaacctttgctcttaagagcatcagcagttcttcaaatacttaa

SEQ ID NO: 443551 - DNA, 443 bp, Triticum aestivum
gggtcgacggggagaatccctcggtgccagtggcaggcgaatccctcggcggcggcgaaggcgacgacgacgcaggttattcttcttcagcgcgcaagatcgatctagtcctcgtctgaaatgggggacgagagggtcgaggccatggagattgatgggcagcagcggcaagaagtcgccgccgctgtgccggacggcttcaacgccgattacctccgaatctactacggaaagctcttcccatatggtgatttcttcaagtggcttgcatacggaaatgatgcaaagcatcctggatgtgatcagtcatacattgggcgtcgggagctttcgtttacactggagaatgacatctatctgcggtttcagtcctttgatagtgcagctgaactggagacttctatcaaggagaagtgccctttcaagattgatattggacctgt

SEQ ID NO: 443552 - DNA, 133 bp, Triticum aestivum
gtctgttaataacagggtgcaagagtgctataaaatgtgagctcctgttagtcagcagattagtatcatatgtcatttgtgtcacatttgatgcgtccatgatccacaactggggcgctagacgtgtatgggt

SEQ ID NO: 443553 - DNA, 374 bp, Triticum aestivum
aaacatcctcggacgacctccccgacgccgacttagaaagctccaaagcaaccccgagcggcatcatcaaaaccgatgaaggccctgccgaagatgatgatggagattcccaccatttctgggtaatggcataactcgtgtttcctcatttaacatggatatactcttggctgactcgttcactgaccgactaatttgtgaaatcgtagtgcttctacttctgagacctcagccagacatgaagatcaagaaatggaggatgctgccacttgcaaccctggtatgatctaaatagtttcgctttcggtcgataggatcctcatttttaactttgaatcttttctgtagctccacctagtatcatcattgatctc

SEQ ID NO: 443554 - DNA, 381 bp, Triticum aestivum
tttgtcacttcggtggaaggtgaggcgggcttgttttcttcttcagcccttacatgcgtcttcagccatctctatctccgagacgccggcttcgacttctcctctgtcctcactcccgtggactctgactctgagggcgatgctgctgccgccgtgaagagctccatggacgccatgatgagcaggttcctggtcgtcagtcctccgatcgggaccgaggggacgggcgacgcgcctggcgatggggctccgctggcgggtgatggcggcacccaggtctgaagaggtggcttcgtaacgatgcaccttcatgtttgtcctgtatcatgtagcatgcctcacagaggcatttaaaattgtttgcttggaacaatatgtttt

SEQ ID NO: 443555 - DNA, 379 bp, Triticum aestivum
cagcggacgctcgcttggcaaagctactggttccagcaccctatgtggtgccagaaaagaaggccaagaagaaggcctcggggactcagaagagtgcccagcgcctaggggtgtcggattcatcatccggtgactccaagacgtactcctcccgtgaagacgaggaggaggaagaagagacctctccccctccagcggggggagagaggaaaaggaaggccgccccacctagggaggccgaagggtccaagaaggggaaaacccttcctccggacggctccaccaacgccgacgacggcgaagaggattggccgcacatggccaagcccctagcgagatcgtaagtgtctggataccagaatgattcatagtattcttc

SEQ ID NO: 443556 - DNA, 388 bp, Triticum aestivum
tagggactagctgccttgtactatgaaatgcttcctgcagccggacaaataatgagttgcagctcgcagagcgactgttcggtctgcaggagttaaggctgaagggatgtctgcctaaaaaatggctaaggacccaaggcgtacacatagtccaagtcggcttcccgcctcaccgaccaactgtcaagcagccgaccagccggcccctacttaacttgctagaaaactccaatcggctaagtactttccttcccaaaagtggctaagtacttgacccagccacagtccgtggaatggctgctcggctggcaaggtggcaaccgagggaaggcggcaaaggaaaaaagccaaagagcagaagcaaggaaagatattacttggcaaaaat

SEQ ID NO: 443557 - DNA, 383 bp, Triticum aestivum
aggtagaggcgaaagtgaggctggtcatggagtccgagcatgggaagcagatcagggagaggatggcgatagcgaaagtgattgcagccgatgcgctggagaccggtgggtcctcagcggcagcatttgttgacttcctggatgatctcaagatttccatgctagatgttatttaacctttagtgttcgccttgttcagcttggtggaatttgttttctaaatgtttaaaaacatccggctgattacagcgcggtgtaaacctcctccaatgcgcgccacgcctccagtacagagccaccaccgcttttgcttttcacttagagcatgggtaataatatgctcccctcgtggttaaatagactcgactcaaccttgtactaac

SEQ ID NO: 443558 - DNA, 448 bp, Triticum aestivum
  unsure (1)..(448): unsure at all n locations
gggtcgacgggcaagccagacttgatgaacaggctgtgaacgatgactcagaggacaacaattacatgccgctctccgaggatgaggtgagcctcggcgatgaagaatttatcgtgcctgaggatcccgtanagcaggagcgttttaagcgccggcttatagccacgacaaagagcctgaagaagaagcagcagcagcttcaagctaatcaagacctgctcactgatagatggattgaagtcctgtcagccgaagaatgccgacttgaacgcccaaccaaaagttacccgaagtgcaaattgctacctcaattcgatgacgaagcgctggagccagcactacaagtgcataatgcggctcaccgaccaccacgtggccgagataaaatgacaattctgcccgaacaccaaccggcactgcgtcaccgaacaaattgaaatacaacaac

SEQ ID NO: 443559 - DNA, 374 bp, Triticum aestivum
  unsure (1)..(374): unsure at all n locations
ggcgccaaaacgcgcagcacgcgcgcctcgcatgcggtggacgtcctcgctccactcccgctttgtccacgccgtggagcttctcggcggccacgagagggcgacgccaaagtcagttcttgaactcatggatgtgaaggatctcaccctagctcatgtgaaatctcacttgcagatgtacaggactgtgaagaataccgaaaggccggcagcttcgtcaggttgatggcttcgagaacgggtcggctggcgagatctgcgacgacaacttgcttgacctgcgaggcggcggtaagcccgaggcagtggcaccggccacacggaatggaacgttanctgcaaacgacgatgacaggagcatcggcgccggtgcc

SEQ ID NO: 443560 - DNA, 386 bp, Triticum aestivum
cgagccaacccgcgagctacaacccctgggagaccaccggtgccgccccggccccgatgatgcaacagccagcagcaatgcaggacccgttctacggctcaaacgggtatgcggcgccccatgcggtgcagatggccgccatggcccagcagcagcaggctttcatgcttcagcagcagatgatgatggccagccaccaccctcaggcacaacaataccaccaggcacaggcggccccagcgaacccattcggcgcgaacccgtttgcgcccgccggcgcccaacacccttatggcggcgctggcaccgggatgatgcccctccacgccgtccacggcaatgcgtacaccgggctgatctaaccggtggttcacagatgaaaactt

SEQ ID NO: 443561 - DNA, 441 bp, Triticum aestivum
  unsure (1)..(441): unsure at all n locations
gggtcgacggggagccccggcatccgaacacggggggacagaagaaatttcctccccaggtgaaaacggtcaatatgatatacgccacccacattcccaaacgggaacgaaagcgagcactatgggacgtctatgcgatggagccagtcgccccaaagttcaacccatggtcggcctgtccgatcacttttgattgtagggatcacccgaccagcatccgtcatggcggttcagccgcattggtcctagacccaatcattgacggatttcacctcacgcgagtccttatggacagcagcagcagcctgaacctgctttatcaagacacagtgtgcaaaatgggcatcgacccttcaaggatcaagcccaccanaaccaccttcaaaggtgtaattccaggagtanaggccattgcacgggctccataacactggaagtggt

SEQ ID NO: 443562 - DNA, 390 bp, Triticum aestivum
atcaaggcaacatactactccctgaagacatttgtctgtcgtcttcaggcgaggttgaagacctggagaagcttatcgaccacgtgttcccgagtctagatgacaacatgtccaattcaaattacatgacatctcgagcaatcctttccactacaaaggaacaatgttgacaagataaacatccgcatgatagagcgttttcatggtgatgaagtaatctaccatagctttgacaatgcggaggacgacccgtatggctactacgctcaggagtttctgaatggattgaatcctaacggtcttcctccacatgcactcaagctaaagttgaactgccctgtcatactgctaaggaacattgatccagctaatggattgtgtaacagcact

SEQ ID NO: 443563 - DNA, 370 bp, Triticum aestivum
  unsure (1)..(370): unsure at all n locations
aaatgcaaaaagctggcaaataaattaaataaccaagctcactcaagaaaaacaaatcgatttgcgcacggagaaggactgctcattacatatcttacacgcgggcggtaattatacaatacatcactcagatatgcgtacataatcctgacatgtcatttaggctagtgcacttctcccagttcctacatgatgcgcaaacaggctacttctcacaacctatgtacatataaacatatcgtacaaagcggtacattgcatggcggctaagcgtactcaggcggagatgttgacgatctcctttgccctgccgagggtgaggcgtancgaggctggggactcgacttcctccttgctaataggctccata

SEQ ID NO: 443564 - DNA, 396 bp, Triticum aestivum
tagaaaaattgatcggtcgaagactccatgatatccgctccagcttcatcaacatagtcatcatcgccatcgtcggggtccgagtcggtgtcgtcgatgatgatgtagttctccgggcaagtggaaccgtcatctcctcctctgggcgcggggtctcccatgaacactcctagcttccttgtcaggtcgtcattcttctccactaatacgacgctttcctcctcataatctttgcgtgcaaccttgagttcttcctccagttccgtgatccttgtcatcgccttcttcaaatctgtcatgcctgcgcacatctggttctcctggcgtcgaatgtgctagtttaactcctggatgaaagctgcaatcgatctatccttcctggtgctgatcatctcc

SEQ ID NO: 443565 - DNA, 431 bp, Triticum aestivum
ggtcgacggactcagcgggaaggaaagcaacaagctgctgggggtcaggatgacacagattggttcaacgtcggctgcttcgttgtgccagtgccacacttatgctggtacatgcacgtacgaccatggcgtctgcgcgacttcatcatcttcacccgaactggcccatcctcgccatttccagcgggataagcgagttgtatgaatatcgagaggtgagctggctctactcattgatatgaaattagttgggcataacttcctttttgcaacaggaaatgaaaatgttcccatgagattgattgatcgtgccccgcttttggatgctgccgttgcttttgaaccaatgtcatctatgtcatcggtcatgtaacctctaaggcagctgataatatatatgatgtgactgtcttttcatctaaagatgacct

SEQ ID NO: 443566 - DNA, 277 bp, Triticum aestivum
tcgacgggcattgggtttgcgacgccttgcatcgtatcggtatacgcatcttcattctgtatcttccacgaggtagctgatgtttacacctaccaccgtaccttctgcaatgtcacttccagtacgctctatctcaccgaacacctcctcatgcagttacgatcgggatgtttcttagcctacgcagacacattactgcttcctatcatctcatctcctaatatttgtccttctcttcacttttgtctccctagctagctctgtacgcacgcctatc

SEQ ID NO: 443567 - DNA, 291 bp, Triticum aestivum
gatagtaataaatgacctgcagtacgtggtgcagctggatgacacgaccctgatcgagcactatgccatctacaacttggtgcgcacggctcccatggccagctacatgcatgggtgggacacgctcgtgaccacctagctcgacaagcgtgaacatccggccgcacctcggctgcgtcaagaacactttcctccacgcgctcaagatgctgccgcacggcatggacaattagtacagctccctttagttcaccctcgtcgcgatcatcgtgggagcttgagagctgctgg

SEQ ID NO: 443568 - DNA, 90 bp, Triticum aestivum
  unsure (1)..(90): unsure at all n locations
ggggngnaacattttttacgccngccaagtgtcanacaaatcncggggccgacggggtcccctnaacctttgtacacaccgcccgtcgcg

SEQ ID NO: 443569 - DNA, 377 bp, Triticum aestivum
accttgtttggaccgaggaggacacatgcatactagcttggaggaaatgacaaacctgtttgtgtaattaaaattacatgaaccattttttaaacctacgcaagctttttaaaattatgtggacatttttcttaatacgtgaacattattttacaatacatgaatattttaattatttaaacatattgtaatctataattttcatcgaaattacaaaacacaaatctgtactgggtcgcagtgatcccagacgggagctcctatttggcaccatgtgtgttgggaaaccagccaacgcaccccatcgcttcccgtgcgcaattttgggctggcccatgtgtatggtaggaacaccagtttcattcatttcatttttt

SEQ ID NO: 443570 - DNA, 386 bp, Triticum aestivum
cgggtcgacaatcaaccaagattgccaaaggtgggcagccgcactcaaggcggttgacaagttgaacccaagtggcactaatgatagagatagggtaagtgccatttctttcatgattcttccacgctcatcatgcttcttcttggtgtttctagtgctaacttgttttcttgtttgtagctcaatattgcacaaaacttgttccaaggagatgagaagaagaccaagaaagggagaccatttaccttgcctcattgctatgcagaattgaaggatgatgagaaatggaagcctcgtgatgctatcgatgctgatgatgatgagagatttggatgatgatgaggatgaggcatcaagtgatgacggcaagagacgccctacacaaa

SEQ ID NO: 443571 - DNA, 203 bp, Triticum aestivum
tgcattatcatgtgaatcatgttggcacaatgggaaactgacatctgtagttcaaccattgcttcagttgctcggcaagacaacaatcatccaattccctgctaatttccttcagcattaatgcagtttcagctatcaagtcatccagccaagaagaaggcatagcaatcgatcttgcagaatcactccaacactgcttcctg

SEQ ID NO: 443572 - DNA, 434 bp, Triticum aestivum
acaatcatgaggatgtggacccatttgcgatggaaagtgatgacgtggatcccatgcaagaggatttgctaaatgaaatatacgaaaagacagccgatgaacctgtactaagatctggcgatggaggcgctgaacaacccgtggctccaagagaggcagagaagcatcaagatggagaggatggtggcggaagcaagccaagcaaagttgagctgacggaggagcagaaggcgcgcatggaggctaacaggctcaaggcgctagagagagcggcagcagctcgggctcgcgcgtcccagtcgctgcctactactgaaactaccacctgaaagcgtgcagggttttgaatcactccgccttgcatgtttgggcgtgtaagcatagatggtgtgtttcatggagatggtgttcgttgaaattgaggtgttaaatcc

SEQ ID NO: 443573 - DNA, 290 bp, Triticum aestivum
cgtacgaacatgcgaaagctatggtccaatagccacaatacgccagggaaaagttggtaaaataaaaaagttaataaccaaccaaaacgaaccaaaataaaattaaaattaaaattccgccggatccttttcggcaattcaagggtaacaagggaaacggcaaattcgggggccccccaaaaaaaaggccgcttggggatcaaaaacttctcaaatagcagctagctaaattgagtccttcatgtttcacaaacaaaggaaaattcaatttcgagacatgtgcttaaaca

SEQ ID NO: 443574 - DNA, 388 bp, Triticum aestivum
ccgggtcgaacggggcaacatataactgctggccaagctgatacacaccaggatgttcatgaccgaccacttttcaacaacaggcttttacaatatgatccggctgtagctgaacgtgtagtaaaccctcccaagcaagctgtctctgtatttgcagacacacagagcagtgaaatcaaagatcggatatttgatgaatttaacagcctatcagttgtatatcagaagccctcttacatgtttaccgacaaggaacatcgtggaactttcgagtactcagaagatcttgcgaacttaactgttggggcagaggctccagaaaccgtcatttctgcccaaagataccaagaaagcgatagtgatcttctgctaagtacttcagataaag

SEQ ID NO: 443575 - DNA, 393 bp, Triticum aestivum
ttgtcctaagcttgggggtgctatgattaatgaagataatcttgttagtacccgtacttttaatgaacaaatttgttatgatgacatcatgcctcctatttatgatgatcacaatgatgaaagtgggtttcgaagagtataaaatctaggtattaatgatcccactaatttggagggtgttgaatcttattacaataatgacaaaagtggatttggagaggtcttgactttatacagtgatgaatccactactttggaagaggtttcaattgattatgacaacaaagttgctatctatgatgattatggtaatgatatgtatgctataaagagtaataataaccatgaaacttgtcaccatgattttaatgttcaatttggttatgtcaatca

SEQ ID NO: 443576 - DNA, 384 bp, Triticum aestivum
cactacagggtctggggcagcacgaaggactccctggtcgaactcgcctcggccatcatcgacccctactacgaaaagatgaagcaggatgcccagagaacaagtcccctatcctggcacagggcctggatgtggcaactggatgaacccacctcaggttcgaggccaagtgcgtgtacacatgctacgaggtgcacaggcagatcgttgacatgaggaagtgcctcgtaaccaaaatcgatgagcccagatcaagccacaagcagagcaagcgtcacaagaagtagatgatgatcagatgatcgtttatgctagttaatcatgcatgtaatatatagtttactttattggtgtgttgaaatgtcatgtgtgtagtatccacct

SEQ ID NO: 443577 - DNA, 351 bp, Triticum aestivum
  unsure (1)..(351): unsure at all n locations
tctaacaagctttgaggtaagaattttaatatttataaaatagtaccgcatagacagtagcccctgatgcttggttcggtgtttggaaagaaaagccggactgaggatctaaaaagatatacgcaggagtcttaaanaaatatttcaatatgggattgcaagcttccctgctgaacttcaacggccctaactgcgaaggcaattgctttgaaccaaaccctcaagcggtccgaaaacaacccctccgttgcaaaaaacaacttcaaggacaaggaaggtaattaaaaccttattaaatttgtaccttacaaaaaaggatttggttgcaaaaggaatgacaaggataacttg

SEQ ID NO: 443578 - DNA, 363 bp, Triticum aestivum
gatatggaacagtgatccagatgcctcccaaaatgtagccgtgtgcgatgcagcacacactaaattctttcgcacatgtggtatcggtgattaagcgtttctaatgacgtagtgaaaccatacggtttgttgttacgaaccgtttaggaaatagtatgtaaggcacacgggccaacatatgaactgtgtgcgatttgtgcccgatcgcacacaagttttctatgtaacccgcctgccatgctagactccatcgcacacgttttccaacaattaccgtccgcgataatgttctatcaaaaatggttcaggagccccttcgcacacatacaagtgttgcagaccgaaaaaaaacacagaagaacc

SEQ ID NO: 443579 - DNA, 191 bp, Triticum aestivum
ttgctccgtgagatctgacagattggcgtaatttgcatccagtctgttcgtcagaccgatggtcgacgtttgggtcaaaacctgtagtagggttagttcatcccatccgaactagtctgagccttgcataatcggttctgtatttgctttgttgaatttgcggttgcatcgtcgtgttcagttgctggtct

SEQ ID NO: 443580 - DNA, 89 bp, Triticum aestivum
  unsure (1)..(89): unsure at all n locations
agtcggggacgaggtgaggcagctactgtgacggggacgggcgccctgngcgcgggcgggcttccagatcgagcggngcaaggggtcgc

SEQ ID NO: 443581 - DNA, 274 bp, Triticum aestivum
  unsure (1)..(274): unsure at all n locations
ngtcangaagnaatggggcggtggtgtcatgggctccaagtcgcaagccaagacaaaggcaaggaaaaggtcaacccaaaggaggttccccaaaggatgaactaagccaacccttaaatttcaaaacatatccaatgtattttccctttcagtgtgtcctaattttgacaaggaactcaaacccttttaccacaactgtggaacctaattgtggttttctgattctctgttccgttcgcaagactatatcaaagataagatgaggtttacccgg

SEQ ID NO: 443582 - DNA, 300 bp, Triticum aestivum
gatcagtaattcctctcctgcttctccacaaatcgcctcggactctcgcgagagcaaccaacctactcgcgccggatccacaccggcgcttcgaggcccaatgggcgagaatctcttcgaggagatcttcaacatgcatgaggatcgaacccagaagggaagagattcaacacagtgactcgcattgacgccacaagtggatacttgcttatgtacacgtacatacaaagtccaaccgctgtcaaactatcgcatatgggtaactcattcaccatcgttttacatcctacacagagtcag

SEQ ID NO: 443583 - DNA, 382 bp, Triticum aestivum
tatgacggtcctactttcagatgttcagtgcagaaggtttactcttatatattacagtttgaccagtagaaaagagacattgttatctctatgggttggggtggcactctatccattccactgattagcaagttgagcgtcagacatatggtttggcttttacggatggtggatgatgtcagacaagccattatcttggggccgaataaggtatttaagttcaacgagagcgacgttgagaagatatacggaatcccggcagctggaacagatgtgatggacaaaacccatgaataatggttatatacgcgtacaaagaaccgattaatggtatatgaatccagaaactcattatattacctatcatgtttgcaagcacctg

SEQ ID NO: 443584 - DNA, 417 bp, Triticum aestivum
  unsure (1)..(417): unsure at all n locations
ggcggggcaaaggccgcccgaagaaaactgagagcccggctgaaagctcgggacgaggtgggaagaggggccgaggcagaccccggaagtcttagacctctccggcgagcctttttggtgaaatcaggtcaagcgatatctaacacctgatatgatgtgatccagcccggccattcgacagtactctctgactgcctgctattcgagagattttttccgtgtagtggtaatcttgtgattgtgagcctgtaatgttagcatgcgcaaccgtattattcattggtgaccgtgagtgaatttttctgctcaaaaaaaaaaaaaaaaaaaaaaaaaaaaaaaaaaaaaaaaaaaaaaaaaaaanaaaaaaagaaaaaaaaaaaaaaaaaaaaaaaaaaaaaagggggcgccccaaagggt

SEQ ID NO: 443585 - DNA, 363 bp, Triticum aestivum
acgtattaggcaatttggctaggaagtggtggagtaagtaacatacttgtatacgtagtatgcatcgaaggtggatacggtgtccgcggtggtggtggtaaccgatgagcatggcatccatatagaacattagagcccttatccaccggtgttcctcggaagggagaagcctcaccccctggaattctacctggccatgtcttgcctctcgtatttgtattctctgcgagctgtgaacagaatcttaactgaagtttacaggcagttttctagttgcttgtttcaatttccgcatgtgtaatggtcgatggaatgtacgggaattgtttgctaaaaaaaaaaatttaaaaaaatagaataata

SEQ ID NO: 443586 - DNA, 376 bp, Triticum aestivum
ccgatgaaaattgggtggatcttggcaggaccgcgaggcaagagatcgagggaaagcaaggaagtacctaagctacacatgacgctaggaccgaacacgggatgaccacctctgactccattgggaccgggagaatgcacatactccctctgtttacaaatataaaatgttttgaatatttcaatatagactatacatggatgaaaatgagtgatcaaagacaccaaaacatgtctatatacatttaattcagaaaaaatctagaagatcttatatttgtgaatggagggagtactatcggtgtccctccttaagttagaggtgcacgtgaatccctttcctcctcaagatttttgttcacctcgtgatcctcatg

SEQ ID NO: 443587 - DNA, 195 bp, Triticum aestivum
ccgggccgacggggatcaccaaccagcaatccaattccccaccagccccctcgcaccctccggcgaaccaccgcacctctccccggcgaagcagcagcgtccgatggcccccaaggcggagaagaagccggcggccgcggagaagacccctgcggcggagaagaccacggcggggaagaagcccaaggccgagaa

SEQ ID NO: 443588 - DNA, 377 bp, Triticum aestivum
gatctaaacttgtatccattcctcaatacgcgagggcgtgcaactttcagtttgcttctgtggcgtgtgaaggcttgtgccaccgcagcaattaaccaaggaaaggaaggaaattggatcccgagaatgctgtagactgatctatgggttaattagagattccaaacggagctgctgatgtttgaaggattgatttgattcatcatgcctgcaccggaggagatcaagatccacgcacaaaacatcgatgctgcagcaagagagataattggcattttggaggatacaagcataggaaatgtgatcttcgtccgtggttggcgtggatttggggcatcagcggcactcaaggcagtagcacaacgcctgaaatcatc

SEQ ID NO: 443589 - DNA, 401 bp, Triticum aestivum
cgggtctataaatcttcacctctaaagccagctgtttggaagttctgataaatatgtctaaggcagaatctttgagggcaatttaggaatacattggctattgctttaagtagaccctgtgaaagtaaactaatgtttgaatatgatgccagaagacactatttgtaagtactaagcatgttctaatttgcactatttgtaagtactaagcatgttctaatttgcactatttgtaagtaccaagcatgttctaatttgcactatttgtaagtactaagcatgttctaatttgcactatttgtaagtaatatggtgtatgagttaccttttgtctatcagatatgatagcgtagtagccatgcttccctgactcaccaccaagagcatacttcagttgtgtt

SEQ ID NO: 443590 - DNA, 112 bp, Triticum aestivum
  unsure (1)..(112): unsure at all n locations
tttgnccagagacacanatgaactccggtcagtcacaagggngtacnccaataaataaatttgaaatccgcttgaccatcagggtacccatgaaatagaccgtgganttagg

SEQ ID NO: 443591 - DNA, 400 bp, Triticum aestivum
ggtccgtatacgaccccgttctcgggatctgctgccatttctgcaggcagaagaaactctgcggcgaggagggctgcaagcgctgtggggaaggagactttgagcagcaatgcatagggaagacggagtgctcctcttgccattcctcctatgggatcctctgccgtgcttgccttaaagttaggtacggtgaagagatggaagaggtcaggaagaacaagaagtggatgtgccctcactgtgttgaggagaagggtaccaagaaattctggatatgcaacagctccatctgcttgaagaagaggaagatagcaccaaccgggatcgccatattccaagcgcgtgagcaaggatatgcgtcggtcgcacaccttctcatggaccagctgaagagccgcgg

SEQ ID NO: 443592 - DNA, 387 bp, Triticum aestivum
  unsure (1)..(387): unsure at all n locations
cgggtcgaccggtactgctatacgttagctgtagcgccggtccccacgctactgagaggcccaaaacccgcgctgctgctaggcttttccctagtagtgcctgctagagccagcgctgtcggccatgcaaaaccaggagaagggcgcgcgacaaagtagtttttagtgcacggcgcgtagcgcgtgttggagatgctcttagggttagggacttagagtcagtatgtccagtggcaaagcttcggcagtagaagcgatgttgtgtcgaataaatcttctcccaagtccagctacacctggacggctttcatgatggcggcgataaggagccagtgggtttttctcttctggcattcctatggggtgtcngatctggtgtgtttgggt

SEQ ID NO: 443593 - DNA, 396 bp, Triticum aestivum
gaattcaaaatccttatcatcaacaaacataggtgaagtagcaaacttaggatcacatttcattctagcattcaaagatttctctttcagtttgcataataaatttttaagatcatctctatcattgcaagcaagaaagtttctagttgtctcctcatccataacataaccttcgagtactttaggcaattcatatctagaatggctagatctaataggtgttacaagattcccagtttcaagtatttcatcaatttcagcattctcaatatctttagctctagcaagttgttcatcaagaaattcacccaatggcatagtcttatcaagcaaggtactagcatcatcataagcatcattcatataagaagtagcatcatcaataacttgtgacat

SEQ ID NO: 443594 - DNA, 74 bp, Triticum aestivum
tgtaagacagatttacacatgcaaaacacttaggttgacttgacgagcctagcatgtacagacatggcctcggg

SEQ ID NO: 443595 - DNA, 334 bp, Triticum aestivum
ctagtggatacagaaagttgcaacggtggaattaggtttttggctcctgttctgatcgtttgggggtacgtgtgtatatctaggaggaagaagtacgccggacgagcaacaaggggcccacgacgcaggggggctctcaatttgcttgggatcctaatatgctatgtattcaacaataacaccactttcctatgactgtgtcgaatacatctagaactttgatacttgatgattgttttgaaatattgcggtaataatatcaatgtcatgctccttgattactgtgaacttaataaatgcttgtgctgaaatttgcaagtcccgtaccattcac

SEQ ID NO: 443596 - DNA, 294 bp, Triticum aestivum
gatatggatggtgacttccccggtggcgaatccgaaatctccgaagcgagcgattctaataatcgcaacgctattgacaccacttcgaatcacagatgtgattggtgatgagaatggcgaggataataaagagtatgcagacgatcaggccgctgcatcaggtgacaacaattataactatcaccacagtcactatgattctggggactactactatcattactatcatctctctgctgtcgacgatagacatcgagtcttataggaggatgattactatgaggatgacgacga

SEQ ID NO: 443597 - DNA, 381 bp, Triticum aestivum
acgtattcgacgaaaaaaatatatgcggccaatgcatggctatgaacgtcttcttgtgtggttaaatatgtgcacgtgtactctataccgaggagcattttcgcacaggatcttccttgcgtgaggtacagaaggtggccaagcacaagacgacgcgaagcactcgttaaaaagaaaggaaaaacgagctgggttccgcacctgactgctctaggttcgttcggagctagcggtcagatccgtcacgatggatgtacagaacctgcatcgacgagccgactggtgtcaggtgaggttgaaacagcctgtaacgtggttagtacctcgaggaaccggcgcgtgtgcttttcgaaagaagtggaacctgtggtagacgtgatc

SEQ ID NO: 443598 - DNA, 391 bp, Triticum aestivum
ccgggccgacgggaaagtatatgatgagaagcccaagagcatccctgacaagccgctgaacaaaaaaataaagtttgacgactctgattcctccgatgatgaggatcaaggtcattcagtggaggaggctaacaatggaaatgatgcagaaaaaggtgaagccaagtcatctgagcagcaacaagaggtacctggtgccttgggaattgccagcaaggaggatgaagaacaagtggaaactgctggcggatcagcgccaaagaagcaacggatagaagatcctctggtttctgaacagacagaaccaaaagcgcccactgatgaaccagcagagactactgatgataagccaaaagagtccactgataaaccagcagagactactgatgat

SEQ ID NO: 443599 - DNA, 306 bp, Triticum aestivum
aatgcccgggccgacgggagacaggacacatcctgatgatgcggggcgcaggcaatcaaggggcactcaggacagtgctctgcccatatcatcggtggcggattcgccgcgtgaatcacagctggcgatagcacaaaattcagacacgacatcgacagccgacaacgggatttcaggatctgcccctgcattctcctcgagatgctgcgaggatcagctcgatataagcatctgatcatccacaccagaggtctcaacactggcgcctgcgacaactctaagtcccacatgacaatcatcaagagt

SEQ ID NO: 443600 - DNA, 385 bp, Triticum aestivum
tctcacaatgtgtacggttcgtgtagagagagcttgccaacatggagcagataaggcaggacagatcgtatgtacgttgacgaaagcgtcggatacagccctaatgacacatacagagactgataaagagacaccgagagaggaagaagttaggtctgtgacatagatggagacatgtaatatacttgagatacgtttgcatcggtattctgttcacatcgacggagaagacacaccaggtttgatcacatagctcgacacgcattgacgagaggggaaggatctcgtgggttgagggattgataattttgtgcgggtgatagagggataggtaattctgtgcaagagacagatgagggaggagtcagtcagctgtcgtcccatc

SEQ ID NO: 443601 - DNA, 406 bp, Triticum aestivum
aaaggtgagatgagaagtttgcttgagagaagttaatgagtaatgccatttctaagaagagcaccagctgtgacgctactgctcaccgtcagaagatgggtcgatgcagaagttggaaaggtggatgagaggctttaattactttgcaactctgcctcatgagctccatcagcccaacaagtcggttcctgcctttcatcgctcgctttagcagcgaccctgcttgatggccagacctcatgcggcagcagggcagggcagcacgggttctcggtagattgtgatcgagggcctagcacgaagattcccagtcgccggtggttgtaaagggcaaaacccctggagcagattttgtcaatggacaagtggagactgctatgctagttcatgggaaaatacagaatga

SEQ ID NO: 443602 - DNA, 417 bp, Triticum aestivum
gggccgaccgcaattccgatggacctgtggtggtgcacatttattccgaaaagtagcaaaagatattttgactgcgaaggatgtatctctcatcaagaagttccatatgctctatagcttcttcttggttcggagagttgtggcccctactgtcgcgtgtattctctacaatatcatacttccaatctcagttatgatcccagaactattcctaccagtctggggcatcgcatatattcccacagtacttttagtggtcacagccattagacatccaaaaaatttacacattctgccattttggattttgttcgagagtgtgatgacaatgcatcgcatgagagctgccctctctggtctattcgaattatcagagtttaacgagtgggtcgtgacaaagaaaacagggaacaattt

SEQ ID NO: 443603 - DNA, 372 bp, Triticum aestivum
tcgaggggtaagaagggcactgggagagttgaacgtgtggagcagttaacatttttgacacgggtggcaaaaacgcctgcccagaagcttgaaattctttttcatgtgatttctgcccagtttgatgtcaaccctagcttacttggtcatatgccagtcaatgtgtggaagaagtgtgttaataatatgcttcttgtgcttgatattctgcaacagtatcctaatattgtagtggacacctcagtggaggctgatgagaaggaaactcagaagggtgccgactatgatggaacaatccatgttactggtgacctagttgcattcctggagagaattgactcggagttctttaagagtttgcaatgtagtgat

SEQ ID NO: 443604 - DNA, 407 bp, Triticum aestivum
gatcaagaaaccactttgacaaaactctgtttgggttaaatccttcgaagaaccactttattagacgcctgaccctcgctccattgtatgggcatcggcatggttctgtctgccgtggtcatgctcagtgccgagagctgtacatcgccgctagcggcgcctccatgtccatggagcatcgtgtcactgctattggtgttctagctagtgccacaagctgcggcgttgtgcctctcggaaggcgttcaatcagctgagccagatggcgttccgatacaaattgttcatgtagaacatgcccagcattgccagctcgctactgttctgtggccaggcgctatcaaaactaccaaagcaggctcctgtgcacttgaggagggtcaggtggaccaaaccggcttggttta

SEQ ID NO: 443605 - DNA, 281 bp, Triticum aestivum
aaactctgtctgggttagggctttcggatgagcactttattaaacgcctgactctcgcaccattggatgggcatcagtctggttctgtccgacgtggccatgctcattggattaagttgtacagctctcctggaggagcctccatgtctaaggattatcgtgtcaatgctaatgttgttctatctgatactccacgctgtcgcgttttgcttctgcgaaggcgttcaatcagttgaattacatggtgttccgattccaattgtccatgtctaacatgccca

SEQ ID NO: 443606 - DNA, 60 bp, Triticum aestivum
  unsure (1)..(60): unsure at all n locations
ggnnangaaacttatctngccgttnngtacnntctctnaattcccgggcccgacggggtg

SEQ ID NO: 443607 - DNA, 396 bp, Triticum aestivum
gacgggctattaaagaaaagaacggagcacatacatgttccaaacatggactttgcgcatttacgtgaagggaacaatccatgagtgcatggtgcgtccctgctctatcactagcaatagcatgcaggatggctcttgacaagaacaacttctatagatagaatttagcttttataaatattaatatggaggaaagaacaaataattatttgctggtagaaaatctggattacaatagtccgtctgacaaaaaaaaaacaaatggaaaattacattaggtggtaagaacaagaaacaaaaaggcatccgatgcatctactataatagttctctacttgcgcttaacaacgccgacataacgaagctctaccgaacccaagtagatcatgccattgc

SEQ ID NO: 443608 - DNA, 388 bp, Triticum aestivum
ggagatcagacaggcagcctttgaatgccttgtggcaattgcatccacatattatgcgcacttagatccttatatgcaaaccatattcaacctgacagctaatgctgtcaaaggagatgaggaaccagttgcactgcaggctgttgagttctggagtactatttgtgaggaagagattgaactccaagaggaatatgagggatctgatgatgctaactcaactgtaaattatcgcttcattgagaaggccctcccttcacttgttccaatgctgctagaaactctgttgaagcaagaggaagatcaagagcaagatgataatgcttggaacatttccatgagtggcggaacatgccttggactcattgctagaactgttggtgatgca

SEQ ID NO: 443609 - DNA, 247 bp, Triticum aestivum
ggtgaggatggtgatgagggtgatgagtactagagctgctgagttcaacgacctgatgtacgccaagcgttccttcgcgtgatccgcccgagtggctttatctgctgtctgtctgtttgaatgtttgctgtgtggtgtttggtttacaacctgtggtatgtttgaacctgcttcgcaccttggtcaatatgcatgttatctggtttgcctaaaaaaaaaaaaaaaaagcggcgctctaaaagatgga

SEQ ID NO: 443610 - DNA, 274 bp, Triticum aestivum
agcacctgcagcatagtggtgacaccgacactgtcgtcaacagaggtcagctgcttcacaaaccaccgcttgatcgcaaaaggcaacaccgcgaatcagattgtgaaaaccatcacgatccagtgctacctcgtgctaaggcacgtccacccgcaggtgcacactctcgctgaaggttctctgcatcacctctccactgattccgcagacctgctatatgctccccggtgagtcgtccaacctagactcctccaacaggtcacggagcatcaac

SEQ ID NO: 443611 - DNA, 391 bp, Triticum aestivum
cgggtcgaccggggattcaatgtaggaagttctcttggccttcaccacaagggtgcttggtgtacacctccaagaatatttattgatcaggatgaagtgattccacatttggaccctgggatggttccttcaaccgttgatcctgatgctgctggatacgctgaaagagcaaacaaagccaagaagccagtcaagatcagtgcccggagccttgcaaagctggacagaaacgaggtgatgaaagctgcggcaaaagctcgggcatcatcctctgttctccgaccaatagatgcccgtcatggccatgaagctgatattagctccagtggcaatgccagcgtcaggagtagtatgagtgttgattacagtgctacacaagaatcgaagaatg

SEQ ID NO: 443612 - DNA, 388 bp, Triticum aestivum
cgggtcgaccggaggagctagatagcccatttggcaatccagcccgtggcatcgccgttgtttattatgtcattgagtggtacttccgaggccaccgtaattgaacactcttgaaagtagtgtcgtaatttccgggatgccataaataccgcgtatgttatcttttgataatgtgggtaccgtgatttgcatggagtgaggacagtggatacataatatactggcttttgaagtgggaatttatgtccgtccgtctctcgttcgacgacgagcaccgcgctcacaacttggtgagttgccgctatatataacaacattggttcgccaacatttggcgcgaccaagattgggttggtggccaagatggcttttattgcttccaatctgg

SEQ ID NO: 443613 - DNA, 422 bp, Triticum aestivum
ggtccagatatccgggtcgacgggagacaaggcgatacctctgtatcagatgttgaagaaaatagacaatttagtctagagtgacgcaactaatgcggcgtttgaggacttgaagagacagctagtcgaaccgccagttcttgctgctccggttgataaggaaccattgttattatacatggctgctaatgatcaggctgtcagtgtagccattatggtggaacgcaaggaggctgggaaggaatatccggttcaacagccagtttattatatcagcgaggtgttgattgagtcaatgcaaagatatcagcgaggtgttgatggagttgtccttacttcccctcgaggtgataaaatttattatgttctccgcttaatgtttccttgtactatcaatgcagctgagtacgaggccttactcc

SEQ ID NO: 443614 - DNA, 396 bp, Triticum aestivum
aattcgcgggccgacggggcaacacaaaatttccgccgaagcagaaaagcatcgtctctcgtctcgtcgaggaatcaacaaccatgggcggtggcaacgcgcagaagtccaagatggcgagggagaggaacctcgagaagctgaagggcggcaaggggagccagctcgaggccaacaagaaggccatgaacatccagtgcaagatatgcatgcagactttcatctgcaccacctctgaagcaaagtgcaaggagcacgccgaggcgaagcatccgaagagcgacctcgtccagtgcttcccccacctcacgccgtgatatctgccaaatcggacggagagagagagaagctgccgtaatccacctagtattatcatgttccgcaatgactggttgt

SEQ ID NO: 443615 - DNA, 391 bp, Triticum aestivum
gacctggcaatacatcgactggataatgtggtcggagagttccgacctatgatatttgcggaagtacctaatgttactagttttagaggggtggtagtatatgttcatggattttaccctcatgcggggggaacagttgtccgacctgggagatttcctggccacattaatggtgtttaccaactgggtgattttacataccttgacggagacttcacatctgagtctggaacgtctggtggaccagttaccatgggagatagagttattggagtaaatgtgcaaagtgtgggaggatcgagatgcgcggtttcccctctgacactatacatgacatttatgaattggtgtggttttaatggcggagaccatactattgctgccatgatac

SEQ ID NO: 443616 - DNA, 310 bp, Triticum aestivum
tgagttcccatatgacagatgaggagcatgaaatcccggctgtgtagataaaaagcagagttgtagcgtagcacaatcatgtaactcgtttggctgcgccctactgtcctgtaccatatagtagacctttgcgtgtggagtcccgacttatgtacccaagagagaagaatgtaggaggtttagtcctgtgatgagatcggattagcctatttatgtgtgccaacagaagattatagttttgttggttcctgattgttgtaccattcaaccccagctttgtgctgctatcgtaatgttgaaacttggccgc

SEQ ID NO: 443617 - DNA, 417 bp, Triticum aestivum
atgcccgggccgacgtcgaactaaaacgaaggaacctacactatcatcaatgctgaagaagaaagttaccgcaaaagataggattgcagggaggcttctaaatggtcatgctagggacgcaacaataagagaagcttctaatactgaggatatgacctacagggaagcattcccaaatcagtggcagtgaaagcaccctgggtaggtctttcttcataattaacagtttcgttttgctgtgctgttgtatggtgaggtgtggctgatattcccttgcacgcttgaagtgcttgaagtacgcgggacgctgaagctgcttccaacctgtgcatggaaaatttcagaaagggaagttgtagaccatttgtactggcagtcggattgagaatccaaatcagaacaacccgacagttaaca

SEQ ID NO: 443618 - DNA, 394 bp, Triticum aestivum
caaatctacagcattgtccatttcatgctccactaaagcaagtactatgtgaaaagttttgcttgccccactgttaacttaccacaatcagtcatcatcaatttgaacgccgcacttaatacattacgcgatcttcgacaaacccgtcggctaagcacacactctctgctaaaacacatacacatatcagcattcgatgagttgacgttctatgatcactaataaagcagatgggtcaagtattcattgatataacaaaatgcactgctttgtggagactgtattggggggcaatacaccatcgtttaacatgacatgtgcttaattagctgcacgcttggctgcaaattacgcgcgaaagtatgggggatcaatacgatacactcaactttta

SEQ ID NO: 443619 - DNA, 382 bp, Triticum aestivum
gggggggaggggcaggggcgttgggagcatctttctcctacctttagccctaggttacccgattgttgagagcggcgacccggtgggaaaaatctgcagcgactaggcgactgcgtgctagggtaggcatggagttcttgatgcagcccgtaaataggcagcaggactctaatagaagaggtcaacgagaacaagatgaacatggagcctcttcattaccctgtgagtctatgacgacgcggccggtggtggagttgccggccaacacggaatcaagcgccaacgaccagatttgcactgagggcgctgttccaagggcaggcagtgcagacaacctcaagcttcagagcactccatcgaacagggtccgggttggggcaac

SEQ ID NO: 443620 - DNA, 421 bp, Triticum aestivum
attcgccggtcgacggggataacgaggagtgcgcgtgcaaaaccaaaaactgcaaaaccggagcctgcggttgcaacaagaaactgaaagggtgtaacccaaattgcacgtgcatcgggtgtgagaatggctacgggatgaaaggggctgataagtccaatgctggaccgggaggtacgggtggcacaagtgacgccggaggctcaggttccaacaagcaaataagaatcgggtgatgacagtaggcttgagacataccagagcatgatgcaagtcaccttactttcttaccatcctcaagtcacctcctgttgagatatctcccactgtaaagcacagccaggttcctgtagattccttgtaatggttggttactcgaagcaagcacggcgaaaactccatgttcctcaaccctcaaggg

SEQ ID NO: 443621 - DNA, 340 bp, Triticum aestivum
acggggacaaccatatgtgtgcctgtcagggacgagcgagcgtcatttcctactactcttgcactctaagatgaagcagatgtagcccaggttgcagatgaatccgatgttatagcggcaactggatgaattgggatgacaaatcgagagcccaacgatgaggtacaggtggcacatttgactagtgcgacccacttcgataacacacattgcactctcgcaacgagagaatgcgtgcaacatacgacatcatcatgcaagtcagctctacactacttagcaccatcacatcaactcctgctgagatcttcctcactgtagccacacagacatattcatg

SEQ ID NO: 443622 - DNA, 395 bp, Triticum aestivum
ctcgaccacaacgccgtcgttgcgccgccggtgagccaagttgccccagccccagatcgcccttcccatgtcagtgtacaagaattccgagctcgtgtccgtaccttggagagtgctttttctgatgcggattggtttttaagggatattcaaggtgaaatacagcagatgagggaggaggggcatgagaaagacaggcaaatccgatctctcgttgaagatgcaatgaagaaacgtcggtcaagccacattagaatcaagcaattcgaccatgataaagagctgatgcgtcgattctttcagggatgcaaagaaaaacttaagaagtcttctgatgcatttcgggagtataagaagatgtgtgaaggaagtggcgtgtcatcttcgggtgttgt

SEQ ID NO: 443623 - DNA, 380 bp, Triticum aestivum
agatgcaacaagaaaaaatgaaggaaaagcggaaagctaggaagaggtcgtcgaaggatgatgatgatgatgacgacgatagcaacgaagatggtgctgatgaagatgatgatttctttgaggatgaaaagtctgatgaagacgttaagccaatgaagaagcagaaggtgaatgccaaaggtaaagaaaaagggaaaggaaaggacaagcttccagaggaacatttcgaaccagaagcaactaaagaagagttggagctcttggttgctgatcaggatgcaggcaatggtgcaaagggctttaacatataacgcaagagtaaaaagggcaagaagggcaaggattctgtcgaggacaaacatcctcatattgatcttagc

SEQ ID NO: 443624 - DNA, 379 bp, Triticum aestivum
ggtcgtcaatcagcgccgcggctcacccccatgcgaccctagcttcgctcgctctccggcgtagcttctcccttttccctgccgcggcggatctgcgtcggcatttgacggcggggagctgacattacaggcctggtctgcaccaatggaggcaatgcgcaaaaaggaggcaacagcaacggcttgttctgaagacaaccgtaaaggtgtacatggtgtatccatgaatgggctatacgatccttggaatcctgcctaccctccacgtgatcctagtccatgcgatgctgacatggctgctcatatcgcatcagtcaaggagtggatggacaaaacacaggctatacttgctaactccagagcaaccaatataatcata

SEQ ID NO: 443625 - DNA, 362 bp, Triticum aestivum
actggctacaaagtgggtggtgggtgggctctgaatttcttcgtcgtccgtaccccaaccatcctggccatagtccggccaggactctcccgataacgagaggtgctttagcgaatttaggatgtcgccaaagggcgagtgttggaagatgtccgcggcggtgaattccataaccggcgcccaatccgaatcgattggtaggggcgcgggaggttcggagtccggcaaggagtccggaacctcggaatcacgagtttcgcaggggacaagattagcgttcggctccatcgtcgtggaagttggagcccccaatgcagtgtccatccaccgatcctcggtctgggcgatcggctccggactaa

SEQ ID NO: 443626 - DNA, 350 bp, Triticum aestivum
gaacttgggcgccgtccacaagggttccaggggctcagatattggccgtggcgagcgggaagcgttgacagttggtctacgcagaaacatagagttgtgctgcctagccttgattcatatcctactaccagagacctttgtcaatttattaacccgccctcttgagtttgcaccttacctcagtggctgtctggcgttacagtcttggactgccgtgatgagtttaattatattgaatggttcatacgttgggtcttatcacaacggcttctggagctgctgagattcgctcatcagcgagatgcctgagatacgactgatccagacggtctaggcgctccatctttacc

SEQ ID NO: 443627 - DNA, 424 bp, Triticum aestivum
attcgccggtcgactcccacatctcaaatgcatacccattcgttcacttctcattttcacgaagtcgtagtgttgagattttatctggcataacaccagtagagtatgacccgtagaagtttccgggttcacacagattatggaaggcatagattcaacccatcggtgtaccttaggaacatataccgtaatcttctagagtaattaacacaagctcggaagtagagcatggttgaggaagcagaggatacaacttaccaaaggcattatgtatcggagaaagaactcaccaggtgattaattatgaaggacactgttggataataatccaacaatggatatggcgatcgatagcggagctgatgtgagcatcggtactcaaccagaggaagaaggatgcaaggagatctgagtatagaaacat

SEQ ID NO: 443628 - DNA, 384 bp, Triticum aestivum
cgggtcgaccgacatgggtaagatgaaattttgacggagcatcatactacaacaagcccattaaatggtgctcactgttggaattaattaggatgtgacataagaaccgccgacttcggaattcctccatcaagttgcttttgttttaatttctttgcaatttttaatttaaaactctggtacacaagtgtgtctgctaccttttcatctcatgtatatgctaacattttcgaaaatcggtaaaatttgcaggggttactttgagacggcagtaaagccaacgaatttaaaacacactcgtcaattagggtgcggtcgtgttagcatgtgtaaagtgtacatatcccacattgcttgatcccactcaaactccgttataaaaac

SEQ ID NO: 443629 - DNA, 408 bp, Triticum aestivum
gctctctctctcactctgtggtgtatttcttcctctggctctcttctcctgccccaaacatctcacgccgccgccgccgagggttagggtttgtggccggagatccctcggattcgattccattcgagtcgaatcgaagagaagagaatcgatagagatggacgcgcagcgtgccctgcttgacgcgctgatgggttcgtcgcgggacctgacggaggaggagaagaaggagcaccgggaggtggcgtgggacgaccccgacgtgtgcgccccctacatggcccgcttctgcccccacgacctcttcatcaacaccaagagcaacctcggagtatgcccaaagatccacgacccggccctaaagcaaagcttcgagtcctccccccgctacgccgccggcctccccaa

SEQ ID NO: 443630 - DNA, 293 bp, Triticum aestivum
cgggcggggtaaacccccagatcatgtgatcagtaaaaacaattatttctccttccttgggctcaggaggatttttgaggcctgggaccctccagtggatgtcagctttcttggataagacgcgagtttctacgaaattgttcagatcttccttggtgacccgggatggtgcccagttgcatgtggtgaaagtcttagtcattgttgataatgatctgaaaatgaaaactttgccggtttaaggttatgttgttatgccgaccattgatctaagggtaagaatgataatcatt

SEQ ID NO: 443631 - DNA, 385 bp, Triticum aestivum
cgggccgacgggggccgtcacggcctccacctgtgccctcttgcaggtggactgctggtcattgatgcggcgagtcaggctcttgcagcaaaatctatgatattctctggatgagctgcaggtaggccaagctgttgacgaggatccgacggcgaccaccaaggtatacaaacaacagtgtaacaactctaggaatctacatcttaatacagctctattttcggggattcaaatctccaggctgaaatcaacaagcccacataatcttcagccttccacaattatgttatgcttcatgttctatgatcaggttgtaatctgctggtgcggtgctgccctgctttgatttggggattcatctgggatctaattttgaccgaacaaa

SEQ ID NO: 443632 - DNA, 382 bp, Triticum aestivum
gtcgacgggtgcaatgagagtccatagcatactttgaacctggaaaccagaagatttgactgacggtagattgttttcgtctactgctgtactatataccaagaggacaagcacttgggagtgaaaaagaccaggaaagcagtcattagccatcagttttgacagggtagatccaacaccatctgttcattgaattactgagcttgatgggtagtttttctgcagttacagaaattagtcttaagtcgaaggataatgcggtaggcaatggtgatgtgtactggtgaggcttcacgtataacggagtgtcactctcgtcatctagatttacggacaagattggttgttggtgatgcgttgtggcacctttaagttaaaattt

SEQ ID NO: 443633 - DNA, 381 bp, Triticum aestivum
tgatcgctagatccaacgctccaacgactacgaggggctgggcagatgcaacaggacgaggggctggtactagcataggaaccataagtagggctgggaggtgaacacgaggaggtgccgcaacaagggcaactgcatcaactactataggagcacatgcaaatgctacaagatgaccaagtccaactattgctagacgatcactagcagcatctccttgcatccatcagctccctcctgtcgatcaccttgttagtgttactcgatcaagatcctcaagatgaccacctcatgtcccatcaccagaccacgttgtgttctcacatcatgcaccattacattatgattggcaacactttccctcactatacttcaagtcga

SEQ ID NO: 443634 - DNA, 144 bp, Triticum aestivum
gggtcgaccggaggtgggaagtgaaggcgcggacctagggcagatcggcgagagagccgccggatcgaactggtctggagcagagaaagacatcaaccatcagcaaaaaaagtgacaattggatcaggaggcgagttacaatgc

SEQ ID NO: 443635 - DNA, 73 bp, Triticum aestivum
cggtcaagccatcccgggtcgaccggcgaataaaacggcaagggtgaagtgggggagaggaaaacgagaggcc

SEQ ID NO: 443636 - DNA, 392 bp, Triticum aestivum
gggtcttaaggatgacgaaagcgtcagtgacgacatcaggcgagagagatatcgagactgcaaatcgctttcctgtttttgcatttcttactgtttatgtaactttgtcagtattcagatcatatagcctatggggagcagtgtaaaacataatttgttgatgcttaaaatttggagtgatatgtttgatacatctgcactgttgacatggtcttctttaatgaataacaaggtggtccagtagaattgtaactttagagccctgcaaattgtctgtgcaaattatgatgctggtttatagaactaaatttgtggcgtgcctctattttatctttagttgtaggtttctccgaagctttattgtgggttgtgttacttgccaaacaagttct

SEQ ID NO: 443637 - DNA, 395 bp, Triticum aestivum
actgtggaaaccagatcgaagcagagtggataagagaacggaactggcatcgtagaagaaaagctggattgattatcacgagttgcaatcattgtggtaaaaaagaacctggctcgatacaatgttaggaaaatatacctcttcgtattatcatataagtaggctgaagccatcatatataaatataccgaaggaaggccgaagatcataatgcaaaaggccaaaggacactataaatataactctaacagataccacttctcttaaaatgtacattgaaaataccaaagccgccggcccgagggggtttacatactaaccacgctaatggaaattactgaggtactcaacacacagaatagcctagaaaacaaaatttagaaatcacagacaca

SEQ ID NO: 443638 - DNA, 103 bp, Triticum aestivum
cgggtcgagccgggaggcaaatggacgagtcaaacatctcgtgtccccataacacctcggaatacacgcacaccatctacagccatcattcattccatttcgc

SEQ ID NO: 443639 - DNA, 412 bp, Triticum aestivum
aacttctacggattgcctggcgcgttgatggagatagggtagttttgcagtagagctactgttttgttgttctgaatgtttcctagctctgctgctcttctccctggttggagctgaaaatgttctgttaatttctgagggacttgctgaacctttagtttaaattctcccttataataatttctgctgcagctactgttctggctggaccgagagctgtaaacagtatagtctggtttggccttggctttttaataaaagttgggtctggggggcaacccctctcatttaattcagttctgtatttctcctatggctgttggccgctttcatttgtttatataatttcccagtggcttttagtccacgagtgcttcctgaatatgttatttcttcggaaatgttaacgccc

SEQ ID NO: 443640 - DNA, 352 bp, Triticum aestivum
  unsure (1)..(352): unsure at all n locations
atgtcgcaaggtgggcggcgggaggccggatctgcccacactacggcagcgaggaagaaggggtgggaggccctccctcgccagtgatgcttgggagagaacaacaaggcacgctgatcgagacgcgccggcagtgggtaagagccgtcgccgaggatgaccgcgtgaacgttgcaccttctcaccttccccggcggagaggatctggctggatctgtgaccagcggtgagtagagagagagagtgtggccaccgctgtcgtgtttagatctggagaggacgagatagtgtgaagagagcancactagcaagcaagcgcagaggctcctgcctatatagtggagtactagtt

SEQ ID NO: 443641 - DNA, 164 bp, Triticum aestivum
tctgtatactgctatatgcattgaggcaagttcttttctctagagcttagttataggaaatttggaattactgtactggttattattttctggctgtacttgtagtagtttaattagcccattgtaatggatttggtgaccatgtgcgaatgaaataatagtac

SEQ ID NO: 443642 - DNA, 377 bp, Triticum aestivum
ggtgtgcaggtccggatgcgtccgctccccctcctccccctttccccggccgagtgcgggccgatgtagctccggcgttgttcgaggcgggacgtatgctgcggtttggcggtcgggtgcgtcctttggggcaaagccggtgactttggctggtcttgggggtgtctggatgcagggcggcggccttggcggtgggagacgcgacgtttgtgggcggagctcgcgtctcaggtgctggtgtgcagccatatccacgcgggtggtttggttgcgggtggttggcggaggtagggtgcgttggaggggtgtgagcgccgggtacaccacttgctcatgggccgacggtggcgacgtccgtggacgccgtatccttcatc

SEQ ID NO: 443643 - DNA, 397 bp, Triticum aestivum
cgggtcgaccgggaagatgaatccacagggtcctggttggaacaagagattgaggattggagcctctgccccaagcttgacaccttgcccaccccgcataagcgcttttgagaaggcggtgagggtgttcataaaaaaacccaactgaagatgagccgtggatcataatttagagagtcaattccctggtaccaaaaactgtatggagtttgcgctgaagatgcagactggaagtgtactacactccgaattacactgggtgtgtccaaaaaaatacacctgcagcatacattaatgattcttggtggtaccttgtgcattggaaagttgtattttagcaacaaattcgtatggtaaaaatgtcttgccttgtgcaatgcagcccatgttgtgggat

SEQ ID NO: 443644 - DNA, 401 bp, Triticum aestivum
aatgagataaatggtatatttgctaagtaaagattctgtctaaagtgatgataaatcataaccagaggggtgttatgaggtattgatgtctatgcttagtgtggatatggttgacccagttatttctgttgatatatgatgcatatgtttgtggtgcattttcatggcatataatgccacaggttattttcaccttaagtagaatctgataataactcaacttgaacatatcgttgatcgggtcatggtgccactgaatcgagttttcccagtgcaaccacatttgcctttatgggaaggcctttattcagtccgttgtcatgcctctggtcggtgcctccaacgattgaaggttatgggcatgtggtaccctggcccggtaagcagacataaccttgtgt

SEQ ID NO: 443645 - DNA, 410 bp, Triticum aestivum
  unsure (1)..(410): unsure at all n locations
gggtcggccggtcggaccagtggagcccgatgggaaagagatccccgttagcttagtgtatgggcaagtagaattagccgcaaagtattcccaacaggattgtaggctagacagcctgttggatggtatagaagaggaatttagtcagtctacatgactatgtaaacaaagtgacatgtataatgccttctagccggattgtaaatcatttgtcttggcagaccttttcgcttcaacctcgggaccctatagtccggagtgtatccgaatacccgctcagttatataagaaccggggtatgtgtggaaaccaggtgtaggggtcattagtgcttgaatagacaagtatccaactagttacgttatattacatgggtagtaagaaacatcttcganggagaatagttccgt

SEQ ID NO: 443646 - DNA, 63 bp, Triticum aestivum
gtgggaggccggatatgtccacactacggcagcgatgaagaaggggtgggaagccctccctcg

SEQ ID NO: 443647 - DNA, 90 bp, Triticum aestivum
cagcccaacctcctccagttcggctccagcacctccgagatccttgagactgaatccagaaaggaactgtccggccaattaccaaggaac

SEQ ID NO: 443648 - DNA, 400 bp, Triticum aestivum
gcacgactgacccttattgtgttgctaagtatgggcagaaatgggtgcgtacaaggactatcattgatagtttcactcccaagtggaatgaacagtacacttgggaagtgcatgatccatgcactgtgatcactattggtgtatttgacaactgccacttgaatggcggggaaaaggctaatggtgcacgggataccagaattgggaaggtccgcatccgcctctcaacgctagagactgatcgggtgtatacccactcataccctcttattgttttgacacctgctggcgttaagaaaatgggtgaggtacagcttgctgtccggttcacatgctcatcactgctcaacatgatgactctgtattcacagcccttgctgcccaagatgcactatataca

SEQ ID NO: 443649 - DNA, 388 bp, Triticum aestivum
ggggtcaagcaactgacagccatagccttgcagaaagggcacggcgtgagaaaataaccgagcggatgaaaattctccaagatcttgtccctggatgtaataaggttattgggaaagcatcagtccttgatgagataatcaattatgtccaagctttggaacgccaaattgagttcctgtccatgaagctcgaggcggttaacgcccatgcccatgctcacaacggagttgaaacatttccaactaaagacttcgctgcgccggcatacaacacagctccagggttaacatttgacccgcaaacaccaagggagtacgcccagggctcgccggctgcagaatggcttcacatgcagattggtggcacctacgaaagagtgacgtgagc

SEQ ID NO: 443650 - DNA, 392 bp, Triticum aestivum
attgtatattgtcgtatttatgttgtgtcagttttgtgatatactttacaattaaaacaatttctgaagaaatctcactaaatttcttaactttttttgaaatgaaaagatagatcattttctatgttatgcattcaaaacaggcaaaagcgcctggatgaccggagtcatttacatgaaggtgatgtaagcgccgcacagctggccatcaccaggccatcagaaagacgtttcagaattacatgggaaggagatgggggggttgtatggaggtgtgtaaactatgcagaaccaataagattagcccaattcactagtacttccctggttggttctccccgagcccgcacagtgcagagcttgatgagatcggcaatctccttgtagacacg

SEQ ID NO: 443651 - DNA, 402 bp, Triticum aestivum
taaaaacaaagatggtagtgaagtgtttgattggtttgagaaatatgttctgcgttcgaaattggatgttagcattgatcacctagagctgtgctcactgttatcacatggtggtgatgcaagagataaacatatcaccttattgatgaatgctggtctcctgacacgccaactaatagatccaaacatgtactggttttctattccaagtattggtcctatcccaggttcacacaaaagattggtgaccatggcatcagtatacaaattaactctacaagccttttccatgtccacatcatttccctcgatgcagtccaaaagaacaatttgtaatgattctatagttagcaattaccaatgtaaaggaaatctattatttgcagcagctcctactgagct

SEQ ID NO: 443652 - DNA, 105 bp, Triticum aestivum
cgggtccacggggacaccacacaccctcacagcaagatgattcaggaagtgtccaagtttcagtcatgaaagattggacaaatggttgatccaccaaatcaatct

SEQ ID NO: 443653 - DNA, 380 bp, Triticum aestivum
acagctgggacctcaacttcagtcgaatccgtgacactttttggttgcggggcttcttcagtgaaaggttcctattgaactgatggtgtgtggatatgctccaaaaacgcattactgggaatggcttctctcttggaacctatttttgccaaatcatcatccgcttgatttttcagtcggggtatatgatggagctctaacccctcgaatttcttctctagctttctcactgcattgcagtaaccagtcatggctggaattctgacgtcccactccttcatcacctgattaaccaccaaatctgagtcgccataaaccacggggcgacggacgccgagtgaaatggccatacgcaacccatacaaaagtgcttcatattc

SEQ ID NO: 443654 - DNA, 382 bp, Triticum aestivum
gggtcgacgcgcgggtaaaacaaaggcaacttggaacggggaaccgacgaataacttgaagagaaaacactgttgaaataattgaggaaagaatgcaaaggcttcgcacgggtagggtggatactcgattacgaactccggctccgagaagaagggtgggcgcgtgggaaaagaaagacaacttcacagagggaacaacgtcgttgagaaagaactgaggactgatcttgcaaaagatgaaggggatcacatcaacttgacgagaaaagcaccagatgaaaagagctggcatcggaacgaacgagaactaaccgcgagatcctaataaaaagttttgaaggggaagaggagtatatcaaaacacctacgtcaagatttctca

SEQ ID NO: 443655 - DNA, 76 bp, Triticum aestivum
  unsure (1)..(76): unsure at all n locations
tgcattcancaactttttcacganctaggagcccggtgccctttcgcaattcattccatcctttcaacncgaagtt

SEQ ID NO: 443656 - DNA, 390 bp, Triticum aestivum
cacggggctagggtttggggggggttccggctgggcctccccagcttataaagccggacgagccttagtgtccgggtcggacacggcccgtaggtcggttgcgcatttttttaaaataattacgctcagaaaaaaaacaaaaagactactaaacggactccaaaaatcctgaaataaattttccccggcttctaaaatcaagccgcacatgatgaacatttatttggggcctaaatgaaattttgaaaaatgcacattttcctaaattcaaataaaatagcaaataaaaccaaataaaaatcttgtttgacttttttattaaatcctcaatgtttctttatttttgggaaagtcattttattccctctctcatatttttatattagaaat

SEQ ID NO: 443657 - DNA, 323 bp, Triticum aestivum
cgggtcgacgggctgattcaaagtttgaactgggggcataaaggtccatttgcccattttcacctggtcggaacatattccccagcgactcacatttcagaacggaaggagtagaaagtatcacaaggaacagaggaagcaacccgtaaaggacaatcgtgccaaagcaacattaattctgcaaaaaaaaaaatagacaccataccaaaacatatcaagacaatcaataaacataccaaaagaaaagtcgaaatcaactttcaaactataacgtttaacatgacaaagttacaccaatgtaaaaaaaaccgtgtcccctaaag

SEQ ID NO: 443658 - DNA, 398 bp, Triticum aestivum
cggtcgacgcggctgtggagtttaccgacgcgagcccgctgcccccacggagccagctgctggagaacgtgtttgccgatcccaagggcttcggcatcggccccgacggcaagtacaggtgcgaggaccccaagttcactcaaggcacggcgcaagtctaaggacctccaccgcagaagcagcttgtttacgccttgtttctcatgtactacctctctagctaccctcagcccctagttttgtcgaacccgctgtcgatttcttgtgttgttagaggtcatatatcactgtaattcattgctcgctgtgctactgcgcggcgtctgatgcccccagttttttttacccaagaaatgttccccagttcagttgttctacagtaactcaacatccaaccg

SEQ ID NO: 443659 - DNA, 58 bp, Triticum aestivum
cgggtcgaggcgctaaccaactagaacatcctaatgccggtgaacaacccccttttcg

SEQ ID NO: 443660 - DNA, 399 bp, Triticum aestivum
ccgggtcgaccggtttggccatgtttggatccatgggttagagttagtttgagctagttggggctcagatagccctaaagtatccaaacatgagggttaaattggagcaagttgcaccaaacccacccgagaaaaactatcccacccaagagtcgctaacatgtgatgagttaaacgacatcaatagatggcaaaaacgctagcccgccgcactttgagagagacgaggagcgagaagcgatatgggctggtggattactagagctaggtatcgcacggaggccaagaaatatggtgatagctgctacctgttgagcttgcgttggtttttcccttgaagaggaaacggtgatgcagcaaagtagagtaagtatttccctcagttttgagaaccaagat

SEQ ID NO: 443661 - DNA, 87 bp, Triticum aestivum
cgggtcgaccgggatgttaaccattagcggctgtatgcatctattgatgcagaggccggggaggcggggattttaacctcctttttc

SEQ ID NO: 443662 - DNA, 397 bp, Triticum aestivum
tcctgagaggctggcggcggcaccttggcggggtccttctcatgatctccggcctgcttccgggacatgtccgtgaactgcgtcacgtagagcttatggcccatgacggggcctgtctccgtgacgcgctggcggccatgcaacatcatcatcgacagcaggcatgcgcggagagccctcaaccccattcccgagctgatcaactcgatgagcttatccagctgggccctgaggatgtcaatcatggagttggaccgctcaagttgaaggttgttcctggcttccaccagcttgttattggctccttggaggcccacactgtctgccagtgtaatcgcctgccgtaagtcctctatgtagatttgacggacttgctcggtgagcacgggctccgaaa

SEQ ID NO: 443663 - DNA, 335 bp, Triticum aestivum
agacagcaggtgtctaaggtggagtagaaggatgcggctgctggagcttttctccctccgtgcacccaagaagcctttgtgcaaaatttgaaccagacattgcttttgtacaattgttgttgcttagtattacgattctagcaataccgctcgctttatagatcccctacttctacatgtactcaattgtacatatcacgcccccatttgtactcgtactatcttaaagaataatcgtcagagctaaattggaccgctcaaattgaaagttgttcctggcttccaccaacttgttaatggctccttggaagcccacactgtctgccaatataaac

SEQ ID NO: 443664 - DNA, 369 bp, Triticum aestivum
accggcatctatgcggcgcatccttcctttgatgacagtggcatcccgccacctccatcaaagtggaagggttcatgccatggtactgctgctgcccattgcaataacaaattgagtggtgcgaagttcatcaccgtcaatgactctggagatgtcatagggcatgggacacatacctcgtccacggctgctgggaactttgtcagtggtacctcggcccagggtctcggcagggccacagcagccgggactgctccacatgcacatctggccatgtacagcatgtgtacgcttcgtgggtgtgactccgctgacatcgttgcggggatagacgaagctatcaaggatggggttgatgtgctctctcgg

SEQ ID NO: 443665 - DNA, 86 bp, Triticum aestivum
atgactaatgttgagtccatggattatacgcactctcaaccttccatcattgctagcctcttcggtaccgtgcattgccctttctc

SEQ ID NO: 443666 - DNA, 382 bp, Triticum aestivum
gacctggagacattttgactgcttctaacgggatgacaattgaggtaaataacactgacgctgaagggaggcttacacttgctgatgctttggtctatgcttgtaatcaaggtgttgacaagattattgatctggcaacactaactggtgcctgcgttgttgcacttgggcctagcattgctggaatcttcacaccaagtgatgaactagcccaggaagtcgccgctgcatctgagttatcgggggagaagttctggagattgcccatggaggaaagctactgggagcagatgaagtctggtgtggccgacatggtcaacaccggtggtcgacagggaggctccatcaccgctgccctgttccttaaacagtttgtcgacga

SEQ ID NO: 443667 - DNA, 198 bp, Triticum aestivum
gattaggaaaagtagtagcagtaacatgactctgcatagaagtggtttcgaaaaagctcgaacagcaatgagcttgttttatttgctgataaggctatataatgtgatttctctatcaaaaaaaaaaaaaaaaaaaaaaaaaaaaaaaaaaaaaaaaaataaaaaaaaaaaaaaaaaaaaaacaataaaatcataaaa

SEQ ID NO: 443668 - DNA, 81 bp, Triticum aestivum
cgttacaggcagccccgggaacaatctcggcgtgctggtgacaattgatgagtgacatgttgaagattcctgtagcacgtg

SEQ ID NO: 443669 - DNA, 393 bp, Triticum aestivum
  unsure (1)..(393): unsure at all n locations
gatgggtgttgcccccatgatcacattggttagtttcctgagaacaaagaagaatgggtcacacgttgcctcgtgaggactggaagccccatattctggccatgagcccatgatcatgctcctgggagaagcaaaagttgtttctttaggttttgcttaggatgtacacagatgtaaattaattaccaatttactatgcttcgtctaaagaggtgacaaggcatgcaagtgatgagtcacttcgcagccaagcaagtactgtacctgtttcgcgttaaacctcaccttactgccagcttactggtggtggtgccaaacaatggttttcaactgacttctgatttacatggtacaaaananaaaaaaaaaaagaaaaaaaaaagcggccgctct

SEQ ID NO: 443670 - DNA, 340 bp, Triticum aestivum
gacgacatccacaagttcctacactttattgatcgtcttgaggtccttgtggggtgtttcaatggtggaaggctacgtgggatatgtgtgccactgctgcacacgttgaacaagtccaactgtgtcgagaaacttatggtacgagctgttttctgttatatattttgttcataaactctttcttatacacagttttacagctttgatcttcttgaaatagaaactgcccagttgtattgttcctatacagatgcctgaccattgccgggtcagacttgcacttggtcacaacatgatgtttatgtcaacctactccattccccttggaggtgaaaatata

SEQ ID NO: 443671 - DNA, 428 bp, Triticum aestivum
  unsure (1)..(428): unsure at all n locations
acggtcaactattccgggtcgaccaagaaggaggaggcaaacggacatcgggacgacatcacactccaaagtgtcctcatatgcaccaattttgaaggagacttggaccgtatgctcaactcggatagtgccagagacacttagccattggactttgtatgggtgcgggtgcttcatcttgaccaattgaagcttggagcatagttcttcacttgccaagttgtggcaactacctccatcgatgatgaccttgacggaccttccattgatgccgccctttgtgtggaagatgtggaatcgttggtcttccccctattgatgttgaagagtcaaggctttggagacaacgagagcagggctcgaatcctcatcacaaaagacttgatcatcttcatcctcgttcatgcgtcngtgcatggccacttgct

SEQ ID NO: 443672 - DNA, 51 bp, Triticum aestivum
  unsure (1)..(51): unsure at all n locations
cgggncgcgggnnnngnaangttttccgcggtcagnggtcnaaacntcccg

SEQ ID NO: 443673 - DNA, 357 bp, Triticum aestivum
ccgcgagatcaagttgcttaggctcctaagacaccctgatattgtggaaataaaacatattctacttcctccgtcgaggagagagttcaaggatatatacgttgttttcgaactcatggagtctgatttgcaccaagttataaaggcgaatgatgacttgactccagaacattatcagtttttcttgtatcagttgctccgaggattgaaatacatacatacagcttcttgcagcaaatgtatttcatcgagatctcaaaccaaagaatatcttggctaatgctgattgtaagctcaaaatatgtgacttcggtcttgcaagggtagctataagtgatactccaaccgccatatttt

SEQ ID NO: 443674 - DNA, 436 bp, Triticum aestivum
aggcggctacgggtgttggcttacgaagctcggatgactgtcgtctcagcttgttttgtaatcggatacggcggccgatacgcgtcagttataagcccattgagcttgttgcttccgtgcaaaacatggaaagcccatgacccgtaaagaaactaaccaatacgacgcttattaaatagagtatatatatatatatataaaaagagtatatatagaaaaaaactataggccgcttattgcgagcgagatagcctagcatcggtcaaagcgcttccttgattctgctcactataaattagagcaatttttcattctttgaaattgcggtaacattacatatataaataattatgatcagtttaaataataaataagtgaaaactatcgcaaaacagtgaaacattcacgtgttaaaaagttatagcatatatcgaat

SEQ ID NO: 443675 - DNA, 421 bp, Triticum aestivum
gggtcgacgggtggcccccctgatacagcatcaagaacaaaactcaaagacggcaggcatttggcatacctggaatctggcgtcccaaaggagaaggccaagtacaagatcattttcgtccatggattcgactcctgcagatacgacgcgcttcaagtctccccggagctggcacaagagctgggcatctacctgctgtccttcgaccggcctgggtacggtgagagcgaccctgacccggcgccgtctgagaagagcatcgccctcgacatcgaggagctcgccgacaacctgcagctgggccccaaattccacctcatcggcttctccatgggcggcgaaatcatgtggagctgcctcaagcacatcccgcacaggctctccggggtggccgttctcgggccggtgggcaactactggt

SEQ ID NO: 443676 - DNA, 411 bp, Triticum aestivum
gagagggagtggttgcggagctaggggtgttggatggtgtaggagtgcgttgtgaggaaggaaaaatgtgctcaacaaacatgacatgacgaaagacataaacgtgtccggtgtgaaggtcgagacagcgatagcctttgtgctcgtcagagaagccgagaaaagcacatgggatagagcgtggtgacaatttatttgcagaagtggcgtaggcattgggaaaacagagacggccgaaaacacgaaccgcggagtagtcggggtgggaaagaaagaggaaataatagggtgtattgttgggtttagttttagaaggtcgaatatttagaaggaaggtggccatgtggagggcttcagcccaaaacttgagaggcatagatgattgaatgaggagagtgcgaactatatcat

SEQ ID NO: 443677 - DNA, 386 bp, Triticum aestivum
acatgttcagataaaagagagagttgtcttgtgctcacaagcacactagggcagttgccatgtaaaagaaagagttaccgtctgcttacgtgcacgctagggcagttgccatgtaccatgcaaaaacacatggcaattcgggtaaaagagagttgccatctgcttacaagcaaagctagggcagttgccatgtaccctgcagaaacacatgtcaactgacagctttgggtgtggcgaggagacgggcgtgtgggcgaagtgataaacacccacacaccagccccctctgcgtgcgtgaaaactgatgtgtgggcgaattgctaaacgcccacacaacagcccccgtgtggtgaaaaagaacggtgggcgaccggatgaatgcccac

SEQ ID NO: 443678 - DNA, 447 bp, Triticum aestivum
  unsure (1)..(447): unsure at all n locations
tacggtcgtagattccgggtcgacgggtttttaaagaaaaagaacctatagttaatgaaagaatagatcaagattccacaagaattggtaaacttgaggatatcattactaatttagggtctgccttttcatccgtttgaaataacccaaatcctcctacctccaatattgctaaattaatgtatcttcctaaaaataagggtgaatcttctagtaaggaaaatgcggatctcaaatcaataagtgttcaccccaacttcttcaatatcattagggaaccttttgctacaaatgaatttcttgatttcttgcctaggagtttgatcattaataaaaagaaggaaactccaaagggttataagtgttccattgaataattacataccaaagatgataatacctagatctattcttgcttttatgcctagctangggtgttaaacgatg

SEQ ID NO: 443679 - DNA, 393 bp, Triticum aestivum
cgagaataaatatgctaaggagtccaataaataaaccgatgatattttgtagatgtttggggatgttctggacccaatggtgatgactatccgagtcgggtccgggacagctttcggacgcgcgcgtggagagccgcgggctactgagagaggttaggttgggcctggcggtgaatggtagtggactgtggagagtgggttggtgtaggagaagaggggagagaagcaggccggcacggtttccggagaccgaaaatgtccgacgaaaagaccgactaatattgccgctatagtttaacggttgggctatcgaacgaactccgaatgcgatgaaacttggcaggcggcctacctacactaaaaccacaccgcatgccaactttcatcctaatc

SEQ ID NO: 443680 - DNA, 399 bp, Triticum aestivum
atcatctttgttgacgcgaagtctctcatgacatcctttaatatttctggagttgcgttccaaactttagggtttcaacatccttggcatgagccatggtactactgtccttcagtccctgatgaatctcctgtatcataagatttttctcctccaacttggctactttcagtttctggctcctgatttcttcacgaattgcctccttgtcaaatatgatttcctaagggtccacctaaaattcttcatgtaatactccagatcccggcgatacaccagctaaggttaaagttgcatcctttgctgacagatgctccatcagccttctaccatccaatccttccatgcatacgcttgcttaactccgcacgatgacaataacataagaggtcgataaca

SEQ ID NO: 443681 - DNA, 91 bp, Triticum aestivum
  unsure (1)..(91): unsure at all n locations
gggncgcnngnngnnngnaantttttacgcggccggtaccggacaagaattcccgggncgacggggggtggcnaaaccaggctgctctagc

SEQ ID NO: 443682 - DNA, 423 bp, Triticum aestivum
cagggcttgggcaaggttcatcagcatcacggaaggcgaatggaaaccaaagctgaaatggtttctagccaaggtaagtaattaagtagtactagctagctagctagctgccatctctttaattatcatgcttgattaattattatctaatcaaattaaattccattctggtaataaaggccctgaagcaggcgcaggggactgatctgtgtgcattctgcatttgcgagaacattcgcatgatggcgtccgaaaggagcagatctcaaagacaggaatgggtacgcttgtcagaacactattcacaatttttacaccattattgatatctagtcacacaactaatacacatgcatattgatctccttaatagttcaaagaggtgcgggacaagctcctaacaacgaagcgcgtagaagcact

SEQ ID NO: 443683 - DNA, 410 bp, Triticum aestivum
  unsure (1)..(410): unsure at all n locations
agctagcagtggcgctagggttttgacgaggtggagaggtggaagaaggttttcttgacggcaggggacatgtatttataaagaagtgtgcggcacagtgcaattacgcaggtacccctggctgttcacatctgaggggcatgtggcaagcacgcaacatactcagagttgtcccacgttcccacgcccgccaggtttgtcggatggttgttccggcttctccggatttcaacaataaggatgaatcatttaaaacaaacttaatgtttgtctctgtgtcttctgctgacaaggatgcagagaagacatttgacagtttcaatagtatgcatatgatttggacagatagagtttgagatagaaagcatagagagattanggtccgatcacattcacttagttcaaaagtt

SEQ ID NO: 443684 - DNA, 402 bp, Triticum aestivum
ggtatctcctcagaggaggagataaacttgttcaattggcatataccaaatctggagtacgccaatgcaggattatcttcaaggcttagccttgcattctgggaccaggatgatccgtatgacatgggtggggatcactgcttcctgcctggtggcaacgggaggcttgtgcaggccctggcagagaatgtgcccattgtttacgagaggacagtgcacactatacggtatggaggggatggtgtgcaggtggttgtcaatggtggtcaggtgtatgaaggggacatggcgctgtgcactgtgccacttggggttctgaaaaatgggggtatcaagtttgttactgagctgccacaaaggaagcttgatagtatcaagaaactaggctttgggttgttaaac

SEQ ID NO: 443685 - DNA, 219 bp, Triticum aestivum
agataaaaacctccgtccgcctcgtcctccccggcgagctcgccaagcacgctgtctctgagggcaccaaggccgtcaccaagttcacctcctcttagatagcatgttctctgtcgtcctggtggatcgatgtttctctgtaatggtcatctgttcggaccatgttggtcttgtaatttgtgctggttgtgctggaagacattgtttcagtatctcgcg

SEQ ID NO: 443686 - DNA, 391 bp, Triticum aestivum
  unsure (1)..(391): unsure at all n locations
ggaaacaatgcttcttcagagaactcttgatgcaatggttgatgtcgtttattgtccgagatgtcaaactgcttgcttggaagatgcaggtgatgaagccgtgtgtccaagttgtttgttcagcttctgcgcactttgtagagggcgacgtcatgttggggttgaatgtttatctgcagaagaaaaacttcaaattttggaggaacgtcaaaagtctgcacgaacaaagggagacatccagaagcttatggatgaagtatgcagtatcaaggaaattttgaaggatgcaaagcagtgcccgcattgcaagatggctatatctaagattgagggatgcaataagatgacctgttggaactgcggtggatttntctgctaccaatgcaacgct

SEQ ID NO: 443687 - DNA, 232 bp, Triticum aestivum
  unsure (1)..(232): unsure at all n locations
gccgccgcggcagtcccccctccccgagtacacgctcgccgccgtctggatccaagcaggttattgtgtgaagtgccacgtgtccacatggcttcagcggcgcaagatttccagccccggacattctccatcanactgtggccaccgagtgaaagcactcgtctgatgcctgtaaaaaaggataacaagaaactgtcctccgaattcaacctttccccccagttatggcctt

SEQ ID NO: 443688 - DNA, 411 bp, Triticum aestivum
aaactgtgtggttgtgcgctgctgcgtgggataaggcggatggataactggcgcgtggggcctaggacacgtgtcgatcgctagacgcggcttacaatcgcgtgagatcagtcggttggaaagaagcgttttccgaattttatagatattgggtcatttagaaaataccatcttattctgccatattcattataatttttatggcatgagcatctacaaaaatgctcaggtagtatgccgttgaacaacatttttttgttgtgaaccttgttacatgtctcatttgtgatttctgagaggttggtaggcaagatctgaaaaaaaaaaacttctatactgtttttcttgcagtttcttcacctggttcactgatacagagcacaagagccttgccggatggggtgcaagatg

SEQ ID NO: 443689 - DNA, 402 bp, Triticum aestivum
tctcaataagtattttattgaaaaaccggtcgtgacagtgggtctcattcaattttaaagccgagggctcctggaaaagggaaagggtgtgtcctggggtggggtttttgtgttgggatcgtgtgcgagagataacatgccagataatccagacaatcacatttctcccccacatatgggctcgatttgaaggagttcagattatccaaatagttgaattttggagagcctgcaaggcgcccgtttgacgtcctagcgcatctggatgtatgagggagaaagacgttttgaccttggtgatgaccttaattatttgtttgattcatttatatgtattgtagctcgtagcaacgcacgggcgttctcctagtatacttggtattcaagatatgtgaaactttc

SEQ ID NO: 443690 - DNA, 433 bp, Triticum aestivum
caaggatgatgtttccatattaggaggtgagagtgatgatgtgccatcttcggccttcatccacggcgatgatgacgttcccttcgaccacggcgacgtatgatgatttgagtgacttgtgccaccatattgagagtgagagtgacttcaccactagccccatatttgatgtgttgccatgattcccatgtaaggagagccacaaccccaccacttgagtgagatgagtgactccaccatatgtgacattgagtgcacctaccttgacggagtgagtgaaccaccacatagagagagtgaggtagctgatagggcatgtgaggccactatgatttctaacaacttaatctctacttctattgtgtcctctcatttggtgctaggtcccatgtatgatgacacgccgattcacgacgacttcgccctccatttg

SEQ ID NO: 443691 - DNA, 186 bp, Triticum aestivum
tgaacatggtgcagcactgcctgcccagggaggtggtgaacctgatcgcgtgccatggccctgagctggtggagcggcacgacgtgttcggcaagtggaacgcgcgcctcaccatggccggcttcaggccgtcgccgctcagctcgctggtgaacgccatcatcagcacgctgctgcacagctact

SEQ ID NO: 443692 - DNA, 404 bp, Triticum aestivum
ttctggtggcagagcttctgcggattcttcatcatcattatattcgctttctctgaacctttcagcacgacatgggcgatgctgaacgaatcccctttctcaagcgcgaattgccattcattgggtgtgatgtggaaccagtcctagtttgaagtcacggtcgccttcacctccacatactctgcggcgccaccctcgggagtgatgacaatgtcatagggaagccccgattccttctcttcgttcacccacttgacattgctaggtcccagctgcccggcaaggtattggtgtaccgcagcttcaccaagcctgccggttcttgaccgctcatctggcttttgaactgtggctttacaaggtgtgccagctcctagctcgctttcatcttctgcaacatcagc

SEQ ID NO: 443693 - DNA, 406 bp, Triticum aestivum
accgcagattgtgtggggtgcgaggaagaggaggacgagaagcgagacactgcccattgatgccgccaccttgctgccaggagaaggagagaagaggatgcggggacctggaccagatgcacaggaggacgaggctgttcaagcggttgaagccgctccagcaaagcgggctcaccggttcaaccccaagtacgatgcgaccctgtggatcacctgctgaggtggtctgagaagccacatcggcgccgggcacactgacaaaacaatggttgttcgactttggcaacatcaatgcacatagtatcgtttcacctatgacccccacaactcaaacacattacacatgtacaccatagatgtccagggaggtaaagtccctttttttttaaccatttcaactgttgtt

SEQ ID NO: 443694 - DNA, 370 bp, Triticum aestivum
cgaggcggacttggccgagtccatgctttcctggttagggagagcctccaacacaagagagagagagagagagagcatcgtgactgccatggcttgaactattttgctgagatcctggaaaaattgaatggtataattctgttaattgggaaccttggaattgattttcacctgaaaaggttgatcgagggtcggataatggacgtaacacagctgctagagaagatattataatatggaaaatagcagatgaggagcaagctgaagttggtagatcaattgagcaagagttccagacccaggttacaccaagaacaagtgcctcagattattcatttttcaggcagcggaaggatcactccccctccac

SEQ ID NO: 443695 - DNA, 388 bp, Triticum aestivum
  unsure (1)..(388): unsure at all n locations
agctcgactgctacagttttcagcaggagctccatgcccgtggaggcccatggcattggcaccatcccaacaaaattgatggacgaagtaaccaactgccaagtacttcaaggaaactaaatgctttacaatactccaaatagccaatgcgactctgtttttaagaccttttgcacatttataagaccctgtttttatacatctgtgtaaacagtccaatgtgattctaactgatgatagttcatctagaagaaaaaggagaaggggcaacatggagaaagacgcggtgctggtgtgcatgatcttgggctttctaggctccgtcgcggtcacnctcggcttcgtcgccaacaactatagctccaagcgtaaagagctatgtgagccc

SEQ ID NO: 443696 - DNA, 334 bp, Triticum aestivum
atgtgccactttgggttcacgactagccatgtcagcccgggctccttatcatatggatgctagtgacactatcatatacgtgtgccaaaagacgcaaacggtcccgggcaaaggtaaggcgacacccgtgggaataccgtgcgtgaggccgcaaagtgatatgaggtgttacatgctagatcgatgtggcattgagtcagggtcctgacattgaattggaagcatcattgtgtgcttgaattttcctgacggccttctaaattttcattgatagagtagtaatctccggggccgggttatttttccctccaatgacccggagttcttgaatgca

SEQ ID NO: 443697 - DNA, 61 bp, Triticum aestivum
  unsure (1)..(61): unsure at all n locations
accggtcctatcntccgggtcgacgggccggaagaagggcagcaaggccaagaagagcgtg

SEQ ID NO: 443698 - DNA, 89 bp, Triticum aestivum
tacaaataaaatgtgtcctgtaatcctctaccctgggagagaaaaaagctagttagctgtttgatagtgttcttcagtccttgcttccc

SEQ ID NO: 443699 - DNA, 340 bp, Triticum aestivum
gtcaggaagatttctcgtgttaatctcatgggctccaagtcgcaagctattcctactgccacagaaaaggttatcgcactggaagcgtgcttcagccgcagaactaatgtttagtaatgtcgatgtagatctactcctcatccttgccatagtgttcatccatacagaggctgtttggtaccagtttctggaactcatttttgtttgactgatacatcttggtcaatatcagcttctggaattaacgtatatctgtataattcctagttactatttttgtcgagctgtaattccctttgttttttctacattacggtgttactacttgatgaaaacttac

SEQ ID NO: 443700 - DNA, 376 bp, Triticum aestivum
caattagatttgttttagattcatcttcagcatgaggaaagaaagaaagaaaggacgaaagaaagaaagaaaagatgcgcacgcacgcttgaggtcggcgacggtggtggcggaggcggggaatgagacggcgaggcgggtgcccaggctcgtctccaggaacaccgtcgccacctccattcgatcccctcgttgccggaggcggaggaggcggagcggcgtcccgaaatggaaagctctcctctgctttggggtttctccaggagcaagaggccaagagcagaggaggggaggccagcggaccacgtgacgtgacggcgctccctctcctctcctctcctctccggtcacactacttctagactcttgttgactg

SEQ ID NO: 443701 - DNA, 402 bp, Triticum aestivum
cgtgagaggccggattcggttctatattggagggggagctccggtctatgcagaggaggcagcccagcagcggtctgatctggccagggcattgctgacggttggaggatgagatcgatccagaggaaaattaatcgaaatgagaccgaaaatatattgatcgtccaagaccgatctgaagaaaccgatagagagaggaggacgagtcgcggtgtctggaataaactctaaaccttgactcttgataccatgctagaggagcaacttgattgtactaaaccttgactcttgataccatgctagaggagcaacttgattgtattaccatagcccatggggagaatatatggtacaagagacttggggtacacgtaaggaaacctagaccaatgagtacatata

SEQ ID NO: 443702 - DNA, 242 bp, Triticum aestivum
gacgtcgaagacagcggcgacttcgtgtgcgcgttgtgacgagcaggcgtggcggttccccttggtggtgtggcctttgtgtttgtaatgtgttcatccttctgttgtgtcgtttgtttcagagggttgcgctgtgctgttgtatgattacatctgttttctgtaaccgttgttggtagtgacgctgtggataaaatataagtataactacacttccatatgtgtttggtgtcctcagctgg

SEQ ID NO: 443703 - DNA, 264 bp, Triticum aestivum
acggggatgatcaggcaccctcaattgcagcaccgccgcgacgcggcatggttctgtacatgtcactgtcggttcgaacagcacagcacggtgctcggcgcgcttttcaatgccgtcgtagctccacgtcaagcggatttaatatctcatttgctgttctgctaggatcatgtgtaagaccgtcgatgcactgcatcctttgggggctgcgcacatgtgatttgtacggataccctgcactgttgatagtcctatttgtgcaca

SEQ ID NO: 443704 - DNA, 248 bp, Triticum aestivum
gtacctttaatagcctttgttgacagtggagctcagtcaaccatcatatcaaaagactgcgctgaacgttgtgggttactcaagcaccttgatcaacgttacaaacgggttgctaatggtgttggtcaaactgagatacatggaacaatacatgtatcagctacaaacatatgccatgctttctaaccctgtaccttcagagtattggatgatccaaatatggaaatccttttcggacttgagatgct

SEQ ID NO: 443705 - DNA, 102 bp, Triticum aestivum
gactatgattccaccacaagttgggttgagactccggactttataaaaaataaaagaggccaaagaagcccaaataaaaaagagaggccaaagaagcccacc

SEQ ID NO: 443706 - DNA, 57 bp, Triticum aestivum
ggatcctctggcacgacgaattcttcattgtcgaggcttgcctcgtcttcggaggac

SEQ ID NO: 443707 - DNA, 231 bp, Triticum aestivum
  unsure (1)..(231): unsure at all n locations
gcgtgccaatgtgaaggtaaaggtgggttccttgctggcccgggtgttccttttgaactggcttgctggggcctggaaagagtttcaaaatccaaaaatgggggtcaaccccccattggatgatcaggtgtctgctctggacaaaaaaaaaaaaanaaaaaaaaaaaaaaaaaaaaaaanaaaaaaaaaaaattaaaaaaaaaaaaaaaaaaaaaaaaaaaaaagcggccg

SEQ ID NO: 443708 - DNA, 102 bp, Triticum aestivum
gactatgattcccccacaagttgggttgagactccggactttataaaaaataaaagaggccaaagaagcccaaataaaaaagagaggccaaagaagcccacc

SEQ ID NO: 443709 - DNA, 372 bp, Triticum aestivum
  unsure (1)..(372): unsure at all n locations
tggcgtgagatgaaagggcgagagggaagggtccctcggtggcaaaaaaggaggttgcctgaagttcttcaccctggggtttacccgggttcaaagttacacggttttcgcaggaccttgtcgttctcatgcttgctgctttcctaaatgtttgtttgcttgtagtcttcggttagggcaaacaatgatcttttcttttctacatttttccgagcttggtcgctccgttgagttgtaagcttccaagagagttcctatgtatcgttatgccgatgaggtttgtatgtggttgtaattcctggtcgggtgatggctttgttaattcaaagccgggctcttctcgagcccacgtttaaaanaaaacttactatg

SEQ ID NO: 443710 - DNA, 416 bp, Triticum aestivum
ggataaaaacatttacagttggtggaacggtccttgcctttttgaaattctggacaaaatcgaagttcctttgcgtgatcccaaaggtccagtaaggctgccaattattgataaatataaagatatgggcacagtcgtaatgggaaaattagagaatgggactatcagagagggtgatagtttgttggttatgccaaacaagacccatgtgaaagtcactggtataaacttggatgagaagaaagtacgacgtgctggacccaatgagaatgtacgtgtcaaagtgtctggaattgaagaggaggatatcatggcaggtttcgtactttcaagtgttgctaatcctattggtgctttcactgaatttactgcccagctgcagattctagagttgcttgataatgctattttcactg

SEQ ID NO: 443711 - DNA, 63 bp, Triticum aestivum
acgaattcattggtgtaggggttgaagatgaagttcatcatgcgagaaaacgtcggaggaggc

SEQ ID NO: 443712 - DNA, 357 bp, Triticum aestivum
aatgaaaagaaaaacgattctcccatcaacatgccatcccaagagctgggtctgaagatatcggaaacaactagatgtgaaactgaaatccatgatgaacgaagtattccgaaaagatcaaatctgtcagcattcaccaggtaccatactcccatggcttccgatcaaggtggggcaacatttcggggaagctgttcacctcaagataacagctcagaggctgtgaaaacgaactccacctgcaagatggagtcaaattcagatgctgctcaaataaagcagggctcaaatggcagtagcaacaacaatgacatgggctccagtacaaagagtgccatcgcaaagccttgttcagac

SEQ ID NO: 443713 - DNA, 438 bp, Triticum aestivum
ggaaccacagcggcgcacaaaccctacatccagatccatcccacctctgacctaggctatcatgacttccatcgtctccaagctcgcgcgggcagccgtcgcaacccacgcctcttccgcaccgattggatgtactgctggtggcagtcgctctacggcccggtgtctccctgggctctggctgactggcggtaccatccgacgcatgtgtagaggcgtctctcctgcaggaggtcccaattcagaagaagagaaaggcagacccaactcggaagatgctgtagatgctgcagccatagatcctatagattatctccatgttcaagaggatttcctcaagtcgaaggaagccctgtgggccttgtaagactactggcgcaagtatcatggcatctcgcgggacagaaatgagattgccagacggttcaacatattttg

SEQ ID NO: 443714 - DNA, 238 bp, Triticum aestivum
ggctcgggaagttggttgagggttggacgtcccttaatggctctgacagcgacgcggttgcgaggcatttcactccttttgttgcagaatggacacatcggccaactggttgccgtggtcggtacgactacaaaagctcgcaggagctttcggacacacaagatgaactagatggagatgctgctctcgacaaggacgatgacgataacatggagaacgtgcatcatgacaccgaccc

SEQ ID NO: 443715 - DNA, 247 bp, Triticum aestivum
  unsure (1)..(247): unsure at all n locations
aaaagctacctctcaacccacccttcaattaaaaaccattcggaccccttgccccaacccaaggtattgaagaaggcaatccacctatacaggaaaccttgcgccggcaacggaatcaaaggttcccccaaaggttgcattttcaaactcccctgcttgcggcgtaattcgtttggtggcggtgggtgcctgncgcggaaacatgccctttgttgcctgcacattgacggccattaagaagagtgta

SEQ ID NO: 443716 - DNA, 443 bp, Triticum aestivum
ggtcgacggggaaaccgaactggaggaaaaacactttaaagttaaccaccataaattatattacaaacccttggttaatacaacttcggggaatttcggttacatcaactcgaacatgatgtccttcgagcattggccctctatcaagcgggcaccctctaggacgtcctcaaaatagcgctctggcttgcggtggtccttgcctccgggtggaccctcaactgccacgatggcggccttcattttcgcccagtgcatcttgacacgggcaaaggccagccgcgcaccttctatacatgacgaccgcttgaccatgacaatttgggacagcgcgtcaacgagtcgctgcaccaggccaaaatagctgcttgggacgggttcggctggccacagccggactatgacgtccctcatggccaatccggacaccctatgcagctcgg

SEQ ID NO: 443717 - DNA, 89 bp, Triticum aestivum
gggtcgacgggtcgtgtatatttggacgctatgtatgtatagcttggatcttgacgcctttgttcaattgttatatgatgatgagtagt

SEQ ID NO: 443718 - DNA, 336 bp, Triticum aestivum
tatcttttatgaagaccgtgttgttactcccttagatactgccatcaccctctccaattcaaatggctgataaacaagaaaagtaattgaaagtatagatattgtatgatagacaagtcaatggatagtggggaataaaagagggcatgaaataattcatatttatgttgtctaaccaaacaggatagcatgacacaatttcacatatatatatgatggctaactaaacaggatagcatgacacaatttcacattatgatggctaactaaaaaagatggaaagacatagttcaaaatatgagactatgtaaacaggatgacatgatataactatat

SEQ ID NO: 443719 - DNA, 105 bp, Triticum aestivum
atcatctaacacggcgaattcgtcatcgccgaggcttgcctcgtcttcagagggggcatgtaattaccatcctccgcttctccatctgccgctctctcaggaggg

SEQ ID NO: 443720 - DNA, 417 bp, Triticum aestivum
  unsure (1)..(417): unsure at all n locations
ggcaaattaataaaaattctgtacaccatggtaaaaacaatcattataccctggtccaaatggataaaaaaattactttgcttccaaggacccctgattcaattttgaaagatgatattaatagagctaataaagcaaaacaggagaaaaataagactgaaaatcatattgtggcaaaagaatttgagcaacaaatgcggcctaataataaacaatctagtgttgcttctgaaattaaattgaaaagtgcatgtttacttgccaccaaatctgatattaatgatctagattttagaaaatctatttgctatgcttttgagtgcaaagaggcattattttcattcgaggacgtgccttcctctttgcctcctgctgtcactaacattttgcangagttcgctgacgtctttccacaag

SEQ ID NO: 443721 - DNA, 368 bp, Triticum aestivum
  unsure (1)..(368): unsure at all n locations
tcgatggagaataaaaaggaatgaaaggtgtcggaggaaaaggtgacacaggaggaacttaccagggtttatcggaaaggaaaaggaaagaaaggtcatcgacagaaaaactcaaggaagaaaaacttgggtattaagaacgagactcgtcaaaagtcacatcacgcgagatgcgcaagcgacgacctacaggatcccaacatcgatagtccttgtgcctatcgctgtagccaaggaaaacacactcaaccgactgagtagtcagtttggtgcgttctcggggggcaagaagaacatagcacaaacatccaaacatacgaagagctgagtagtcaggagagagaccagtgagacactccatangaata

SEQ ID NO: 443722 - DNA, 404 bp, Triticum aestivum
ctctgaaggtgatcaattaccaagacttcaaagcctgcaaaggataccccaaggaattgtggctgttcaggtcaacattggtgtattaattgtgtgcaccgctttcttatctggcgagcctgcaaccaggctccggtctcaagaactgcaacagctgatacctgcattgcttgaattcatggctgtctgcaaccgtgcaatccgtgtgcattttagattgataggggaagaagaccaggagttccacacgcaacttgtcaatgggtttcagtctcttactgctgagctttctcactatattcctgccatactttcggagctatgactgtagcaaggtggcaggcagttaggtagcatgtgaatggttggttgatttttcagttggggatctgctccaaatgttc

SEQ ID NO: 443723 - DNA, 369 bp, Triticum aestivum
cgggatagcctaattcatcgtggccgataagaccatcctctccatggcaaggaagcactccttcgaggacgcgccggaccatctcaagaatacctccttcaactaatcagcctataagatatctattattagtactgtaatgttcaggcagcacttatgtgatatcaggcgaggcttgcagacatgcagtggtgtagtaccgcgcttctctgcgcgcaagatcttatctgatgaagtgatcttgatttaatatgaatgaagggactcgattttccaagccaaacatcttgtcacgaattattataagcttataatgacgacttgagaatcaaaatgtcaaactgaacagctgataacaataagtcactt

SEQ ID NO: 443724 - DNA, 434 bp, Triticum aestivum
  unsure (1)..(434): unsure at all n locations
ggaggagcattaactggctatacctatcacgacttgcggccctaaaggaatttgcttttatgaaggctttaggagaccatggattccctgttcccacagcggtggactgcaatcggcactgtgtcattatgtcacttgtgccgggatatccacttgttcagataagagaattgcaaaatccagatgatgtttttgacaaaattcttggtcttgtaattcgtttggcggagcatgggctgatacattgtgattttaatgaattcaatatcatgattgacgatgatgaaactgttacgatgatcgacttcccacagatggtatctgtttcgcaccggaatgcccagatgtattttgatcgagatattgggtgtatctacaagttcttcaacaaanagttcaatcttacananaaaggtggacaagatggttctgaa

SEQ ID NO: 443725 - DNA, 117 bp, Triticum aestivum
caatggaaaggaggccagcttgagatcactgagcttgaatctcttgagcatgtcttgagtgtatttgtcttggttggtgaaggttccttctcttctttgcttgatttcgaacccgcc

SEQ ID NO: 443726 - DNA, 123 bp, Triticum aestivum
gacgggcaaaggcaaggaggccagcttgagatcactgagcttgaatctcttgagcatgtcttgagtgtatttgtcttggttggtgaaggttccttctcttctttgcttgatttcgaactcgcc

SEQ ID NO: 443727 - DNA, 286 bp, Triticum aestivum
acgggagtgttttgattatggcgaaggctatgaacaatcgggcttcactggcatgatttcgataagtctttacaacagtatggccactttgctttgctaatgaacctagtcctggtatcagatgcaccaatcagggatgggctccaccctttcagggtccatgaatagaccaccatgaaaattttgctacggtaagatccttttaagaacttaccacagtgatattaatctcatgctagtggagacatagtgcccttacgaactccttgggtcaacgtcagtgact

SEQ ID NO: 443728 - DNA, 429 bp, Triticum aestivum
tctccgtatgatgggagttcaacccgaaaggaccgcgaactattcagcaattcttcggcatgacgctcgaagggatgtatggattgttctttggatcacgaataaagtgtccggacaccaccgaggatgcgggtctaaactgcaaccgtccagatacccacataagtaatctacggccgaacacgctgtcttttcatttgtcctaacatcattctgaaaaaattgctcttggccaggactggataagaaaggcgaaaatgatcaggtgttcggccccccttcctgaaggctcactggatcccgtactagccaggatgcttgagctcgtaccttatcaagcgccatcaggggaagatagagggaggaataaagaagctgaaagcgggcctcgcgcattactcatccaaaccaggggaattagcgtctccg

SEQ ID NO: 443729 - DNA, 433 bp, Triticum aestivum
gacgccgcaaggaggaacaacaccaggatgcccaagtattccaagttcacgcagcaggagctgccggcctgcaagccgatccttactccaaaatgggttgtcccggtgtttttccttgtcggcgtcgtctttgtcccagttggcgtcgtttcgctactagctgcacaagatgttgttgagatcattgatcggtatgatcatgcatgtgtcccacctaacatgactgataacaagcttgcgtacatcaagaatgatactatatccaaagagtgcacaaggattctcacggttacaaaggagatgaaacagccaatttatgtgtactaccagctcgataacttttatcagaatcatagaaggtatgtgaagagccgaaatgatgcgcagctaagagaatataggaagtcagatacgacaacctcatgtgaccctg

SEQ ID NO: 443730 - DNA, 69 bp, Triticum aestivum
ccgggtcgacgggatactctgagcacgacgaattcttcattgtcgaggcttgcctcgtcttcggaggac

SEQ ID NO: 443731 - DNA, 172 bp, Triticum aestivum
tcaagtcgatcgggtcaagatgaagtggggcggtggcgtcatgggctccaaatcgcaggccaagagcaaggcaaaggaaaagctcatcgccaacgacgctgcgcataggatgaactaagcctaaccttatatgtgagagcatatgccatgtactttccctttcattgtgtcc

SEQ ID NO: 443732 - DNA, 418 bp, Triticum aestivum
cagccgggcctcctccagttcggctccagcacctccgagattcttgagactgcattcaagaaggaaactgtcggcctagttacgagggagcagtatgttgagaagagggttaacatacgaactaagattgaggaggaagagaaagagaagcttcaaaaattgcaacaagaagaagaagaactgcaaatgcagaaaaggaaaaagaggagagtgaggggagatccacgcttgtcattctatgatgacattgggaacggaagtgacgaggatgagtttgagaaccaagaaactcagaagaaacaacttggaaaggatcccacagttgagacaagttttctacctgacagagatagagatgcagaggaacaagcagagcgagaacgcttgaagatgcagtggtcgcgtgagcaagaattga

SEQ ID NO: 443733 - DNA, 428 bp, Triticum aestivum
  unsure (1)..(428): unsure at all n locations
attatcaaaaaacgaagtcgtgtgcaacttgacaccactgacgagggatatcatatgcgtattgcatctagttagtacaaaaccatggtgcattataggtctttttgagtattgtgcgacctgttagatttgacggcatcatcctcactaaaattaaatattctccttttgctctgtatttgatttgaatgtacaatatagatagtaaagcaagtttgactagaggaattcaataagcatgggggttctacgaagattattcatacaccaacatacaaaacatgacaatcatttgatttaccaaacaaagttctaaagagaaaatgaatatatgaaatatattgcactttataatagcattacatggcatcgangagcagacacagctcatatatttacatttttgcttgcattattcatgtattgtg

SEQ ID NO: 443734 - DNA, 429 bp, Triticum aestivum
  unsure (1)..(429): unsure at all n locations
catcggattagctgccaatcgtgacgctgcagcgatcatgttatccaacggggttgggaagtgacccggcggtgttggcacatactgaggcgggtcatgattttgtcgaggcgggtctgcagcatgtggctgatccggcactcctgtcccaggtgtttcaccccagtttactgctgccagattactggttcctgctcctggcgtgctgaagagatttcttgcctcataaaccgtcggtagacgagattggtgccttctcctcataacgtcgtttgaagcgttctgatccaacatgagccggtaattttctgcttgaatctgctaccctgagcatccanagcggcctactcctcanccatcctggtttcctcagcagccatctcctcattagcctgagctatctgatctcgcaatttcctgacctctaca

SEQ ID NO: 443735 - DNA, 408 bp, Triticum aestivum
cggcggcgagcgccggcggcggcgggaaggacaaggacagggacagggacagggccaggggctccgcggtctccttcacggagggcgagaaggtgctcgcctaccacggcccgctcctctacgaggccaaggttcaaaaaactgaaaatcgggaggacgagtggcggtatttcgtccattatcttggatggaataaaaattgggatgaatgggtcgcaagtgatcgtttattgaagttgactgaagagaatgttcgaaaacaactagagctgaaaaaccagtcaggggacaagaccgtcaggactggtggacggtcagcacagcataacccaaaaggctctaatgtggatgcaaaagccgataaagatgacaccaaaggtcttgtcaaggggaagaagcgcaagaatc

SEQ ID NO: 443736 - DNA, 427 bp, Triticum aestivum
tcacctaacgccttgcttctagatactgaccttgtaactctagataccctacctggcgtgtatataagacaaaggttttatcctgtaggggggacatcaatgcaacatcattcaccttgccctagagtttgaccacatctcacgatctggaggtagatcaactctatactcgatacattccattaatataaacgagagaaggatgtagggttttacctccatcaagagggcccgaacctgggtataacaccgtctctttgttcttgtcaccatccggctgagatccatagcacggtcagccccctgcgggctttcatgttttgtccagtccatgcatctataacttaaaagatatggttctagtcctatgattaatcatgttagattggcactagtggcaagtatacagttttgttatcaatgatgc

SEQ ID NO: 443737 - DNA, 402 bp, Triticum aestivum
aagggcgaggcgcagatctgccgagccgaggaggagaaggggaggaagggtggggagggagagagggaagaggagccatgcagagttgttgttggaggaggtcccctttgcttcttacaggacagcaaatcgcattcaagaagttggaggaggtgtatggcacctttgatgcgccttcacagaggaatggcttctttctgccaaggcccaagatgaccaacgctgaccttggcaggatcatcaactctgatgaggtgcagtctgtcgttaagccaaccaacaaggagataaagctcaggaagaagaggaggaacccgctcaagaatgtggctgcagtgctcaagctgaacccctactttggcactgcccgcaagatggctaccctcgtggaagctgctcgca

SEQ ID NO: 443738 - DNA, 431 bp, Triticum aestivum
  unsure (1)..(431): unsure at all n locations
aagataagagtatcatcttaaagaagagcagaagagcaagcagattgaagatattacaagtctttcaatacaatgtcggttggccacccatgatgaaccagagcgcacagagaaatactattatttccggtctctccatatgtggctcacatgcatttcgaacctaaagtaggaacatttagctaaccaattaaacatctctcagttttactaatattagatatgaatttgtacaactaagcttgtttagctcgatgggtggagtagtgctattacgacacgaaccacgtaggctgattgtggtcatcataaaattgggaaaacataagcatgatgggtacagtgttaaccatggcagtgggatggcagatctgaagctgcaaaccgcgcaaagggtagttagcanccgatgttttctttgaaataacaac

SEQ ID NO: 443739 - DNA, 434 bp, Triticum aestivum
aaccagctaatgtatgtaagacgtctgagctggagagataatttaaaaggatcatctgatgattacttgcattcgccacatattgagtcaacagactcaaaatgataatgacaaggaatgttaataagatttctatacttatgggattattcataatgaaagaaaacaagaaattccagagcaataggttgctgaggatttttggaatatcgggtggtatttcaaagacttttgtgtaacacataaacaactgggggatgagcggatattctataaatgcgagaattaaccgtaggggtattcaagtgacaagaacagcaaggcagtaagctcaagggattatcgaaaccacgacgagtttttcagggtatcttgtaataacaagaccaactggggatgatataagaataacaactgtaagtagttatccatac

SEQ ID NO: 443740 - DNA, 432 bp, Triticum aestivum
ggccgttacatcattgcaaagggaggaatcacttcatctgatcttgctacaaaagctttggaagctcggcttgccaaagtaatgggacaagctttacctggtgtgcctttgtggcagcttggccctgagagtagacatcctggtgtcccctacattgtttttcctggtaatgttggtgataacagtgctcttgcagaagtggtccagaattgggcttgcccttctagaagttcaacaaaagaacttctccttaacgcggagaagagtggctatgcagttggtgctttcaatgtatataatcttgagggaattgaagctgtaattgcagctgccgaggctgaagaaagtcctgctatcctgcaggttcatcccagttccctgaagcaaggtggagttccgttggtagcatgctgcattgctgcagcagaacga

SEQ ID NO: 443741 - DNA, 184 bp, Triticum aestivum
tcgacgggggattcaatctaaaaaaaaaaaaaaaaaaaaaaaaaaaaaaaaaagaaaaacaataagataataaaattatatacaaatggataaacaaatatggtaacttctctaatgtgaggcagcattctcgtctcgagccttatttttacatggtcgcgaattggaggatcttctgttgtgt

SEQ ID NO: 443742 - DNA, 434 bp, Triticum aestivum
  unsure (1)..(434): unsure at all n locations
atgtcagggtgcagcgatacgtcgccgctggtgacggcaagctctgtctccatgtccgcgccgtgctccggtgcttcagcagccccagcgtcgccactccctccgatggggcgctttggcggcatcctcatacactgacggcttcgaggactgagagcggcattgaggatgcaagcagacagagaggattgtgtgtgtgtgtgtgccgaggatggggggtgcggccgcttgggcacgccattaatatggagtagtgggagagaggcgggtcgcggtcaaaccgctggctcgcctcccagtgagcctgtgcaccggactgctggcacgcctaccatcgtttcacacagctactcgcacgcctcccgatgacactgtgcagcgagcatgcctcncatcaattcacacacctgcacgcatgcctcctggtctgcctg

SEQ ID NO: 443743 - DNA, 202 bp, Triticum aestivum
gggtcgacgggggtgaggatggtgatgagggtgatgagtactagagcagctgagattgcgacctgatgatctgcccgattggctttatctgttttctgtctgtttgaattgaatgtttgctgtggggtgtttggtttacaacctgttgtgttgtatgaacctgcttcgcaccttggtcaatatgcatgttatccggtttgcc

SEQ ID NO: 443744 - DNA, 291 bp, Triticum aestivum
tctacatcttcggggtgctcaagcaggtgcacgcggccatgggcatctcctctacagacatgtctcagcatgatctccttcatcaacgacatcttcgggaatctcgccggcgatgcggttactgtggccaggtaggggatgaagtccagtatcacatccagtgaaatctagagctccttgcgcctcgtcctccgcggcgacctcgccaagcacgccgtctcggacggcatcacagccgtcaccatgttcatcactaactacggttacgtcgcggtgtctctagggttccgt

SEQ ID NO: 443745 - DNA, 441 bp, Triticum aestivum
aaaactgagaaagctgaagctgtacagccatcatcaggtgaacaagttgagactgtcaagaaaacatgccaagctgaacctgtaaagcaatcatcaggtgcacaagttgagactgtccagcaagcatgccaacctgaagctgacgctgttaagaaagcagaaaaattgctgctgagctaactgggccatctgacccaattgcaacagctgatgtagctgagcaaacaatggaaaatcaagctccaaaagatgcagttgaaattccttgtgatgtgaagctggaggatgaagcattgactgaagaatctgtagatcaagttgtaactgagcaagtcaaagttccatcagatgctgtacctgacacttcaaaagttcaaccagaaacaccagtcgaacacgtgggaacagaagcagaagcggacactgctcaagacctaactg

SEQ ID NO: 443746 - DNA, 348 bp, Triticum aestivum
ccgggtcgacgggcaattcaaaggggaggaccgtcaggtgtggtgtgaagagctgggttgtatatgcccacatgcgtcagtccatgggttgggcatacatgggtatcccaactaaggacatgtcaaggatgtccgctttgaccatcgacatctttaggaaactagcaggggcagcgtctgttcggttcgctgagttggaattggtcaacatcaactcgggcgaggtttattcatgcgtcttttccgactcacacggcgagctcgccaagcacgccgtctccgacggcagcactgcagtatccaagtttacctcatcgtacgtttcatctcacatcccttctatgatgt

SEQ ID NO: 443747 - DNA, 332 bp, Triticum aestivum
gaagaagacatatgtgcaacagctagaaagcagcaagctgaagcttgcacaactagagcaggagctccagaaagctcgccagcagggaatcttcatttctagctccggagaccaaacccatgccatgagtggaaatggagcaatgactttcgatctagaatacactagatggcttgaggaccaaaacaagcaaatcaacgagttgaggactgccgttaatgctcatgcaagtggcagtgacctgcgccttatcgtagatgggataatggcacattatgatgaaatatttaaggtcaaaggtgtcgctgccaaggctgatgtgttccatatac

SEQ ID NO: 443748 - DNA, 343 bp, Triticum aestivum
gcagcggacggcgttgagcgggccggcgattccggggtcgcgggcgtcggcagaggggttggtgagatgcggtggcgcgagggggtcgtcggggtggtgttggagagtgttggtggcagctatcgtgagcgcaacaagctcgagaacctccggttatctccccgtgctccggcgatgcggacgagctcgttgacaaagctggagcatacatacgaggatggaacattgtcaaaacgatgggccacggcgagggcaagcgatttggtgaaagaagaagtcgcggagggctcagcggtgaagaaaaaatgatggtgaactgcgaatggccacagatggcaacact

SEQ ID NO: 443749 - DNA, 333 bp, Triticum aestivum
  unsure (1)..(333): unsure at all n locations
aggaccgggctagcccccttctgtaagaccaacccagccccagcggtaagccgctgatctgaacattttatcttcttctgtagacacccttcacctgaatctttaagaaatcatcattgtatttttcaggctgatgacaaattctggaaggtcaaatatgaccatgaggtggccaagaaggccaggaaggctaagaaagccgccaagagagccgctccccgcaagaaaggaagtangcctactgcttcagagctgctgcaactaagcgacagctccgattcagaggtaaccccccaaaaaaaaaaaaggacaacaaaaaaaaaaaccggccgc

SEQ ID NO: 443750 - DNA, 69 bp, Triticum aestivum
ctatggcgtgtcatgtaagccatctgcatgtcgctggatgcatctaccgtggttgctggcacagcaacc

SEQ ID NO: 443751 - DNA, 394 bp, Triticum aestivum
  unsure (1)..(394): unsure at all n locations
cgggtcgaccggtgagcggatggaaanggggcgagcgggacgggctgggaggcagatggggacccggctacggtttcacaagggggttacaaaagaagctttcggggatttaatactcaaaggtgaaatgataagaataactccgtgggggaaaaaattcacacggcggtggcccaaagatatttcaccacgctggatgcactaagtggagctatcggttgtgcctagaacttcttgaggctttctatgttccattttctggatgcatgcgagtttgactagtggttgattgactccacttctaacggcaacatcacaatagttttctagatgcatccgataatttatgacttaatttatgacttaaaacaacaacttcagattgagataatga

SEQ ID NO: 443752 - DNA, 377 bp, Triticum aestivum
agcgctgccaagtccaaggacaaggcggcacagacctcggcgtccatgcgcgcaccgtgtccctctcaagaggcgcgggaccagcagcgtcatagcgttcgcagcgccatacgtccgctgacccaagatcaagctggtggttcacgtggcgttcaagaccagcatgcacggcagcatgctggctccagcgaggtacggtcgccgggatgggacgctgctccttctaacttggttaggagtccaagcacgcccctctcctcgcaccgttcacctctaccgcgcaccaccccagcagaagccttggcgcgggcccagctgctcctggactatcctcctacggtggacaagaccgacgaatggagggccactatccagag

SEQ ID NO: 443753 - DNA, 161 bp, Triticum aestivum
attcgtgcggtcgacggggaaacagagcgaatcggtgatgggccttatcgcgggtctggcggcgtgctctgggaggctggggatgtcatggtagtgtagatccagacctacgacattcataggccgaagacaaaggaaattgagttgatgtaaagttgtgt

SEQ ID NO: 443754 - DNA, 421 bp, Triticum aestivum
  unsure (1)..(421): unsure at all n locations
gcattgacacttttcgtgctaccaacactacataccagccagtccggaggaggccagcagtgccgacgacggctctgcgatggggaaaggtcgctcatcattgcggcaccagcagttccacgatcacattatatccgcgtgttgatgagcaacatgactctccgcccttcctccctccaggaagagacatgatcatatcgatcaccagtcatggagtcaagtggttgttgtcgtcaagctaaatgttggtgagtgccaaatgagaagatatatgttctaatattcctgagctggacattatggtaaaatattaattttagaaattttgccaatcataccggtctgtagctatatcacattgcaaaattccatgaacatgtggtccacattatttttcacattgcanaattccatgaacatg

SEQ ID NO: 443755 - DNA, 399 bp, Triticum aestivum
ttcgtcggcctcttggtttacaatgggcgttttggcgttccgccgttccattggtagcttgacgcctttgccctgatgttagattcaacatccatgtgacactgattggggtttgccatctcgcggccctgggtatcttcatccatgacctcctcttcaccgtgtttggtccaacgtgtatatccatccatgaatccccgagagactaagttccactggacatctgcaacttgatgtgactctatattggcacaattagtacatggacacatgatgtaatccgcatcaccaattatccactttgtactttcagtcaaattcatgaactctgtcacgccattgatataatctgcggttttccgattcttcatccatcgagattgttccatctgcaccaca

SEQ ID NO: 443756 - DNA, 433 bp, Triticum aestivum
tccaagaaagaatgtagaaatgaagttatccatccacacaatgtttatattatcagtttgtcacaatccatatgaatccaaacaccttatctttagatgataggtcgttttggttgtttttttggctgttagttcatatcttggcacgccgtgcctgggagtgttccttgtctgtaataagtccatatggaatcgttgacctggggtatggttctaacacttgcaatatctaaagagtatctctgtaaactctgcaagtctgatgcatgatcagcagataatcatagtttgtagtttacaggcaaactgcgattctaggaagtgatacgaacataaatgacgcatgcatgcgagaatcaatgctactcatgagctacacaccatttagcagcatcatgcttatcgtgctactaatgcaacctatgttttgaac

SEQ ID NO: 443757 - DNA, 275 bp, Triticum aestivum
aattcgcgggccgacgggagagggagtacggacgtaggaaaaaacaggttgtaggggcagtacggacgacgtggggcgtggggagtcggatgacgtaagatgggagacagagccttgcgtcttttttaagcagtagagatataccgatgtatgcctgtctgatcttgtaacttctaattacaaataaaattgaaatctggaagtaccttaaaatacttaacctctcaatttcttccatgcttacttaggccccgttcggattccctccaattccc

SEQ ID NO: 443758 - DNA, 407 bp, Triticum aestivum
gggtcgaccgggtattcggtctattgtaaaataagataggctgacaagagcctattttaagcactttatttctaggtacgtgcaatttagtctgtcgtggccaaatgccaaaaacggcagtatcctctgtgggtatagaacccatgggatggttaaacaacaagaggcagtagataaggtttacacaggggcttaatctaaaaagaaacctattgcacggggccctgctgcacgtctacgcctttgtctcttttgtgccgtatcctggaagggtatcgctcgaatgttgtctgtaaaaaagaaaaactcgtaagagggtgcaacgtaagtatgcgttcaataataagagtgtaagttgttggcctgccaataaggtcgagccaagcgtggggctgtattaaatatag

SEQ ID NO: 443759 - DNA, 417 bp, Triticum aestivum
gggtcgaccggtgactttcatacaactgaatagagtgcacgctccgaacgtcaatgttccacagagctctgattttgttccattgttaaagaagttaaagtttcgtgctgagcatcgtcgcgcttttgaacaggtttttggtaggacagttatatgccgagacctggaaactgcgaccagagttgcacgcagcaatagtctagattgcatcacacttgatggtgatcaagtagccaaaaagggtggcatgacaggaggtttctatgattctagacgctcaagactgaagtttgtaaaagtaatcagggacaacaaagcagaaattgaaaaaaagacggcacatctagagaacgtgggaaaaaagttaaaagatatagataagaaaattacggatttgattaccaaacatcagcaaat

SEQ ID NO: 443760 - DNA, 329 bp, Triticum aestivum
ttcgccggtcgacgggtaatacacaaagaaattggcttggttccttctcgttgctcaaggtcggtgagtaatctcaaaagagattggcggatgacaacccttcctggctacctatgagctgcagttgttgatatcttggaatgaagcagtcattctgggcactgtgttctcctggctatcctgaatctttcgctgatgaatgtagatagacttcgcatgttggcattaacagcgtgctgttggcgagatcagtttgtgttgtaagtggagaagaagtgaaatgggactcttttcagtgtatcaaaaacccgcagagactatagctaatc

SEQ ID NO: 443761 - DNA, 432 bp, Triticum aestivum
  unsure (1)..(432): unsure at all n locations
cctgccctcagcttgatgccatcaagagcccggtctgcagcgaaggtgcgcagctggccttcgctcgtgtcaaagttcagtgggcgaagatggacgctgtcaagctcgcgaccgaaggaccgcccgcgggcaaggagcaccgcacgcccgagcagtattttgatgatgtcctgaagggatcccgcattgtagagggccagtgtgcaaaagacattatttttgaatgaagacgttcatgttatcccgtcctgtattatgaaacaaagctgatttgtaatataatgcttgttgtttgtttaagtttttgcctcctgtgcggccattttattaagtctgaaagttggccactcgccggcttcagcctccacgtaggtagtacggnggtgttcgggttggaacctanacactccttgaccaagagtttggtccttg

SEQ ID NO: 443762 - DNA, 394 bp, Triticum aestivum
cgggtcgaccggagaggggagatacaggtttttggggagcacactcctgtgactgctgccagcgacgacttcctcaacgaaagccttcttccccgacctcggtaacctcctcatcaacgacatgagtgacaacatcaaccacatcggttctgctcccgctatacagtatgtgattctgtcctcctagtttagtccgcatcattactttgatgtttgcaattgtcgtcatgatctatttactgctgattcggattaaatctcatactaaattgctcatatattcaactatccaatccaaaaacctgattacaggcaatttactccgagtggttttgctgcgcttttgaagccgcctacttttaagggggtgcaatataaaatgtggcgcacaaga

SEQ ID NO: 443763 - DNA, 381 bp, Triticum aestivum
gggtcgacggagtgaagatagaaaacatcttaatctggatcacaaaaatgtcattcacatgcaacaagcagcaaatgcagcagtaaatggtgctattggagcaactgcattgtcgtcgccttccacatctaggaagagaaagcacatcgattcttcacttgacctttcgaccaaggaacatttagctatcaggaatggtcaactatctcaggttatttatcagaagaacgcaatggcctccgatggttcacttccaataggccagtctgcgcatcctcatatgatggggccctttaaagtcacctacaggcctcttttagcggatattattcagccaggggatgtaaaggagctttgtaaacttttggtgacagtatcggg

SEQ ID NO: 443764 - DNA, 325 bp, Triticum aestivum
aacagaaaatggttaatctcagcaatctcctcgttgtacacttcggggttctcctcgtccttaacggctgccttgcgacgcagtcacttggggttcctcctcatctacagaacaagtgtcaactcgataacttatatgttctctaaaccaccgaacacttcactagtgagactggtcacatccactaaggtgattataaccacactcagatccgatctgttggtgtttctgtagcacgccagtctgcttcatcatcagatgtctttacttgttcaccttcttcacttcgccacttttttccgatatcattcatcgaacggatatc

SEQ ID NO: 443765 - DNA, 371 bp, Triticum aestivum
gaggagatggtgatggccgtcagggtcgccatcgtgtgcctctcggagctgcccgccgatcggccatccagcgatgaactcgtcgcgatgcttgcccagctccacagcttctagccacctccatcatcgttctagcagaaagtttcttcagaacatcttccatcgcgccagacgacgccgaatggagctggatcggaccccggccggccatacagtcccaccatttcagcttcttgagctgaattcagtttgtccagatgggaaccagcaatgtagaggccgaacaacaagtgtggcaaaatagcttcatggcacatgctggtggttgaggttcatgtaagatgatgatggtgatgttctggccatgaatg

SEQ ID NO: 443766 - DNA, 387 bp, Triticum aestivum
  unsure (1)..(387): unsure at all n locations
gggtcgacaagattctagcatttcaagcctgaaaccttgagcgcttttagatcgttgatggtgtccatcgtagagaaattgtagtcagagctgttgataaacctggagaaacgctcgcaaggccttctggccaggtggtattggtagacaaggacgtcatgtcgcacgcacaactggtcagcgacaccttctcatcgtgcccggcacgaccgatggtgtactccaggtcgaagccgaccacttggtacttgtcctcagcaagcaactgttccatagtttggatggagctctccaccgagaccggctcgttcgtgtacaccaccaagagcgccttcncactcatgtgggtgtccactatgtgatacgtggtgaactgccacccgttgt

SEQ ID NO: 443767 - DNA, 261 bp, Triticum aestivum
gtacttcaagatgaagaatttgtgctggaggcacacaactatgagatggaaccattgcttgtaccggaagggtatgtgtttgtgctgggagacaaccgtaacaacagcttggactcccataactgggggccgctcccggtgaggaacatacttgggagatctgtgttccggtactggccaccgtctaagataaccgatacaagatactaccaacccgacgcggcactctacgcggtggggatgtcgtgacgactcgtgcct

SEQ ID NO: 443768 - DNA, 415 bp, Triticum aestivum
ggcacaaaagctggctgattttgcgttggaccgggactttgaagttagcttctcaacctatgacagagtcctggaagccctgtacactgaggagaagacgttgccagcctactccatgctctgcaagatcaagcacaaagggggcattgtagaccagaagggttgcgatgctttgatgggtagcttaaaagctggaggatactcaaagcaagctgacattttgtctaggatcttggtggagaatggatcgtcaacatccaagaggggcaagaagtctgccatgggtgcatagggaggtttctgggtttatgaaatggtcctattttcctttctgaattgaagaaacagtggtttgttttgttttattaatgcttgttgggccatctgtcagattgggattttcatcctagaagac

SEQ ID NO: 443769 - DNA, 388 bp, Triticum aestivum
cgggtcgaccggtcacttaaacggacttaactaattacatgcataattaatgtctggctaattaattacattaattgcttgatttccaaattgattgggtgtttggtttccaaattgttttgcattaatgactggtgatgcttttaataattaacgtgatcctcctgtttaagtatcagtaatatttttaataattaatgtgatactcaggtccaaagcaaataatactcttcgtaattagcatgggcctttggttaaacactcgatgatacttttatacttccttcgttcctaaatataagctttctgtagatttcactatggactatatacggttatatatatagacgtagtttagagtgtagatacactcattttgctctgtatg

SEQ ID NO: 443770 - DNA, 188 bp, Triticum aestivum
cgggtggagtcaaattttgttctaagtatcgatttgtaattcttgagttgtaagaatataaggctgtgatgatgatcattagagcattgtcccatgtgaggtaaggatgatagggactatgattcccccaaaagtcgggatgagactccgagaaaaaaaaaaaaaaacagacgctctaaaagataaaa

SEQ ID NO: 443771 - DNA, 121 bp, Triticum aestivum
ctccagcaagtagtgcctcgttgcagaatttttagctctcttttgtacatgatgaccgacagatagctggtccctttaattagtgtcaaatttggaaggggaaatgtcagcagcagttcgc

SEQ ID NO: 443772 - DNA, 372 bp, Triticum aestivum
gaccctaaaaagaaatcctctttcccattcacgctttcacactcactcatcttgctcttgctcttccccttgccttatcccctttcccactccaaaattgctgccgccggtagctcccatcagcttgattccctgattcagtgccttgagcttgctcgtcctcacctacagccagccccgcagcttgattcatttgtgcggccatagcgtgaccttcgacggcggctggtttgtctcttgatctcctcgtacgcctcctcggtctcctcctaggctggtaaacgtcgatggagtggtaggagggcccaaggtgcagctgctcaagggaggaggcgagatcatcaatctgcacgatgttgttgctgtcaatgt

SEQ ID NO: 443773 - DNA, 394 bp, Triticum aestivum
attcgccggtcgacgggctggattagaagggtacgtgtgggcgcaaatccaattgagcggccaccctgcccaggcagggtgggagcgcttgagaagactatcaggggccttgtggacagggagtgggacgaagtagtgaagccagagctagggacaaatttcgactcgctgacagaggctaacgatttttaaacttatattcgtgggagcatggcttcggcattagatacgggaaaaacaggctcaatcctgatagaaggaagaccatgcaggagattgtatgtagatgctcggggaagcctctccgtgagaatacaagatcctgtaggtgtgagtgtccagcaatgattaggctgttgagggcatcagataatgggtatccagatttacacct

SEQ ID NO: 443774 - DNA, 354 bp, Triticum aestivum
tcattacaaacatatactacctccttaaccaataaaccatgcatattaatggatgattagttcgcaggggcagccatgttctcgcgcctcgtctgattcatgcacacaggggactgatcacaagccaactgattccattaatttgctggctcgtcctaaatcagaaaataaaataaaaaaatagcactccaatacattgtggagttcaactcgtcgaggccagggtgccgcttctcccataatacgcagggcaccccatcgatccattttttagagcttgtgaatcatctgagcttatatatagttagctgaatgaagaagcatcatgcatatgcatgcaacgtaccggcagct

SEQ ID NO: 443775 - DNA, 63 bp, Triticum aestivum
  unsure (1)..(63): unsure at all n locations
atcgaacacatcacatgcagctcttcgcattgcaagataanagaatcaagttggccaacaatg

SEQ ID NO: 443776 - DNA, 365 bp, Triticum aestivum
ttgaacttgatttcatgcccatggaaacgatgtagatcttatcattaaagcttctcttacattaattattcccttggtataagttcatctcatatctgggatctggccttgtcgcaatcgtggttccgaccacattttctccttgattccatttctcagacaagttgaaatacttgtcttctgttgatcgatacatctccgcaacctctattttgatattccttcgagtattgccctccggtatctcgagaatatcgaagaactgtgttgcttcccatgagtcttcatctagtattgcttctcaacgttttcaaattcccccaagttttgagttaatagtcactccagaacaccgataagtgaat

SEQ ID NO: 443777 - DNA, 311 bp, Triticum aestivum
ggagctgatggtgccgcacgccatcggcgtgtactcgctgggggaccgggagacggcggtggtggccatcgcgggcgggcactccgtggaggtggagcccgtgtggatcctcccctcggtcgcctgatccgaccgaccccacgcacccaccggcgtgcaagaataaataaaccgagcccacgccttattcggatgttagaactgtggattgctgtgcgtgttgttttctctgctttgttcatgggattaattggtgatttgggtttctacgcaaagaccgctctgtcccaaaaaagaaaaacatggttaat

SEQ ID NO: 443778 - DNA, 261 bp, Triticum aestivum
ccgggtcgacgcgggagggcgaatacgaggaagaggaagacctggagcaggagtaagatcggtgacaaattcatctctccgtttatgtggtattgtggttttcgtacaactggagcttgttactagtagagactagagagtaccatggctacaactctgctgcttgtttgcgtgtcttggcatgtattggatttgtactgcgttcgtaaaaaaaaaaagcaaatcaaaaagaccccaatgtcacaatcattctacagtaag

SEQ ID NO: 443779 - DNA, 400 bp, Triticum aestivum
  unsure (1)..(400): unsure at all n locations
cgggtccaccgggggccaaatatagaagagaggatctacttgggaagaaagaagaaaggaggagggccaaagtaaaaaaaagatagatcagggagggggtcaaaatccctagcactgctccattcccaaatcgagcctggcatcttcatctccctcaccctccttctataccttcggccaccgccatggccaggccggcatggtggtgcgcccccgtagccatccatccactcatttccatccaccactccaccatcaccctacaccaccagcacccccaccatcattccgcgccatccatccaccatctccagccaccgacgcatctggcgcgaccgaccaaacagcccgtctggtgtcncgcgtgagcgcgccatccaccactcctctgctctctgcc

SEQ ID NO: 443780 - DNA, 390 bp, Triticum aestivum
cgggtcgacggggacggccacgcccaactccgattcgaaatactccttccccagctagggttttgctggctccgccgccgcctccggccagcgtcgtcgccccatggggctgccgaagcatttcaccgtcgagtaccccagcttcaagctcgtgatcgtcggcgatggcgggactgggaagaccacttttgtgcagaggcatctcactggacagtttgagacgaaatatgagcccactattggtgttgaagttcacccattggatttcaccactaactgtggtaagatccgtttctactgctgggacactgctgggcaagagaagtttggtggccttagggatggatactatgtccatggtcagtgtgcgataatcatgtatgatgtcac

SEQ ID NO: 443781 - DNA, 381 bp, Triticum aestivum
aggaggtagccaggcgggctgggcttgtggtgggcgctaggtaagttccaggtgagtctctgctttttccctttttctttctcttttctaattctgacatttgtttctggacttagtaaaaatggctaggcactttcaaaaatcatgcaactaactgaggtcactgtttggaatatttccaacagtaaacatttcagtttgtgattatttggacatttaaaatattttataacattcaaatgcccaaatgcaaatggagtatgatttaatttagagcccaaatatgtcatgaaaaaatgcgcatcacctctggttactgtttccagcattttccaaaaatgatgaacatttttgaaagccatttggatttactgaaaatat

SEQ ID NO: 443782 - DNA, 383 bp, Triticum aestivum
agggcaaacggagatcgttgaaagatcttgctgctcaagaactttgtgttaagatacaacagcaggagcactgcccgattgaggatgctcgcgcagcaatgttcatttacaagaagcacaagaaaggttgggagaagaacaagaaagagcaattcaggttcaagaacaagcagaagaagcgaggtaataagaaatctgccgaagccaatgagaaggaccccaatgtcccaatagttctactgtaggaaatatagatgtaggggagctagggccaagcagtgtcgttcttaacatggatttcacgacgccaaagggtatgccgtcgtgtgggaatttcagatggaccctgtcaagaactcaagatcagcacgccaacctggaaa

SEQ ID NO: 443783 - DNA, 381 bp, Triticum aestivum
gggtcgaccggataggaggttcttctgaaaatgacaaggcgtacggtggatgggaatctgttgctgggcttagtgatgttattcagagcatgaaagaagtggtgatactgcctcttctatatcctgaattctttagctctttaggtcttacaccaccaagaggtgttctgctgcatggtcatcctggtactggtaaaacacttgtcgtacgggcactaataggggcatgctctcagggtaacagaaggattgcttattttgctcgaaaaggtgctgattgtttgggcaagtatgttggggatgctgagaggcagttaagacttctattccaggtagctgaaaaatgccaaccttctatcatattttttgatgagatggatg

SEQ ID NO: 443784 - DNA, 422 bp, Triticum aestivum
  unsure (1)..(422): unsure at all n locations
gcttcggatcttcggggtcgcaaggaagaagaagagatgaagaggcaaggggagaatggaaaggacccccggtcttatttataaggacaaagggataaatgacaagcgcgagaatcgaggagccaaaaatcgaatatctgatacaggtgtcgccttggtcttcggtaattaattaataaaagaagtatttataggttttttatacagagatgatgtcatgacgatttgctgcaattttagaagatgacgtcatggcggtttaccaagctcatatggaagagacgtcatggtggtttaaaagggttaaaagaagatgttcaaggaaattttccaagtaatgaagattgacatgaacaggttcaaatcaatctggggcctaatgttggggatantactactaagtttaaaccgccaggaggggc

SEQ ID NO: 443785 - DNA, 437 bp, Triticum aestivum
  unsure (1)..(437): unsure at all n locations
cacggacggaggacagagcacctctcttcttccaggttcttctccttatcttcacttaatgtatgtgcatgtgctgcagctcacccatggtcttgtttgtcttgcaagttagtgagcagcttcaggaggagctcaagcacgaccaccaagaggcaccaccgcagcaacagggcgactgtggaaggcatgttgtatttctgtcagcccagtcctgactatgtctgtccgtgagtccgacatttgattgctgttgaagcagctccatgctgaagaagagaacacttgtagagcttgtaacattacttggagagcttgtaaagtactgtagagcttgtaaagcattgtatatgttatagcttgtattacgtgtcattcgtanagcttgtagtgaatctggctaatggtaattggataaaccaggtgggttctcgcttccc

SEQ ID NO: 443786 - DNA, 361 bp, Triticum aestivum
gcccataccaatacgtacgtacaatggggtaggtgcggatggaggtggaggtggagatcacgagcatccatgatgctctagcgaccggagccaggcgagcggtatcgtccgcggtcgcgacgacgacccgcgcgtcgctggatccaaggacggagtcatgctgcctacaggcggcgcggcaacctccaagggtggaaaggcgacctccaagacacccccgctagcgcatgcatcacggtcctcccaggtcatgcacgacgagcaacgccgcaacgctggtgactccgagcgtccccacggaaagagccctcaccatcaatctcgagatgcgcaggccggcatgcactccaagatgatggtg

SEQ ID NO: 443787 - DNA, 368 bp, Triticum aestivum
ttatggatttaaccatatccccatgatgcctactgagatggtctctccaaattccgttcattctgacactgcaagctctcatcaacaagctatactgcatcaaatgccttcaccccatggaatggctcagtaccaagtgaggcaaactaatcccaataatccgcttgaaggcgaaggtagtttaagtggcaattctaggcatcggggggatggacaagtgctccgtgataaagttgcctcaattgcaactggcggtgttgcaaactaaaatggcaatgttgaaaaggataatggattcactacggttgaacccaaccaagcccggctatcccgaacaaaggatttatgccaaaattggttaacccaaa

SEQ ID NO: 443788 - DNA, 440 bp, Triticum aestivum
cgacgggtgccaagtagaaccaataggatcttcttgggtgataattatttgatcttgctgaaaaagacagaaactttgcgctcacgcaaataattattaaaattcaccagaacgtgataaattgccaattctttttgcagtagatcaatatacaaattttacaggttttagaagtttttcagaatttttggaattccataagtattcgaacaaatcagattgctacagactgttctgtttttcgtgtgttgtttgcttattttaatgaatctatggggggtatgaaccatagagaagttggaatacagtagatttaacaccaatataaataaagaatgagttcattacaatactttattgtggtggtttgttttatttggctaacggagctcatgagattttctgttgagttttgtgttgtgaagttttcaagtttttgg

SEQ ID NO: 443789 - DNA, 74 bp, Triticum aestivum
cgggtcgaccggaagacaaataagaaggataaaaaggagaaggatgagaaaaagaaagaagatggcgaaggccg

SEQ ID NO: 443790 - DNA, 396 bp, Triticum aestivum
cgggtcgaccggtccgatttacaatattagttttcgatctactattttgcaatcttttactttccgatctataaaccaaaaataccaaaaatatttactttatcgtttatctatctttgtcagatctcacttttgcaagtaactgtgaagggattgacaacccctttattgcgttgggtgcaagttgtttgattgtttgtacaggtattcggtgatttgtgcgttctctcctactagattgataccttggttctcaaactgagggaaatacttatttgtactttgctgcaccaccatttcctcttcaagggaaaaaccaacgcaagctcaagaagtagcaccatccttcttatccatcaagtatttggggcagttccgcttccagcgaccattccc

SEQ ID NO: 443791 - DNA, 403 bp, Triticum aestivum
ccgggtcgaccggtattggtaaaattacacttactgatttcagtcttggagaacttccaccatatttgcgtacgatgagagtcgtcccaagggatctaaatgaactgtgggctttcgaatttgattttgaatattgtagtaaaataatactgaatgctgaagcaagacttgaggttcaggaaccagggctgcaaaaagacataatgagaactactgtcgaagcagattctaatggcaaccaatttggaccttcgcaacttttggcttctgtaatggaagatgaagatgaggcagatgtgttaaggcggtcaaagaaaactgggaagacatcaaggtggaaaaatatcttgcattcaatcactgaccatgtctctcaagtgccgttttcgttggcaattaaagt

SEQ ID NO: 443792 - DNA, 72 bp, Triticum aestivum
  unsure (1)..(72): unsure at all n locations
ggngngnatttctagggggccgtgtcganacatanttcgtcggtcnacccacgcgnccnattctagatcgcg

SEQ ID NO: 443793 - DNA, 392 bp, Triticum aestivum
aggggctgcgccccctctagggtttccacccccaagggctggcggccagccctacatcccatctaggggggcgaccaaggggaggagaggggggcgccactagggtgggccttaaggcccatctggacctagggtttgccccctcccactctcccatgcgccttgggccttggtggggggcgcaccagcccacccggggctggtcccctcccacacttggcccacgcagccttctggggctggtcgccccacttggtggacccccgggaccctcccggtggtccaggtacattaccgatatcacccgaaacttttccggtgaccaaaacatgacttcccatatataaatctttacctccggaccattccggaactcctcgtgacgtccggga

SEQ ID NO: 443794 - DNA, 331 bp, Triticum aestivum
gactctaagcaaaggcagggtacagggtggtgtcaagggatcctgggtgggtcacctgggttgggaggaggaggcgtgttctcatgataaaagacttgccggttcatgatgctcagatccaacagcaatgacatgcttgtcctagtaggtccccgtatatatatgtcccctgctaattccttgcgtctggtgtaactatgacattttttttggggggtttaatcattgtgtagcatgaattggtgctggactaaaaaaaaaaaaaaaaaaaaaaaaaaaaaaaaaaaaaaaaaaggtataaaagttaaacacaacaataaaaacaaaacat

SEQ ID NO: 443795 - DNA, 402 bp, Triticum aestivum
aacaggaaggtgcgagcggcgctgagggaggctgagaggaaggtgctggaggccaggaagaagaaggacgctgctccggaaaccaatgcggcttacttgggtgggtttgcgatgcccaatgacccagctgagcagctcaagcacaggggataccatatggttgcaggtgcagtggacattgggttgttccggaaggcggcattggaggatgtcaagcggttcaaggaggcgtcaatggagattggtgaagcagagggcgaggaggaggatgagaaggaagatggatactggagtgaatgagcactggggaactggtgatggcttcatttgtttgtgttctgaattgaagcttttagggtctccattttctggactttggtgtactcttgtttagtcgatgat

SEQ ID NO: 443796 - DNA, 435 bp, Triticum aestivum
tatatacatgttatataaaaaaaatattagtaattataaaaagagttaaaaaattcataaactttttcggatttttttactttcttttgtagatgtataatttttttaacgaaatcaaaactcccattgacatttgggcgaataacaatatcgtaattacaaaaagagtaaaaaattatgaattgttttggaactgaattttagtttttttgtagttgtataaaaagttcggtgaaataaacacccccattgacttttgggattaaaaaggaaaatcataattacaaaaagattcaacatagtctgaatatttttgaaaattattccactttttcgtagctatatagaaagtttggaacaaaattcccattgatttctgggcgaaaaaacaaaatcacaattacaaaaaagttaagttttttaattttttggaaa

SEQ ID NO: 443797 - DNA, 398 bp, Triticum aestivum
  unsure (1)..(398): unsure at all n locations
ccgggtcgacaacacaacggaactctcaatgaaagcaccaatgtcggtgtcaaaaccggcagatctcgggtaaggggtcccaagatgtgtgtctaaggatcgatggtcacaatggacaatggggacacgatgtttacccaggttcgggccctcttaatggaggtaaaaccctacgtcncgcttgattgtactcgatgagtattggggttagaagagttgatctacctcgagatcgtaatggctaaaccctagctgtctagcctatgattaatctgatagcctctacagactaaacccccaggtttatatacacaccggaggggcctaaggttgtacagagttggtttgcagaggaaggaaataacacatcggaaaccaaacttgccaaccacgcatat

SEQ ID NO: 443798 - DNA, 342 bp, Triticum aestivum
tgagcaaggtggaccgcgtgctctactccctccgtcgtcaacccgcacaactacggcttcatcccgcgaaccctcggcaacaactccgacccaatcaacttcttcgtcatcatgcaggaccccttcgtccccggatgcttcctccgcgccaaggtcatcggactcatgcccatgatcgaccagggcgatgccgacgacaagatcatcgccgtctgcgccgacgaccccgagtaccgccacttcaacgacatcaaggacctccctccccaccgcctcgccgagatcaggcgattcttcgaggactacaagaagaacgagaacaaagaggtggccgtcaacgac

SEQ ID NO: 443799 - DNA, 107 bp, Triticum aestivum
gtattgtaatacacatagattcgttcagcaatttaaaaggttcctttcgtattctcgaatggtaggacccaatggcgtaccagccagatcttggctcgtgttgatcc

SEQ ID NO: 443800 - DNA, 340 bp, Triticum aestivum
ttcggcgtcgacgagctcagatgattgaatttaggtcaacctgtagcagaacgttttcgtcacgttcacgggtttgactacaaggagaccttcgcaatactaatgatgcttaagtcggtcggaatcatgttagcaattgccgcattctagattataagattttgcagatggaagtaaagactgcattcctgaattgatttcgagtccaagacttgtacatgatgcaacctgacacttttatctatacaaaggatgctaacagagtgtgcaggctccaccgatccatttacgagccggtgcacatcatctcggtgttggtgtacacgttctgacaatgtga

SEQ ID NO: 443801 - DNA, 387 bp, Triticum aestivum
gtgcccatgacagctgaggtgacattaccggtactggcaccggcgagcgcgacaccggccatgactacactcggcatggagaagccgggagtgaagctcaatggtaagaagtctcatactgaaatgatgcagatcatggatgaagctagtgaacttctgaagaaaggcaatgacttcctctcgctgaatgaggagaacgttaagcctttgttgagtatggatggatcagctgatgcatggtggcttgatagtggtgctagtaaccacatgactggttcacggtgcaaattcaaggagatggatgaaagcatccgtggccatgtgaagctcggagatgggtctactgctctgattaaagggaaaggttcagtcatggttgaatgcaag

SEQ ID NO: 443802 - DNA, 59 bp, Triticum aestivum
gactgctctttttctgaatcagaagaaagagtaactaaggtgtatgcatagtttgcacg

SEQ ID NO: 443803 - DNA, 80 bp, Triticum aestivum
ttgttctagtatcgagttgtaatcattgagttgtaaataaatagaagtgtgatgatcatcattcaatagagcattgtccc

SEQ ID NO: 443804 - DNA, 384 bp, Triticum aestivum
acctcaccggcagatccctcagctatcagggaaagcagccatcagcggagattgagggtgcctctccggcgagagtgctcgtgtcgtggtggtttcccaccagcggcatgggggaggcggtgtcctctaccgctaggtctacttgctggcgacctcaccgtcaccagcccatctgtagcctacttgaatggatatggttcctgagagaccatttcttatgcatcaggtcctgaaggtggatgttgcttgtttagatatctatggttccaaattattcaaaacggttcatgttatgctggatgctattttattgagagtggcttcgaacaatatggcatgaacatatttgttttctctttggccaataatgaaatgatctttgtg

SEQ ID NO: 443805 - DNA, 134 bp, Triticum aestivum
ggccttcccccgcaggaaagcatcaagcgcgctttcctatttggggtaaagattggcgctgatggtgaaggtaccacgagtgccatcctccttagcggacaccttctttgtcacaggtggatctgccatcgcct

SEQ ID NO: 443806 - DNA, 406 bp, Triticum aestivum
gagcgcccacaaaggattcagtcccatcgagaagaaattcataaggttgctacatgattgtaatgtcggtccatcaagaatggtccaaatactgtccctgatccacgaccgagatgggagcctgagtagcatgccctacataccagcagacgtcaaaaacctaaaggcaaagtaccgtagagagagcaggttggctgacatagaagacacaatagcctacttcgaagagaaagcaaaagcagataatgatttcttctacaggataaggttggacgatgaggaccgtgtcaggaacatgtattgggtggatggtgctgcaagaagagcctacaaacatttctgtgattgcatttcattcaatgcaacatatctcacgaatatgtacaagatgccccgtgctccattc

SEQ ID NO: 443807 - DNA, 256 bp, Triticum aestivum
cgggtcgaccgggactacaactataacacactggatcaaaatgcagtgcgaccgcagtgagaagcttctgtgtgacaggtgatgaggaaggaagggcatgcatggccttgttggaagcacctgtgcagcatactcgttgtatatcgtaatattccattgtgtaatgcacactatatacatttgtgcacccattcaccctgtcaatctcgaactcattgtacatagttccattgttagtgaagatcggctagttggg

SEQ ID NO: 443808 - DNA, 401 bp, Triticum aestivum
gacggaacggaaaacctggacaggcccaggcaaaggggttgtgggaaaattccaaattttcaacctaaggcttcaaataaccaaatttattacaatcattgtaaggacctcaatggtggtaatttccctcgctagacgccatactctcctaagttgtgaaaccaaggctatgatcaccaaagctatggaaatcaaggcaaatagagaccacaactctgataccacttgtaggatcgaaagtaggtctagagggggggggggtgattagactacttgaccaaataaaaatctagccttttcccagctttaagtcacagtctttaacaacttagcacaagtcaagcaataaacctacacatgcaattctaagagtatagcagcggaatataaatcattgcaca

SEQ ID NO: 443809 - DNA, 422 bp, Triticum aestivum
gaaaacggacagcccatggacgaggagtatgaggaggagcaggttccagattactcgagagcctattctggtggattgagaccccttgcccatgtcatgatggatgatgagaccgaggatgatgatgaagatgctgaaggggacggagagggtgacgaggaagaatatgacgtgaaccatgcttccgccgatgttgatgatgagatggacgaggatgatgatataggtgatgatggggatgatggtggtgatggagttgaggtgaatgcagatgaagatgaaggcgcgacctcatactcgtcagagtacagtgaataagagcttctgtctccggtgaccatttatgcagggtagttaattaacgccgttggtcactgatccggatagcttggcggaagtggttttgggaactgatataaaat

SEQ ID NO: 443810 - DNA, 302 bp, Triticum aestivum
attcgccggtcgacgggactacattactccctcgtcggacgaccggctatgctgctgtgtatacctcaatgcgccaccgtactcccatcgctgatctatccatctctctactcatccatacctgttgttattctccggggacagtagttcaaccactaagccctcgtactcctccacatgggaaacaactactgggtcttcactggatccatgtcgttcgcttcctaagcctcgcgtcgtccatctcactggtgatctcggtgtggtctgtccaacatgttcaatgagcgacatccatcgga

SEQ ID NO: 443811 - DNA, 403 bp, Triticum aestivum
  unsure (1)..(403): unsure at all n locations
atccccgcctcggcctcgcctataaatagagcctcccgagctcgtttctctccacacacgctctccacacacctccacaacaccgtaggaagccgtagcccggccgggtaggcctctggccgccgttctcgccccgagctcgcacgcgatccccgtccactgccccctccctctctagagccgcttgagctctactgacttgtccgacgtgtccgtggtggtccactggtgcttgctggcgctgttggagctattggactggacctacctcactggaatcaccatctccgacgagctcgttgtcgtgcactcctctccagagaaagcgccgccaccgcgccgcccaactctgcttctctcccctcnccctccgacttgattgctggggctcgctgtcagccgc

SEQ ID NO: 443812 - DNA, 413 bp, Triticum aestivum
gggatatggtacgcgtgagctaccaaggaagatggcgcgggcgggcgagcagtgagcgggggtaaatggtgtgcggccgacgatggggaagagaggaggaagaagaagagactagttgaatagttctctctgaccgagatggggaataaatggatcgcaaggacttactttctacagtatccctatgcatctacgctcacttcactcattttgctctgtacctagtcacttgttgaaatctgtagaaagacaaatactccgtatttgggaacagagggaggcttttactccgtactatttgggaacagagggagtatcaccatatggagggaacagaggaagcttgaaatatgaacatgtcaatgggagggattaagccccatgcatgcatgcatgcatgcaacatgcaacac

SEQ ID NO: 443813 - DNA, 417 bp, Triticum aestivum
cgggtcgaccggtgaagggcttggggaggcttgaggactgcgagggagctcgggacgggcttaaatagccgcagggatgagctctaggggaggggaggaggtgacacgtggcacggctacatgtattgcgccggcgatgtgcacacgcggccaagggtcacgggaatggcgggaaggcaacgagggggatgcgggcgaggcgcgggaactcacggagacgagggccgctcgcggacgagagggagaaggggacaagagcgaggaagacgacggtgcacgggcgtgcactgtgctcggcgacggcgatggctcaacgaggaagcaaacgaaggggaaacgggccaaggcgcacggcgacgatgaggctgagctggttgataagcttggacgagccagagccagccgaagatgcgctac

SEQ ID NO: 443814 - DNA, 147 bp, Triticum aestivum
agacttcgagagatgtgtagaagaagaccagggcgctcatgggcctgctcggatgggcaagtgggccataatggaattgcttcttccaaaaatcatgacgtgctacaatattgacatgaatgaatgctcacggacccatctcacgcc

SEQ ID NO: 443815 - DNA, 392 bp, Triticum aestivum
  unsure (1)..(392): unsure at all n locations
cggcgggccagatcgaggaggaaggaggcgaagggatcgggatcgggcagatgagaggtgcgcgaggggatctagcagggctcgtgcgaggagaagcaagaggagaggtggcgcggcgtacgggagagatgggatcgagggaaaaagtgggatcgagggagagggaggctgcggcgctggagggaagagggagggagagatcgacaggaggtctcccctggcgctagggttagagggaaggagtgcggctgggcttccaggggtttgctgggccggcctggaccaagggaggtttgggccggactgggctgcagatgggccggccagcagctctctctctctctctctctctctctctctctctcttaatttctcttttcagcanaagagat

SEQ ID NO: 443816 - DNA, 275 bp, Triticum aestivum
  unsure (1)..(275): unsure at all n locations
ctcacggcaacagcggagaggtagctacggtgcgcgattggtcaatgaaaaaggagaaaggaacggagaagctcaccgtgcggctcacacggtggcccttgggggtttagtagctgcggnggcgtcgccngagttggtgaagaacggcggcgaccagagaagtggaagaaggggaaccggtgcagcaagacctccgagctccagctgcggccaccggtcgacaaggaagatgatggcggagatgacggacacgttggcgaggcgaggcgatgggg

SEQ ID NO: 443817 - DNA, 424 bp, Triticum aestivum
acaggccatgtcatcctccgccccaaagcagctagtggcagggcctacaactgctgaggacgcaccaccggttcagatgccggccgctgaagcagcggggggagacccagctgcagcacatgctcagcagaccaacctggtggaacagactgctaagcagtctgatgcttcggaaccgcctactaagcagtctgtaggtccagaaccgaccgctcatcagtctgttggtccgcaggcgtgtgaccagcataccaatgcgtcagcacttcctgctcagcaaaccaacgcgttggcacggcctcctcagcacaccgacaagttggcaccaccttcgcagaaacccgacatagcttcaacgcatggtcagcagtccgatgcctggctcctacagcccagcagtttgtcacagcagcaccgccagctc

SEQ ID NO: 443818 - DNA, 196 bp, Triticum aestivum
gacggggaagacgaagtcgacgacgacgacgaagaagatgatgatagaagaagaagaagtagaagaagaagaagaagaagcagaagacgaagcacaagaagaagaagaagaagacgaagatgcagctgatgcagaagatttcgatgacgtcgacgacgatgactaagctgtcgaagacttcgaagactcctacgaa

SEQ ID NO: 443819 - DNA, 349 bp, Triticum aestivum
gacgcggacggcaagggcaaagggaaggagaggcgcagcaaggagcagaagaaactcaagcagagaggaggaaagacagggggcaggagatttgaagtaaagagtaaactgaagagcaagagaagatgaaaatgtatgtgtatctttggaagaaattttgccagtttagttcgttttttcgtttcatggtaggtttcaccggtgaaaaaacatgccttgtgccagtgtagccttgcatagtttagtgcgaggcgattttcatgttcaaaaaaaaaaaaaaaaaaaaaaaaaaaaaaaaaaaaaaaaaaaaacaaaaagataaaaacaaaaaataaacatacaaacaaaa

SEQ ID NO: 443820 - DNA, 153 bp, Triticum aestivum
agttcctacaagttatttgcgcagagaatcccgatgggcaggaagttggtgagatggtatatgtgctcgtcagattctgcatgatggtcgcggtgggtgagaattcgtatcttttatgtgaacggcgttggttatgatcgtggggagttaggg

SEQ ID NO: 443821 - DNA, 341 bp, Triticum aestivum
cggtcgacaattccgggtcgacgggcgtggtcagcagcggattcgacactattcttttttctgctttcctctgcttctattctcttttttggcatcgcctctattcttttttttcttttttgcagggttggcatcgcctctattcgaaaagccggagaatagaatgggggatgttctgtaatggtttttgatatacttaagtacataatgcatgcagatgaaccggcaacggatgcacggtgaccgaacatctatattgagggcctgcataattttctcgaagtggctgagacaaacaagcagaatggttttatgtattgtccatgtactgtctgtggggc

SEQ ID NO: 443822 - DNA, 433 bp, Triticum aestivum
  unsure (1)..(433): unsure at all n locations
cgggtcgaccggctcgaaaaggtcttacgagagcggcaaagagccttcatcagaagcttagcaagaaactcttgttacaaactagtgttccaacagctgtgctctatcatggatcagtaacagattttgattctcgcttatacgggtttgatattggcacctgtcttgaggtgattgagcatgtggaggaggaccaagcaagtttatttggcaacgttgtattgagttcattctgtccggcggtgctcattgtttccacacccaactacgaatacaatcctatcctccagaggtcagctttgccaaacaaggaagaggagcaggaacaagacgctggaccttgcaagttccgcaaccatgaccacaagttcgaatggacgaagtcncagttccagcgctgggctactcgcctcgctgcaagccacaactacag

SEQ ID NO: 443823 - DNA, 125 bp, Triticum aestivum
aggtcgcaggcgacgagaggatgatccggagaccagaggaggtagagtaggttacgcgcgggcgaaggggttcggagaaatttccaaaattttatatataacgaccctgtcggtgtgaccgaggc

SEQ ID NO: 443824 - DNA, 403 bp, Triticum aestivum
atgaaccaatccgcaccgcagacattccgttccaaggagatctccaagagcaacgtggtggatgacatggtctcgagcaatgctatcctctacgagcctggggagcatcctgaccacgtcgtcgtgatcaagtatgtgccatacgttggagacagcaagagggccatggacgagtacacctcggagatcttcatggggggcaagagcaccatcgtgctgcacaacacctgcgaggactcgctcctcgccgcacccatcatccttgacctggtgctcctggccgagctcagcaccaggattcagctgaaagccgagggagaggacaagttccactccttccatccggttgccaccatcctgagctacctcaccaagggcaccctggttcctcctggcacaccgg

SEQ ID NO: 443825 - DNA, 420 bp, Triticum aestivum
tcgactgcggagtgcgagagattggcttttttagacgcctattccgggtatcatcaaatccgtctgtatggacctgacgaaatcaaaacagctttcatcagtccattcgggtgcttctgctatatcaccatgccattcggtctcaagaatgccggagccacgttcatgagaatgattcaaaagtgtttactcactcaaatcagtcggaatgtggaagcatacatggatgatatcgtggtcaagtcacgaaagggttccgacctgttgactgacctagctgaaacatttgccaatctcaggagatatgatattaagctcaatccatcaaagtgcacattcggagtgcctggcagaaagttactcgattttctcgtttcagagcgaggaatcgatgctaacccagaaaaagttagcaccata

SEQ ID NO: 443826 - DNA, 396 bp, Triticum aestivum
tgttcctctgtgcgtgaggagcgctctgtgattccgctaacggtgatgacgccacgtggaccgggcatcttgagtgtaaggtagccatagtgcggcaatgcgttgaaccgggcgaaggccgttcttccaagcaatgcatgatggtcgctttggaagggtgcgatgatgaagagtagttcgtcgcttctggagttgcctggagagccgaatgttacctctagtacgaaggagcccctgctgtaggcttcaacgcctgatatcaccccttcaaaggtggtgttgctttgactaattctggatgggtctatccccatcttgcggacagtgtcctcatatataagattgggactactgccaccgtccatgaggacacgggtgagacggtatccgtccaat

SEQ ID NO: 443827 - DNA, 400 bp, Triticum aestivum
ggacacgccttcccatcgaaaagagcaaaccacccgcccgcccgtgccccgtaacctaggaactccgccgatccgaaccccccaaggccgcagcatccagagcttcttccccgtcgcgccctcgaagaacccacaaaggaacgagtgtgaatgttctaatgatgtcaaaagccggcaagaagtctagtagtagtaattccatgtacgaagctccccttggctacaagattgaggacgttcgccccgccggaggaatcaagaagttccagtctgctgcctactccaactgcgcccgcaagccctcctgatattcccttcgcatgcctctcgacgtagcttaggatttctttactgcaatttccctttccctttcgtgcaataattctcccttggctggctg

SEQ ID NO: 443828 - DNA, 430 bp, Triticum aestivum
cgggtcgacagactggttactaaagagtgagttatgacgaggaacttgcatcccgacttaggcatgcagttgagaccaacatactgagtgcagcagacagatatggtgtacttgatgacacctatgccctctgtatggctggtaaacagaagctggtcacgttgctgcatttgattgctgcgtacaagaatgagactgagtatactgtgcttgcacatgccatcaacacaagcctgagcatatatgagatgatggctgttgctgcacccgaggagttggttaatatgaagaagttcctaattgacttccttgagccattcgcacagagagttggctgggatgccaagagtggggagggtcacctgaatgcactgttaagaggtaccctcttatctgctcttgcggaactaggccatcagtctaccataga

SEQ ID NO: 443829 - DNA, 320 bp, Triticum aestivum
ctttagtaccggttggtaacaccaaccggtactaaaaggttaaggggtttgggtttaagaattaattttccgttaaatttggggtttccatttaaattttttaattggcgggaatttaacaaaatcaaaatgtacacgttatgcaaatatataaatagaatttctcgtagaaccggttggtaacgccagccggtttattctgctaatattagcagaataactattctgataacacttccgcactgcacgcttaacgtaagtgcacgtcattgtttgaaccaagtgtgctgcactactcacacgagtgaacttcccgtcgc

SEQ ID NO: 443830 - DNA, 405 bp, Triticum aestivum
ggagaggagaaaaatatttttcttaaatgaatctagtcaaaccaaaaatattgatttaacctgaatcggatgatttttggaggctctatgggtctatatttataggtggaaaagaggtttaggggtcaaaggctaggcaatgtgagactaaacgtagacgaaatagaaaagaaacagaggaggcgggtcgcatgggcctaaacgcgtaaggcggttcggccggccgcgcagctgcagtttttttttaaacaaaatttggcgtaaaaaaataaaaaggttggctgggcctggcccatataggaaaaaaaaatggggcgcccattggtactatgatgtgcacctgggcggcagttagtgatgggccacatgtatagttttttcaatagaaacagaaggaaaagagaa

SEQ ID NO: 443831 - DNA, 409 bp, Triticum aestivum
agcgacggctacatgcaggccatgtcataggttaattaagtggtccatccccaacccctctgcttcaactgccatcgatctcttcaaaggccccgccgctaatctcccccgccatgcggtcaaggatttgcaatccttgtacgccatcgatcccattttgtccttcccgaaggacgcattctacaacggcggcttggaatcctcaattatcaagtcatatctcatcgaccacgaccacgaggagggcacccacaaagcgtcttccaaggtgaaatagcccatctgcgacatcagagagcacaccattggtttgtgctcttctaactggaaggatcccgtccatgacaagttaggcaatatcctatcagcaaatattactttttctaagctagccaaccgcacccttttg

SEQ ID NO: 443832 - DNA, 354 bp, Triticum aestivum
gataagtaccgccaccacggcggcattgttacaaataacagatgcaaccagcgcacggtctcaccaacacatcaacagacgatctcgactcgaagtcaccatatgtcggtgtacgggcccgcagatcgctaatgaggggtcacgtacatcacctcgaatgttcaagggaccaggagacaggggacacgatgtttacccaagttccggcctacatgatggaagtaaaactctacttccagcctaattgatatcgctgcaaaagagtcacacaagtactgatcaatgatcgatcatcttaaaggctaatccctagaagtccacccggtatgactatgataacctcaatggactaaa

SEQ ID NO: 443833 - DNA, 98 bp, Triticum aestivum
gctagccctttcagataccgccgtccagctctgctaagcaccgtctgactatgaaggactgactaaacattgtaattcacggccaacgagatccactc

SEQ ID NO: 443834 - DNA, 341 bp, Triticum aestivum
gtaatggagggcggagtaatgatcagcgttgaatgctgctgtttcatgtgcagtagtggctgccatttcatggtggcgagtagaagggaaggcggcgaagggagtagaagacagagcggtggcagcgagcggaagagaaagatgaagcctcatagacctagtacgatgagttagatgggctaacaacatgaccaaataagcttataggcctgccttttacatgggatagcatggacaaccaacgggccagaagatgtcacacgtagtagaacagttgggcttcttctataaaatacactactaggctgggagacgatgtgcataaatcaacatacgtttgt

SEQ ID NO: 443835 - DNA, 111 bp, Triticum aestivum
ttcatggtctcgaaggtagattctgggtccgcactcggtttgcgggctgtacgcgcttgcaaccggcttctggcgtggtatgcaccatgcacgccttctccgcgctggtgg

SEQ ID NO: 443836 - DNA, 260 bp, Triticum aestivum
gggtcgaccggggtttacaggccagtcgttgggttggtgtgccaccttcttgtgttgttggtactcaagctgtgacgtctctgatgaaatatttgagcgggcgatcattcttcacgagattaccgggtccaacgagatggatcgttacgtgttctcttgcagttttatccgactggatgaacgtatccaaaatgccagcacctggctcgatagctttataggcacatcctacagcagggtgccaatatttgagcacttct

SEQ ID NO: 443837 - DNA, 395 bp, Triticum aestivum
cagatacagagtatgaagctaatggggcctgatgggtacgacaagagcgtgtcggacgacacgagtacgagtgaaacctctagcatctccctcggtcagatcctgaacaggaggcaggcaatcttgacttatagcagtgatacaagtgctaacaacaaattctcaggaaagaggaagaagtttgccttcactgggctttcagttttcctggctaagcaggctaagagcaagaagaagagagggtcagatgagaactgatgttagctctgccagaacactagctagttactgagtgttttgaccccctatttccatgtctgtgttcatgtacaatgttcctaggaggagtatatgtttctaggtctaatgaggttctgatatttatgtagctccat

SEQ ID NO: 443838 - DNA, 327 bp, Triticum aestivum
tcgacggggaaggaaagggtgatgctgccgtcgcttctgcctccagtgtgccgtgtagtagaccggccaccgccgtcctgcaccttctcctcaacggaaacgaaccagagcacgcctggaagcggagtaaatccacgtccgtcgctctactggatgtggattgggtcccgtgaatcatcgtcactcagttgatccggaatggagctcaaaactgagctcaaaatgtcaggaacggtgcggccgtgcagaggccgggtcaccatagggcacaccggaggcaatggcgcaggtagtaataaacactcatacatcgcagtcgtggtcatg

SEQ ID NO: 443839 - DNA, 437 bp, Triticum aestivum
ggtcgagatatccgggtcgacttcctggattacctcaagtcctccttgtcctccggcgaggtgaagctgctcttcgccggcgaccaactccgcaagtcaaccggttccgatggtgcaaagcttgtggctaccaaggcaaagggcctgcctctcatcaccatttctctccatagtgttactggcgctgtgacgagtgatgtcatagccgagttctcgctagggctctatggagcttataggactgcacgggagcttgtatccaaagaacaagaacaaatgtcacagctgatggggagtctgtcaactgaaagagaaaagaacgaaatcatgcaaaaacaactcgaatctctttctttcctagacaaaagaaaggcaacaaagccaaagctgttggctgatcaggttccaagtgtgtctgctgtgactctgggctctga

SEQ ID NO: 443840 - DNA, 519 bp, Triticum aestivum
  unsure (1)..(519): unsure at all n locations
gtggnngnaantatttatctagcccggtcggtgtcgaaacaacccgggtccnacnggggggggancgtnaagcacatccggcaaagatcgagggggatcccgttgttncanancnnaggtcaaancaaggtgcnatcaggcgttnaaaaggnattcncacaatcgggcataattgtcctgaaaaaaaaattgtanacnccctttggtcggaaggcggcgggggaaggaaggggacactggggcgggatctttcagcagcgaattccccatacagatagaggcgcctatcaaaaagatactccgaaggcttcgggatcgangtctcattagccgaagaagacccaggccaatccacgtggcctctttgaccaacgtcagcgacagagacatagtaaattggttcgcgggcatcgcgataagtcttctgtcctactacaggtgctgcgacaacctttaccaagtccgaacgaattgtcaactancaanattcgcctggtccgctatattcaccctaaccca

SEQ ID NO: 443841 - DNA, 404 bp, Triticum aestivum
ggtttgacaaactattcatctttgaattagacaaggaccttggtatttcatccatggagtgtataattgactctatgggtgagttaggtggaatacctcaatcgttgtcggaagagaaggcgtatatgataagggggtatctagttgaatgtggcgatagactgttgatggtgaaacggtggattcatcctattgcccgttcaacaagtgatgactttttcgagcataaccgtactgttgcacttggggtttttgaggcggatttgggcaccgatcctgctggatggagaacagtaaatgatttggatggccatgcactctttcttggccagcatagctccaagtccctgcgcgctggagaatgcagttggatacaagaggactgcatctacttcatgtgtgac

SEQ ID NO: 443842 - DNA, 391 bp, Triticum aestivum
cctcgacaaggttgtcaagcccaatgttgtgtttcttaaggagtgcgggctagatgattgtcatattgccaagctgtgtatccctgtaccgaggatgctcgccaccaacccggagcgcgtccgggcaatggtggcatgtgctgaaagattgggtgtacctcgtggcactggaatgttcaggcaagcgctacgggctgtcgcgtttctcaacgaggagaagattgccgccaaagtgaactacttgaagagtacgttcaggtggtctgatgccgaagtgagcattgctgtgcgcaagtatccgattctgctggagaagtcaaaggaatctctgaagcgcaggtccgagttcctgttctataaggtgggggtggaacccgtgtacattgctcat

SEQ ID NO: 443843 - DNA, 395 bp, Triticum aestivum
gacttccaatcatatccagacgcaggagcagaacctcaggaggagacacagcagaagcagcagcacgtcgaggaaggggctactactaccgggcaggacggcgtgcaggctgcccagtgctcagccaacgacgtcggcggtgtggtccaagacgcatatgtgcagaagtacacgtttcctcccggttggggtgacgtctcgagcatccccgcgacaggctgggagtgaccgaccagatctcttttcttttcttttccgtcggggccattgctgttggtagaataagacggggatcggccttgcggagctaacttccgggggcatcctgaactcaccctcgtcggatgctaattctgaacgtctctagtgtttgttcgctgcgtcacgttgttttg

SEQ ID NO: 443844 - DNA, 384 bp, Triticum aestivum
gcggcgcactggagacgcagatgggtggcggggttaaagccaaggaggagtaccgctttggctcgtccaaggtttctcctgctcctgctgaagaagtggctgctgctgccgctgccaaggggaagaaatccagggcgaagaaggctgctgctcctgctcctgctgctgccgctgccaaggggaagaaatccagggcgaagaaggctgcgtcgcggatagacttggacaaggctgaagccgttgtgtataaagccgatatgaaggcgagggagtctgccagggtagccaaggccaaggccgaggaggccgaagaagctgccaggatagccaaggccaaggccgaggaggctgaagaagccgcccgggccgccaaggcggatgctg

SEQ ID NO: 443845 - DNA, 401 bp, Triticum aestivum
  unsure (1)..(401): unsure at all n locations
attcccgggccgacgacgtcgagaagcagatgccgacgtacattcgcgcgactcgtaaaacccgtgacttccgcagatgtgatccttgttggggttgcgacaagttcatgagaagagatgcccttgagcgatcagccagtctaaagtctgattgtttcaccagccggtgtgatattgtggtgtgcaaggacaacaccccagatgccactggctccggcaccggcaccgaggttctcctgcccgacatacaccaacattttagcaacctccttcagaataaggtgggtgctgatgtgacattcgaggtcngcggcgagacgttcgctgcacaccggtgtgtgctcgctgccaggtctgaagtgttcatggcgcagctctttgggcacgctacgcccagcgtc

SEQ ID NO: 443846 - DNA, 218 bp, Triticum aestivum
cgggtccgacgggtccggaaagcaaatcaggctgaacccgcccttggagcaataattttttcaatttaaggaaggattcttcctggggaagtaacccctttttttaaaaccctgaagaatactccggtcaagactggcgggtacaaaacaagttgaatggaaagttgattggtgttaggtttcaatttcatttcatggcatatatgtgattcgtatgc

SEQ ID NO: 443847 - DNA, 338 bp, Triticum aestivum
  unsure (1)..(338): unsure at all n locations
cgggaagaggaagcgaccctgaacaacctccggaaagggttcccaaacttctccaagccaataacggcctccccaaccttcgcaatgaaggcttccaatccgggttaaaacttcaaccgaaccccgaaccggccccccaacataaaaaggcgcctaacctaataagagtggcattcctctggtcactgtataaaatgtttacagtttgtaggcttgtantgtgatggtagtaaggctggaagagagtttgattttacagagccaacattggtctggtacctggtgactagtctaggcacagaaatgcctggagctcgtttacttgctgtaaatgaact

SEQ ID NO: 443848 - DNA, 215 bp, Triticum aestivum
agtagagagatggcaattcatgctggtagtgctataaggccacgccagggtttgtgacattgctgggtgccagtatgtttctaccattggcccttgtaaatccctttagtgaaagggtcgtggttattagaatagagatcgtgcattgcacgtgcaagtttggtagagacgtgcattgcacgtgcacatttactagtaaaattaaattatcttat

SEQ ID NO: 443849 - DNA, 209 bp, Triticum aestivum
gaagaagagcgtcctggctgcaggtttgcagctccaaaaacaaaaaaaaaaaaaaaaaaaaaaaaaaaaaaaaaaaaaaaaaaaaaaaaaaaaaaataaaaaaaaaaaaaaaaaaaaaaaaaaccaaaaaaaaaaaaaaaaaaaaaaaaaaaaaaggggccgcccaaaaggttcaaacctaagttacccttgaaggcaatttaaaaccc

SEQ ID NO: 443850 - DNA, 404 bp, Triticum aestivum
ggaccagatagcgagcgcagggaagggcgatggggacgaagaagccgcagctcctccgcctcgccgtcgtcgccgtcgccgtcgcggccgtccttctgaccgcttcggccaagaagtccgcggatgttacacagctccagatcggcgtcaagtacaagcctgaatcatgtaccctacaagctcacaaaggcgacaagattaaagtgcattatcatgggacactcactgatggatcagtatttgactctagctatgacagaggtgatcccttcgaattcactcttgggaatgggcaggtgataaaaggttgggaccaaggtttactaggtatgtgcgtcggcgaaaagcggaagctaaggatacccgcaaagatgggttacggggaacgaggctccccaccaaag

SEQ ID NO: 443851 - DNA, 242 bp, Triticum aestivum
gatgtggacgactacggatatacaagcttcctagatgactgaaaatgaaacccttatatcatgaaacaagcactcactcctattgtcccatgacagtgctactgcatagaatcctactatcccacaaggctcacagtgccatttgagaataacctgaggctggacggatttagaattcctcctgcgtctgatgacacggtgaatgcaataaacaccagatacatcaaaactatgatctggaa

SEQ ID NO: 443852 - DNA, 459 bp, Triticum aestivum
acgggtccgtactgagagaagtatcaggcgcgttactcaggcagttcaggttgtgatcagaatattattctgatcccgtgatcagaatagtgtttatgtgtgtgtgtgtgtatatatatatatcatgatctttcaaacacaaagagcttgccataggattaaatgaaaaagggaaaggtgtggatcaccttgactcaagcacaaagtaaaaacataaagtaaaagataggcccttcgtagagggaagcacaggttgtcatgtgcgttttgggttgatgcacaaaatcttaatgcaaaagaacgtcaatttatattgccccttgtatgtggacctttattatgcagtccgtcgcttttattacttccacaacaagatcatacaaagcttattttctctgcactaataagtcatacatatttagatagcaatttttgttgcttgcagcatgacaacttact

SEQ ID NO: 443853 - DNA, 56 bp, Triticum aestivum
gaggcccaaaaggttccaagctaagttagccttgatggcaagttcaaacccctcca

SEQ ID NO: 443854 - DNA, 461 bp, Triticum aestivum
tagcggcggcgggaagcaggcctcgacggcggcgcaggggttgagagtaagcaacagcgacctgtcccacttggcgaaatgccttgttactacaacgttgatgacatcctcatggaggaggagcttatttcggttgttttccaagtaactgcaaatggcgttggtatgctagatcctggcgtcgagagaaacagtgttgaaaagggtgctaaggtagaccttccattttggcttgctcatgggatgctgtctctggaacaagcggtgtcgataaatgtacctccttgcttcacccagaaaactcggaaggagatccaagctgatgcagcctgtgttgatttgagggttcggtgcccttacttttatgagctaggatgcaagattgttcctctggtgggtgacaagagcatcggccagttcttgcgctacgcgttcaccagtaggtacaaggaggtactaag

SEQ ID NO: 443855 - DNA, 73 bp, Triticum aestivum
cgggtccacggggaggaaaggatgatgaaggatatgattcccctgcaagtcgggatgagacttcggactttac

SEQ ID NO: 443856 - DNA, 436 bp, Triticum aestivum
aggccacttcccgccgactctcaggtatgctacctcttttcgatccatacccttgttcgattgccccatctgccatgtcgctgcatgtggatctttttccactccaccatctacccaatttgctatcctctgctctgctggtcacgcagatgaaaactttaatttgcgctattaaaggaaaccctacttcatgcagactaatccatgtctgggttgaataaggaaaggaagggagactgtactgtccaagagtgtacgcatcgaacccgcatctaggttgaaaaggggaaaatcaatagctaaggaacgagtctcgtgtctcttgggttaagaagggtagaaaggcatgacaacgcaatagagaatgaccaggtcgattggtttgttgtcctcacataggaaaaacgtggctaaacataacaaaattgggacataa

SEQ ID NO: 443857 - DNA, 368 bp, Triticum aestivum
gatccgatgaaggatgtatgaaggtgaccatccaggatataaatccttcaaacaccagaacatgcatccaggaaaaggtgccgcctaacctttgcaccttcaaattgtaggattaaaatttggaacctgacatgaaattgaaaaataccatgctttaattaattatagtacataccttgtgcagggcacataaaatatatctgatatcgcttttttatgaatacttttatcttttctatcctaaaaaaaacaaaaaactggagcaaaaaaggcaatcaattaaaggtcgaaaaaaaaaccttacctttcgggaaaaacaaagggttaaccaaattttggaaaactcgaagattaaaaactgttttccg

SEQ ID NO: 443858 - DNA, 154 bp, Triticum aestivum
gtggctggcaatcctgctccggctgaaaagaagaaaattcaacccccctccccctcaaaaggaaaaaaggaacctgttgaaaacttaaaccaagggcccccttaagaaaaaaaagccaaaggcaaccaaaaacggtaacccgaatggcctccta

SEQ ID NO: 443859 - DNA, 395 bp, Triticum aestivum
aaaaccgaagggccgtacaattgggactgaagatcaatccatcgtgaagacgtacgactacataaactgtgttgtcacaacacttccgcctaacggtccacaaaggtacctggatgacactttcccctcctgttgccatgcaacaccatgatcctgtgtgtgtgtaagaaattttttgaaattactacgttccccaacaacaccttttgagacacacacacatgaattgggatttaataaaatactccaagtgcctcacttaaatcttttgagctagaaaattttgctctagtgcttcacttatacctttagagcacggtggtggttttattttatagaaattattgatctctcatgcttcacttatattattctgagaatcctcctaaacaaca

SEQ ID NO: 443860 - DNA, 435 bp, Triticum aestivum
attgaccttgacaacatcgatggcaccatcgacgaagttgacgatggcaatgttgatgatggtgctctcacacctaccttcaccttcccccagcttgagtccaccaccgcggagaaggtgatggtcagcgtcgaggcgatcgcggaaaaagatgacgtcgccaccacggaggacgaactcatgctggtgagcgctgagttggagaaggttctcgggggcagcaacgtgccgtcggcacgggtaagcttcgccatgggcatcgattgcccactgcagggcttcctacttggttccccagtgtgcagcgacactgaatcatggccagagaagccaaacggcggtggacgtcctgcctccccccgttgattgttcatgcggacacgcttcacggaagagaagggggccctagttgccgtccaggagagcgaggatggt

SEQ ID NO: 443861 - DNA, 61 bp, Triticum aestivum
cgggcaagatgaaaaggacgatgacgacgacgacggcgatgaagaagaagatgatgaagaa

SEQ ID NO: 443862 - DNA, 464 bp, Triticum aestivum
  unsure (1)..(464): unsure at all n locations
gggtcccgggcgagaaaaatcctccgccgctaaaccctagctagctcgaaccccggcgaggccaaaaaaagggcgggatccgcggaaaccccttcggcttcgtcggcggtggggaggctgcaggcngcggcgcaggacgccgccaactcctcctcctcctcgcgctccgccttctccaaccagctcctcgtgcccagggaggcangacggatggtgtctctgtcggcttgcgcgaagttcggcgctgtcagctttgtggttggcgtcgtggttggcttcaccctgaataaaaggctgcgccggtgggctgccaagctgctcaagagaattaagggcgataactagcaaagctagtgcatttaatcttgaaagaaattttgttggcaagtgtgctctagttacatctgtagtaactccaagttgaacctcattgactgcttggatcaactgtgatggatacaaca

SEQ ID NO: 443863 - DNA, 282 bp, Triticum aestivum
gggtccacgggagggaagagggggaagaaacagtaaatacatagcaagcaagtgcataacaggacaacaagcagagctagacgtgttctaacgcggtatgaggtgataccggtgaaggggggaaacatccgggaaagtatccccggtgttccgtgttttcggacagatgaaccggaggggaaatgttgcaggttcactatggtaaggatgcctggcggacgaacaggctgcgtatctggattcgtctcttcgttctgagcaaccttcatgtacaaacttttt

SEQ ID NO: 443864 - DNA, 137 bp, Triticum aestivum
ggacagtgacgagggccatgagtagcagagcctgcctcctgatgctttcccgacgcatgctgctggaagcctatcatcggcccgcgtggcctggtgcgttatcggtccgtttcagcattttcttcgccgcgttctgt

SEQ ID NO: 443865 - DNA, 475 bp, Triticum aestivum
ttcgcgggtccacgggagtccaacccttgcgtgcgaaccaccctggctgtgtatgtgagtgcatgcacgtgtactccctcaatcttccaacaaagagtgtacatatacacttccaatgcacttagcctttaatctaatcgatattgattgactaatgcaccaacttgtgctctagctataggctacatgtctatccttaattacaacatgcaacaatcttcatttaatcttcttctctcaatggtcgcatgcacacataagtctgctacttttgggtgataattatgccatgaagtttcagttcctcttggtcaatgtgtaaatctctatatgtatagtctttcatggacggagggagtaggttgagcacttgagcgtgagcgtgtgtgttgcgccgtgtgctgtgtgccgcatgtatgcatgagtattgcgtgcatgcgtgcatgtgtacgtgtgagtgttgcatgttgcatgt

SEQ ID NO: 443866 - DNA, 177 bp, Triticum aestivum
  unsure (1)..(177): unsure at all n locations
aatccatnaaaaaaaaatgcgaaacaaaaattggttggttggaaatgggaaggaaacaatggaaattaagtcaaaaggtgtaaccttttccttccccggttaaaacagtcctggattgcttcatatacaaaaanaaaaaaaaaanaaaaaaaaaaaaaaaagcggccgctccaaaag

SEQ ID NO: 443867 - DNA, 106 bp, Triticum aestivum
tttgaacatttgctttgtggggttggtttaaaaacctgttgtgttgtaaaaaccttgtatgtttgaacctgttatgcaccttggttaatatgcatgctatctggtt

SEQ ID NO: 443868 - DNA, 87 bp, Triticum aestivum
tgcgtgaaccgaggcggaaaatcctttcaataacggtaacaataataataactccgttaataaataaaaaatcaacaagaacggctt

SEQ ID NO: 443869 - DNA, 476 bp, Triticum aestivum
  unsure (1)..(476): unsure at all n locations
tccggggccacggggacggcacaaactgggaggttgcacgggagctgctgcagggtgccgtcgcgccgccgcagcagcgcgtgtttgcggcgaccgagccatcagatgtcgtcgcgtcgagctatctcgcgattctccaggtatgccagagaactacatgttcacattatttgtgcgcaggcggcgaactacatgtcattccccttggactacgctctggagctggaggagaagctgttggcgcgggacgcggagattgccgcgctgcggaagcagctggaggagacgaagggcgagctcgccacggcgaaggtgccgcggaggtagtcagganggtagcaggagagcgagacggaggacatggngcgcaccgcggatcttttcttgcttcgctactctgtaatccagtgatccgttcctttgctatacgagactcgttaactaagattcatcagtgagcaacaagaagggaaaaa

SEQ ID NO: 443870 - DNA, 436 bp, Triticum aestivum
  unsure (1)..(436): unsure at all n locations
tccagagaagctcaactcattcctcatggtacgtgcgcatcagaccacataggatgtgggtgaaacatgccttttcgttcaattgatttttctcacagccccagattatgtgttgtctttgtgttccttctctgcatgatgtcaacttgtcaagtgccacggctgcttcaacatgtgcgttgttaaaccttgtcgagggaggcggtggcgactggtggtgcgaagccgatcctccacaagggcttctccatgctgctacgctctcccgtcggtctcttcttgccttcgctcaggcaggcgccgacggggctgacacgccgttgaatcagcgacggacagcgtggcgacgcaggtgtgtgaggagtctccgtccgctacaggctacagcctcaggggacgaagcanacacatattgggagtcttcatgtgtgcagaa

SEQ ID NO: 443871 - DNA, 419 bp, Triticum aestivum
gtccacgtgtcccgcatcaaattgaagttttaaatgggcaaattccctattccggctaccaaccgggctttcaatcacctgcacataaaggcattagggttataacctgggaaaataatctccggtccttctccttttcggataacaacaaaattctcaggggcaacaacctacatagggcaaacctaccatttgcaggactatcatacattatttaacgtacctcaaaccctgtcattagactcataaaagcttcatgcaatccgctttcagcggacgagattctctccatcaccgtattcatcagcacacggtgttcatctgagaatggcgctcgccccaccaactccctcagaacatctgatcgcacaccatatggtgtcagactcttttgttcgctctcttcggcagccggacac

SEQ ID NO: 443872 - DNA, 166 bp, Triticum aestivum
  unsure (1)..(166): unsure at all n locations
tcacgggtgcccggggggtgtgggagagtggaggaatggcctggccagtggtgggagtagtatgggggcggtgaggcctccgcggtagcacagccggccaagggaagcangagcangcggcacgaccggcgctgctttgggctgctggagcaagaagaccagagca

SEQ ID NO: 443873 - DNA, 409 bp, Triticum aestivum
agcaaggccatatcagataaaggcagatggagctttcggaggaggtctacaaggcaccgagttctcaagaactctgatatatccgagcctgaaactctaagttcgagcaaagcaaaagctgatgttgctccaagcaacaacgtctactcttcaacatactcttatgcctcagagaagcccctgcatctagagaagccagacgagaagattgtgcttcaagagaagccagatgagaagtccctactcgaagagaagcccgatgaaaagcagacagagaagacaactgaaaagccagtggaccagataattgaaaggtcaattgaacagccagatgaaaagataaccgagacgccgagtgaagagccagctgaaaggatatctgaaaaaccagttgaagagccagctgaaa

SEQ ID NO: 443874 - DNA, 309 bp, Triticum aestivum
cagcgtcagaacatcaagaacgaagaatgatagtccatgagcctgcttccacagaggctcatgaagttgaagatattccagcagctgaacccaccgctgctgaagacattggtcatgatgacaatgtagccgatgatgaagttcttccttagatcgaacattacgtggtatcatcacctgttcatacgaacagcgaactcatcagcattggtcgtccactgacgccaattgctcaggatgcatcgtgggctgatcacccacaactacaagactcccccagtactccccaataacaacaacaagctacac

SEQ ID NO: 443875 - DNA, 388 bp, Triticum aestivum
cttggccccaaccgtatcaacggaaatttcccccctaaggggatcggtttatcgcgataacctgccgagttaagatcgggaggtaggaggagcttttggggggtgggaatggcttccggcgggaacccgcagttccggtacactcagcctccatcgaaggtgatacacgtgaggaacctgccgtgggagtgcaccgacgaggagctgaccgagctgggcaacctcttcggcaaggtcgtcaacaccaagtgcaacgtcggcgccaacaggaaccaggcgttcatcgaattcgctgaccaaaatcatgcaattgctatgatatcatactatgcatcatcagcggagccagcacacgtaagatgcaagaatgtgtaccttcagtactcca

SEQ ID NO: 443876 - DNA, 433 bp, Triticum aestivum
  unsure (1)..(433): unsure at all n locations
atctgggatgtattccgcagccaaaatgcggtagactttgcacgcangaggcttcaagagcacaatgaccctgtcgcctgctgtaaagagttggtcgatgaggccatcaagaggaagagcggcgacaacctttccgtagttgtcgtctgcctcaactccatagcgcctcctgtcttaacagctcccaggcctcgcgtgcagagaagtatatccgcagaaggcttgagggagctgcagggcttcctcgatagcttggcggactgatatgtgtggcttgagaaccctggcaggtggcagcgctgtagtaatcccatttttccatagcctagcttggaatttaggtttagtatgtgccccatctcataacctgagatggttgttgttgagtaatgcatcactgtaacatattatgcggctaattttatctgcacct

SEQ ID NO: 443877 - DNA, 430 bp, Triticum aestivum
gtgtgacggagccctgccggagggtcctggaggtggggcagcaggccagcggtggaggagcttgggcgcgggacatggatgtctgactgcgaggccatgagaggcacatcgagaagggtgtgtctcctggcgcgtgcggggatggaaggagcggcgcgaggacggcagaggcatggtgcctcgctcctctccctggcgaagcagggaaggaggggatcgagggagagggcgctgcgagcgagagagaggaaggtgcaggtggtttggacacgggagcgagaggtgggggttcgaacgagtggtgaggaggggatcgagcgaatggagatggagatcgggcctctcatggcggcgctggtgggaggacgaagggaaggagtgggaatcgggctaggttagaattataggtacttgggccgggggagtgggc

SEQ ID NO: 443878 - DNA, 466 bp, Triticum aestivum
ggggcagtggccagcgcgggccttgccggtgcccacgatcaagaggaagacgttgccgtcctcctccgagactagcaggcggcagtgatcctctagcgactctggcatggtgaacgggtagcacgtctcgtacttgatgttttctgccaagggccagtagtgaccgctgcatgcatccggaggtgatgcatgatgtctgttggcgagcccctaaacggcatcgggcactcatagaagtagatgaagggctccttggaggcatcgaccaggtcgtccatgaaacaggagtgactgtaggggacgttgcgccagttgaatatatgagcacgttactacaagatttaatccaaataagcacaaaataaatcatgacggctataatagagattaaactaatcatgtggactagaatagtagatgaatagatagaatctagtaggatacagagtagaaacatgaattctat

SEQ ID NO: 443879 - DNA, 384 bp, Triticum aestivum
  unsure (1)..(384): unsure at all n locations
ggggctggctacatcggcaaaatcgtccctcagtcataactgaaagaacgtcgggataatctcgctcagcagttcacagttccctgagaaatcagcaaaagttagttggccgtgcatagtcagttcaaaagtaaagatcacgcagtcgtctctgggtttctctctgttttccttcctccttggagactgatagtattgcagcattcccttgaatgtgctattgtaaaagaaagcgaggtgcagtgtaaggtcactgcatatgtatttgtggtgttctctttttgcttgtagcgagtacgtccccgtggttatggggagcatgatgtctgcttccaagtcgaatgtaatactaatagtataagaaaggaaaaaggttcaacanac

SEQ ID NO: 443880 - DNA, 430 bp, Triticum aestivum
atcagtggcatcgctgacttttggtgcttttgttggtgagggctccacatttgcttcagccatgacagcgccagtggcttcagtggtgttggtggtggcagccgcaagattttcaacctccacttgacgagctggagggttgcttacgatcacgttctcctcgagaactgcttcttggtgggacaggggagtagcagcttgtggtagttcttcttcatcggctgatgtagccggaatgtcttcagcagttttagcttcagacgtagagacttgaggccttggacctttgtgaagcctgcgcaacgcgggcgacgcatgtggagtttgtgttggctgggccttagagtcttcttcctcttgtgggtgatccgcccacgaagcatcctgtgctattggtgtcagtggacgaccaatgctgatgagttcacta

SEQ ID NO: 443881 - DNA, 381 bp, Triticum aestivum
cctctaatcttttgccgaactgagagtgatagtcccatggagaatggttatgctcgtcctgtcgaagggatccatgttgttgttgatatgcagaataatattgtcatagagtttgaagacaggaagtttgttcctctgcccccaccagatcatttgagaaactacactcctggagaaactagaggtggtgttgatcgaagtgatgtgaaacctcttattatcaatcagcctgagggcccaagcttccgtattaatggctattttgtggaatggcagaagtggaatttccgtattggttcaaccccaaaaaaggtttgggcaaccaacccggtgccatatgttgatggaagccttggacttaaacctatagctcaaaggctg

SEQ ID NO: 443882 - DNA, 451 bp, Triticum aestivum
tccacgggtcggcggtcagggtcaaccggatgttcaacccgaaaataaacctccagatttgaatcaccaatgaggggaatttaatcgaccggaacaggacctccaacgccaagctggtcaaagctgcaggccaaggtgtcaagtcacaggaagcacctcaccattgatgcatgagctctgaagcttttaccctggcctggaactccttttggcttcaatggttttcctgctgagagcttcatggctgatattgcagtggcacgagttcttcaggtgaaactgtcactgattacatctgaacccattgtaatgttttgggtggtactagctgtgcagatggaaccagcaatgttatgtcgtaacagtagtaacaacgaactggagcaagagtgatcgaggcgcgggtttctcgggaaatggttcgatttcaggcattcacacacaccttttg

SEQ ID NO: 443883 - DNA, 381 bp, Triticum aestivum
agaactcttaggtggattacacactggaattaattcgcaacatattaccatgacaagcaaaatggtacaagagcacagtggacttcatgtacagccgcataaagctattgttggtgccaatgcctttgctcatgaaagtggaattcatcaggatgggatgcttaaatttaaaggaacttatgagataatatcgcctgatgatattggtttaacacgtgcaaatgagtttggtattgttcttgggaagctcagtggaaggcatgctgtcagaaacaaactagtggagcttggatatgaaatcaatgacaaagaatttgaggatttccttaaacgctacaaagaggtttcagagaaaaagaagcgtgtaactgatgaagacat

SEQ ID NO: 443884 - DNA, 454 bp, Triticum aestivum
ttccggcctgcgccaggagtgccggacaatcacgatgagcacggcttagacctactgtcggatagtgctcgggatatcgcccctgcaggaaccccgaacctaaatccggaccagattgcatcgcccgaggatgtgtggatggaccctgccccgcaggccgcacactcatcggcggtagagccgaacataggccttacctctaaggaagcctatgactccagtcccccggactcgtatccggctataggttccagtccacgcgctcccgagcccgctgagcctggttgggctccggtaacggagtttatcgctgcggatatcttccagcactcgccccttggcgatgtgctgaactcgttaaaatctctctctttgtcaggagactcatggccgaactatgtccggctcgagtgggaagcatgcgatgaaggaaattcgttgcccaacccacaac

SEQ ID NO: 443885 - DNA, 115 bp, Triticum aestivum
atcacattatactgccatttgcctctcgttttcctctcccccacttcacctttgccgttttattcgccctctctctctctctctctcctccctccccatttgcctctccttcccg

SEQ ID NO: 443886 - DNA, 451 bp, Triticum aestivum
  unsure (1)..(451): unsure at all n locations
cacgggtcgccngggagactagctaaggtttacactctgctctcctctcctccgccatctccgaccgaggtctcccggcggcgggtattgtctcccggccggtcgtgctcaaggaagacagccgtgtgcctcttcctgggacgctgctctgtgtgcctcttccagggacactgctccgtgtgccccttcccgggaagctgctccttgtggtgcctctgccctgtacgacgctctccggctgctgcttcgacccaagttccgacaccatgtagctcgtcaagattttgggcagctggagccatgctccatggacgacgaggatgaccgggaccccaagcccaagccaacgagcacgacgaggtaatcgtcgagtccggggaactttgactcgactccccacaattagatgcaaatgcacggcagcgagagattgatgatgtcgacgtcgtta

SEQ ID NO: 443887 - DNA, 394 bp, Triticum aestivum
  unsure (1)..(394): unsure at all n locations
tggactaacttgcacganaaaccgcagaggtaaaacanaaaagaaagcaaataaaagcaaagttttggaatagtccaacacgagtgttttgaagctacatgagcttaagtacaacctaattaaatttctttaaataccgccacatcttgatgtagacatgcagattacctcccccaagcttaagcttttgcaagcccaaaccggcggaatcactgtggcggttggtcacaagcccatccatggctccagttggagaagcttgaattcatgtaggcggacgtgcctcgaagggacacgacaaggttgctcatatcattgatggagccctgcaaactgtaaaggtccgcataggtggtgtaggcttcttgttgtggatgttcctggggttgctcct

SEQ ID NO: 443888 - DNA, 436 bp, Triticum aestivum
aagtacccatcacaaactcatctccctcacatttacattatttgccatttgactctcgttttcctctcgcccacttcacccttgccgttttatttgccctttctttcccaatcttcttctctctctttcgcttgctttcttcttcctcgcttttgtttgccgttatgtcgaaaattggggagattatcgtcgagatggacaataatgataacatggaaaattccgatgctccggctgaagaagcccctatcttgcatacaataaattcgaatcggtcgtggtaacattattggtaaaggtggtattcaaaatttctttacttgtgtcggtgctttaccttccatgggtggttctattcttcatagaactagtagtcctgcagatgctatcgctatgcttgtagttgaacttgaaagacaatttatgcagtatgcat

SEQ ID NO: 443889 - DNA, 422 bp, Triticum aestivum
aggacgaagctacatgtaattcaccgacgagacgtaacaatgggcaggcaggcacatcaggttggagggaactcgaggcgtcaagcggcagaatcggttgtggggtgtcaggatggttggtagctgaaccctcaatgacacgcgagacccacctaaaacctccagccaatgtagatcctatgcaagattttgacctgtggctctgccgaaaacaacggcgacaacgcgtctgattggtgcaactggaggtgatatgtgccattgaaaaacaattgtggcatttccaaactttgaatgccatttgatcaaccatagaagaaaatccatcccaatcttcaaacgaatggcccaaaatcccagggtgtgataattcgcgatcctgactgacttactgcgcattgggagattcaacattgactggg

SEQ ID NO: 443890 - DNA, 401 bp, Triticum aestivum
  unsure (1)..(401): unsure at all n locations
gtaggcgtccgagattccaaggtccacgggccgacaagcatcttctacngtgggaaaggccaaacctccttcacggggggctttccccttctcggcggcggaaaacctcggttaccggcccaatggatgatgcattaaagtaaggaagaagaagcaagcagaacagaagaagagatgggcgacgggggccccgcccctccccttttatagcgggagaaggccaactgacaacccccacgatcggaggtaatgacgtcttttctgcatgcaccagggactcgtcaagtcgggcagttaccgaggcagcatggggaagcggagatgcccacgtcccgtcagtcgccacgcgtcaatcatggacgcatgccgttggggcccgcggcgctccgcacttgcccctt

SEQ ID NO: 443891 - DNA, 68 bp, Triticum aestivum
  unsure (1)..(68): unsure at all n locations
ggnnnnngnaatgttacaactgnctagcctggccncaaannnnncanaagncccggggggccacggga

SEQ ID NO: 443892 - DNA, 424 bp, Triticum aestivum
ttcatcaagaaccagaacgaggctggcgtgggcatgactgactacggcctcgacaggggcggtggccctggcctctgagtgaatgaggctttgtgttgctttgcttgttgtgaactgggctgggaggttgctgtaacttatgtgtgcctgaagctttgtgcttgcacctgcatctgatgatccgagtgacgcagaaacggtactgtaactgcatcatatgtttatggtgtggatcgcctttggggtgtactccagagacaatgttgcatgaactgtcatgggaaaagtaaaacattgcggtgtaatactacatttcccatgctgctttaagtctgtttattacttttagttcgtgtaagctgcggtgccagtgaggtgtcttgtatgttggctagatagagtgagatcgctcattgttgggctt

SEQ ID NO: 443893 - DNA, 471 bp, Triticum aestivum
  unsure (1)..(471): unsure at all n locations
ggtccacggggaggcctttccaatccatagccacgtggatcctaaataaaaatggcgtttaaaataagaatgaagaattaaaaggttccaaaggcaaaaaaaattggttaaccgccaaaggaaatacaatggtggtttaaagacgattttttgaacctaatgtggatatatacatatatatggattatcctcttcccaatanaatcgcacttgtcatattcctatacagaatgtaggagtatgattaagcagatgcagcagcgcattgagttgtgtctagccagatctcgtgcacagtacgtaggaccctttcctatcccaaattaaaaatttctgaacatgctacacgtacctctctatcgacaacataaactgaagacacaaatctggtaatcaagaactttctccgcacaacagcttaaagcacacacatacacttgaaccaatcaggcaatcacgcatgaaacgacc

SEQ ID NO: 443894 - DNA, 273 bp, Triticum aestivum
cacaatcctcaggaggttctgaatttcctgaaaaaggcccgcttctctgctaatacaaccatctacttgacatatacattgtggcacaaaggcctcactaatcttaagaatgcattaccaaacacttataccatcgacgacataatgcctgctgaaaagaaatgtgagttcctgaactctggtgattcaaacctatcaagggcccttttacctccaaatctgctcgcataccaacttcttcgtccctgccatccctggtatgttctaccgcaa

SEQ ID NO: 443895 - DNA, 152 bp, Triticum aestivum
tttgggcgattggttggttgcgtgaccggatacctgtcgtcgtctcaagcttctttgtcaacgttcgccatctgccatggtgctgggggatgaagtacttctgggagagcttgcgggcgtccgaccttgtaagctacgcgttgggctggcag

SEQ ID NO: 443896 - DNA, 451 bp, Triticum aestivum
ccggggccacggggcagtttacacaggctcaggccaccttgtggtgtaataccctactactgctttgtggtggattagcctcgcgaggggctgaggatgaactagtacaagtggaagaacatcctcaggaggcgtgttcttgtgatgagctctagggattcggtctccgggggtccgatccttctacggttgtggctagactatatttataatggccttggtcctcttccttcgaaacttaggcgggaagggatcccacaacggccaaatttgaaagggaacaagaagtacatataatcttgacgaaaggcggtcttcgcctacaaagcctttgagcgtgacctcgtggtgggatcggcgatgacatctatcctgccgttctggcggtcctgggcccctttccaggcaaatggcaacctttggctgattccttggggctcaacacctgcgc

SEQ ID NO: 443897 - DNA, 201 bp, Triticum aestivum
tacaggtccgacattcccggggccactaagttagtcgcattcatatacgccatttgattcagtcctgggtgccaatcatatcacctgggctggaagttttgttgtacttttggtctgtagcatcagtgtcgtaaacaatgcaatgatgcatgttttggctcattgttgatttcagcttaatgcttattgtttgtactacct

SEQ ID NO: 443898 - DNA, 414 bp, Triticum aestivum
aagtttgaatccgaaaacccgttcggttcccctccgggaaccgttgctaaaccttggtcctaaaagccgaaccctggtaccccaaacaactaataataagccgcaattaggtgttccgggtacaagttgttgccatgttgtgtcgggcgcatccgcacatgtttaaagttcccggatttgatatccgtggttgtagatattctaagcacttgtacttggtatatatgcccgggcaagtatttttggtacaagatgattagaatgcgccagtacgtgtccggatacaagttgtggttgtcttgtgccaaggcgcgtcactgccttttgaaggcccgaatttgttgttcgtggctgtagatgctttgagaacatggtacaggtacatatgcccacgcagttgttcctgaaacatga

SEQ ID NO: 443899 - DNA, 455 bp, Triticum aestivum
  unsure (1)..(455): unsure at all n locations
ccacgggtatggtcaaacatcattgcttaagaggaatgaacaattcctccagtatcgactaatctttgacagacatagcgatgtccatgttactcttcctgctcccttcctttttgattaccaggcaaaaaggaagatacgttgttaccagggaggaaacagctgaacacaaggagagagcagaggcggctcaccaacattcaaaatcaattctcaagatctggctacgaattattagcacgaacgctaaccctagttagattattagcaaaaaaaatatttgtagagaacaaataattgatcactaatcatagaccgataccattcaaacaatcaatacactacatagatctgacgaatcttactccgatttcatggattgggagaacataaccatatgatttttattccagaaaaatganaatggggtgggggtgactaaccggttttccgtc

SEQ ID NO: 443900 - DNA, 204 bp, Triticum aestivum
cattgggtaataagtatgaaaagttcgatcatgatgcattaatcttgcatacagatagagtcgtataatttactcgtgtggatttattcgttatcggtctgtatgcatatttgcttagtagtgtttgttttagacgatgttgtgttgtaagtaccatatgtgtttatgttcattaagaatcatggttaatatgtatgatttggc

SEQ ID NO: 443901 - DNA, 215 bp, Triticum aestivum
cccatttgccgggaattgcaagcccaaccaacgttttggggccaacccaggaagaaggtgagacaccaacaccaaaaacctgggtcaaaccttgggtttgccccaaggggccattcaaccaaaccaaaccttgggttccccccgtttccaatttttcccccaaaaaaaccggaacctttccaatccaatttcaatcccaatccaaaggttccccc

SEQ ID NO: 443902 - DNA, 450 bp, Triticum aestivum
ttcccgggtgcacgggaaacgctccatgcagaagcttgaggatgacaattcagaattaaggcatgcgcgagaacagagcatgacaagagtcaataagatgtcacttgattcagataactctgttgacagacgaattgtgatcaaactactagttacatacttccaacggaatcacagcaaagaggtattggatcttatggttcgcatgcttggcttctccgaagaggacaagcaaagaattggttctgcacagagcaatgttggtaaggttgttgtccgcggtgttatgtgtcttcctgggcgtctagttggaggatttgttagtggaaattcagcacgaaaatctagacatgcaccgcatgataaccattcctttgcagatcactgggtggactttctcactcacggagacagatgacagggagaatcagtaagcttcggaagccgctg

SEQ ID NO: 443903 - DNA, 459 bp, Triticum aestivum
  unsure (1)..(459): unsure at all n locations
ttcccgggtgcacgggcaggttttcaatgtgaaggacatgtctaccaagccgagaaaaagaaaagataaggaagcgaatgcatcgtacgatgagccaaagcggcacatagttctttctgggaagagaaacatcgtgggagtggatgacaagacagacatgtcaggagattatgaaaagtttgatgaaattgctccattcacagtgaatattgacccgagcatccagttaaatgatgaagattttccatggctacggcgcaaagggacacacgcgaagaaaaagtttcacacccaaagatctgggatgtgatcggcttcactatcatcactttcttctgtgttntcacaccaggagggaacccttgtaatagttagggtagctagttatgtgttttggcattttgtacgcgaataaattttaggtgcaagcaaattctttcaagcatttaatgatttttt

SEQ ID NO: 443904 - DNA, 325 bp, Triticum aestivum
gtcataggtcatttagtggtggtaggctgtgtaatacaaaagaagcagcagaagattgaaaacatcattctgtgagctgcatgtatgtgatgattttgtgaccatcaggattgatttcttttattaagtggctcatcagatgtttgagaaaatggccataagaggattgatgaaacttgaaagaggttgtggtatttctagcacgttgagaggataactcgtgacagggttcacgtgaagtgggaaagacccaccatgacctgcgagttaatggtttttggggtacgccttttcccagccccaggtaaatatcatgaggctacct

SEQ ID NO: 443905 - DNA, 408 bp, Triticum aestivum
gacaccatttctatattacaaggagaagtgaagaattctacaactccgaattggttgcttgcccattgaataatgtagctgagaccactgtcttgctaccgcatagagaaagtgtgaaaattcaggatgtccaactctttgagaatcacattgctgtatatgagcgtgagaatggtctaccgaaagcaactgtctatcgcctaccaggcactggagaggcagttgggcaacttcagggaggacgggcaattgattttattgatccagcatatgcagtggaacctgagccatcgcagttccattcaaatgttgttcgtttttattatagctcaatgaggacgccaccctctatctttgactatgacatggatacaggggtgtcggtattgaagaaaattgacactgttt

SEQ ID NO: 443906 - DNA, 441 bp, Triticum aestivum
  unsure (1)..(441): unsure at all n locations
acacanattgtcatctcgctgcaaaactgaaggtgccaacaaaatacatcgaaactttgatgcccaaggactaaataacgtaactccttgaagaagtcctccaatccaaaatccgaattggccttggaattctggcgccccatctcgatgtccctctcctttgggggcttcgcgtccatttcaaaagaatcctacgattcagttgatcgaaagcatcaacaatcatacagtaattgcaagttccacccatttactgaaggttccaaccaataggatttggacgtatgaccgattacttttcacgtttgacttatctggaaatcaatcagggttatgcagcacgtctaattattgatccatgatgacactagtagaaacaaacaaactttccttgttcgaaaaggangatgaaacccggggcctaaaaagaaacgaactgta

SEQ ID NO: 443907 - DNA, 463 bp, Triticum aestivum
tcccggggtcacggggaggagaggaggatgcagtaccagtcgcacatccgagggctcaacgcgtacgatcgccacaagaagttcatgaaggattatgttcagttttatggccatgagaaaaatgtggataacagtctgcccatcaaaactgataaagatacattgagagaaggatacaggttcattcttaccgaggaagatgacatggattcaacttgggagaagaggctggtcaaacgttactatgacaagctttttaaagagtattgcattgctgacatgacccagtataaaaaaagcaagattggattgagatggagaacagaaaaagaagtgatatctggcaaagggcaatttatctgtggcaataggcattgtgatgaaaaacatgggctaggtagttatgaggtgaatttttcttatgttgaagcaggggagcagaaacaagcactagtgaagctgg

SEQ ID NO: 443908 - DNA, 454 bp, Triticum aestivum
ttcccggggtcacgggtcacaacgaatgctgaagaagcctctctgctcaccattggtatgacagacttgtcgctccttagatcatgtatgtatcatctgcttctatggagagcctatggcctatgtgaataaatgctttgattggcattgtaatatcttctgtttggctctatttgttaataatgatggcaagcaaaaaaagacattttaatggattcacatgggtgtgttattctggagcaggttgatcatgctgccctgttaaaatttggtaaaccccattttttaaaatagaaattcaatttaaaggggtacccaagctaaataaggcctcataaatcatagtatagaaaaggcggggctggctaattaaatgaaaggatttcgaaccacaatctttgctaattcgacaacgattgcattctttaattatttctcaatttttactacttaa

SEQ ID NO: 443909 - DNA, 514 bp, Triticum aestivum
  unsure (1)..(514): unsure at all n locations
cgtgggnccgtccgaaaattcaagggnccncgggggctgcaagcngttatcntgttgtgatgaagaaagaatgaagttgggaaangnancngaaattcnggntgcacangntganggtggcngtgaanctttggatnttgtanatgancngttanaaacaatggatgcatcnactgctgaaaagcgtgctgctgaaatattgtttggtccaagttttgacaagcaaatgcaagcaaaagccaacacgaaatttttctgggggttggcgtatgaagattgcattggcaagggcgctgttcatgaacccgaccatccttttgcttgatgagccaaccaaccatcttgatctcgaggcttgtgtctgggctggaagagaaattaaagaattttgagcgtatacttgttgtatctccgcattcccaagattttctaaatgggagtgtgcactaacatcatccacatgcagaacaagancctcaagttatatactggaaattatgacaattatgttcaa

SEQ ID NO: 443910 - DNA, 237 bp, Triticum aestivum
cgggcatgactccaccaacaacggcttcttcgctgtgacgtgcgcacatattcatcatcgcggccagtaactgcatggatttaattttttagacacttattctggtttgcccaaaaaggtgggttagaaagaaagccatgtgaattagttgtggcctgtgactgtgagggagtggattagcaactgaacctttgacactgttgtttggcaagaatgggaggagcgatcctttgtttc

SEQ ID NO: 443911 - DNA, 91 bp, Triticum aestivum
  unsure (1)..(91): unsure at all n locations
cagngttataagccnccaaggattttggggaattcccgaacggttaacggattccaattgtaaaggcccttaaaactccggcantttttnt

SEQ ID NO: 443912 - DNA, 328 bp, Triticum aestivum
  unsure (1)..(328): unsure at all n locations
gatggatgacaatgcgaaaggcgaacanaaacaataaccaaaaggcaatgggcaaccaactcctcatattacatttatattgttggcaaaaccaaagaaaggaattggcaacaaaacaccgaggattaccctccaagaaacaaaccaagcgccgacgtcagcggcgccgccccaagtctcgccaaagcaaaagcggtgacaccggcacaggagataatagcactccggacagtgccgaagacgacaacaatcccctacagcaagatttagagcangaggatggagaagccagccctcccgagagagcggcagatggagaagcggaggc

SEQ ID NO: 443913 - DNA, 178 bp, Triticum aestivum
ttcaaggggccacgggatgttcacgtacgggagagaagcgacggagttaggagttgtagatatgcattgttgtaccccgacctgaatgaatggaatatacgaaataacgctgttggtcatggcgacgagacagcggaggatgacccctccaagaaacaacccaagcgccgacatcaac

SEQ ID NO: 443914 - DNA, 246 bp, Triticum aestivum
ggggcaacttatagtaaatcatattattactagacatgttaacagataatctactgatactagcatggtatgaaatgtcgatgcctctgaacatctacattaaaaacctaacacattacacacaaaaaatttacagtttggcaatctacttagtattggacaaagagttattcatcatatcttcacatacgacgatcatgtacccaatattggcggatctaatcttcatacatgaagtactctgtc

SEQ ID NO: 443915 - DNA, 462 bp, Triticum aestivum
gtccacgggaccgatcgcacatttaggtgagaccgaaatgttacgaagggaaactgagagtttgcaatcccatctcggtgagaccgagatccctatcggtgagactgaactgattagggtttctagctatggctatgtcaagtgaactcggtggcgccggatgaatcaaatcagtgaggctgagtttgactttaggtttaggacatgtttggaattgagaaagtggctgagggttttggagcatatcactaagcattttgagcaagtagatcattaagcaagacctcatcgccttttaatagtattggctttcctatggactcaatgtgatcttggatcactaagatagaaatgaagaggcttgagcttttgctaatatttgtccttagcattttgagggttccacatctctagtccatgccatagcaaccatttgaactttctgaaataatcaacttgaaa

SEQ ID NO: 443916 - DNA, 444 bp, Triticum aestivum
aaaactttcaacagtggaagggagcattatgcgagctgttagtgagttgcaagcacttcaggatgaaagaaagaaagtggatcctcaaaaggctgaagctattgaacagttcttagtaaaattgagatctcttggatcaggggaagctgcttttacctttattcttgatgatgcttctggtaacagcttcatcgagaacccgaatgcaccttcatcagatcctttgttatctttgagattctatgagaggacatatgaacaacaagcagcactcggttttcttgctgaaccaaccaaagaatctggagactcttctcaggatgcttcaacagtggaaggaaactctggtgggccgcaaaggattccacatggttcagttggagctgttgcaggtcgccgtgctatagctcagggaaactctgatgaaattactacagcactgtg

SEQ ID NO: 443917 - DNA, 312 bp, Triticum aestivum
aaaactttaaagactggagggtaccattgaaccacgtgtcagtgttttacggacaattgaggatcagaatcaaactgtggatacccaatctgcgaaacccatcgtgcagctcttaatattctgtaattctctataatcacgtcaagatgcgttaacgtttactcctgatgattactctgatttgaccgtcatctataatgatactgcaacttcattaaatgattagatatgtctgacattctataagttgatctagtaacaatttcaagcactaggtcgtcatccgtagccaaatcaacaatttacagattc

SEQ ID NO: 443918 - DNA, 479 bp, Triticum aestivum
  unsure (1)..(479): unsure at all n locations
ggggcttgcgtgagtttccaacctgacaaacaacttgaagggccgtcctcgcagatccaacctgcagaaggtggatctgcagaagctgaagatgaatacgacttcttgaaggatggcaagaagcaggctgaaggcagactacagaggtcattagctcgtgtgaaatcaatgactcaatacccagaagcaagagaacaatacagtaggctgcaagcctgtgttacagaactacaagagtccaaggcgatacaggataagatgctaagcgatgcagctggcggcgatggaggtgatttcatggttgatctggaggatttgtgcgcggatgagctgttagacacaccgatgtccactattttgtgacgttgatgggcttttactagaccagttangctgtgacttgttcgttttaccagactagttgtaaattcctgtgctagatgttcactgctcaacatttgactcagtatagctaatac

SEQ ID NO: 443919 - DNA, 431 bp, Triticum aestivum
gacctcgagctggacatggacctcgacatcggcgacgacttcctggagatgcctggctgcgactttggccggggcatggatgatttcctgcaaaccgtcgatttctgcgtgtgaattaagagaggtttaaggtttatctttaaaaaaaaaaaaaaaaaaaaaaaaaaaaaaaaaaaaaaaaaaaaaaaaaaaaaaaaaaaaaaaaaaaaaaaaaaaaaaaaaaaaaaaaaaaaagcaaaaaaaaaaaaaaaaaaaaaaaaaaaaaagggggccccccaaagggttcaaacttaatttacccttcaaggaaatttaaaacccctcaaaaggttcccccaaatttaatttaaggggcctttttttaaaaatttctaaaggggaaaaccccgggtttacccaatttaaacccctttgaaaaaaatccccttttc

SEQ ID NO: 443920 - DNA, 464 bp, Triticum aestivum
  unsure (1)..(464): unsure at all n locations
ctaccgccgacgttgaaacgaggcgagcgtcgagggaaccgtggagaacggcggggaagcaacattgcgccatctggcatcctcttgtggtgggagaacgaatactcctgtggctctggctggctctacaccctcacgaatggcacaccatactcgattgatttgttatcctctgggtgctcgaccttcgacctgtatgcccaccacctcgcctgactgttgcctcgggcgaatctgtctgctccatcgcccagaggagatacttaatgaactcggaggaccgcggcgtgactcccgccgaggagtacatgtacattgccaccctcatcgccgtcttcttcctctttcncatacaatgccacatggccctcaccgtccttgaaatctcccacccattgtcaaatcaagtaaggatatccttcaacctggctaactttgcctggtcccgccggcgatctgcctga

SEQ ID NO: 443921 - DNA, 303 bp, Triticum aestivum
gagatccgcaagctcgatgagaagtgagtgggtttgtcctctcgttctgcttactttcttttgtagagcccagcctagtgctacgggttctagacgtggtcaaaagtagacgatagatcttgtcagtaaattgctttgcgatggccatgtatgaattagcactccgtgttttggacgcaggaagtgagtcttatagcagactgcttataatgtttaccctcctccaaaggccacgaagcaaatgggagtattccctaattttgtatgagaactgtgcctgtttgtgttctgtatttctgtcag

SEQ ID NO: 443922 - DNA, 271 bp, Triticum aestivum
ttcccggggtcacggggagatctcaaaactgctggcatacttggaaagcctggttggggttcaacatgtccgtgcgattcatcttcatctaagttcatgctccgcggtacggttaccaacgttacctcccttgccatgcacttcattctcatctccgaacttccaatttgacttcctcccgaaccttttaagcaatccagtttttactaggatatcagagattacgatcgctagctatcttagtaaacacatgtatcacattctttcgaac

SEQ ID NO: 443923 - DNA, 445 bp, Triticum aestivum
ggggccaggtgggttgggccgcctgctggctgggccggcctgctgcggctgggctgcacaggggaagccccaggtaagcccctcctttttttttctgttttctatttttttctgacatttgttttgatttcataaatatattaaatcatttaatttccttatgccaacttttgcaggagctagatatattattccagagctcttttataattggcataatttttggaccatatttcatatatatataaatatatttccaatgcaaatatttatcgaattaatccaaatggccaaaataaatgtccatgagctcctaaaaatattgttttgatttttatctctgtccaatattttcagagggcaacatgagcattttcttggacccttttggagaaatttttatttgggtcattttcaaaaatgattctgagggttccaccaatcc

SEQ ID NO: 443924 - DNA, 204 bp, Triticum aestivum
actcgtagaagccgcccgtggagccatgattttttccagttgagggatggatctttcctgtgtatgtatcgcttttttttacagccttgacgataactctgtccatgactgctgtgtactacaacaagttgatgggaatgtgatttggtgtatggtttcaatttcatttcatggaaaaatcaaaaactcataaaaaaataaaaa

SEQ ID NO: 443925 - DNA, 485 bp, Triticum aestivum
  unsure (1)..(485): unsure at all n locations
ttcaaggggccacgggatgttggctaccacatgctcctcgatgatctcatcggatgaaccacgatgtcaaggattcaagcaaccccgtatacaattccctttgtcaatcggtatgttacttgcccgggatctgatcgttggtatcccaattgtcacagccccagatcagcccttgtttgtttttgctttagcatccatgcaacatgtttaaattttatgaaatttgaaatggggattgctcaaaccctagcattaaaggaattcactaggttcacctaaaatactttcaagtaagtccaaatggctttcaaaaatgttcatgatttttgacaaaggtganaaacctctaacaaaaatgatgccaatatttttgggcattatggattttgaataaccaatatgtatttgaattggggcatttaaatacaattaatatttttaaatgctccaacaattctgaaaatagttaagggcctctgtaataa

SEQ ID NO: 443926 - DNA, 383 bp, Triticum aestivum
gggccgatcgtgatcgcggagaccaacaacctcgagtcactggatcaagcccttgttaggtctgggcgtttcgaccgtcacattcagattcattatccaaatgttgatggccgacaggagatccttgacgctcatatgtcaaaggtgttgaataccaacgatgtggatcttctgccccgtccttaaaacctattgcaattcacataatatctaatttgtgagttctgcattatctaccatcaaccgatgtcactgatgattaccctcaaccttgtcaatcttatcttatttccattaatgtctgtcatgctctacccaaaacgtgaaaaacctctaccaacaatgatgccaatatttttggaccaatatggatttttgccact

SEQ ID NO: 443927 - DNA, 456 bp, Triticum aestivum
ggcctcgggaagagttatcttttctgcttaacggcctgccaaccccaaggcctacccgctggcggactcgcagctgacgataacgatcctcgacctcgtccagcaggccgccaactacaagcagctcaagaagggcgccaacgaagcgaccaagactctcaacaggggaatatcggagttcgtggtgatggcagctgacacggagccgctcgaaatcctcctccacctcccgttgcttgcggaggacaagaatgtgccatatgtctttgtcccttcaaagcaagcccttgggcgtgcttgtggagttaccaggccggtcattgcttgttcagtgaccagcaacgagggtagccagctgaaacagcccattcagagtcttaaggatgctatcgagaagcttctcatatgatttatcaagacctttcagtgtgatgggcctctgcgacacagtttttc

SEQ ID NO: 443928 - DNA, 454 bp, Triticum aestivum
ccacccataaggcggttgatgcccttcttcggccgcaagaaagctattttttggtaaaaaaatcacggcgaaggtttcagcccaatcggagttacacatctccggatataaaagaaacggtgccaaggcagaatctcacagagcgtagaaacagagacagacagagagacagatccaatcttggaggggctctcgccatccagggagaaggtcaaggaagaagaggaagaagaaggggggctctctcaccctcacttccggtggcgccggaacgccgtcgggggccatcatcatcaccgcgatcttcaccaacacctctgccatcttcaccaatatctccatcaccttcgcccttctatctatagcggtccactctctcgcaacgcgctgtaccctctacttgaacatggtgctttatgcatcatactattatccaatgatgtgttgccatcct

SEQ ID NO: 443929 - DNA, 75 bp, Triticum aestivum
cacgggcacttatgaacctcatgtgcctgcatccacatgcctgtagagaggctccacttcagcactaacagtctc

SEQ ID NO: 443930 - DNA, 366 bp, Triticum aestivum
  unsure (1)..(366): unsure at all n locations
gtacaggtccgacnatccgggtccacgggggagctacaaggggcccactagggtggggggctcagtaaatcgtgtaagcacactccctgccttctatccttgacattctcgacggtattgttcaattacctttcccacagtggctacttagcgcgaacttcctctgtgcatcgatataccgtgataggatacacactttcatacaggacactgattatatgttccgcattgcatcaagtagacttacctatgatcgcatttcgaaagcgagtcttagaaatattgccatgcacctttcaacgtgtcattcaaactatacacactcatcattggcatactactgacatcatcatatagtagatatct

SEQ ID NO: 443931 - DNA, 216 bp, Triticum aestivum
ttcaagggtccacgggcattctaatagaataaatcaatcagaaaaaaagaaaaaaaaaaaaaaaaaaaaaaaaaaaaaaaaaaaaaaaaaaaaaaaaaaaaaaaagaaataccaccaaaaaaaaaaaaaaaaaaaaaaaaaaaaaaggggccgcccaaaaggttcaaacttaagtaacccttgaaggaaacttaaaacccctccaaaagggccccc

SEQ ID NO: 443932 - DNA, 372 bp, Triticum aestivum
atataattcatattcacatagctaatgaattaaatccagagtcccaaaaataaatccttaaaaatgttcaatatttgggttgggaccagaacccttaccataaattatcaaacatttacgaggagcattttggagcaatgaatgagatttttagggttttttcccttcttttaattaagttttttttaggcttccaaaattcctcagttcaggtttcaacaatttaaacatgatgctcagatgaggtctagcctagtgcataacaggaccatggatgtgacacttttatggacgatggaataacgagtggcaagagcctaagcttggggatgcccatggcaccccaagatagtcacgaataggcaaaagcct

SEQ ID NO: 443933 - DNA, 431 bp, Triticum aestivum
  unsure (1)..(431): unsure at all n locations
ggtccacgggccgaaggtacgatacctccgtgatctgcacacattcagctcgatgacatcccatgaactctagatctagctgaggtcgcgggagagtttaattagcacgacggcgtggcgacggtgatgaagaagttagcggcgcagggcttcgcctaagcactacgacgatatgaccaaggtgtgtaactgtggaggggggcaccgcacacggctaaaataattgtctgttgtgcgttctanggtgccccctgctgaaagtgcaatcatgcccttaatcatattttgatgttgatgacaacatgcatgttgggactaatcatgtttatcaagtatatctcaagattatgtctcaagggccgtgtgtggatcatgactacggacataaaacatatatatacatatatcactcgagagcaaagaccaagaca

SEQ ID NO: 443934 - DNA, 449 bp, Triticum aestivum
  unsure (1)..(449): unsure at all n locations
cgggatattggaatgaatatgtctcatatacaactcttggattgcgttgccaatggctggtcaggtgcaaaatgtgctaaacagatttgaagaggccatggaaaagatagatggcatggagaagacgttcgaaacacagctcaataacaagtttaatgaattgctcgtgcgtcttccaccaccaccaccggctggacctaacgcacctctactactacaacaacaacaacaacgacaacaacgatgatgattacctccacgtcccgaaacagccctccgccgagtgagccgtctccctcttgcgcctgaccaaactgttggtgctgctgttgatacttctgtggctcctgctgctgatgccgangacgatgattttgcgggagattaccacgatgatgttgataaaattagaactacgtgcaagcaccaggaacacaaccaccaggtca

SEQ ID NO: 443935 - DNA, 469 bp, Triticum aestivum
ggtgtagcaacacattcttcttctcttggttcttcttcttggtcatcggctgatgcagccggaatatcttcagcctctttggtttcagattcagagatgttcgcagtaggagaggcttcaggaaagacttcgcgtgaaacggattggcgctcttctccttgtagaacacttgacaaaagtgacctgtggccttggtcctttgcgaagcctgcaaaacgctggcgacgcctatggagatggagttggttgggcctcaaagtcttcatcgtcaatcaccggagtggtgacctaggtcgggggagtaactggtgtttcttcatcatgaggggattcttgagggtgatcagcccatgagtcatcctgagcaattggagtcaatggacgaccaatgctgatgaatttgttgttcgtgagaacaagccatgataccaaattgtgctcgattcgagaaaggacttcgtcatcttca

SEQ ID NO: 443936 - DNA, 383 bp, Triticum aestivum
  unsure (1)..(383): unsure at all n locations
ggatattggaatgaatatgtctcatagacaactcttggattgcgttgccaaaggcaattttattgaaattgatcccagtattgtgcatgaagttatagaaggtatantgggaacactacctcaacanaaggggcctcatcatacccaggaacaaacgcaagtttttgagaaaatttgcgaagtaacgaaaattttacaaaaatctcttgaacctcttaagggtgttagtggaaatcttcaccgcatgaatatgttgattaccctttgcaataagcggttggatgctttagatctaaaaatttctgaatatgaagggaaacgtaaagaacctcccggattcgagcatgattccgctaaaaaattgaaaaccgaagatggcaata

SEQ ID NO: 443937 - DNA, 223 bp, Triticum aestivum
aaaggtgtaagggttgttctaggctcgagtcttctaggatttccagcagattgacaacttgggaacttttgttgctttctcaattaacatgttttcgtgcgggaccagtgacaatgactgtcgtgaactgacatggattgtgctagtgtcgggaacttgataacattttagcatggatatttaccgtaagcatggatttgtatcagagtggcgtaataaatgt

SEQ ID NO: 443938 - DNA, 337 bp, Triticum aestivum
gggaaagctctgattacgagcttgtcacaccctccatgcgactacagctcccacgtgttcacgcacgacatatagacatcagcgtattgaatgcataagtcacaatttaggcaatcttcacaagatcccatgtcatatacatcatcaattgggatataacatacttggcctacactcgccatgtcaatcaagtgcatagataacattacatcatgcaaactctcattgctcgaccatagtgccaagtctatgagagaacccatcatgcgacacggtctcgatcaccaccaattgggcagcactactgatcatcacgaagttaaacatagtaatgttg

SEQ ID NO: 443939 - DNA, 414 bp, Triticum aestivum
ggcggcaaagagaaccggggctgaaaaggggctcctctggaggctgccggaggtcacctcaagggagctcggcaagatcggccccgccttcgggctcggcatcggctgcggcgctggcgccggagtcggcttcttcggcggtgcaggattaggttatggatttcctggactcactttaggcttcggagttggagctggctgcggtataagatttggttttggttatggcttgggcaaaggaattgctcatgatgaaaagagaagacattcaaacgttggtaaaatgttccaggaaactccaaatctgcctaaggataccattgctggtttgtttgacgagttggttgtaaacaccaaaaagcttgccaccgcaacttcaaaacagattgaaaaatggcactgagctgcaccacc

SEQ ID NO: 443940 - DNA, 160 bp, Triticum aestivum
gaagaagaaatagagcatcccaagctcatgaagttgatggcaatcttctgttctggtgtccagtttttactgcatctagaaccaactagacttgaaactgttatccgccagctaaacattatgctatgttgaacctcctgtcttgtgagatttttgatct

SEQ ID NO: 443941 - DNA, 425 bp, Triticum aestivum
cgccacttgctgcaagcctggcagaacacgcctccttgctgcattcaaatgcctccatgaaacccgcccatgtggaagccgataaacccactctggacacacggccgttcgtgatcgggccggcattaaacgcaacatctgccgagctcctcccgtatgtcatctatttaatctcctatttaaatgatgccaaatgccggccaagaatcacacacctccaccgctcccctatctcctccttcaccatttttttccactcttacaatggcttactaagagtagttattccgcatccaagctggttgggtggcccgccgagcccgccggatatgagatatgcaactcactgatccacctacctcccctcgcccgacggagccagttgccgccccaagccggcgcgcggttcaacaactcgccgctcc

SEQ ID NO: 443942 - DNA, 272 bp, Triticum aestivum
gcgagacggagtcgctctactttgctgacagagatggcgcctcgaggcgccgtagatagacaacataattgttgttgtatcgccaattttacgaaatataccgtctgctgttcatttttttctcgccttgttgcgcctttttttcaacatgttgtatgacttgacggctcgaaatagatagaactcttgatgtgggcctgtatttacttgtgagattcggtgttacccagccggattagtagagcatgttgccgtttatcggatcatttttc

SEQ ID NO: 443943 - DNA, 253 bp, Triticum aestivum
cggggaggtggaggcagcagcataagtgaaagtcctctgcaatgaatcactcaatagttaactcacatacttcatgagcacagtcagcaacttacgtcgatcgtcgccatagctacatttcacaatatacatcgtcggcaccatttcattacacaggcctcaattcctaaccaaagcaacttgaccaccatttcttgtcctacctccccttcttccccggttcaaattgaaagttcaggaagattaaggcttc

SEQ ID NO: 443944 - DNA, 362 bp, Triticum aestivum
ccattatattcacatcaacatcagagtcccaacggagctgacaccacggcaacgggagctgatggaggagtttgatatagaggagagcaacgacgtggcgagagttgcggctgcatctggatgagatttttatgctcctcatcgattgattgattattggcacacataataagtcagatagccctgaagggcttggtgtaccctatatgtccctatccttgtttgtaggcgttagatggtgagttttgccctgtataatatacacgtcaccataactgataagcctaaattatactgtattgtataagcatctgatttacattcaccacttccttgtggtaccattgttacaagagataaag

SEQ ID NO: 443945 - DNA, 366 bp, Triticum aestivum
cgggattagggccagctctccatacgcgcgcggcatccagcaaccggaggagggacgacacaggtgtcggcgtcccggttactatcacgccatcatcccaggggacagcctcgtctgtgcgccgcgaccacctagcgcggatgacctacattcgggaacgtgccgtcaccacgtggacgacgaatcgagtagcacttctgcccagttgcaggtgcatgctatagaggccgttacgcaccatgtaacggaccttcaaacgcaggaggtgtcgtgattaagctcctcatcagtgctcctcgtgcgatcgctctagcgccagctcctatcgcattcatcgcttcctctctcgccacattctccagcttt

SEQ ID NO: 443946 - DNA, 320 bp, Triticum aestivum
cggggacaacgacaactgggaggttagcggtattctgtgaatggaatgatgacggaattcataacaactgtagatgcacaactctggcaattcgagatcttttcttttgcctgcatggcacaaactatatgagtcaccagccgctctttccacttcaattgtactattttattgtaccaaatgttagctaatgcaatctccattccggatagaaaaaaaaaaaaatgttacaaacaacaaaacaaagcaaaaaatcaaaatgaaagtttaaacatgtatggaattataagtaaaaaatcataaaaagaaaaaaacgggaa

SEQ ID NO: 443947 - DNA, 370 bp, Triticum aestivum
ggcaacaataagttaaggaatgttccaattgcaaccggttgaaggaacaatcagcatatagaaatgggcaccaaggtacactgttcattccctctgaaggaagaatccatgtagtacctagcattcatttttagatgctatgtatctttctgattgtttgggcagtagagagctatttatctgtaaacatctgcagtagagagctatgtatctgtaaacattaaatattgttgcatcaaagagcattatcacctccttgtcattgtcaaaaagtatgacagttcagtatatgggttacaagcttacggcatcgacttacaatacagaccacgtgcattctcgtacattcatccattatcaatgctgagca

SEQ ID NO: 443948 - DNA, 322 bp, Triticum aestivum
caggaagaagtggagcggtggcgtcatgggctccaagtcgcaggccaagaccaaggccagggaaaggctcatcgccaaggaggctgcgcagaggatgaactaagcctagccttatatgtgagagcatatgccatgtagtttccctttcagtgtgtcctgattttgacgaggaactcgaacccttttagcagcagtgtggaatcgtattgtggttttctgaatctctgttcccttctccagacttatgcaaagattagatgaggtttacccatgtttggattcacaaaaaaaaaacaaacgccgcaaaaaaaaaaaacgggcg

SEQ ID NO: 443949 - DNA, 427 bp, Triticum aestivum
gggtcgacggcgagcaactactggaggtggagatgacgccctcaggtgctgcaacccatggctatttttgctggaatcggggcagcacaaaggctacatcgaacactgccggcgatgaagacgacgacctgcggtgctgcatccagcgagttgtttgctggaaccggccggcgaaaaagttgcatccacaccgacccgtgctggaattcgacgaccaggcaagtcgttttgctggaaccggccttttgttttgctacaaccggcaaattttttgctgcttcggcaaggtgtttcattgtgacagtctgcggcgaagtattttggcaggaaccggtgatgtgttttgttggaactgtattccctttttgctactaccggtgacagtgcctttttgttgctgaattttgttttgtcttttgctggaaca

SEQ ID NO: 443950 - DNA, 432 bp, Triticum aestivum
attaaaaggtattataaaccataaaaaatttgtaataaattaggtttaacaccaaattaaataaccattgatttcattacattaccttaaattggtggttggttttatttcgttaacggagctcatgagattttctattgagttttgtgttgtgaagttttcaagttttgggtaaagatttgatggattatggaacaaggagtggcaagagcctaagctcggggatgcccaaggcaccccaaggtaaaattcaaggacaaccaaaatcttaagcttggggatgcttggagcgtcttgtatgatttgagtctttgctttttgtttaccacagtcatatttgttgtacacaccttttgagagagacacacatgattcaaaatttattacaatactctatgtgcttcacttatatcttttgagctatatagtttt

SEQ ID NO: 443951 - DNA, 432 bp, Triticum aestivum
  unsure (1)..(432): unsure at all n locations
ggtcgacgaccaccatcaaagacatgttcatgctgacccagtacataccgttaatgtatttgagggtgacggggatcngatcgctgtcaagggggttgatgcgtgacatgtcgtttctgaagatcacgcggcatcagcaagcaaggagctggcttaaaaagctccggcctgatggctttgagtaaacggtacagccccgacgagcacacggcgagcggcatggtactgagattgtccacacgtgaaacaatgagcttgattacctctgtggggagtgaattccagccactctttcggcgggcgctgctcggttctgccattgttagtgcttgggtttcagtcgagggggaggcgccttagcggggatggaagagcggacaaagatggagaagtgaatatgtgctgcgggaagtggacaggtgatgatgacta

SEQ ID NO: 443952 - DNA, 427 bp, Triticum aestivum
gggtcgacggcgttataacagtcaatggaaacacagaccgctccctccgtatggaagagcacactgcagccctcgtggcagaagtacaaagcagacttctttgacagacagccaatttggcaatgataaccccgaacaccgtcaagcgagtccggagcaccctgcaacatgatcgtcaggctcgacaagagctcaattagcaatccggcctcctccccagccccattcaggtggcatttgtgccacgcgtacacaactacgcactcaaaataccatgggcataggtggaggcaagtagacaatacggcctacattgcggttcagccgccacgaggcccgcatacccgttttctttctttcaggaccctacttttgggcagccccttcagagaactggaccatcggactaatcacaggagggaaacac

SEQ ID NO: 443953 - DNA, 280 bp, Triticum aestivum
  unsure (1)..(280): unsure at all n locations
aagggttcccccttccgccgaaagggcaactaattgaaaggctaccttaaaaaccaagcctttgttaaaccctttattttttcaggggtgttggtcaaaaattttgcaatgtcngcaaattgaatccatctttggtaatttggtatctagctcgagcaatattactatgacactgtactatgttccgtttgggctgtgagatcagactagttgtacctgccaggtaatatggtgggtctgatgaattgttgtttctaatgatgctgcttgcccttgctgg

SEQ ID NO: 443954 - DNA, 416 bp, Triticum aestivum
ggtcgacggcgatccacaggtctatctatcggacggtgtcactcgatctagtatcatgatgccctcactgggaagctaacgtcgcctgtggctaatggggtaatcagggatccgaaggttccggcatcgaaagccactgctactgatgtgctcccggccgttattaacccagcgaatgtggcctcaccagcagcggccgacatgacaccagtgcctaacgagaagaacccagttgtcgctaccagtactgtcacaattggagtagctgcttgatcgcattacccgatcctcggagctacccatggataacaacctgactgtgcttgcaaaccacgtgagacatcctcgttccaatgtactgatcatcattcgtggcgtctcgaaatcgggtctgataattaggtttccctagctct

SEQ ID NO: 443955 - DNA, 432 bp, Triticum aestivum
acgttaaaaaaaggaacaacaagccaaggaaacttgggcaaaaacggttccaattaaacaacaacttaggggtaaattgaaaaataggaaaacaataaaaaaccatgcatacaaaaagcatcttcgataatgcatatgttctgagcatttcccttcaattccatccacaagacgagaaacactttctccattctcaaatgactcggtaaggattgttggatgcaaagtagtatcatttaaacgatcagacatatttgaattttgttcagcatgaatccaaaaacgtgggggtaaaaaacacatagaggcatatatgaccaactatcgatagcagaacttttaaaatgcaccatggcatagtatgtgttactttcggacattagaataaggtttgtcagtgtagcattacatgtagtcaagtacagactttac

SEQ ID NO: 443956 - DNA, 486 bp, Triticum aestivum
  unsure (1)..(486): unsure at all n locations
gngaacgtctacgctnnccgtgccggtccacaaattaacgggtcnacgggtctgtgagaagttatctgaccaaagaccctgttgttggtttgcccgtcaacaancacngtgnaaggcncaaaggcaaaggtcanacnannggncanagggatttaaangtntnacccccgggccnanaaancaaccttganagggcaaacttagtattgctacaacacctaaatgtgcnaaaagatttcgtgacactgcacaaagagacatcgcaaagaantaccgtgaccgtgggggtgcacaggacggacgctgaagttattagagagcaaaactccactttcgtgtgttggttcaaagagcgagttctggctaatcccccggaagaaggttgtccgaacggaacactcatatacgccttagcaaatggccctcgaccaacttgcgacttatcaagcatacgatatcaacggatacacgttctacacggaggaa

SEQ ID NO: 443957 - DNA, 326 bp, Triticum aestivum
gtcgacgtcaacacgaaagccggatcgcaggggctgctgcttctcctcgctctcttaattgaccctgtaaacagtgcagcagatatcgtcactgaagaccaccaagaaattatcaagcattttgccagaatcaaatccgagactgttcctgagaacactgatgcatggtctgatgacgatgattacgatgatgattattaagattatgaaactggtgatgctgatgatgatcattccaattctggataagacttctcgggtcaagattgctaggacgatgaccacgatgatcatccttaggctaacggcgataattctggctcagc

SEQ ID NO: 443958 - DNA, 57 bp, Triticum aestivum
gtgttgatctatcatctaactgaattaccccaacccaaaaaggaacaaattcaccag

SEQ ID NO: 443959 - DNA, 433 bp, Triticum aestivum
ctggtgtagagagaaccttgaactctcgccttcaggaagcggaagcaaaagctgctgcctcagaagaaaaggagcggtctataagtgagagactgtcacaaaatttatcccgcataactgttctggagacccagattacaattcttaggacagaacagacacagctgagccgatctcttgaaaaggagagacaaagagcatctgaaagtagacaggagtatctagcaattaaggaggaggcagcattacaagaaggacgcgcgaaacagcttgaagaagaaataaaggagcttagagctagacacaaaaaggagctgcaagatgcagcagaacacagggggctgcttgagacggaccttgaaagggaaaaagctgccagggcagaacttgagaaaacatcttcccgcgacttacctaaaattccatttccaga

SEQ ID NO: 443960 - DNA, 84 bp, Triticum aestivum
cccgggtcgacgggtcagcataaatcaaatccaaacatatcttgcaaatctctatgtctcccacctggacttggtcccggatcc

SEQ ID NO: 443961 - DNA, 425 bp, Triticum aestivum
actagcattagtaccctacggcaacgcaacgcccagggagctaggcgagcctagctactacctagaccagtgatctaatggcagctccactagccagctgcgcgcagcctcgcgacgcccgacgttatattcggtcccctcctctctctcctccgggttttcgggcgcgaaatatcactgctcatcgcccatacctctctctctgcctctactacgtgcgtacaacgagagatcctctgagatcatgaaattaggcgctgagatacgtacactgcttgctcgcatgcggtctcagctcgagaatcgagttattgccgtcgtatatttctcgagcttggtccgtcgcatgctcgcatgccaaattttacatgcctgattcgtgttctttctggcgtagccactagtaagctttcagctggtcgtgt

SEQ ID NO: 443962 - DNA, 173 bp, Triticum aestivum
ttctcaacatttggtgtgcaaggcaaaccaatcaacaaggaactaagacaaaataataaagtaacgaaataaagataaaaaaaaagcccacgaccagggaggttgtatgtttccgtcggtgccgcttcgagctcctgcctctcctagagttgcatccatcttcatgggttttc

SEQ ID NO: 443963 - DNA, 439 bp, Triticum aestivum
gggggagaggggatagaagacactgggaacagggcctcaccgcgtgcatgccagagtggtagaaaggactcccgaggcccaatggtgagcacatgtaccccgtctacggccgccggagcgaggtgccatgaggagggggatgtacgaagaggagctcatcagcgagttgtctggaagatccacgatgacatatggatctcaggaacggtaatttggcgtcaggggatctcggacgacggcgaatcgaagatggcggccgatggacagatccggcggagatggctttggtagagaagttgaagggcacccgacgtctcaatcttcggcgtggtgattcccagcttgacggcgggcatcagggacatggcggtgcggcctctcgacgacattggccacgggagcggtgactctcaggtgagcacgtgagcgacatgccctc

SEQ ID NO: 443964 - DNA, 425 bp, Triticum aestivum
cggggaggaggctcaaatgttcttccacatcgtgctggcgcggtacatgcaactgaacccgcggcacttcggccctcacctcggcgacaagcatcttctccaagctcacgtgtgacatctagggctcctgtatcgggcgggatggcttcatcgtggcgataattggggtggatgacatcatcaatgggctcatcagggaggcgcacaggcttcatcacgttcctcgtcatgtagtaatacgtcgtcttcgtcgtcttcacacagcgacatcatcgacgccatcctcaccatggacaacaacatggggttcttcgcatatgcagggcctgtacagatctttgtgtcagatcacttgattcctgacgatatggaattccaatctgatgatgtgccacactacaggacttctgatgcatcggtgatca

SEQ ID NO: 443965 - DNA, 423 bp, Triticum aestivum
gaagccacaatccggcggagcactacttggagcaggtaacagaaggtgcccgcttaataaaggcgcagttctcgaagaatgtcctgttggagtgacaaatcgaatcattgtaaaaacaatgttattttgattacggggctatatttatacttttttcttgaaagtattattgtgtctcctgcgcggctgtttctatgtatatgtgtaatccaaaagttaggagtcgttggcttcagcccccacgcatacaatgcgggggtgttcgcaaaaaaatatgcataatcacacttgatccaacgtcttggtccattaaggaggtgatcgcacgtcgaactaggcaaccggacgatatagctgtaacactttcgcttagccatgggattttaccggtggggctactatgtagcccctggtaccttcgcg

SEQ ID NO: 443966 - DNA, 212 bp, Triticum aestivum
catcaacgaatcataattccccggcaagaagttccaaggaatccattgaacaacctacaaccaaaggtgacaattcctcaattgacccaatgaaactgctgcccctctaaggcttccggccgaagccaaagggctccactccaaaaggtggtggtcgcggtggaagaagtggtggtcgcggtggaagaggtggccgtggtggattccgtgga

SEQ ID NO: 443967 - DNA, 430 bp, Triticum aestivum
gggcgataaaagtaaagcagatgactacatcagaaccggtacagggaagctgggagctggaacccagcaggcctcgggtcctccttgctgcttcagggagtgtagctgctataaaattcgagagcctctgtcgtgtcttctccgagtgggcggaagtccgagctgtggccaccaagtcatcattgcactttgttgatagatcatctctccctagcgacgtcattctttacactgatgatgatgagtggtctacctggacgaagataggagacgaggttctgcacatagagctgcggaagtgggcagacatcatggtgatcgcccccttatctgcaaataccctggccaagatcgctggtgggttatgcgacaacctcctgacgtgcatagtgcgagcatgggactacaagaagccgatcttcgtcgcgcc

SEQ ID NO: 443968 - DNA, 233 bp, Triticum aestivum
  unsure (1)..(233): unsure at all n locations
gggcactacagaaacagcagcttcncagtcgcagcgccccaaccaatggcgccctaaattcgccgggcatcagcgcgcccctcctgttcgcaacgagaatgcatcgtcggtgctcaaattcgccgggcgtgtggtccggcgattcatcccccaacggtcctgctgccggtcgcccatctccggttccggccggaacacccaactcaacaagtacgtcatctcatcctccggtc

SEQ ID NO: 443969 - DNA, 397 bp, Triticum aestivum
cagtcagtagttctattgcagaggcggcaaacctgctgcctaataaaacgtgtccggggtaactgaaaacttaaggtgtggtgggtaatggtttgcctccgaattggccgaattaatccgttccaatttcaaccattcgtggaattggttaaagggtaataagtcccaagttcaagttaaataataagttggttggtaaaaaaataaatcaactcaaccacaggtcaacaaagtgagtaaggtgaattaggcgaactaagacgaccttattgaggacaagagcagagagctgactcatgtcgtacgtgaactgaaaaaggaatttaaagaactcgaattggtgtataaaaaggatgcttcacgtgccaccagctatgcataggccattcaagatgtt

SEQ ID NO: 443970 - DNA, 213 bp, Triticum aestivum
aaaggaaggggttttccgaaaattttggaaatcccctttttaacgaattcgttcctggcaaaaccgcctccgtctcaaggaagtcacaatatgcaatataccaccaacaaggaaatagatgaacggttatgatgtctcaagtccaagtatagtagtaaattgttggttcaaaaaataaatcatctcatccacaggtccccaggtgagtcaagt

SEQ ID NO: 443971 - DNA, 54 bp, Triticum aestivum
cgggggaaacaaataacgataggtacctgggatggaagcagcacagtcacgtcc

SEQ ID NO: 443972 - DNA, 295 bp, Triticum aestivum
atacgaattaaaccacatagtgtcctggacgataatgcatatatcgctggagaagcagtagatgctcgagtggatggaatcgttacataggcttctgcagggtgtgacatctcagctatgatgaccaggagatgattctattggacggtcgtttataagcttatcaattggatgcatcagtcataactcaacttacgctccttgcggcaaatggtactttccgcagttcaccttgtagcgagcaagggaggagatatagacgtacgaaatatttatgcttactaaatagctaatt

SEQ ID NO: 443973 - DNA, 438 bp, Triticum aestivum
cgtcatgtcatttgcatgcgtgttgcatcctaaccaggtcaccaggtgaatggaaccaccaggttttccaaaacttgcatccgccggggttccccaatttctccccgtggtcaattctgagccaaacaaaacttgcaaatgcccgcgacatgtccgagatagtattttataagtggccggaaaatgttctcggattgggatgagagttggcgtgtggtctggttatggtgtaggtagaccgcctgccaagtttcatcgcaatcggagttcgtttgacgccccaacgattaactatagcgacattatagtcggtctaacgtcgggcgttttcggtctccggaaacagatgccgggccctctctctctcttctccccctcgcagtctcgccacagcccacctagtccatcctccttcccctcttcgtttccggagttgtc

SEQ ID NO: 443974 - DNA, 418 bp, Triticum aestivum
ttatctgagttgacaatatgtgtaaaatagtgcacatttatctccagattcagcaattggaaggatgtccaacaaaatctcctgataatacaagagaacataaggtgcaacggagtagagtagatctcccatttataaaaagaaaaccatgtcaaactttaataacctttatagacgtgacatgtcttctctttttcaagaaaaaaagtgagcatgtctttgaggagagcaactaaaacgaagatcagggatacccggtgttaaagagagagtaaccgcacttaagaaaagctactaacagacctcaaaccatcactctggaaactgtgaatcccgtggaaactactttattttatcccaataagacagtttcaaacatgtgtagaaattattgctagtgtgtaagctggatgtcaac

SEQ ID NO: 443975 - DNA, 430 bp, Triticum aestivum
tctgcctcaaccttggccactgcatcaacctgggcacaccagagcatcgcggcaacctttcacgtcttcctcagctccggtaaaccttctaacctttcccctgcagatctgttttagggtttcacagttcttcagtattcatcgtctgcctcttgctcatatgatagatctttagatgaatccgcaaatctttactctgtgcaatgatagttgtttgacctttgcctttacttatgcatctcaaaaccatagatctacatgaacgtttttctcattggttcggtactgctcctttgaacctctaagtatttatctcttttctgaacttgcttcagatccaatgctataaggaaatcttgtgaaacctgtttctgcgtacttgtccatccgcaatgcttagattaggcggtttaaccttatagaaaatttt

SEQ ID NO: 443976 - DNA, 436 bp, Triticum aestivum
gtcttttacattaagttttcacttttcctttaagcaccaagccgggaagaaaaaatccctgggtgaattaaagaaagcccaatggaattcaactaaaattttggataagggcttaaagaaagcctcaagttgctcaattatatcaatttgagttgggatgcctgtttctcttcacatagacaacagccatttgtagaatgctcttttgcttcacttatatttgttagagcgtcggcatatattttttagaaagaattaaactctcttggttcacttacatcaatttagagagatgacaggaatttgtcattcacatggttagtcatataatcctagataaacttgtagatcgctgaatatggtatgtttgattccttgcaatagttttgcgatatgacgatggtgatattagagtcatgcaagtgggtggttgtgg

SEQ ID NO: 443977 - DNA, 96 bp, Triticum aestivum
ccaggacagaaaaaaggagtcaagttaagaaggcggtcctcaattccttgaacctttcaacaatttccctttggaagggcaaattgattgatggcc

SEQ ID NO: 443978 - DNA, 358 bp, Triticum aestivum
cgggagcattctaaggaggttcatcatgcagggatccaactcaatggctggacctgaagcctcgaaagccgtcagcatggggatgcccgtcgagctactgcgtgcaagccttccgcacaccagcgaagatcaacgccagatgcttcttgactttgctcggaaatccatgcccgtgagcggctacaaccactccggcgctaggggcgggcattctactacttccaaacctgttcccggttaaaagtacatgtgctgcttgtctttcagatggtgattacagatagacatgcttcctgcttcgcaagatgtgtgagcttggagagattccgttggctccgtgtcgaaagttagcgttcct

SEQ ID NO: 443979 - DNA, 442 bp, Triticum aestivum
cggggtgagccatagctatggaagggtgctaggtttctggttttgctagacgataggaagagacttggctctgtataccatgttagattggatcgatggaagcgttcctactcctccgtagaggagccgtgtgggtatttattgattgtggcagaaaacctgccttggagtacaagtacttgccgatcgctaggatacagcaggagagaagaccgaggtttacacgggagagaggaagagatagaattaggaggtagttaagattacatgacgtgaatatctctaactctaactctaacacaccgcatgtacggcggcgccgcctcttgcgctgacagtgtgacgacaacataacgcctggagcacggcagtatgctcccttggcttggacgcacactgtacttgttcttgttgatcaatatgttgaatgcgatgaagccac

SEQ ID NO: 443980 - DNA, 450 bp, Triticum aestivum
  unsure (1)..(450): unsure at all n locations
ttcccggggtcacggggtcatgcatgtaattcatcattgcctttcgtaataacggagctaaaggaaacaacctctatatagttaattgtggtaagcatgaaacactaagtcttccctgcataaagtataaatcatgagcaccttggtaccaaaccaagcaattggatcgtacttctaacacgcttcagcattttcaacttcactcaatacatgagcgtgagccatagatatagcactatgggtggaacaaaatatggtcgtaaggatcaatangagaaggaagaaagtctcgcattaattgggcggatcaacgggttatggagatgccaatcaatcaatatcaatgagaggagtacggatttccatgcaacaaatgcactaagagctataagtgtatgaaagatcaaactgaaaactaagtgggtgttcatccaacttgcttgctaatgt

SEQ ID NO: 443981 - DNA, 402 bp, Triticum aestivum
gtaacctatgttgattcacactgccttccttcacaactgaaccatgggaaacaaactcaatatagttaactgtggtacgcatgaaacactaagtcttccatgcaaaaagtataaagcaagaacaacttggatataaaccaagcatttggattatacttctaacactcatgagcattttcaaattcaatcaatacattagcgtgatccatagatatttcactatgggtataaccaattatggccttaaggatcactaggacaaggacgagagtcacgcattaattgggcggattatcaggttatggatatgctaatcaatcgatatcaatgagaggattatggatttccatgcaacatatgcactacgatctatacgtgtacgatagatcacacagaaaacta

SEQ ID NO: 443982 - DNA, 444 bp, Triticum aestivum
  unsure (1)..(444): unsure at all n locations
ggtccacgggcaaggaaattaggaagtcaaagaaagatgtgtatccaaaaaacaagataggaaagggagcctcaaaaggcttgggaaggcaaaaatcaaggaatccccggaaataaaggaaaatttggtaaaaccaatgaatactgtanagaaagcagcttcaaatgtggtttctaattcaagtgangagctgaaagtcaatgcatcaatgaaagctcctaatgttgcttataacgcaaaggaaagggaagctacattatattcgccgatgagagctgttgctggggtgatcacgaagaaacaaaaggagcatgttatagatatgggaaaatctgatgattttgtggaagaaccactgcgtcttccgcagtctgttgcgccgcgtactgaaaaagtcactgtcagtcccagtgttcgtacntaaaaagggagaagtacttcact

SEQ ID NO: 443983 - DNA, 104 bp, Triticum aestivum
cacgaagtaagaccttgttaagaagtatgacttcctaatgccgaataatgacttgtcagacgatttgctaagcaagtaatgttccggtaatgcaactgccaacg

SEQ ID NO: 443984 - DNA, 133 bp, Triticum aestivum
aaagatgtatgacttcttattgcctaagattgacatctcggactatttgctaagcatatattgtgcgggtactgcatctgccagcgcctatgtaaaaggcttgaatgctgctttggtaactgccatcgctatt

SEQ ID NO: 443985 - DNA, 128 bp, Triticum aestivum
  unsure (1)..(128): unsure at all n locations
gaatttcgccgttgangcctttccttttngccttgaatgaagaatatttccccttagttacntttgtttggttttgttttgacctttgttatcgttnttgaaatcctccctaatatntgaaagggnca

SEQ ID NO: 443986 - DNA, 445 bp, Triticum aestivum
cgggacagctgcaagaagagtaagaatggaatggaatgaacgaaggggaacacgatcttgagagagcacacttacaacaaatactataacggagttgttggaaaaccaacaacgaaaagaataagcttgatatggtcttatggaatacatctcaaataatgaggtgacaacctgccactcacagaaaaagattgtgttgataagaataaggagacgagaaacttattcaccggaaggataaaacaagaacttggatcatttataaccaccataaatagcaaaatccttagggaaagctttaggtgaaatataacccaagataactccaacgaagaggttgatggatttaaaatttctcattcttaacaacatgtgaatcatgaaacatgagctcaaattatcaataatgacataataccacctccaatgatacggtagaaagaat

SEQ ID NO: 443987 - DNA, 79 bp, Triticum aestivum
ggccacgggcctgcaacaaacagatccatacgtatcttgcaaatctctatgtctcccacctggacttggtcccggatcc

SEQ ID NO: 443988 - DNA, 433 bp, Triticum aestivum
tttccggtattgtaccgggatgcttctaaaaggttccggaggatttaggagggtccggaggtccggaaaatgttccaccacgatcaatacagcagaatgggctgtaggggggtgccctagccttaatgggccaggggcaccagccccgccaaggcccatgcccatgggagaggggaaaccctaaaggggagggcctccacttgactttggaggcactcctcccccctttggccgccgccccaaccctagatgggatctaaggggccggtccccctctctcccacctataattagtggaggcgtgggagggcagccgcaccaaagttctggcacagccctccccctctcccaagtcctcctcctctcccgcggtgcttggcgaagccctgcaggattgccacgctcctccatcaccaccacgccgttgtgctgc

SEQ ID NO: 443989 - DNA, 428 bp, Triticum aestivum
caacatatgtgcagcaaggaacatgacactgaaataacagttcaacagacaaaaactatcaaacactaatgccccctttgcaagaacaagggaaacactgaaaccaaagcaaaagatctgggtccgatttgcaaaactcgtaacaaagaagaaccaaaaataagttttcattacactgatgtttaagatagtttcccacattaatcataaaatctgcaggattgataagacagttattacaactgcacctacagttgcattatgcgcaacaacggaaccgtcacagcaatgttacccctcctcgtcgcaagctgcatttcactcagacctcaaacatgacgccaaacctggtaacaagaggaatggatatgatggcagcacccagcgcaacgccaaatatacggtgtgagatggagaacgtggcgctc

SEQ ID NO: 443990 - DNA, 440 bp, Triticum aestivum
ttataatagttcgagccaccattgtggtgtaataccctactccattgtgttggtggtggattgcctcttgggctaatgatgaacattacaagggcagaacggcctcctgaggttaaggcgttcttgtgcttggtgagcttgtgtgtgaggtggtctctctcaagctccgatcagtcctctcactccctttttctctctcccttttcactgtggtggctagtcctatttatagaggccctggtcctcttccgaaatatcgagcgggaagggagccaacaatggcgggctaatttgaaggggggtagctagtacaagctatcctgacaaaagtagtattcgcgtgcacaaagttctggtggtgatgttgttttgggctccacgatgacctccgtcttgcagtcctcggtcttggtcttgttgcaccgaaatggcaacctttg

SEQ ID NO: 443991 - DNA, 270 bp, Triticum aestivum
cggggagattgccaacaccatcgcagcctccaacaacaaggtgttcctcgactcgggcgacctgctgcttgggctccagtcgctcaagatgttgaacaacaacaagaaatgagaccgtctctgtcacgcatgttgcggttgccgccagtcttgtctacattggaggaacgaacgcttagtttctagtattcccgatccgaaaacaagaaagacgccctttgctactgtgaattatttgtgcactttttcaagtgaacctgtcagctactg

SEQ ID NO: 443992 - DNA, 446 bp, Triticum aestivum
  unsure (1)..(446): unsure at all n locations
gctgcagtgcaaagctcggtgttccaatggaacttgtcngcggctttcgaaaccaaatttcaaccccccgttgcccaatggaacctctccccggcggtaaccgttgctacttacaaagctcgccgacgggctcgaagttgcagtgcatcgttcagcgctccaatggagctctcactggtggctctcggtgctgcgttgcagcgcttgacgagcctcggagctgcgacgcaaggctcaatgttagtgctacagtgaagctctcgacagcggttctcgaagctgtgatgcagcggccggtggtggctcaagtcttgcgaggcagtgcttgtcggcggcaaccgttgcaaggcgcttcaatggagccctcattggtggctcccggtgctgcgttgcagcgcttgacgagccttggagctgcgaacgcaagctcgatgttagtgctacag

SEQ ID NO: 443993 - DNA, 352 bp, Triticum aestivum
caaactgaatcagacgaccgccgtcatggctcttctggcatcggtgcggtattttttggattaataacttaaataagggagatggcagactacgtaacatcatgaagggacaaaactcgatagagccttatctacattgaagaagacaatatagtttgatgtctgatgttggttccttccccctgtcctaaaattgtatccagatcaaatcagtgattcgtttccctgtccagttttgtatttttctctaagtgattttgatgtcggaagttcaactgtatatgtacgtgaaaaaaactggtgttttgtctcagaaacaatgtatgtgacacacgtgaaacaagcgggcacg

SEQ ID NO: 443994 - DNA, 427 bp, Triticum aestivum
aacgggtgtaggatggcagacagttctctctacaattccaatggcctcaggcaggcgatgagcaggtgccccggctggaccatgctgcagagtgcgccagggttgataagttaagggatcatgttgcctaatctctctaatgatgtggcacatctggcgacttcaaaatgaccacttttttgacagcgcaaccagaggttgcagacactggtggacacgatactcctggaggcaatactctggatgatcgctggtgcaaaggcgctgaggaggcagccacaacatgcttgcccaccagatggtttttgagtagtttagctgtacagctcatttgtttcttttgttctgattttttttctttgagcttttggctgtaagtactaatacaaaatgatgtgcactttaggtacatattccacagaaaatg

SEQ ID NO: 443995 - DNA, 455 bp, Triticum aestivum
  unsure (1)..(455): unsure at all n locations
ggtccactgacaccaaaaacaggtcattcaattggcaaaaaaaaaaaatccaccaacaagggataaggaaatgaccgaccccaaataaggggcaatccacaaagcccaacaaccccaaaaaacctccgaattaggtggttccggcaaccggaattcacccaaaatccaaagccataaaacacaaccaaccaacgcaaaacaacaaggcctcctccctcctttcccctcctcgaaatcgcacgactcaaccgctgccatggacgctggaaaaaacctcagatctgttctgacctctctgtagttcttttgctcacatttcttccttccaaagtccttctcccagtcggcaaacatccactacagaaaaactggaaaagtggatgagttctcatttntcacagatctgtcaagaaggacaaaacggagaaaagaaanaaagggagagaagaacctgc

SEQ ID NO: 443996 - DNA, 227 bp, Triticum aestivum
gggccacgggcgtggcggcagcgtgaggagagcctgtgcccccgaacctggccgccaacctcggcccaggccttggcaaaattcttcccgcatttgcaggcacattaatcaacggtccaaatgatcttcccaatccggtctgcaatccgtattgatgcatgctatctcgcatgatctgcccatgttccattaggctcaaattattggtgtttccagtccccccgatg

SEQ ID NO: 443997 - DNA, 433 bp, Triticum aestivum
gtccacgggccatcatgaatattcattggtgtctctcaaattcatgttggcagatgtgctgcatctacgtcaacgacatgtaatctgcgccctgacatacctgtgccttgctcatgtatgtttgcggattcacatgttactgtctgtacttgtgagaatgatgtttgacgaaagtaacaacttgaacataacatagcccatatgaccaagctgttccaattcgggagctcactctgtattcaattactttctattactaaacatatacttgtatctccaaccaatccgagctgggcttggtgggcttaacctatgcatctgcattggatttataaaagtagtaaatgtacatttagagaacttgacagactaaactcatataacttcacacatggataacgcactattataagtactcaaaagatgaccattc

SEQ ID NO: 443998 - DNA, 262 bp, Triticum aestivum
  unsure (1)..(262): unsure at all n locations
ccacgattcgcattgggcgcgtgacgtgggggtcgtgtgtgggatggcctgaacatgcttgcgtcatcctgtagttgatagtaaagaggcagccagtgcttcccttattattaaaaaagagggattcgcangggcgctacttatttactaagtggacttgggtcgcaacctgcatggcgccacaccccatgatcacggngtggaaaatggtcgccccacctgttctcatgcctctgactcgctcgccacatgtcncgcatgc

SEQ ID NO: 443999 - DNA, 95 bp, Triticum aestivum
atactctagagtgtcaccaaataatgctcctcggaaaatatgtccatctgacacagtatgatatcatagtatgtgggtcttgacttcgtcagtac

SEQ ID NO: 444000 - DNA, 397 bp, Triticum aestivum
ctagtcaaccactcgatgacctattggaatcttcggtattcctccgcattaacgaagggccgtttcccggccaggcatgtacgcactccgaatccggatgagtgtggagccaccaggggctatatattagccccactgtcaaactcctctggctaagtgaaagtgttaaagcattatagtccggttgcctagttcgatgtgctatcacctccttaaaaggaccaagacgttggattaagtgtgaatatgcatcttctgcgaacacccccgcattataggcgtgggggctgaagccgacgacttcaatctttcaggttatatacatgtatacataaacggccgcacaggaggcatcacaatactttcgggcaaaagtataaatacagccttgataaat

SEQ ID NO: 444001 - DNA, 113 bp, Triticum aestivum
acatcatcatcgcccctgccatctaccaccaccgctatccgccacgctccgaatccgtattcatataccaccaccgattcatataccaccaccgaatcatatccatatcatat

SEQ ID NO: 444002 - DNA, 434 bp, Triticum aestivum
  unsure (1)..(434): unsure at all n locations
aaatgaatacgaaaaggatggcttcatattggatgatgcggataaaaacaaggaggaggaggaaaaggaggcaaaacctattgatgataaaagacccaggaagaaaaagaaaagaaagaaaaaaaaaaaaacggaggatttcaaccttgataaggatgactacatgttgctcaaggataataacattaccggcatcactcgtccgaagcctcctgaaaacaagtttaagcggttgaagaaggcaagacgggaatctgaaatggatgggcgttctggcttctctgatcatgacggagcaagaaaaagccggactgctgaggagacagttcgtagctccttgtttggtaatgaagaaccgtttgaggaagattttgtcgaggaagatcagcangtagatgaagatgaagttggtgaagatgatatggatgatgaaa

SEQ ID NO: 444003 - DNA, 448 bp, Triticum aestivum
cgggtccacgggaagaggaagtgtgaagcactctggccaattttccgcatttctcatcaaagaagccgttacatttatgatcttttctataaaaggaaggagatatcaaaggagctgtatgagttctgcctggaccagggttatgcagaccgtaatctgattgcaaagtggaaaaagccgggttacgagcgcctctgctgcctccgctgcatccagacccgagaccacaactttgcgacgacgtgcgtgtgccgggtccccaagcatctgagggaggagcaggtgatcgaatgcgtccactgtggctgcaagggatgtgccggcggcgattaactgactagttatgtgtattcatcatgtgtcgccgaatccatggtggctctaagccaagcactctagatgtttcttaagcgtgttctctggtaaagaacagatcgtcctgtaatgt

SEQ ID NO: 444004 - DNA, 237 bp, Triticum aestivum
gggacaagcattatggtccaaactttttttgtcttgttttgtgggagtaaaagtaggaactgtatatattaattgtccacatggcagagttgtcttgtgggatttgcctcgacatggctcgtcaataatgtaccatgattcttgtgctgtaaaaaaataagaacaaaaaaaaagaaaaaggaagatataaaaaaccggaaaaaaaaaacaagaggatgctaaatcatgaacatggtc

SEQ ID NO: 444005 - DNA, 131 bp, Triticum aestivum
cgggtacatcgaaatctctaccactagatagttcacgctaaatccgatcagcgaacctattatggtatcattgtacttgtgactggccttctacggagcatccactccggtttagatacatacaggatacc

SEQ ID NO: 444006 - DNA, 395 bp, Triticum aestivum
atcatcggactcatcaactattcatatttcacggtcaagatgttcaaaggagtcattgcatcatcttacaatgaaagtcataacttcttcattgatcccattaacccgctgctcctttcatgcttcctgccgcagtgaacgggctctactccatgaggtggttatctcggtggaagatgtgctggtcacggtggatttggtggccgtggtcgattccatagaagacgtgcaccaaagggtcgtggacctcccaagggtgaaaggcgttgtttcagacgacgagacagattcaatgatgtacatctaagttagctgtatgttgatccacgatattctacattatctgttcagctgcaaacattatgctaactcaactgtgatcacgcattcagttc

SEQ ID NO: 444007 - DNA, 318 bp, Triticum aestivum
agcgggcgtcttgaacaaggcggcgctacagcttggagactaatgtcgtatggaatatgtacattggctccggcgggatgcagagggaggatgtcacgctccggacatacgcgccggtggttgttacttctggcggagtctagactacccctacagatgactactagtcttttctgtgcactttgtctccactcgtgcgcaactgtaagcaacttcccattcggtcacacatcttgaaactactctaagctgatcaagcttaactttggagttctatccgaatgggctctcggattatacggaattccttattgatat

SEQ ID NO: 444008 - DNA, 418 bp, Triticum aestivum
tccgggtccacgggtaggatttcgaggatcgcgaaatgcaatgcaataaaatatgatatgcatgaatgatctatgtataacattccaaattgaaaatttgggatgttatatatgattgtgttttttatgttttaattagtgtttttgccaagtaaagcctttaggatcttcttgggtgattgttgtttgatcttgctgaaaaaaatagaaagtatgcgctcacgagaataaattttgtttttttaccagagagcgataaactaccaattccaactgaagtggatcaatatacaaattatttaagtcctcctaaatttttagaaattttggagttacacaagtattccaaacctgcagattgctataaactgttctgtttttgacaaaatctgtttttcctgtgttggttgcctaattt

SEQ ID NO: 444009 - DNA, 124 bp, Triticum aestivum
aaaatgatatgtcgagaaagatgatagaggtgaggaggagtggggcgtggtggtgactggtggtcggactgggctgatgcatggggatggactgcgccggcaacggccaccatgccagattgtt

SEQ ID NO: 444010 - DNA, 381 bp, Triticum aestivum
ttgaaataaatctgcacgcattgatatataacgaattacaagaacaaacctccgacgccccaaaaagtatccaacgggtttgcgaataccgtgctacctgtatcactgaatgttgaatcctcatcatttcgtgctttacatttctttcgcctctctgccctatgtttcggtgtgatacgtcagtggtacggtatatggctgatataggggggatgcttttataatgttgatccgtacgaccacattaaattggttcaatgtaggatctcatgtcttgaacagcctgtaacaatcaacaacatacagatgctacatactgcagtagttggccagattcagtgtcggcacctgttgatataacttaatctgtatccacggttc

SEQ ID NO: 444011 - DNA, 179 bp, Triticum aestivum
ccctcgagtagttttttttgtctttttttttttttattttttttttttttatttttttttttttttttttttttttttttggtttttttttttatttttattatttttaatgacgcctgataatttattttattccagcgcgactgggaagggacacccagtcaaatattcgaaacaac

SEQ ID NO: 444012 - DNA, 428 bp, Triticum aestivum
ccctcgagaaaccatttttgtctttttgatagttgcattgttgcagtaaactcggacaatagcaagagaacaaaattctgataacaattttttaaaaaaaaatctacaactagcaatactgctacaaatctggaccagtttagacctcggaccacaagttacggctaagtgctacagttatcttcggaaccttgtctgttcaaggaagtggcgggttggagccttatagaagcatcaccgcagatggccgtcaagacatcaaactctcctcacgttgtctccatggataaccaccgcgccttcagtcatcagggtgccaagagcaccgcggagttcgtgcatatgaatttccattgagctctgcttcctcagttcctccagcaactcaatcatgcgcatcgaggggcctccaagctgcattttccccg

SEQ ID NO: 444013 - DNA, 149 bp, Triticum aestivum
cacctgggcatccattgtcaagtcagaactggggacatcaaaacgatcgggcacagcagatcgtgggcacacatcacatcttcgcaaggcttggaacaggatgctcaataatcatccaaacgacagagaaccagcagtgacaactttgt

SEQ ID NO: 444014 - DNA, 372 bp, Triticum aestivum
cgagtattttattttgtctttttttttttttaaattaataaatcttatcatatatcatagaatgcacatattaataaatcttatcatatatcatggaatgccagccaaccaaacctttcccatcatgctcaaacacaaacatagcatcatagcactctcaacacaaatgccaaccgcactcggatacaccactgcgtagacctggaattctaagctgggagccatgctacaagaaacgcctacatcagtgctatggctcagcagatggcattgcatcagggctgccaggaatgcttgtatcaatgttggctagtgctgtggctcagcagatggcattgctgcatcagtgctgccaggaatggttgtatcaac

SEQ ID NO: 444015 - DNA, 363 bp, Triticum aestivum
acgttccactatcaaaaaatatataagagaaacatacagaccacgtagctctgaatcacttatatgcgtcttttacttgtttacatcatcatattatccctttggagttcgatatatggtcagttgccaatttttcatatcctaagtcgcttaaggtttcatgataaaaggcatgagagagcacatctgtaataggtgcatgcccaatatactgttttaaattcactatattgtttgtgttactttgtgtccacagcctatttaacaatggggctcttacttaaaagctactgtgatgtctacctatctcttgtctgatacaatcctgctttaaacaagtgccgagattttgcatcgtcacca

SEQ ID NO: 444016 - DNA, 371 bp, Triticum aestivum
atctgcaacccttttgagatttaattgctgcatcgctacaatcgggtcagctacagatagattacactacaccggcagcttacacaccggagcggactcatgcacacaatacaacagcacatcctcgacgatatccgccatctctctcgcattcgagaatggcgcgcgctcgccattgccgtcccccaatcgggattttatctcgctattgctacggtacggccgccgctacccattaggtcgacgtcgccgcgatcgggctggcgaccacgtggtggtcgctggaccagactagccgcccgaacccgttggtgcccgacggcatcccgcccgccgtgaaacccaccgtgtagcgcatcctctcgctggac

SEQ ID NO: 444017 - DNA, 422 bp, Triticum aestivum
cccctagagtattttttcttgtcttttttttattttatttttttttttttttttttttttttttttttttttttcagaaaagccggaagacaatagagtttttgaacattaccccgaacaatacacataaaaggatcgagtctccgttacacgaaatcctggaggacgaatgcagctatgcacgcaggcccatggatcttttattttatgagctaaaatggcttcgagccgacccaaggttaccatggagactctacttgttctgcagcaaggacaccgctgccttatcagtgaaccaggtgaattctccatcttgtagcacagccatctcaacaggcagcaggtctgacgaggtttgcttgtctgaaagcgccttctgcaccgctgccgcctttccagctccagtcaccaccatcgcaacg

SEQ ID NO: 444018 - DNA, 199 bp, Triticum aestivum
aagaagatatatacagagcagcgagtgggagaaaaatcatgcaggtcacgcgagcacagagtgtcaccgcctcagtgtttgctatcacagacgtcaggacgtcccccagacgggtaccgtcatcatcgggcctcaagcaccttacaaggaaaggaaacaccaacgggaacagcaccatcatctacgaagaaaacgcagt

SEQ ID NO: 444019 - DNA, 121 bp, Triticum aestivum
gcagtaaactcggacaatagcaagagaacaaaattctgataacaattttttataaaaaaaatctataactagcaatactgctacaaatctggagcagtttagaggtcggaccacatgttac

SEQ ID NO: 444020 - DNA, 195 bp, Triticum aestivum
ccatattttatattgcaccactaacagttcacttcacatatagcatatctgcgacgtataggaacattgagtgatgtcgcacgcacagtactacggcagcacagcatgcttccatagcttggggagagcaacaattgctcatccacccactcattcaacgcgagcgcaggcatcaggtgtcatgtcccggcgact

SEQ ID NO: 444021 - DNA, 154 bp, Triticum aestivum
cacttgcagattactactaccgcctgcaggtgtagcatatcggttgcacagaaatgacgccagtagatccaaacgggaaatcgctgctacaccccgtcggattcacaacgtcaccagcggacgccacacgctgaggaactccagctattgggca

SEQ ID NO: 444022 - DNA, 352 bp, Triticum aestivum
atgcctggcctagcaattctctgaaaagctttattacatgttcatcgagtcgtaactcgtaacaccgtgtcgcaccagcaagcggagcgcccatacaaggtgaataacgtatggtcgccagatgaggttttcagagcctaagaccaggaccttttctgagcctagaaacatccagaggtacatgctcgaaatgtcatgagcagcatgtgtgttttgttacattgtaaaatcaagcctctgggagcttgaagatggctccgaaaggtttccagaactccacctcttcagcatctccagagcagccttcggttgatccataggtaccatgtgaccaacatcgtgaaccttcaag

SEQ ID NO: 444023 - DNA, 369 bp, Triticum aestivum
tgcccggccccccctagagtattttgttttttttttttcactcctcaaccccaataagggactcgtcacattatattgtgcaaacatgtctgtgtccgttctgatcataagatacaggcaaagactgtcatcaccggcaaattcagtgccagagcggcaggctaaccaatcagatgtgttcccagccaggaccgctaactggcatgtcaccagtcatcgcatcacatgcgtctcgtttcaccatatccggaggtgcgcaacctcgggaatctacgtggtggatccgtcgagcaacgggggatgatcgtcttgctgcgataaccttcccggggacgggtctagaggatgccctgcgactgctgaggcctg

SEQ ID NO: 444024 - DNA, 124 bp, Triticum aestivum
ccctagagtattttttcttttctttttgaacgaaaacttctatctttatttctcaaatcacatacaagcaagcaaacgggctgaaacaccaatgccgccgcgcgacacatacgggcacacgaac

SEQ ID NO: 444025 - DNA, 217 bp, Triticum aestivum
ctcgtgtgctgaatcgctcgcgcatagctggatccatccgagcgggctcgcgggcgcagcgcgaggctatagcgagcgagagagcgatagcgcggtgcgcgggcgtggctcgctcagcgcgcgaatgcgctcgtcgcacggatgcaggggagagaaggttcgcttggtcggttgatcgataaatcgaaggaaatccggatgagcgatgaatgcgccg

SEQ ID NO: 444026 - DNA, 303 bp, Triticum aestivum
cctcgagtattatttttgttctttagggtagacaaaaaattcaaggtacagtaattaatatagtagtagcagtatgtgtgtaaatgtacattcaatcgttgtttgcattctcatgtatggatccagatgccgatgcttcacggtatgcaaccataggaggaaccaatttccaaaaagaaaaaaaaaacatggaccaaaaatccctctacaccctagcagctgttccttgtgactgacatctttcttcacacgatctcactgcactgtgggcagcttgctatcggtaattaatatccatatccc

SEQ ID NO: 444027 - DNA, 316 bp, Triticum aestivum
ccctcgagtatttatttttgtcttttttttttttttaacttgcttgctatacaaaaggaacttctacagttgagccacactatccactagctcgaaccaccgttacttcgacttgaaagagcagaccacgacagcggcggcagccaggagcaaggctgcaagaggggcatcagccttcctgatgagttcccccagcgaacctagcgaggctggtggatcacgcggggagcgttgctcttggggctgccggcgtacttggtcggcttctcggcgttcctgggtttctcccggaacccccgcggggcgtcgccgccgc

SEQ ID NO: 444028 - DNA, 409 bp, Triticum aestivum
ccctcgagtatttatttttgtctttttaaaacaaacatctattgtgatctgagatttaaaacaggcatcatagatgcttggggtaagtacagactgcaggctaaacatcccaatccaacaacggtcgagtgccgatgaagcgaagaaactacaaactaaactgcctcactccagggacgggacgacacttgcaaggaaactactcagagaagacggcactaatctactgcatctagaaagtccttcgagaaagcccggttaggccgacaacgacgaagatttttttccctgactgcaaacacttggacagagtttcatccgtcatacatcactcgtcaccctcctcgtcctcgtcgttcacctcggacttggacttgtcggaatcaccagacgccgtggggtctcctcg

SEQ ID NO: 444029 - DNA, 80 bp, Triticum aestivum
tttatttctcaaatcacatacaagcaagcagacgggctgacacaccaatgccgccgcgctacacatacgggcacaccaac

SEQ ID NO: 444030 - DNA, 407 bp, Triticum aestivum
ccccacgagtatttttttttgtcttttgggaaggacagtgacctctctctctatattggaagtatagaacaaggtgccaaacccattgtcgtcactccaaaccacccaagcacaacaggtggtcgcaaattacacgcgccattaatgcgcagcttggaccagcgggtttcaggtcaaggccaaactgaggaaaagatggcgtccggtccccgacagcgacgcaccccgccgccagaaaacaaatgcagtactgcccgagctcgaaggaggtttgaacggtgcggttttatttcgacttcctgcttggctgcttgctttactgaacgaagcacgaacccgggccgaccggcggcctccgagcgtagtagttcgtgacaggagccgcggcgaccccacggtggttcagc

SEQ ID NO: 444031 - DNA, 279 bp, Triticum aestivum
  unsure (1)..(279): unsure at all n locations
aacacangcaaacatacagccgcggttgagcaagcaccattacggacccatcacgatcacacagttgctacagacagcaagataaccgacatagaagccagcaggcagcagcacctaacgacagccagagacgtgaccacaggagagaatcttggagacggcggcggcgcagacgatgccgaggggaacctggtgacggccatggtgccctccgacactgggtacgcggagagctcccccggaaggagcaggcgcacagaggtccggatctcacagccg

SEQ ID NO: 444032 - DNA, 400 bp, Triticum aestivum
tcgagtattttattttgtctttgtcaatgtgcaaatatctgcgtgcgcagaacagcaaatggcagctaaagctgaaagaaaacaagtgctcacaagtacacatcataggagaggtcacggaggggttatgcttactaggcagacggctagcatacgcaattgaggacaaaggattactggaaagctttcccgaattgcggcatcactttagagcatcgccgaggcccgcaagcattcccaggctctgcgccaactcagccaacctcactttcaaggcctggacgctccgtcggtgtacatccgtgtaggcatcgttgaccaaacccgaaagtctttcagcacataacaccatcgcagcttctgtgagttcaagactcacaggttgctggtatccaaaaag

SEQ ID NO: 444033 - DNA, 100 bp, Triticum aestivum
ccctctctctatctctctcgctctctctctctctctatctctctctctctctctctccgtgtcgaactcctggaggaaggcggatacactaggggatgaa

SEQ ID NO: 444034 - DNA, 338 bp, Triticum aestivum
cctcgagtagcttatgtagtccagtcaggactctaaaggaagtcgtatcagttagcgtggcgacaccaggaaaccttcattgtccgcaaatggagaacttggatccaatttgaattgggaagcatgattcgagcttgccctagcttgattactggtgaacggtgatctcccctggctggttgattctgggagaaacactagctgtgtcggggtggagcaacactagttggcggttgcaacaggtgctctcactgcactggtatcgtgcttgtctgacataccgtactatttgcatggcatgctggtgatggtatttgtgcaattactgcattatgttc

SEQ ID NO: 444035 - DNA, 403 bp, Triticum aestivum
ccccctcgagtatttttttttgttcttactcagtaacaagggtaccaatatgatagatactactgctccatttaagtttcaacctcagacagatctaaatgagatacaatttgagtaaccaacatctaaatgcttgataggttggcggataaagcaaatcggggcaagcaattacgccttctggttgtagacataggtgaggccgcacttgccgcagtagtggcggtcgaagtggttggccatgaagacgcccgcgccgcactctgtgttggggcactccttgcggaggcgggtcaccttgccagtggcgtcgtccaccttatagaactgcagcacggagagcttcaccttcttgtgcttgtgcttgatcttcttgggcttggtgtacgtcttcttcttacgc

SEQ ID NO: 444036 - DNA, 303 bp, Triticum aestivum
atgcaagattcacggttgagatatttcagtacagtcctcaggacacagatatttactacggcgactttcaatataaagtcaatcctaagggggcgtctcaccgtgcaggtactggaacgcacagtcaaactacagtacacatgcatataacttgcaagcactacagatctggtcgaaaaactaatgcatgctttaaacaccatatctcgccagttatatacacacaccacaccagctagttgttgcactgcaatcctgcactgcacccacagtcatgacgcatcaaccgtacatcgacatcac

SEQ ID NO: 444037 - DNA, 389 bp, Triticum aestivum
acaactagtctcgagtattttttttttttttttttagtgccatcaccatatattcgatatataaaacgttaccacaatttgctttctgtacttaatagagcgacattagcacatagcagatctacaaagcggtaaaggactccaacacttgtgcaagctcaactgcagatatttcttgaagtttcaacctactaccaaagaattaatggaactatgcctcgcggtatgtacatcgctgcagatagaaaccataaaaactgggtttcaacgtcagaactcatttccttctcttcccacttcctatatttgctcacttgaaaaagaacttccatatcgccctgtcacacacctcagtcaagaagtggccaccaaggacaccttcctcttcc

SEQ ID NO: 444038 - DNA, 217 bp, Triticum aestivum
acaattaaccctaagaattaacccaagcggaagcatttcaatacattcactcagagagatagacatacatttatcactacatagatgacatgtttccttaacaggaagatgtcgatgagcaactgagcatcacgacgagatgaaacacaggacaacttttcatttcgagtacattattagtatcgggctcctagcatcgacgcgtttacttcgtgcc

SEQ ID NO: 444039 - DNA, 396 bp, Triticum aestivum
tttggctgcataaacatacagctggttcgtctgaacatttacatacaacccaaaaggtcacatcgcttcccggaaagagaaacaatataaacaagagcaggaaaacccaaaaggtcggttcggttctttgatgatcccttctaagagaaagtagggaaaagaagaggaagaaaccacgaataaagatgatacaagctcagaagacgttttcttcttcacagcacaccaacatcactgcaaggaagtgtctaagaggtaaacactggacactcagttaccgtcctcttctggccagtaggtgctgttagagatgaacagaggtcagatgtcttcagaacgctcaacctcttcaccgaagaaacaaacatcccccagagggacatcgccaaacagcaa

SEQ ID NO: 444040 - DNA, 308 bp, Triticum aestivum
cctcgagtagttttttttgtctttttgatcaaacgatggaattaaactcgctgaaccataagcatgtcatacaagcaaatgcagagttccagtgatgttcagaacaaacgttcataagtgttcgatttcagcagcacagattggtttcgcctaagttcatggcatgatatgcggcgtgcgcggcgcataaatctaccatgatcccacagcgccctgggctgggttttcaaagtgagagaagccccagtaggtcttcaaggaatatggtgggtagatggttgatccttcagttgtgatcttggcaatct

SEQ ID NO: 444041 - DNA, 432 bp, Triticum aestivum
gatcggccaacagtgtttcacattgctaccactacagctaaaatctcgataatgatacagttgatccatcttacaacaccagaagaaaacaatcctgaggatacacaaggcaaggatgtacaaacgtaaacagcagtacagcacacattgatagaccttcgaatcgaacgacaaatcctagtgcttgcctgacatgcagcgccagaaaaatagagaagatagagaaataattctgattattccaagttgaagcaactcctgcaacatttggtatccgacaagcacccactcatcacataggctaaactagttcgctacaataagctcatcttcaggattggcattttgaggtagcatcgtcaattcatcgtcagctgcactgaaatgatatttctctccaacaactcccaaaaacctggtaaacttcaaaca

SEQ ID NO: 444042 - DNA, 383 bp, Triticum aestivum
tttaaattaacgaaatgcttacaacagatatggaatcctaatattgttacaaaataatcatgctactcatggaggacaaaaacagtgatgcacagttgtaatttgagcaacagcatcaccatatgtgagtacaagacattaaccacaaatggagaatccatggtagcatcttcacaagttcagaagagcagaagctgcagtataacaggctacaaggatacatatcatttatcactttgctgctccttcaaacaagtgctggatgtgggctacaacatcctctggggtgtatttgatgtacaaatcacgcccagtttcaggagaagactttaacttggcaattaaagaggcgtaaactggcatcactgtctcctccaccgctg

SEQ ID NO: 444043 - DNA, 385 bp, Triticum aestivum
tcgagtacttttttttgttctgttttttttttatttttatttttttttttggcacatctcaataacaaggtgcatgttgaggaaccaggtaacatgaaaaccacctgctgcttccaatttgtttgtgctatcaacagccaaaaatcacgattagcagttggcattttgatgatcataggaaaagctaaaaagcattctaacccgatacaacaattggcatctacatatgctaagcagcataacaatttcactggactaacatccccacaaactaacaccaagcttgtggcaaaagctagttacttgttactgatccccgaacaggcactaacccccaagaaaataaggatttatgccaccaaaatgttatcgccacgtgttggaa

SEQ ID NO: 444044 - DNA, 424 bp, Triticum aestivum
gtactgccccgcctcgagtattttattttgtctttttttttttttttttttttttttttttttggcacatcgcaataagaatgtgcatgttgaagaagcaactaaaacgacaaccagctgctgcttccaatttgtttgtgctatcaacagccaagaatcaagattagcagttggcaatttgattagcataggaaaagctaaaaagcattctaaccctatacatcaattggcatccaactatgctaagcagcagaacaatttcactggcctatcaccctcacaaactaacaccaagcttgtggcaaaagctagttactttgtgctgatgcccgagcaggcaataagccccaacaaaatagggatgtacgccaccaaaatgttatcgccacttgttggagagcttggctccaaacggattgctccc

SEQ ID NO: 444045 - DNA, 385 bp, Triticum aestivum
catatcataacgcttgatcagataggcacagacatgaacataagacaagatttgccatcaacaaactaaatatttctctcatatgtgtcctcacaggatcgcaagagcaacagaaacactgggaatcctttttacatgcatcagacccaaaaacaaagtctgaaagtcttaatgccatcacaagatttttctgcttaaccacctagtgggacttgggacttaacatggaccataaaagaggccatccacaacgaagtcttttaccaaagagccatccctggctccatggaccacaaaagcttggagattttcgggaagccacgactcaaaagcttggagatctccagcatcccaaccttgtccctcccaccaaacaagcttttga

SEQ ID NO: 444046 - DNA, 402 bp, Triticum aestivum
ttgtcttttcaaatcaatcactatcatcatggacagatgtcaagttaggctattacaatgaccacagaacatcattcagcatggcacataagccacgccatgacattcagtattcgacacagtaaggacatcatcagtaactaacggtttcacattattagcaacaaggcaactgcaatcacactggatttacattgtacaggaagcacagaaacctaaatcaggatctaacgagtcacaagcaagcatacaggttcctagtatatgccagcagtagtctctaactgtcaatgccaggtccggtttgcccctgtgtctgcagctgacctggcagttggggctgcagctgcgcttgtgagccccccctgtgattgtagagatgtacctgaggttggggttggg

SEQ ID NO: 444047 - DNA, 368 bp, Triticum aestivum
ttgtcttgtctttttttttatttaatatgattcatgtaaatactcttaacttgggagcccccacgatctaattcgtcatgaaaaggctccaggcacgcatactcgatatagagagataaacactgctggagctggactcatcgttccggctttgtggtggcctagtcttgtgctgtgacattctgcccctcctttgtttgtgatatgccataattttgacgtgagtacagtttcactggcatgttgattctggaactacgactggacatgtgggaaaaactagtatactttggtttgggaccgcaacaggcattaagccccatccgtatacggatgttcgctacctaaatgttctcgccacttgttgc

SEQ ID NO: 444048 - DNA, 451 bp, Triticum aestivum
tttttcttgtcttttcaacttcaccagtatgctacgtgcaagttgaccgcatatcagccagcacatcttcactgcatcatgtaactagaaaggtgcaagtcaccatgaatagtaagtactaaatactgataagatggtgataactgataataggataatgctaaaacgaaggttaaaagtggaatggaactggtgtacataaagtttttgataaccagttcaggtgccaaacagaagtagtattccaaggttgaagcagcaactgaaagacggcactacacaactttagctgagaagaggccaccatcgagcaaatgcgtacacataggatcagagcaagtccattcatcctgagctactcaagatgctttgcaagtgaattgcgcttatgtcgatgggctccgagaaccttgaaattggtcaaatgttgcccctgacggaacatctccca

SEQ ID NO: 444049 - DNA, 281 bp, Triticum aestivum
tttgtttttattgtttttttatctgttatcgtgtcgacactagtaaacgtcattttcgcaaaaagcatggatttactgaaatgggaatagtgaaacaagtgaccttcatgccccaaccagacaaacgctttccagttcatccgacgggatggatcaggctgggaaatgcccaatacagtgtcaccatggagggtttcatctgagcggatgacgggagagctatcccagcacaggtcgacggattgcccaaccaaccgtagtatatgcacgacggggggatg

SEQ ID NO: 444050 - DNA, 405 bp, Triticum aestivum
cctcgagtattatttttgtcttttttttttttttattttttttttataatccaagcacaagcagttgtttacacgattgtatcacatgttaaacctacatcccatcagaaaaagtaacggctaggcccataacatacactccatgcaacgccatcaagtggccaaatacaccagttatcataattaacaaccagcatgatctgacttcaaacttcatgccgtacgaaggggtggagaaaccaatatgacaccatcacctcggacaaaaagaaaggggatagtgcgtttcgtggtgcgcacaatttcttcatatgtttcatcatctatctcaacagttgtcacgacctctcaacatctccaagtatcatgtttaaatgttgatcatacgcatggagcttgccgcgc

SEQ ID NO: 444051 - DNA, 280 bp, Triticum aestivum
ttttgtcttttacctgtaggacgcctgtcacattccctctcctacacattggtcactggacaatcaaccaccaaccactgctggtgctgatgctgcaactgcagcgtaaggaccaacaatgtgctgatacaactgctgatacagcgacgtacaaggtgccgaccagtagttgccgcagacagcaatgctgggactcatgcagggctcccgattcggaagccataaaactccaacctactactacatgtcaggcagacggtgaatggggagataatatcct

SEQ ID NO: 444052 - DNA, 311 bp, Triticum aestivum
attattgatctcggtgacagaatgcagcagtgaacatggaagaagcgtaaactcaacaccatccgctgctgacaatactttcaaattttagtacacgagatatgacacaaatcatgtgggatgcacacgatgggtagcccatgtaaatgaaatgacgattggatttaactgcattgcagttcataagatcctgttcaatggctcccgtgttgatgaacttctcaatggcatggaccgcttcgaaggcgaccgggatggagaaagttatggggccaaccaataggtcgagagatttggcgacgacctcatct

SEQ ID NO: 444053 - DNA, 288 bp, Triticum aestivum
tcgagtattttattttgtcttgttgaactgtcaaagacgaatctttgtttttctttttgcatcttgaacgataaacaaagaagtgtttttttcctcgtcttcatagatagatgctactcatcattccatgcacaggtacgcttcgtagtcgtcgtcgttcgtaatggtcacttcacgtattaattggcgccatatcggtcgtaagggcggaagccgtgggcgagcgcggcgcgccaggacttgtctatcccggtgaacctggcgcagcactcgtgcgcgtcccagcgt

SEQ ID NO: 444054 - DNA, 403 bp, Triticum aestivum
tcgagtattttattttgtcttgtcttttggcagggaaggagaagacttggaagaggggaagaagataggcagtagtgttttctgttctttttttcgatgtcccagtttacagactgaagccatacatatggcacaacgactgggccacactattacagtcaacgaacccactctaggccggacaccttgctattgggcttaagcttcctttttaatcttggctgtagcagcacaccatcttcgcttccagtctctggcgcaggttcacttgtcttggcatccttgtgtgtgctaacagagtccgataatgtgatcttgattcccaacaagacaacaatagaaatgcttaattagaaacggacaatacattatcataaccagcgtccaaaacttggatgcaaca

SEQ ID NO: 444055 - DNA, 415 bp, Triticum aestivum
cccacgagtattttttcttgtcttttttttttgagtatcgaacagcagaataatcagttggaaatacagacagttgactttcaccgctccctcaatattgtcctaataatattaaccaacagcctaagaaatacagtacaaaagagtcacgcctatcatacatcgaatgttctcaatatagacgaagctgctggccagcctacaacaatttcagagtttaacgtgactactgggaagggcaaaatcatctgcgcgatgaaacccagctgcgcccaccagcactggctgtagtcttcgggggaggaaacatgcttatgtcggttggggcagcgggttggtcttcaaccacaaggaccgccctagcatggctctaccatgaacagccatgtatgaagcattcaacttgtcaacatca

SEQ ID NO: 444056 - DNA, 90 bp, Triticum aestivum
aagcgatatggagatgtagatagatatctccaatgaatcattcgagtagtaggggtcatctcaattgtcatcattctctctatggtgcag

SEQ ID NO: 444057 - DNA, 416 bp, Triticum aestivum
ccccacgagtatttttttttgtcttttttttttttttggtgttcatatcttttcgtaattgacatacacaaccattatattggtgaaaaatacatgcagctcctgtcctcaagactcgggcagaggcgcagagcacatccttctaatggtgtatacatatgctttccctgtctatcgtggccatggactttgcaataccatagataccatacgaaaacacgaaacgggagaagcaaggaaacgttacaaatcgtacatgtggatacaacactaaaacaagcgttccacacagctagcacggcactgatcactgtacctgatcccgtggagtgaagcggtgaacggtccgacccacaggacaactgaactgaactgaactgcacaggcggcggcggcaagacagaggaactggtgaa

SEQ ID NO: 444058 - DNA, 311 bp, Triticum aestivum
cctcgagtatttatttttgtcttttttttttttttatttgggcccgtggcaacaatataaactgccactaaaccatatgaaccgccattacactgattgctgcgactaataaggtcacacaaagctaaagatcacacgaagtaatctaccacaccaggattcagagatgaggatccttgtaaccaaagctcactcgcaggaattagttattctgtcaagcagatgagctttgggccttagtgtactcctccatctccttcttgtacgcagccatggcaggcgcggcctttgcattccaggcctgcctctcc

SEQ ID NO: 444059 - DNA, 426 bp, Triticum aestivum
ttgtgtatgggctgccctcgagtatttatttttgtcttttttttgcttcactgaccaagaaacacttttaggtttcagaagcaacattgtcttgtctcacgaaacaatacaatacttgaatcaaacacctacttcttaaattatttacatgccaaggctcagaatgcttatcactttggaacacataaaacgaacgactctctcaccgttcgttcgttcattcattcattcattcattcattcacaggccagcttggtgtcgaagctcgtcagacatatggcgaaggcctggaaggccgacagcgggtaccggtagtccatggtgaacatgtccctcccgaccttgccgaactgcaggatcaccgggtcatggtacgacgacgacgacggcggcggcggcggcggggggccggaggcctgcggctg

SEQ ID NO: 444060 - DNA, 357 bp, Triticum aestivum
aaaaaagtaaacatctttaggcataatgcaaaatcctgacagcgaccacaaaaactgagacaatgtttcaccatagtacgaggcaacaacacatccgttctgaaacacatgtcctttaacaatctaaagcacagtagacagataaacaacgacaataactctaggtggccttgtcagccttggaggctgtggcagcagcttgacccctgagccttccagtcctcctagcggcaatgagaccaaccttccggccagggggagcgtctcggcggacagtacaggcgtcaccgatgtgttggtggttacctcctccgtggggatgctccacagggttcatggccacaccacgcaccttgg

SEQ ID NO: 444061 - DNA, 402 bp, Triticum aestivum
tctttttttttttttttttttttttttttttttttggccaggcaggaggacctctgcgtcctctgtttattgttttgcagcaggaggcccaacatagaacatactcgccagtactcggctgtgcaaaacaggggctagcgctgaagtacaaatgggaaaacgtgattcttttgttttaaataaatacttagaacacgacttggctcctacaagcatctggactctaggtctcagtactggagtgtctcacccatgggccccacgcagggacgccacggttccctcccaccccgtgatcaagacacggaatcggctgccgatggttggatcgcaatgcgccccttttctagagccttccccggccatctacaggcaggaatccgccgggaaaaaagacacctg

SEQ ID NO: 444062 - DNA, 399 bp, Triticum aestivum
gctcgagtatttttttttgttcttgtcttttttgcgaacacaatttagaagttggatagaaattagtacgcagacagcaatcagcaggtatggaacatgtttcacatgatgtttagatttgcaggtatctctcttatttggcggttcacggttcaccgccgagttgatttccgatatcgcccttagctcaccggacactcagttgttgcaagtggcaactacgaaggaggagcagcagaggcagatgcctcagccggagccgcctcgtcatccttgtgcttcaccatgcccgagtcgaccagaatcgggacttccgccgcgagccacggcgcgaggccgaggcacagcgcgtgcgccaggccgaacctcgggcagttcttggcccacagcggcttgaag

SEQ ID NO: 444063 - DNA, 117 bp, Triticum aestivum
gcccacgagtacttttttttgtctttttttagacacaaaacatttcaagcagaatgagatgtccaaattgcactgcttaaatggcaatgatccctaaactataccagccctgaccac

SEQ ID NO: 444064 - DNA, 423 bp, Triticum aestivum
ccccacgagtatttttttttgtctttttttttttttattttttttttttttagattggatgtatacgtacatttacatcgcaaaaaaaaagtatgtacaatttcgagggacgtggcaaaattcatcaatcactcggccaaaaattggtttgtgcaaacatctctgatgatggatactagtctgaaagaatctgttctaactcaggatccccggccaatacatcgtcaaccatttcagcgtcaacaacctctttgtcagcagggacatcttcgtcatcatcaggttcgcccgcctcttcatccgtatgattgggaacagctggctcgccaatgcctttgccttggtcagcaacactattcaatacttgatcatcttgagatttggctctggctactgctttgccatcagtcctttcacaaatgc

SEQ ID NO: 444065 - DNA, 407 bp, Triticum aestivum
ccctcgagtatttatttttgttttttaaagtgaaagaccaatgcagtcaccaatattcaagtaaaagaaggcgctctagtctgagagagacatattaaagtaaaataacaggtactctagtctgagagagtaagacaggcaggcaggccataacaaagattctcagcttcttcaatagaagaaacctagaaccttgcctcctacgctcttccggcgggcctcctcgtggtccatgatgcctgccgaagttgtgaggacgatgtatccgaactgcctggacgggagcagccttgcagtccatccctcaatgtctttcacgccgatatcaaagcgagggctgatgacgccgcacttgttcagcctcccgttgagttcgaccacgatcttgcccgatcggtggtcatcaa

SEQ ID NO: 444066 - DNA, 244 bp, Triticum aestivum
tgccaggaaattggatttgtgaaaacgtctcagatgctggatcatattcagaaggactctgttctaaatccggatccccggccactacatcatcaaccatttcagcatcaacaacctctttgtcatcagggacatcttcttcatcaacaggttcgcccgcctcttcatccatatgattggaaacagctggctcgccaatgcctttgccttggtcaccaacactattcaatacttgatgatcttg

SEQ ID NO: 444067 - DNA, 394 bp, Triticum aestivum
aattggatatccataatactattatagcttagcttgttcatagagactggaggagcatgacggctgatcacacgcgatcaactatcccaagtttttacaggcacagaactaccaccgacactcatgctggagctaccgacgaatctagagctactgacaatattacgattggatcaaaatccatgaaagaggggaatctataggcggaattgagggggggatctcgccagcgacaaggcaggcagactacttcttggccttcctggccacgcccttcctggccggggcggcagcagcagcagccttcttcggggttgccaccttcttaggagccgccgctgcctttcccttcttggcaggagcagccgccttcttgggtggcctggccggggaa

SEQ ID NO: 444068 - DNA, 258 bp, Triticum aestivum
cctcgagtattttttttttgtttttttgcagtatcaacagcggcaggcgcataaattgaatcacataagccaatcttacaaaccaccaatagtacaaattaaagaaactagcgagatgaaagaagtttaaataaacagagagaaagaaggggaagggaacccgggcatagcattctcatcttcaactagcttgtcgtccgtccgtccctagaaacgacgcacggtctcactctcacaacagacagccaaggacggcgc

SEQ ID NO: 444069 - DNA, 242 bp, Triticum aestivum
agttgcgaacaatctgaggatgttaatgtaaaactccattggtgtgtttgcaataatacgaatattgacacaagcatgacagtaaaacgacagcaagcaaccttagttcagggatcagacattcacaatccttgggcgttcgtttcattgttgactcgcctaggataaaactaacacgggaagtttatctcccacaccattccattcatctagaacccctgcttcatcctgtcctcgtacct

SEQ ID NO: 444070 - DNA, 342 bp, Triticum aestivum
attattccaacgtcaccggcaagggcccgctcgagaacctcgctgaccacatcgctgatccagtcaacaacaacgcatgggcctacgccaccaacttcgtccccggcaactaagctcaacggctatgctatgcaacttcattgtctttcggatcggagagggtgtacgtacgtggattgattgatgctgcgagatgcatgtgtgtcttttgtttcacgttgcattgcataggcaagtcgagatgatgagttggcgttgtacactaagatgaaccatgtttgtgcaatagtggtggtttttgtttcctgctggttaaaaaaaaaaaaaaaaaactcgaaacta

SEQ ID NO: 444071 - DNA, 342 bp, Triticum aestivum
tttgtcttgtcttttcaatgcacaaatagtaacatatgagagggtaatagtttattacatcaagacgtccgagacatccacataatcatctacgatatatcaacatgcataaacgaatcgtagctaaactaagccttcacatgcagcccactgggggtttaccgctaatccacacctacaactcatcgtactcatggaacccatgaaaatcatccaacaggacatcatcatctcctgatcagtaattgcattatggagaccacgtggatgtgccaccgcaaggttacgtttttggctcgttgtcatggcatggaaatggcactgatgctcgcgtgacgatgc

SEQ ID NO: 444072 - DNA, 92 bp, Triticum aestivum
tttttagacaaaaaacatttcaagcagaatgagatgtccaaattgcactgcttaaatggcaatgatccctaaactataccagccctgaccac

SEQ ID NO: 444073 - DNA, 370 bp, Triticum aestivum
caccagctagaaaatgtgttcaaataggagtggcagaaaaataacacggtttaccagattatactgtcacaaactgttaccgaacacttaaaacaaagactagatgttccccaaaactgatgacaaagcacagctcctcagtacttgataggggcaagaatctccaactgagaccccaacttctcctcggctgccttctcggccttgacacgcagcttggccaattgcttcttcctctcgtaggcaaccttggccttctccttcctcttctcctcaagttccctgatggtgtcatggtagttccacccgacctccttagagagctcgccgaggaggcagtacttgtgtccaggctgtagcctcagaacct

SEQ ID NO: 444074 - DNA, 412 bp, Triticum aestivum
gttctgtcttttttttttctttttcttttgcaatgcaaataatatcagtaatgaatatacgacaacaatgtatctgtttccgcagacccctccagcgaaaatcgacccactgatatctgcaaaatcccagttccagctttccctcgtacaatatgtgaaaaagaaaacaaaggtaaaagtgggcaagccaaaaacaaccacacccaagcagccccactgtatagaaaaaggactattaccaaactggttatcggccctgacaaaaagtgtcaggtgatatcaaccaggaccacgccctcgacatcaagaccgccctaagccactcccacatgtcttgcctgcttggggctatagaatttactggagcgcacacgtaaaaaacagctgatggaccacaactgaactccaagca

SEQ ID NO: 444075 - DNA, 377 bp, Triticum aestivum
cggagatgacatcccggagcatgagctgccgtatccatttactcaagcaaaatcaagtgtggctcagagcacaccaagagttgttactgaagttgtatttgccgcgccatcaccaagcctggctgaacagccggctgttgcactgtcgcacatgtcgcagtctttcaagaggaggttctcacaaagatcttcaacctactctgcaactgccagcacaaccggtctgccgccgaaggctgagtctactgctccatctccactgggcagggagttgatgctcagttctacttctggtggcatagatcatgagtcccaagtgcaagagaaaagtagcaaggatgttgcactcaggtttggtgttacagaagggactcctg

SEQ ID NO: 444076 - DNA, 152 bp, Triticum aestivum
ggtcgacgggtaatgcccagtgggacggatatatgcctgcatgaaacctatgaggatgatcctcaagttccggacccagtccgtatagttgctaccatcgtctttcaacttggttttctctaggaacgcgttgaaattgaggttgacatgcc

SEQ ID NO: 444077 - DNA, 53 bp, Triticum aestivum
  unsure (1)..(53): unsure at all n locations
ggnnnngaacttttacgctnncggtgncggtccanaaattanagggtcgacgg

SEQ ID NO: 444078 - DNA, 52 bp, Triticum aestivum
cacatgtactgcatgaggaatcagaaagggaggtgatgtgtgaggacgatgg

SEQ ID NO: 444079 - DNA, 375 bp, Triticum aestivum
gaacctgtggtatctgggctagtccttgatgattcttggctttgggatcctgactttgcaactgcttcaaagtatgtgatgagtcctccaatccgggaagcagggcataataaagcacttcaagctgctctttcatcaggaatattacagcttgtgggaactgatcattgcaccttcaattccactcagaaagctttcggttctgatgatttcaggaagattcccaatggcgtaaatggtattgaagaaaggatgcatataatttgggatagcatggtggagaccggcaagatcacagtcaccgattatgtgagagtgacaagcacagaatgtgccaagatcttcaacatataccctcgcaaaggagcaatcctc

SEQ ID NO: 444080 - DNA, 399 bp, Triticum aestivum
attgctccactccatctcctctgtctccctcgatccgcgccgcagctgcccccaccgccctccgcctccaccgaagcagcgccgccaaccgacgccctccctctcttctccgtccgtccatccctcgtcgagccaagctgggagtgctggggggatctcggggatgttaatcggcgaccaatcttcggctgaatcaagatagaaacaggttttgatactgaagtctgggggagtagtatactctgtttgagtataccatttagttttggaataaaccacttctccacatggcgggggctgaatccgcactacccgcagttgatcatgtggtgttggataacagcgatactgaagtctcagaggtcgtggaatgcgattccacagttgtagaagtgctgg

SEQ ID NO: 444081 - DNA, 401 bp, Triticum aestivum
cttcacaaagcagagtggattccgatcataaaaagtatgctctgcagaaaagccttagacctcccgatggcatccttgaagatcttttcacggagccagatcttgaattcagcagattctcattcgtgttctcctccatgacacccgacgatccacagtctatgggcttgctcaggattacacttgagaatccccatttggaaggggaccaaaaggatcaggagcctgcagccgagaaggaggctcaccagaaagctttccacttatatgccgccatctctcgagagcaggccaatcagctgcaactggcaggcgacgacgatcgaggtaggttagagttgctatgcaaggatcttactgtaaagctgatggggtacgacagtacatgtgatacaggcaac

SEQ ID NO: 444082 - DNA, 373 bp, Triticum aestivum
cggggacagcgaaaagtagaatgggatggaagtggagcctgcggcgttcgcatctgggtgaggatgaaatgaagatgcaaaggagaaggggccgacgaggaggacgaggacgaggatgaggacgacgaagaagacgactccgacgacgaagaagacgaggattcggaggatgaaggggacgaggacgaggacgaagactccgacgaggagggctacgacgacgacgacgaagacgaagacgaggactccgatgaagaccatgaccacgaggaggacgaggacgacgaagacgacgactaggacgacgacgagtataatgggatggaagtggagcctgcggcgttcgcatctgggtgaggattaaatgaagatg

SEQ ID NO: 444083 - DNA, 125 bp, Triticum aestivum
tctccctaactcgagcccttctccacctccagccaccgccgcgaccaggcatacgtgtcggctcgtcagcatcacctccactatcaccttacgcttccagtaaatccatcagccaacccacgatt

SEQ ID NO: 444084 - DNA, 218 bp, Triticum aestivum
cggtccacgggggtgccccatgcctcctacgctcgcgccaccgactgcccgagccaacgccccgagccctctttctctgtaaataatttgtagaagtattttgtaatttgatctctgtaaataagttgtagaagtattttgtaagttgatctataaagaaattgttgatgttcagatctgtaagttttttgcgtgataatgttgtagtaggattttac

SEQ ID NO: 444085 - DNA, 336 bp, Triticum aestivum
cgggtcgacgggacctacaaaggtgggttcattgatctacaaacccactcgattaagtttaacaattcagatgacgagtaatcgcgtcatttgttcgagccgtgcgacatttcccattcttgccctcgttactcggtcagtcttgctgaacggaagaagtgaaggcatgcctgctttgcagagaagaagcaaaaacattgaattgttgtatcctgccctttttgttatgctgcatgctctgttaagtcatcagaattttgtaatggactcggtgagacgtacattttggctatcccaatgggaaatgaaatattactacatagtaagtatcgtttt

SEQ ID NO: 444086 - DNA, 182 bp, Triticum aestivum
cggtccactgggactactaaaagtagaatgggatggaagtggagcctgcggcgttcgcatctcgttgaggatgaaatgaacatgcaaaggataatgtgccgactaggacgacacgacatgataagactacacaagttactctacaccaaaaacttgattccaagattaagggacaagacaag

SEQ ID NO: 444087 - DNA, 374 bp, Triticum aestivum
cgacgggaggcagcgactacatcgcgtcggcgctcgtcaagatgctgctggagaaggggtacgccgtgaagaccaccgtcaggaaccccgatgacggggagaagaacgcgcctctcaagaccctggcggcgctggggcccttggaggtcttccgcgcagacctgaacgaagagggcagcttcgacgacgccgtcgctggctgcgagtacgccttcctcgtcgccgctccggtggccctcatgccaaagataccccgaggaacaagtgatacatccagcgatccaaggaaccctgaacgtgatgaggtcctgcgtgaaggctgtgactgtgaagcgcgtggtcctcacatcatccacggcggcgatctccagccg

SEQ ID NO: 444088 - DNA, 411 bp, Triticum aestivum
attatttatgggactaacctattaacgggaggcccagcccagaattgttgtttttttgcctatttcagtgtttcgaagaaacggaatatcaaacggagtccaaacagaataaaatcttcaggaacgtgattttctcatcgaacgtgatccaggagacttggaccctactccaagtaaaaaaagaggcggtcacgagggtgggggcgccccctagggcacgccccctgcctcgtgggcccctcgttgctcctccggcgtacttcttcctcctatatatacacacgtacacccaaacgattagaacaggagccatatatctaattccaccgccgcaactttctgtatccacgggatcgcatcttggggcctgttccggagctccgctggaagagggccgtcatcacggaggga

SEQ ID NO: 444089 - DNA, 366 bp, Triticum aestivum
agctatcaatcgttgttcaagccgatcatgggtaaggttatggagattttccgccctggtgcggtggtgctacagtgtggagcagattccttatcgggtgaccggttgggctgcttcaacctatccattaaggggcacgcggagtgcgtgagattcatgaggtccttcaatgttccggtgttgctgcttggtggtggtggttataccataagaaacgttgcacgatgttggtgctatgagacaggagttgcacttggtcatgagctaactgacaggatgccgttaaatgagtattatgagtattttggcccagattatactcgtcatgttgcaccatgtaatatggagatcaccttcacacacagg

SEQ ID NO: 444090 - DNA, 423 bp, Triticum aestivum
ggtacggctgataacaagacgccatttttccacttcgtgatctttccgatccttgaagtactcggctgcgtcagcagcactggcagccaaatccacgtaggcgttcgcagaactccatagccggtccagatgcgcatacttcggatccccgaacttcgtccgcaacaagaagggcttcccagacacgatatctgcaacttgattcagctcctcctttatcgctctaattttggagcgggcttacttggcagccacccgggccttctccaggtccgtcaccttcgcccgattttcctcttcaagaagccgttaacggtcaggagcatcttttaactccacggccatcttggcaactttttccttgctctcgcaatgtgcggcctgttcggcccttaactcttcagccgcctgtaaaacgggcgc

SEQ ID NO: 444091 - DNA, 82 bp, Triticum aestivum
  unsure (1)..(82): unsure at all n locations
ggtnngcaactggtacgctgcangtnccgngtccncgaattaangggtcnacgggcacggctgaaagaaaacgacagaagtc

SEQ ID NO: 444092 - DNA, 429 bp, Triticum aestivum
tcgacggggcccctgcagtgtgcaattggcaggaatcctgttagtttgattttcaaaccctttgagagcgatccgtcagagttaaccttctctttttacacctgcttagttaaaaacagactttcattaatattagttgcacaaacgagagtacatcacacggcttaaactcgatcattacaaaagtacgccatcagcaacaccctagctgcgcctacaccattacatacttggctgctaacctatgatacaaatgtcataatacaccctagcaccttgattcagatttgctatcttttctgcggctgctatttcttgctccgatttagggatctattgaggaacagtgtgcaactaggatttgtttcttcgatttggggatggattattatagactgagccgccaccaattgaagagttataatgaaa

SEQ ID NO: 444093 - DNA, 269 bp, Triticum aestivum
tgtgtgagcaaggcatgtacattagtatcgatttcgcgagtgaggatcctatgatgttgggcatcctcacatggctggaagacttggatgctcttatgagacaagcatctgatttcggaaaatttcggcctgtctaccatcacaggtcgatgggccatcatattacgtttacgaggatgaagtcctactttgatgcaggcaaccttcttcatgcctcctgtaaccagaatggcttctgcattaacgcagcttaacttgctaatctacaa

SEQ ID NO: 444094 - DNA, 84 bp, Triticum aestivum
gtcaagtgtgaatgaggaagtggttttgcaatggagaagatcagaagagggagaggcgagggacaaaacaaagaagaagattac

SEQ ID NO: 444095 - DNA, 268 bp, Triticum aestivum
cgggtccacgggggtgagggaggtgacgagggcgatgagtactagagcctgcctcctggtgctttcccaaggcatgctgctgcaatcctatgatctgcccgagtggctttatctgttttctgtctgtttgaattgaatgtttgctgtggggtgtttggtttacaacctgttgtgttgtatgaacctgcttcgcaccttggtcaatatgcatgttatccggtttgcctacaccatagatctactgctccgtcaccatttcccagtttcg

SEQ ID NO: 444096 - DNA, 254 bp, Triticum aestivum
agctcggtcaaaaaatgaaggagatgaacacggaggcaccggtgcaggcggaggcggtagcagccaagaactgaacggcgacggcggcacgtcatgatcggttacccagtcataaatttgtgtcagaataacgcattgcattagcatgtcatcaaccatccacacatatgtatcacctgatccatcgatgagagttcagttcgacaacgatgtaatttgcctttttctggttttaatgtgatgaaatttaatgg

SEQ ID NO: 444097 - DNA, 436 bp, Triticum aestivum
tcgacgggcgcagattacttcatggagacgtctgtcaaggagtgtggacatgcctggaagtacctgcagaaggagttggaccttctgtcacttgatcttgatctctctgcttgtcgaaaccaggaggcttggtgacatttaatgggggtagcctctgcataaacacctcctcacaacgtctgatttttgaacatcctccactgctactgacatgagatcttgcttctgcccaatggtacgtacctcagtttggagtactgtcatgtcagatcgaagggattcagtctccttctgattgtcaaggacctcggatctcatagctaggagatcctgaatatcagattcttccatggtgcccttgctgcgacccatcgtgaaggaaactgggcagagatttgcttggttgttacctaacacagatgccgctggaaagtga

SEQ ID NO: 444098 - DNA, 373 bp, Triticum aestivum
gaaacccggtatcttgcgtcctggttcggtcagataaggaaggacgaagagaagttcagggcagccatcgacccgaccctggagctcaccgacgagattttcgagagcatctcggtggtcgcggagctggccggccactgcacctcccgggagccctcgcagcggccggacatgggccacgccgtgacggtgctcgtgcccatggtggagaagtggaagccgtccaacaacgaggccgaggactacatgggcatcgccctgcacctgccgctgctccagatggtgaaggggtggcaggagtcggaggcgagcatgacggacgggagcatcatgagcctgagcctggaagacagcaagggcagcatccccgccc

SEQ ID NO: 444099 - DNA, 85 bp, Triticum aestivum
  unsure (1)..(85): unsure at all n locations
cgggtcacgcggagtgattacggaaaccgggtgtcccacatgtcggtggcatggcttacggcgaatgtgcaaggaccaaaannna

SEQ ID NO: 444100 - DNA, 384 bp, Triticum aestivum
aggtccagaccagaagccatggccgctggtgcgtgtgtgctattcctgccgctggtgcgtgtgtgctgttcctgccgcttcctgccgctggtgaatgcgggttgttcctgctatgggaaaaggcccgttggggcgatggagagagggcgttcgcgctgttgggagcgatgcttggtgttcgggctggggctcctctcgtcccgaactaattcgttcgatcgatgcccagattccttccgaacgaatcgttcggtgtggggaggtcccagaccgaacgttcggccgttatcggcgtccttaataagaattaaacaagaagcaaaccgtcatccgcctgcttcgaggattggtcgtgtctagccgcgtcttcccactcgcttgctg

SEQ ID NO: 444101 - DNA, 373 bp, Triticum aestivum
ggtttaaacattgagagatttctccatgtgagttgtatgtaatggcttacgcccggctttcgactaattagcagttcaactctctccttctgagtaaaactatgatgcaaatcatttgcttccgtatgatcgggaggctcgtcgccagggtcgccctccagagcgacgatgtcgagctcgtcgccgtcaacgacccctttatcaccacctagtagatgacctatatgttcacgtacgacacagttcacagccattggaagcagactgacatcttccttacagaggacatgattttacactttggtgagaggcaaattactgtcttcagcatcatgaaccctgaggagatcacgtcccgttaggcaggtgccga

SEQ ID NO: 444102 - DNA, 411 bp, Triticum aestivum
cgggtcacgggaatggttgcaatacaccaccacatggggcaacgttcaacacgtataacgcaaaaagtcgggactccgaattacgaattctgggagcatcctagataattatgtcatcaaaatggcgtaacaaaaggactgtcttggacgcacagactagatactcagtaagctcctatatgcaatccattcccatcatgagataaatgctccaggacttcactacgatgggagagacacggaaatcaagtcccccagattctacagatacgtcgtgtcaactcagggaggttcgacattggcccacacgggtgtgcactaatatataagcgtacatgtcatcacttttaatgccatgcattattgcaaaatcttctgacatgaatgaatgcgatgcgcctgtctcaaaga

SEQ ID NO: 444103 - DNA, 379 bp, Triticum aestivum
  unsure (1)..(379): unsure at all n locations
gggtccagcgcggtgttgccatgaacagaataggaaaatgaatattttcgaattattttgaactaggcaaggaatgtttttgacacatttgatgaagatatgatccanaacatttatgagaattttttgggaatttttggaaaaacagaaatataggttgcctcaaaacctagggcaaaaactgccacatggacatgacacataggcanaactgatgagatggcgcctagtcatcacaacccaccacaatcctacaagctatgaccatctatattggtcattaacaactagaaataaggcagcggactaagactgtttgctttgtgaccatttcgtgtaaggaaattacggcctttctgaccaaaatggtcccaatggt

SEQ ID NO: 444104 - DNA, 339 bp, Triticum aestivum
cgggtccacgcgggcggccgaagcaacaactgcagtagtggcggcgcctacccccgcgcgactcctcctcgtctccgcccgccgcgctgctccgcgattcgctaggtcattgtagagcatctccgttcgcaaggtcacctaggagcgcctgctacgcttccaccaccatgggagacgagacctccacttctgcctcaggctcggcccaggaacctgcagcaccggccctgcagggagctgggagtgtcaagcagcagatctccaacttggtggctctgtcactccgtgcgacagtgcctgaagtggatgtagaaccgatagttgaagtttgcacgggaa

SEQ ID NO: 444105 - DNA, 401 bp, Triticum aestivum
  unsure (1)..(401): unsure at all n locations
gaccacttacctttgtatcgttcgttgttgactttggatcttctatctcctatcgtgtttcgaggatctagtacttgtgaaatcattcttgttggtttgagtgttctctcgtgttccccttttattttttccctcgtttccctcctcgtgttcatcgcggaatccgctcctttcgtgaaagatcggccgattagggttcctaccctacatcatcttggtatcaagagccacgttgatcacgatttcggagcctccccgttgatgaggacttcaataccattgttacacccacaacccctgctgctatacatattggaccaattactagagctcgcgcacgccaactgaattatcaggtacttccgtntcttggtaatgattctaatgttcatgagaatatg

SEQ ID NO: 444106 - DNA, 400 bp, Triticum aestivum
cgggcatgctcaagatcaaaagaggatagggcggcaactatcctcaccgaaggaacccacaagacccccggcaggatccttgccggggaagcccgcacaccgtggaaagacccttgccgggccacccggcaagaccctcgccaagcgcaccggcagggccactgccaggcccgagccaaccaagtctttgctgccgttcgcatgcagctgccaccccagacagctgggcaggcacctgcgtggcaacatgcaaccttcatggaggctccaccactgcgccacctcagctgcctgcctgccaacagggcaccgcatgcagcgctggccagggcgtgtgtcgaaacgagaacgggcggagacggacgggacagggctcgcacacgtcccccaggccgcgaga

SEQ ID NO: 444107 - DNA, 408 bp, Triticum aestivum
  unsure (1)..(408): unsure at all n locations
ccgggtccacgggtgacgtcaacaaacgccggccagcctcggcacagctgcgggtggttatatggtgggcggagtacacgagtgggttccgatgtcaggataaccaccgtccatagctctcatgtgaatgtggcaaggccacaaaacaagttttccatcgccagatatccaacagatcaactggtgttatggatgcttcttaaagatatttttttgtcatttcanacatcaaacaccaactattcacaatggagacaggaaacgtgtagcttctcatgtcaactaagtgagcctgccaattgtggcaatggaaggaggtggcatgtcgcctcattcatgaggctgttagtttcataacagacattttccagttgcatatcttttgtaaagtgttcagactggtttttt

SEQ ID NO: 444108 - DNA, 395 bp, Triticum aestivum
gagccggaatccattgcaatgcttcacaagatcgctgggagggtgtccagccaactgaagacagaggagggcgcagaggtagtcgcggaacaggcctgctacctcccgtgcaccaatgacgggctgccggtcatcggggagatgcctggggtgaagggatgctacgttgcaaccgggcacagctgctggggcatcctcaatgctcctgctaccggtgcagcactcgccgagctcatccttgatgggcaggccaagattgttgatcttgtgcccttcagcccggcaagatttctcaagaagaagagcaggcgcggagtgtaatggcatgcgcggtttgtttcgatctgatgttccaaacttggcaaccgaataaaaagctatcctctcttgcctgt

SEQ ID NO: 444109 - DNA, 420 bp, Triticum aestivum
  unsure (1)..(420): unsure at all n locations
gacccgaaagagttcccggcgtcaggtgttatcagactcatcgtccgatgactctaangcgaactcctgccgcgaagacgaggaagagaaaaaagaggcttctcccccagcggggggagagaagaaaagaaaggcctccccaactggggaggccggagggtccaagaagggaaggacccttcctccggactactccaccaacaccgacgacagtgaagaggagtggccaccgagggctaagcccctggcgacatcgtaagtgtccagataccagaataattcatggcgttttgtttgtcgcatagaatcttctaacgccgaatacaaccctgcagcccgcccaaggacgggctcgacatttcaacgagcggctccctggctccatcggacgttaatagcacttcacttctgggcgcctcc

SEQ ID NO: 444110 - DNA, 398 bp, Triticum aestivum
  unsure (1)..(398): unsure at all n locations
cggtcgaccatccgggtcgactcttaggcgatactcagccagtcccctgggaacacctggcatgtcagcgggcttccatgcaaaaatgtcncagttctcacggaggaactggatgagcgcttcttcctattttaggtcgagtgttgtggagatgcgggtcggagctgcatcggggtcggtcgggtgaatgtgaacaggtttcgtctcgccggacgactggaatgcagactctgtggcgggtttcttcgatcgcagcaagtcactcggatctgcgttttgcttgtattcttcgaactcgaccgctgtcacctgggaatcggcaatcttggggcccttctgatagcactcttctgcctttttccgatcaccggggacagtgattactcctttggggccgg

SEQ ID NO: 444111 - DNA, 391 bp, Triticum aestivum
  unsure (1)..(391): unsure at all n locations
cgggtccaggcggctgccaaaaagcggaggcggggcgagctagaaccgcaagtgactccagcaggcctagacttaatcagcagcctccccgatgatatgttgagagtcatcatctccctcctcccagtcaaatatggggcgcgaaccgtcctttcccggcggtggtgccccctatggaactccagccctctcgacctcatcgacacccacgagctctgccatggctatcgcaaaatcttggatgcgttctccaagatcctcgacagtcaccttggtgataacccacaagtataggggatcgcaaccgttttcgagggtagagtattcaacccanatttattgattcgacacaaggggagacaaagaatattctcaagtattagcagttgag

SEQ ID NO: 444112 - DNA, 380 bp, Triticum aestivum
aaccacatagaactgtttaatgatgcggccgtgaaggactggaggttcaagagatatgcgacgtgcagcaccttgaggttgtaccggaggaggaggaggcttgaatgtgggctgacgagttccaggcttgggtgtactggtgcgaacagcaacataagcgggttcctcaatttcttccaattcatcctcgtaatcggattcttccatcgaagaggcgctagtggagctgcgagggtgagcgacacgcttccgaggacgagcgcgctcctgcgaatcatcggacccaccacgacgagatggacgagagcccccagcggtgacctgcttgcgagcagagcgcctttgtccatggcattgctacctagggaaggagaagactc

SEQ ID NO: 444113 - DNA, 388 bp, Triticum aestivum
gtcgacgggaaatcttcaaaaaagaaggacttcaagttctagacggcgccgttttgttactgttgctcttccgcttcccaggaggaggatgtttccatttcttcctgtagcctgtactatactctaaatcaagctgtgtatgtatacttagcctctggcaaatgttgaagtgctggatgaaaaaagaaatgaagctctgtagtccatgcatgagaacaagttatgatattaaatgtaactgctagcattattttattgctgttatgaagagtgatgctaagtttgctaaaaaaaaaataaaaaaaaatggaaagcaaaaatagaaaaggagataaaaaaggcatggaaaatttatttccaattagaaagatgtattaggaaaaggggt

SEQ ID NO: 444114 - DNA, 356 bp, Triticum aestivum
cgggcttgagatagacccaagaagccgtacttatcattcgtgatgcatagggttctcctgtccagactgccgtcgtcacgcatgaggagaacgctaatgtgcaggaccttgtcctcctggatgtcatcccaatgtctcttggtcttaaaactgctggaggagtcatgactgtgctcatcatcaggaacaccaccatccccactacgaaggagcaggtcttctcaacctactccgacaaccagcctggtgtgctcagccaggtgtttgagggtgagaggactacgaccagggatatcagcctgctcggcaagttatacctcttctggcatcgcgcctgcacccaagggttttcccca

SEQ ID NO: 444115 - DNA, 419 bp, Triticum aestivum
ggtccacgggctggaggaagggttttccccttcttggacccttcggcctccccagttggggcggccttccttttcttcccttcccccgctagagggggaggggtctattcttcctcctcctcatcttcatgggaggagtgcgtcttggagtcgtcggatgagggatctgacacctccaggtggcaggcactcttccgagtccccgtggccatcttcttgaccttcttctccggcaccacatggggtgccgaaaccagcagcttcgccaaacgagcgtccgctgggccttcgggcaaaggagccggatagttgatctgttcggacgtctcctgccaatcctgtcaaaggtaagggagcttagatcccgcatggagtcaaactatgaaaaactgataccctgaaaaaaaaaagagaaggac

SEQ ID NO: 444116 - DNA, 62 bp, Triticum aestivum
  unsure (1)..(62): unsure at all n locations
gggnngagttctctagttcggtccggtcctcncataacggggccgcncgttgtaaccagtgn

SEQ ID NO: 444117 - DNA, 400 bp, Triticum aestivum
caaaaatcatggttaagaaacatattaagcaaggggaaggacaaacaggtgggatcttctcaattgaagctccacttcatgtttcaaatgtacaagtaattgatccagtcaccgggaaaccatgcaagactacatacaagtatttgccagatgggactaaagtaagggtctctagaggaatgtatgcgtctggtgctgtcatacctcggccagaaattttgaaggagagaaaaaagccgagacccacatctcatggcccaaaggacacaccaattgagcatgtgctggagaagacctatgatgccaaagctggaattggtatgcctgatctatgaggagacgtccactgctgggagtgaaagagagagagagttgggcatatttgtgatctatatccatc

SEQ ID NO: 444118 - DNA, 363 bp, Triticum aestivum
tggacttgactagttgtgcttgcactggtagcaggaactagaggtttttctttattcataactctcctcaattttttttggctttgaagtgaatcatggttgtggacattatgtatgtggagatatctgtgaacatgagttcgatgtggaagttgaacttggaatgtcgggcttgcacgtgaactataccatgtccaatgctacgtttgttattgtttggaaagtaattattgttattacatgacccaaaaaaatttgtgccacatcagtagatgcacggacatcacaacagaaatgctaactggataaacatttgaacctagctactatgaaggaaattctgtattgacaacagttttagat

SEQ ID NO: 444119 - DNA, 383 bp, Triticum aestivum
  unsure (1)..(383): unsure at all n locations
gggtccagacggccaccatagttcaaagggtgggtgctcttggcatggtgatgcagctgccgggggaagatgccgagtttgaactctcgaggaagcagatgctggcgactctggatgtcatgatgggcgggctggtggccgaggagcttatagccggagaaggcggggtcaccactggtccctcaactgatctaagcgaggcgactcagctggcgaccgacatggtcaccaagtatggcatgggcaagcgggtgggctttgttacctatagcaatggcggtgatgctagcagtggcaaggcgaccaacatgagcgagcggatgtcagaactggttgacgangaggtgaaagatttactggacaacgcttacangaacgccaaa

SEQ ID NO: 444120 - DNA, 397 bp, Triticum aestivum
ggggaaagatgtcgagggccgtcagggtccgcggcgacgagctggagacggagcggggagcaagggcgaagaagcgaagcctggcagtggatcgctcgacgagctctagatctcccggcgacctagctgttcggagttcccattcccacccagagatactgttcgcgatcttcgagcccgacgaagctcaatccggagcaacacaaggtcgtgtgtgcgatgtggccgagtccgcgacggaggaatcctccgatccacccagctcaccgatctacgaaccctacattcctgacgaactagccgcagatccagtcgtacgctccgccttcaagcatgccatggctaagtacgagggagaagaagatcgtctagctgacctgttcactatggatcacta

SEQ ID NO: 444121 - DNA, 279 bp, Triticum aestivum
attggatgatataatcaatttgatgcttgataattgttttgagatatggaggtagtgatataaagtcatggcaattgggtgaatatgaaattaaagaaagcttgtggtgaagtttgtggatcccgttacatgaacttaggggaaccgctttgtgaagaatttggagcaaaattttatttattgagtgtcctccttaagagtggcggtcggggacgagcgatggtattttcctacaaatctatccccctaaggaacatgcgcgtagtgctttggtttttg

SEQ ID NO: 444122 - DNA, 242 bp, Triticum aestivum
cgcattgtgcttcaagcgttttacgatacgctttgctccatggcgcgggtgcaatccatggatacaaaattagtatactgtatactatttgaaagtcgaaggcggggcttttcctgcgcagtaggtggcagggcagttccacctagtcggttctacatagatacgagaagaccagtgagtacgttgtttcaaacgcacggctgtgtgatttgacaacgagttactgctggacaggtggggtc

SEQ ID NO: 444123 - DNA, 402 bp, Triticum aestivum
attcgccggtcgacgggagtaggaggatggactgctttcccgcccttcagatgcacagggactgggtgagggacgtcgcgtgggcgccaaacctaggcctaccaaagtccacgatcgccagcgcttctcaggatggaaccgtcgttatctggaccgcgccgaaagaaggcgagcagtgggaaggcagggtcctgaatgatttcagaacccctgtttggaggctgtcgtggtcgctgacgggcaacatcttggcggtctctgatggcaacaacaatgtgaccctctggaaagaagctgttgacggcgaatggcagcaagtgactaccgttgagccatagatgttctgcgttctgcctctaggttctttagtaattactatatcataaccaatgtaattttgcc

SEQ ID NO: 444124 - DNA, 382 bp, Triticum aestivum
attcgccggtcgacgggattcacggaaaccccacaacaacatcttgttttcgtgctcgctgttcgcgcttgaaaatggatgtagcaaaaacttcgccgatattagcaaaatccaactatggttgcagcaaagatcatcatcgccgccgtcgcgaggtcatagctctgccttgatggaggtagcacaatatttcgctggtagtaccacaacacatctacggttacagcaaaacttgttatcgccggtgccccacgtccatcctctttgtataaaaaatgaagccggttgtagcaaacaacggagttggttgcagcttttcggcgtcgtccatggcttctgtagtctatggttgaagctttttttgccgccggttgaatctttt

SEQ ID NO: 444125 - DNA, 328 bp, Triticum aestivum
  unsure (1)..(328): unsure at all n locations
gcattggcttcaaggtagcaggctgcgttcttctttcaatgcaggagatgcgaccgttgaagaccttggcttgctcctcgactgggagtcacagtaccttggggcactctgcctcnctcncagcagccgtcnccagccccgtctttctactggcctcagcatcaggcctacagcaatttgcccccacagtcttgaagatatgtatgcttcagagatggcaatgtcaccgaggttcaccantgatcaaggtcactcagcctactcancaagccacanatcagccatccttaacaggcttcatcagcagaagggtctcctctcacctgtc

SEQ ID NO: 444126 - DNA, 359 bp, Triticum aestivum
gggtcttaacaggcacttcaggcctgagctggaaaggaggatctgcgatcgagctgatagcgagctgctgatggcagcttctgcatgatcaccacttctatgttcctgattttattcacagaaataatgcaaaccggtgaagctcttctgtacaagcagatgtagcttaccttattggtttgaaccttttatgtccatgtttatttgatgcgctgatgaagccttgtgtgctttgatggagaagtacaaacgaatttgaagcattgtaccctgtatgttacatgagcctgtttttcttctttaatgttacaaagaatgactatcctcatgacaaagtgcacagtttcaacagataaaaa

SEQ ID NO: 444127 - DNA, 397 bp, Triticum aestivum
acattcgggcgatgttgctggacttgttttaccattgtcgaggatgtcttgtaaccgggatgccgagtctgatcagaatgtctcgggagaaggaatatccttcgttgaccgtgagagcttgtgatgggctaagttgggactcccctgcatggatttgaactttcgaaagttgtgcccgcggttatgggcagatgggaatttgttaatgtccggttgtagataacatgaaacttaacttaattaaaatgcaccaactgcgtgtgtaactgtgatggtctcttctcggcggagtccgggaagtgaacacggtgttggagtaatgtttgacgtaggttgttctaggatcacttcttgatcatagttggttgaccgtgcttttgccttctcttctcgctct

SEQ ID NO: 444128 - DNA, 351 bp, Triticum aestivum
cgacaggcaacttccttacagagggtccttcattaagggttcacgttgatccaggggtgcaggctcctccctgggcgaggtgcttggctgagcttgatgtttgtgatgctgtgtagtgaatgatgcagcatatggactgtatcatctgtttgccatgtagcgctgtaagccatgtgtttggtttcagcaattgtttagctgcatcaatttacaccgtgcgtcaagttcatcggtgtcgaagctgacatcgtgtctagaatgcaccttgccttggaactgacgctttcaaactaatcttgtttacctcataatctggtgtagctaaaaacttggtgtgcctaaaaaaaacat

SEQ ID NO: 444129 - DNA, 390 bp, Triticum aestivum
  unsure (1)..(390): unsure at all n locations
gggtccacggcggaggaggaaggaaggagatggacttctttgtgacgtgtttaaaactatgtggtttttttgcaaaaaaacaaatacactgccccatggacaacttttcccggacggagggagtactagttaaatctgagctatgggtgtgaagcactgatatgccagtacatttgattgtgacctattctaattttgtacctgaactttttttagaaagggttgtacgtaaacttaatgtgctagcagaacttattgtgttgtctatctgttttctttgcacaacattcaagatatttccccatcattgataaagacgatgaaccgttatgtacgacttcgttggtttcaacatagcccttcncgtagtgatccgctgcttccatcctg

SEQ ID NO: 444130 - DNA, 383 bp, Triticum aestivum
aaaactgatgacaaaatcaagaccatggaattggtggaagaattaagatctaaaagggctgacctgcaggctaccctcttgcttgatgcctttaacaaggaccgagctgcaatacctcaacctattccacctcctcaaatggcaacactgccagcacctcctcctcctgatgctcgtactcaagaactgatcaatgagaagctaagtaaagctgaagcccttggtgaacaagggatggtagaagaagcgcagaaagctttagaagaagcagaagctctcaaaaagttggcagcggcacggcaggagccagttgctgatccttctaaatacagtgttgctgatgttcgaattactgatcagaagttgcgcctctgtgacatatg

SEQ ID NO: 444131 - DNA, 391 bp, Triticum aestivum
cggctgtagtggaggaggcggtgccggctggccagcaggcggaggaggaagcaatccttcacccttggagattcaggttagccagtgacacttcagggtggtgtggttggacggcttcgcgccactatggaacttgtagggagcatcaagggttttctcataggagaaggcgggcagccaagcaggcttgccacccttctgacgcttggggccgggttgaccctctggctgctgatcttccactgacgccacttgccagctggtggaagccggctgcggggccttgcgcttgttgtccttctgttgctggcaccgactgttatcaccaacctgcgtctggggagccatagggagcactttcccagatgcgtccactcggagctccgacttc

SEQ ID NO: 444132 - DNA, 321 bp, Triticum aestivum
cgggggatacgagaaagattccggtcctgtttcctggcgcaccgcggcgaccggccgacgagcatccaccgcctccaagccgcctctcctcactgcagcagcgtagcgacttcttcctccagctgcagagcctctccgcatcaagagttccttgccatggagcatggactgtggtcgagcggagctagcgacaagaacaaggccatggttgagcaactgcagagatatggggtaatcaagtcgagcaaagttgcggaggtcatggagaccaccgatagggggctgtttgtgcctcagggtgggtctcccaattttgatagc

SEQ ID NO: 444133 - DNA, 162 bp, Triticum aestivum
caggggcgacgggtgatgcccagtgggacttgtatttttctgtaatatcttccggtttgtgcttcttggtgttgttagcctggtgccctggttggattcataaagacagtattagcttcttgacatgataaattcaggtactgaataaagtcgtggtcctgc

SEQ ID NO: 444134 - DNA, 310 bp, Triticum aestivum
tagctgcaaagtattcgcaggaagactgtaaattagacagtcttatagatggcctagataaggaataggttaatgattgattgtattaaccaaccggtaccttaacccgacaatgtaaaaagttggcaaccgcaggcttttggattaaacccccaaacccaaaaaatggtgaattgctcccgagaatttgaaaagaaccatccataatgtccggaaactaggaaacccggacattacgcacatatacacaaaaggttttatttcgggctatatgttatatcacatatgtaaaacacatttcccagggaaa

SEQ ID NO: 444135 - DNA, 356 bp, Triticum aestivum
tcacgggagatatgacgcacgtgacgcaagcgttcgtatacacgcgcatatactcatccctatgaacgcatacacgcacactctatccctatgagcatcttcgaaatactgattcgacatatcatttttaaaacttacgaagtcatcgtagtcacctacgtctcatcccactgaatacgcattgccagaaatcttgaagtaaatccaggaacacatgcgggcaccaagacttaattctgatgggttgggataccacagttcctctaaccatccaatcacagggtgggttcgctacgaagcacgttattgaaatactacctccctctgggtgcacaggttatacacgtagttctacg

SEQ ID NO: 444136 - DNA, 219 bp, Triticum aestivum
ggcgatggccaaatcaaatacgaggagttcgtcaaggtcatgatggccaaatgagcaccgtgctccgtgctcccaagcaggaggagaattgtgcattgcatattagtttaagatgcaactcttatttgatcgatttccagttaagcatcctacctagctgtagctgctaaagcggatcggacgacgcaattcctgctatgttctccagtgtgtttccac

SEQ ID NO: 444137 - DNA, 55 bp, Triticum aestivum
agaccaccgcaggcaagaagcccaaggccgaaaagcggctgccggcgggcaaaac

SEQ ID NO: 444138 - DNA, 379 bp, Triticum aestivum
  unsure (1)..(379): unsure at all n locations
cgggtcgacggcaacataaaaaggaaaatcaagagatctaatggaggacaaggtggaagaaccaaaagacatgaaaggaagccatagaatccagaacccacggggatgtaccttattgtgtaatggtggtagctcagcgccataagacaacacacatcgaagaagaacctgaagcggcgattgtacgttttaagtctcacaatatccccctcagttgaggagacaattgatgatgtcaaagaggtgtgtantgtgctccatgttgcgcatgtggcgcttcttcttgaagcaaccagattcacgtgaccatccctgttgcagtagctgcagtgactgcgggagtgacccttgccaacagaaggagaaggcaagaatggtg

SEQ ID NO: 444139 - DNA, 420 bp, Triticum aestivum
taatgaatcagaaaagagggatgacaatttattatcggaaaatatgggtggattagatagcttaaacgctcaagcaaaagaacatattctccaattgcagtctcgcttggattctatggaaagggagctacatgaactcaagaagaaaaattcttccttgcaaatgcaacagtttgctggagaagaaaaaaatgagttacttgactacttgagatcattatcacctgacacggttatcgaactctcggaaccttcctgccctggtgtgcaggaagctattcattccgtggtacatggtcttctagcaactctctcccccaaaatgcatgcaaagccccctccaccatcagagaacatggctggtggaaccctgaatttcgggaatggggatgatgaccgtgctgaactcgtggaggatgt

SEQ ID NO: 444140 - DNA, 280 bp, Triticum aestivum
gatcgccgagcctagccactcccccgccgcatctggagcgacctcccaccgaggtaaacccccaaaacctagtcgccgtcgccggcgccgccgcagccgcagcagccatgaacgccttcaggttcctcggggacatgacccacctcttctcggtcatcgtcctcctcctcacgatctacgccaccaggtcatgctcaggggtgtcaaggaatacccaggagctgtacctggcggtgttcgtggctcgctacctcgacctcttcactgactacatctcgct

SEQ ID NO: 444141 - DNA, 266 bp, Triticum aestivum
  unsure (1)..(266): unsure at all n locations
gtcgaaattacgggtccacggcgattggagactagcttctacaacgatgttagttaaattgtggtacttctttgggcattaagttgcagccttattggtatcaaaactggtgttgtaattcagattttggttctttagtgtctcggacttggttatccagtatcagttatgtaatttccttttacatgtttgagtatatgccaactgataccgggatatgtggattgtggaacanatatcaagatgaggattggcttatcgtatcc

SEQ ID NO: 444142 - DNA, 432 bp, Triticum aestivum
ccggatcatggcgctcaagaagacgcgcctcccggaggacgacgagggcgtgccccccacggcgctcagggaggtctcgctgctgcggatgctgtcgcaggacccgcacgtcgtgcgcctgctcgatctcaagcagggccagaacaaggagggccagaccatcctctacctcgtcttcgagtacatggacaccgacctcaagaagttcatccgcggccaccgccagaaccacgagaagatccccgcccacaccgtcaagatcttgatgtaccagctctgcaagggcgtggctttctgccacggacgcggtgtcctgcaccgtgacctcaagccacacaacctgctcatggaccgcaagaccatggctctcaagatcgccgatcttgggctcagtcgtgccttcacggttcctctcaagaagtacacacacga

SEQ ID NO: 444143 - DNA, 326 bp, Triticum aestivum
  unsure (1)..(326): unsure at all n locations
accctcagacttaggagccgaagcctggcaagatggccgagctccggcggtatccgaccggcgaggtggttgtcgcggaggtgaagctccctgagaaaggagaggttgcccaagaatggggagatgcgtcccgacaggttgaaggaggccatgcgcagcgagacaaccctgtcggggtgccgcccgccgcccgcaagcaacgcctggccagctgcagtggtgggtggaggtgttccatgaagccagcaaccctctcgggggcgcaatggtggacttgaaggaaaggancgcgagttggtcgctccccctccccgccgggaccgggg

SEQ ID NO: 444144 - DNA, 299 bp, Triticum aestivum
accctatcaccagctcactgaagtttgttttgcagctagcttgcttgtacagtgcatttacagtgcatgcattacgtctggcgagcgcgtgcgcttcggcggcgcagaccatttgcattcttgctatgttaatgcgtgcgattcagtgcatttcagaaaaaaaatgaagttgggttgtactttgtgtgtgattgtaatgtggagacataaaaagggactatttgtgtggattactcagtttgtaaaatcgtttctttgtaaaagcagtgcgctcggtgaaccgaagaagtacatttttc

SEQ ID NO: 444145 - DNA, 148 bp, Triticum aestivum
ggcgtgtgaagggacggcgagttcagccaagtactctaggtctagcctagcctgttaggagaacactgtaggacgattcaatattttttttctctcttcttgtattcttgctggaaggtataacaaacgagagcctcctcgttcggtc

SEQ ID NO: 444146 - DNA, 400 bp, Triticum aestivum
ggaacgggaggattggaaatacaacgcctctcaacaagtagggaacgaagcacactcgttccccctggatggattggggaaattctccgcctgagccttgtcactgaaggaagtcaattttgctcgaacggggactagatccacagggggaagaaatccctatgtctgtagcttcactagctgactgtgggatgcggaacaatttctccccatcgccttttccggggccgtggggacgggaggaagagctgggagcactagccatgttggaatggtttctcctagaaagctctgaggattcctcacttggtgtggaatggatctgaagatcccaatctctttaaatagacgcctttcttaaatggtcagggtggtatatgcaaaaataacccaacctctc

SEQ ID NO: 444147 - DNA, 351 bp, Triticum aestivum
gcaggccaccaggtccaccaggaatgcctgctattgagtacatgtggctccgaactcccattttggtgaattgcactgattctgcaccgtcacttgccttgtaaccaatgacgccgtgctggatcagcatgtaggtgtatccaagtgtgtagaatcttgtccttttacttagcccgcgcacttcgcagtcttgcactatgaaccatattgcgcagccgggttacactacatccgacaggatgacaataggccatgtacacatatggttaataaaaaacgcttgcaatttaattacctactataccaccgtcctggtttaagtatgatttaactaataaaatatgaatgcat

SEQ ID NO: 444148 - DNA, 405 bp, Triticum aestivum
caagactaactggctatgagtgtttttatagcaggttggtaagcattgggattttgtgggatttcaccgagtcgggaaggaagcttgcgtgggaacctacgaggtcgcgcgggaacgggatcaccgacgattcattggcaccaccatttggccaaaagaacgaccccgcgcgctgcgcaagcttgcactgtaagccatatgcggcagcggggtgacaagacgtgcgagaggaggacgagaggccatgtacacatatggttaataaaaaacgcttgcaatttaattacctactataccaccgtcctggtttaagtatgatttaactaataaaatatgaatgcatgtcgccaaagattatatagtcggatttgtatttgaacatagtttccaattaaataatttttt

SEQ ID NO: 444149 - DNA, 429 bp, Triticum aestivum
acacatcaaagttatttagtacgtactctctccaaaaaagggctgatcatgtcatggctaccatcctgtgctccatcgttgagtacatgcactattcacgtgccattgaggagaaaaaatattgtgtactatgtgccatcgaagtacatgactcacttacacactgcttatctgattatctccattttcttgcatgacacctcctccttgatgctaaatgtcacgcgtgttggcaaaaggatgaacacagctcacgtacaagataagagttgaagaacataggttcccggcgaccgagaaggagcaaggaacctcgcggtggagcgtctgcaaggaaccttgcatgttttcccctgtttttgccgccttcccacctataaacaaatataagaacatgaactctttgctaaccactacaaatgatacatc

SEQ ID NO: 444150 - DNA, 410 bp, Triticum aestivum
acacggctaaccatgattagattgtacactctgcaaaggttggcgaactttccccaaaagaatcgatttcctccgttggatttcccgcacttcatgctgtttgagaaacagatgaccgagacacagtctttcagaagcattaactctaactccgggtagacagtaccaacctacatccctctacatctgcgagcctaccacttgaagaggtcatgcaacttactcaactatgttagagcccataatagcttgtggctgcacacggaagtttctagcatgaaatatcttagatccctttgagcctgggtggcggaccgtaggattgtcacacgggtactccgggatatcctaggacaacactggattctccaggtgcccaaacaagcaatccacctagatgtgtattaaag

SEQ ID NO: 444151 - DNA, 396 bp, Triticum aestivum
accccattattatttaccatggagatctacatgtgccaaacatgtgtatcaaagaaaatttggaaaatatatattttacaatgccccattgaggtgtagactgatgttttgatcagttagtctagagggcaatataaactcaaaaaaattcaaaaaattataaaaccttggaaacctatctgtgtttgtgcaagagatcatgtgtgcaaattttgaggtaatttagaggtggtcgaaaaaatgacctcgttatggagggaccatttggtaacttaagccagtttttgaacaaatgtgatttttaccacaacctccaaatgaccccatttttcttttacatggtgacctacatgtgccaaacatggctatcatagaaagtttgaaaaaactttaatt

SEQ ID NO: 444152 - DNA, 417 bp, Triticum aestivum
gggtcgacggcattctgctactgatatagatgaaggagaggatgaggatgaagaagatgaagttccttcagcagtgggatatggtgctctgtatctgttgacagcttttcctgtcattattggaatatcagttgtgctgatccttttctacaactctctacagtagcatctgctcacctttgtttctgaagaagatgccgcctttttcttgtaaagccgagttacaacgctgctgaatgagcacccctttcttcgtctcatagtaaaatagtttctgcaatggtatgacaacattgtaaagccctgaggttgtacactacacgaaaaaggaaaaggtcttgaagtattggctttttctaggaaactgaaagttgattaagaaaaacaagggaacccagtcaacggaaaaagcggcgc

SEQ ID NO: 444153 - DNA, 392 bp, Triticum aestivum
cggccaagaccccatctcacgaatcaggcccaacttggcccaggagataattcaaacgtaacttcctggtcgcccagatctcatcgagacccagtgccggcgctggcgccgccgtcagccgtttcttcttccggcgatcttcgacgaccttccaagatcccacaaagtcaccgagagtaagagcagtgagacgcaccttaggtaatggtcccttccatggcctgatcgctgtcgtcgccgttctctgatgaacaactcgccggaccatctcgtttttctctcctgcatgtaaaccgatccttgtcggatcatcaaggggaatcaccttgtcgacagttaatgacacgccgtcctcatcgtaactgaatggaaaaactcgcagatcaagtcag

SEQ ID NO: 444154 - DNA, 425 bp, Triticum aestivum
ccacacgcactataacatacatactacgccatgtcaccgcatgcatgcatgtggaaatctttttggattttcagtttttaaaatgttttatctcttaaatgaaaaatccaattgaagatccgttttcaccattaaatccctcgcgacgagatcttcgaaactagatctcatatcaatatatttcaacgaaattttttttggttaaaagttgccatgtctattgcacatgaattaccatgatgtttacactaaagttgtcatgttatgtttcagctattttcttccatattaaaaagtaaattttgacatattataaaacggagaattaagaaactagacttgccatgcaccataaactaaaattgccatgatacatgcacctaaaattgtcatggctcatgcaaaaaatattttcattgtcaaaa

SEQ ID NO: 444155 - DNA, 394 bp, Triticum aestivum
cttgtacctagaccttatgacaactagaaccggatacttaataaaacacacccttccaagttccacagacaacccggtgatcgcttttccgcagggccacaaggagaggattgccgggtaggattatgctacgcgatgctactggagatgcaacttggagatcctatttggaggacttcaatctactccctcctacatgctgcaagacggaggctggcacaagcgtagtcttcgacaggattagctatccccctcttattctggcattctgcagttcagtccactcatatggcctccttacacatatacccatgcatatgtagtgtagctccttgcttgcgaatactttggatgagtacccacggttgcttttccccctcttttcccctttcac

SEQ ID NO: 444156 - DNA, 162 bp, Triticum aestivum
attccgggtcgacggggatttagaaggcactaagtaaaccacacctacatatgcaaactaagtgttattttaacctcaaattgcatataaatcaaatattagcacatatatatatttcctcccacagaacatgaattaaataatgaaatgaaagcggtagca

SEQ ID NO: 444157 - DNA, 371 bp, Triticum aestivum
  unsure (1)..(371): unsure at all n locations
gggtcgacgggtcaacacaaatgttctcttaacattgtgccctcaaggttgctgacatagacatgcccatgatcaggaaaacataaccatcatgcaacacttgagctagtcttagaggccagactangaatacattttaccgtttattattccacatgtgcatatgagtccttcctccgagcctcgtggttattgcagactcgagaaccataacagttatagcatggaacataaacataattatgaactcggagataaataatatcatttattattgcctctagggcatatctcctacagaaaacacacaaaaaagtataagaatacaacacagcacatttagggcatcactaacaaaaaggaagctgttg

SEQ ID NO: 444158 - DNA, 397 bp, Triticum aestivum
accttttcgattagctgatcttgtaggttttggcgttgccgttgccactggaaagcaatattataagagttatccagagcgatgttataaatcacgtcttactgaaattatgctcgaggagaacaggacaggtgaatcttctcataggggattttatctttataatgataagcgacaagcttctccagatcctgatatcaaaaagtatgttgagaaatcaagaaacatggcaggtgttgcacaagatcctaagctgatgaaattaacagacaaggacattgtagagatggtcttctttcccgtggtgaatgaggcctgccgagtgctggatgagggaattgcactgaaagcatctgaccttgatgtaacatccattatgggaatgggctttccttct

SEQ ID NO: 444159 - DNA, 401 bp, Triticum aestivum
tattgaggtggacatgcattttgcaaatgtcaggctctaatcagatggcttcagatggtaaatttggaaaaggtcctcgggagctcactggggctgttgatttaattagccgctacaggctgctgaaccatcacagtttcttttgtaagaaaccattgccactggctatctcagatacacattatcttcagaatgttgtgggtgacactgaaatccgtaaaggagaagggatggagatagatcaactcattcagaatccagacccgagggagaagaagactgcttatattaaaccctttgacatggaaacactagggcacgcatttcagttgcgagaaacagcgccagtagatctgccttcggctgaaaaaggtactccgactatatcggggaattcaaag

SEQ ID NO: 444160 - DNA, 412 bp, Triticum aestivum
cgggtccacggcgaaacgtaagaagataacgttcgcggatgaagctggaggatcgctctgctctgttaaggtgtttagtgatggacagacctctccttctgcatgccagggcgagttatgaacatcattttggctgatagtgtcaggcatttctttcataataagttggttttgataatgaagaatcaaaaaagatggccctggttttttttgttcaaagagagatagatggccctagagttgggaaccaagtaatgggggaatgcttctgtgtcattgtgtctatacttttttcttctagcagtgtatgtttagatggttagagtccatgtgaagtggcttctaaactgttccatcagaatgccacctgttgtaatttgtaaacaagaatcgacttgctgcagtttgatgt

SEQ ID NO: 444161 - DNA, 389 bp, Triticum aestivum
cacttcttatcaggggactcgtacggagctgtgtcccgcaacggcggcagctcgaccgactcgccggaccggggaagcttcgggaccaaggagacgtccctgagcgagctggacatctacggcagctcgcggtacgaggcgatgctgctgcggggggaggacgtgaggaacacgagctggctgcacggcgggttcgacgacgacaagcccgaccagagccccctgttcgaccaccggttcgagccgctcccggagcccttcagccccttctgacgctgacggccgcctccctgcctctgtatgtaaagtctgtccccccggtcatcgcctgttcctcacgtccttcgttttgtgtttgcacaagatgtgtagtctgtaggccctttgat

SEQ ID NO: 444162 - DNA, 401 bp, Triticum aestivum
cggctcgacggggatataatcccatcagagccacttatggagtgcctaccaaagatgacaatacctagatctatccttgcttttatgcctacctaggggcgttaaatgatagcgcttgttgggaggcaacccaattttatttttagtttctttgtttttgcttctatttaggaataagtaatccatctaccttctgtttagatgtggttttatcttttaactagtgtttgtgccaagttaaacctataggatcttcttggatgatagttatttgatcttgctataatttccagaaactttctgtgtcacgaaaaaaattgttaaaaatcaccagaatgtgattccaatgctactgattaataaaaaatttggctaagtattcctaatttggctgaattttt

SEQ ID NO: 444163 - DNA, 164 bp, Triticum aestivum
ctaagcgagcacttgtaccagtcttaccctaaagttattccgttcgttatgttggatgctactgcagtacgtggtgttggatgtgatgtgtgtgaactgcgtttgctgctgcttttctgttaatgttagttgcatctggtgatatgctgctattgctctcgtcc

SEQ ID NO: 444164 - DNA, 264 bp, Triticum aestivum
acaaggaagaaaacaaattccggcgaccgagaagtagtagtatttccatgcaaatggatcttacgatgcatgttgtttgttgcgttaacgactaaaataaccctaagtgcatgtttgtttcactcctatgtggcctaactgctccaacatccatcaattcagcaagggaaaatgtcgtctaaaactatgtccacagagtagattatgggattttggctaaaagcttatgtgcactataaaacgggataaagggagtttttttgc

SEQ ID NO: 444165 - DNA, 301 bp, Triticum aestivum
gggccgacaagactatgcagtcatcaagagacgcagccgagagaccgatgaaagccgaatggagacggtgaagacgcggatcctctgttccatttgagtagcgtggcgacggacgtttgggtggacggcagcttgctcctctgattgttttgcttctgatgtaaaaaatgttctctctggtctgctgccgcgacatcaaggggacctgcttaatttgttgtggtgttgcctacctggtgcctgagtttgacttaattttatagggttttgcgacggtcctgccgcctttggcttgtgtcct

SEQ ID NO: 444166 - DNA, 82 bp, Triticum aestivum
aatcttcagaaaaaaaggacttcaagttctagacggcgccgttttgttactgttgctcttccgcttcccaggaggaggatgt

SEQ ID NO: 444167 - DNA, 82 bp, Triticum aestivum; identical to SEQ ID NO: 444166

SEQ ID NO: 444168 - DNA, 299 bp, Triticum aestivum
gattctaactcggtctgagattggatcacatacgaattgtagcaaggtttacggtggttcataggattctcgccggcgagctcatctcctagctaggtctctcacggtctcactctcacctactcctttgccacacacttctgtcagggtgttgaacgtgacatatgtgtattaatctttctatagtctctagcctagttgacttctagaaatacgatagaattagttggcttgtcacgcagaacatatcgtgtatatattgtgaacaactctcaggaatacaattgagttgcatcttg

SEQ ID NO: 444169 - DNA, 393 bp, Triticum aestivum
gggtcgaggcggattactacagaaagttctatttttgacagattaggttcccaatgtgttgtttgcttattttgatgaaccaatgattattatcggagggtatgacccatagaaaatttggaatacagtagatattacaccaatatgaatttacaaggagttcacaatagtaccaaattggggattaatttcctaatacaaacggaccttacaattttccggtaaatttttgtgttgtgaagtttcaagttttgggtaaagattcgacggactatggaataaggactggcaagagcctaagcttggggatgctcaaggcacccaaatgtaatattcatggacaaccaagagcctaagcctggggatgccccggaaggcatcccctctttcgtc

SEQ ID NO: 444170 - DNA, 410 bp, Triticum aestivum
tccacgccaccaacaactaccaatagaccacggctggcgttttctgcgtttctgagtccaatttgtttttttaggggtggttctgagtcgagttattgctaaaataacttcaggatgctgccaataattgtattgttgttcgttaaagtacacttttttcctcaggaattacttcaggggcagattatggttacctccggccggcccctcaccggtgaggtgtaatgcatcaccatatgcttagccctgtgtactgcaaaactgctcatattacgtgcgtataaggtcattgagtcatcgacattggtgaatctgccgaacgtccaaaggtagatcatgagttgacatgtccggcatacaatacatactggaaagagaatgtgcacaaatttagataaaaagaatttgtc

SEQ ID NO: 444171 - DNA, 331 bp, Triticum aestivum
cgggtccacggggaggggcctaagctctgttcgtcgtcgtctgttagtcgtcctcttagcctgatgtgttcatcggtggaaatgtgcgtgcaattgtttgttcgtgtcttggcccatgtattgtgtctgtcctgaggtcacaatcttgctgtcatcattacctgaaatgaaaatgttgcaatcggttctaagaaaaaaaacattaaatcaacaacaaataataacattaaatgaaaaataaaattttaatcaacacactaaaaaatgattttgcatgaaaaaaaaagggggccccccaaagggttcaagcttaatttacccttgaaagcaa

SEQ ID NO: 444172 - DNA, 399 bp, Triticum aestivum
ctttgggacaaatctaaaacttggaaccctggtaaaatatgattcgatccgcaggcacttgaagcaaagcacacggcacctaagctagtaattgggaaagcaaaattagtccaaacaagtatacgatccggaacagtaccatgcgcagatcaggctaggatcggaggggaccacgaactcctcagctccggtagagggatcccgccgcccgagtgggtcggcggccgtcaggtctgccaattggactggctccgcccggccgcctccccgcttcgtcacctacccctttgctagctggtggctgtaacttgtcggcttcctccgccccttatcccttctcttgtatgcgattcacgcagttggcttcgtgattgctaggaccgcgagtggcttcgccct

SEQ ID NO: 444173 - DNA, 379 bp, Triticum aestivum
  unsure (1)..(379): unsure at all n locations
ggccgcacacctaagggagttcttgatgcagcgggtggctccgcttcaggcgcactcatgccccttacggatgcttggggtgtagacgacaagcttcacctgaatctggtggctttgactgatgaggacctggccgcatctctcctcctcttggtcggggatgactaggagtatccgccgagtgccactgtccccttgttactccgcaaggacagggcgcaggtggtggctactatgcccacatttgatgggcgcgtcctggtgccactggcaccccttgtggtccgggagcaacggcgccggtggacgcgtcttcgggcgactccctcagangaggaggtgaggaggaagacgaggagcgtgactcggaggtgacccc

SEQ ID NO: 444174 - DNA, 426 bp, Triticum aestivum
gggtcgacgggactgtgcaaagaaagaggaggaagaagcgcgacgtgggccaagcggatcacgtcatcaccaacttgaaacagaggcagctccacaggatgcaagctaagatttgcgtgcatgcaacgtcaaaacactactaaatgttcacctagctgcatgtcattggccgatgatgaacaacttcatgactgggaaatctcgggcgttacacaagttaatgccctagtatcacaccggcatttggacatatggcgtactagtgaaaatgcactcatagatggcatttcccaagatgtgcgcattcggaagtgagactggaatgctcctggtctcggcgcatgaaccgtcggtggagtcgtggttagtcccagcgtgactctacatttgccagatgctgatagcccggtcctttcactttcctcc

SEQ ID NO: 444175 - DNA, 399 bp, Triticum aestivum
cgggtacggttacgaaatcaaattagtctctttcagtctagtagtaaaattaatcattgtttatatatcaatgcatgaatgacagtacaagtttgttatagggcttaaagaatagatggtttacattcaattcctcgtcggaccggcactcagtacttatcattacatggtaaaactatcaattgcacttggtggttatcacagagttgagatcaagatactaacacaaaatcatagtttggtggtggattacttcatattcatcatggaggcagcggagaagttaatggagaggtcggagatgtgaccaagagagtttctggttgcagtttccggtctaatcttcgttcggcggcagccttctaggttttttgtctcatattacccaacctaatttgc

SEQ ID NO: 444176 - DNA, 430 bp, Triticum aestivum
gggtccacgcgacatgcacaattgatactcttgcattcaaaatcattagtcttggatgatttaaggttctattatgaagtaaaatatgtaatattcataaatgaatacaacgggtacgcaatttttgaaatggaggctatgtaatcatatgaggtaacacttttaagtagcggactacaatatccatttctttttgtgcgcctctacactaacacgtcaatgcattatgtttaaagtaaataaccaattgcactaaattatctatttacacgagaaatacataggctgagcgtttgatcccttttttgtgatcgcgccactacacccgtacgattggccgcgcccgcgtgaatgtccaagttatcggtgcatcatcccgagttattgtctttttttctggggtggacttcacaccagttattaactgctg

SEQ ID NO: 444177 - DNA, 347 bp, Triticum aestivum
  unsure (1)..(347): unsure at all n locations
tcggcggggccacacagagtaattcctcaattggacccaacacaaaggccaaattgtatggtgtacaagatgcaggaaaaggagaatttcacatacccaacagttaaaggctttggtcctcttccaaaatctaccttcattgcaaatgcaagagactcaatcccagtagcaagagtgacaacagcaatggcaagtggcagggtcagaagaaatgcagatgcagcagcagaatctagtgccgggaaaaggcaagctagangagggactagagctccaagaggaaggaggagtgctggaagaggaggagctacagctccaataggagggaagagtgctggaagaagaag

SEQ ID NO: 444178 - DNA, 425 bp, Triticum aestivum
ggtcgagatatccgggtcgacggggggacaaaattgataatagcgacaagaaggaaggggcttccgattctgtggaggaatcggggaaagcttctgaagagaaggcccctgagaacactgatgccaaggaagagaagtcagatgatgctgaggagttgaaagggtcagatgcacaatctgttaaaaaggatgataaaagcccttcagaaaatgacaaggagccagtttcaagggaggacttcaaagaatattttgccaaatttggcacagtgcggtatgtggacttcagtaagggggatgattcaggataccttaagtttgaggaatcgacggccgcggaaaaggcccgtgcatttgcagctcttgcggatgaaggtggtttggttatgaagggccaccttgtcactttggaacctgtgtctgga

SEQ ID NO: 444179 - DNA, 287 bp, Triticum aestivum
tactccgaagggtatctggcgttacatcctgacacacctgaccccattgcggcggatctggacaaatgggtggtgttgggcatggggccaaaggaccacggtcgggaggcggttctcgatacggtgatcactccgtcaatcccttaaacacagctccttcggatcaacccgaccctaatccagcccactatcacgcgcataagcattgcaccgtcactgtccccctttgattaccaccaacctgtacctatttcccctttgagctccattgttccctttagtttccg

SEQ ID NO: 444180 - DNA, 242 bp, Triticum aestivum
ggtcgacgcgccgggaagacagcgacgagcctgaggaggagcggctgctacggaggctgctagcgctctaccgtgcccgccaagcaaagctggagtcctgggaagcgctcgtcgcgaaggcgagcgtggacatagagaattgcgcggaggagcttcggggtcttcgccaggaaactcttcgggccttggcagacgagcgggagcagcttgcggaggagcggaaaggcttcctccttgagaaa

SEQ ID NO: 444181 - DNA, 392 bp, Triticum aestivum
agagcttacccgggccaaggagcaagccaggagaagtgatgcggctaccatgaaggcagctgaggaattaaaagccgaacaggctgctcatcaccgaagtgaggataaaatagccaacatggctcttgagctgcaaaacaccgcgagccgatatgagcttctcgaaagggaaaaccaaatgaaaacggctgacctagagaaggccttacaagcagcaaaggaaactcgctctaaaatcagaatggctcgggagaagcttcagcaagccggtgatatcgtggctgggaagccctttttattgtgaatgaaattcggcgatccgaagtatgccccccttgaccaattgtggagttctctagatgcgtacttggatttagcaaagagtgatgctg

SEQ ID NO: 444182 - DNA, 377 bp, Triticum aestivum
tgggggcagatgggcaagagatacctgtaagtctggtatatgaccaagtagcgttagcagcaaagtattcccaacaggattgtaagctagacagcctgttgtatggtatagaggaagagtatagccaatctaagtgactatgtaatttaaatggacctatgtagtccctagccggattgaaaatcatttgtcatggcggaccttttcgcttcagcccccggacctgatagtccggagtgtatccgaatacccgcacagttataaaaaaccggggtatgcatggaaaccaggcgtatgggtcacaagtgcctgaatataccagtatccaactagttatgtgatattacatggatagtttgaaacatctttcagagaga

SEQ ID NO: 444183 - DNA, 431 bp, Triticum aestivum
gggtcgaggccaagctgcagtcccagtgtaaacggttgaacttgcggatgggcggtgaggcccgtagggagttgctgtataacatcgaatacagtgccgagtactgaagcagtgagtactgggcaaccttccctgatttcaacatctacctgttatcagtacctcagccgcagtcatttttactgattatgccttgtttgctgattttgtttcttccagtttgattttgatgatgccggtgttctttcaatcaagtaggcacgtgtagtgtttgccggtactcgaagagcacagaggctgtagtctgtaaattatactttgtaacagttttcctaatcattcttcagtatcccaggcttccttttttcgctggagagacaggatgagattttatttgttaggatttcagaataaggtcctaatacatttgt

SEQ ID NO: 444184 - DNA, 89 bp, Triticum aestivum
tgccatccagttgctggacacgatccagctcgctgaggcggacgagttcgaggtctatatgaaggacctggaggccctgtgtaacccca

SEQ ID NO: 444185 - DNA, 420 bp, Triticum aestivum
gggtccacgcgacaggactaatgagtgaaatgcggtaaagatgggcagttgctgaaatgttccagctgcttcttagccgcccatgctacctgttttggttcatcggtgacattcgatgactctggccactttgattgccctgtttgctattgccgtaaagccgctaaagcattggaaaaggctaagaaaacatactctgaagctagaaaaaaattatctgttttctgcagcggctggaagcaattttctaaggaacacagtgagctgatgaatggctttcacacagctaaaaagcaaggtaaccatcagtctgaagcagctgagctatgtcgcaaggatggagagcctagtcatctgaaagaaaatggtacaagtgatgcttgtcctgagaatgcagtcaccacaaagacaaccattttt

SEQ ID NO: 444186 - DNA, 374 bp, Triticum aestivum
ggggcctcaaatacgtcaatggcgtccacgccctccctcaccctcctcctcgctcttctgctgcccctcatccctctcgccgtcgcagctccggagaagcacctcgtgacccacctcccgggcttcggcggcgccctcccatccaaacactacgccgggtacataaccgtggacgagagcaatggcaggagtctgttctactacctggtgctgtcggagcgtgacccggccatcgaccccgtcgtgctctggctcaacggcggccccggctgctccagcttcgacggattcgtctacgagaacggtctggattgatcctaatcttacctcccttcgggaccggcagttccctttgttgtcctcctgtgaatttg

SEQ ID NO: 444187 - DNA, 415 bp, Triticum aestivum
tcggggatatgccctactggcacacacgctcggcaaaatggggtcgtgtgcgaccggcgagcgctcaaatatagaaatacgtgcagtagagctaaaaatacaattatacaggcgaaattgattccggtcgcaagtacatcccacacagtcagtccccgctaaacatttccgttcgtatgtacatcccacacagtcgctccaaggaaaatgtttccattcataggtacatcacacaaaaaatttcccgttaaatcgtttgcgttattgaatgtatcagacatggtccgtataagaaactgtgtggcaaaggatgtccatcacacacagtttttatgtggtaaacgtttgcgcaaggtggcctaactcaaacagttttcaagagaaagtcatgtatgattacacattgatccaacac

SEQ ID NO: 444188 - DNA, 420 bp, Triticum aestivum
ggtaaggacggtgacgagggcgatgagtactagagcctgcctcctggtgctttcccaaggcatgctgctgcaatcctatgatctgcccgagtggctttatctgttatctgtctgtttgaacatttgctttgtggtgtttgttttacaacctgttgtgttgtaagaaccttgtatgtttgaacctgttatgcaccttggttaataaaaaaaaaaaaaaaaaaaaaaaaaaaaaaaaaaaaaaaaaaaaaaaaaaaaaaaaaaaaaaaaaaaaaaaaaaaaaaaaaaaaaaacccaaaaaaaaaaaaaaaaattaaaataaaaaagggggccccccaaaggtttcaagcttaatttacccttaatggaaatttaaaccccttccaaagtttcccccaaattcaatttcctggcccttttttt

SEQ ID NO: 444189 - DNA, 440 bp, Triticum aestivum
gggtcgagactaaggcaacagatgaagatgatgcagaagctaccaaaggtggggaagattcagatgattcagatggtatggacgacgatgctatgttccgtattgatccttatattgcgaggattttcaaggagcgcaacaaccttcctggtagtgaaactcagcaatctcaacttatgcgatttaagcttcgtgtgcttactttactggagttatatcttcagaggaatccaggaaaaaaactggtgctggaggtatatgctttcttaatgcaagcttttgtgaaatcacatagcgccgatggcaatgagcagttcaggcaacgtattggtggtatattgcagaaaaggatattcaaagcaaaagaatgtccaaaaggctttgatgttgaactcagtagacttgaaagtttgctgcagaaggctctgcatctggcatca

SEQ ID NO: 444190 - DNA, 369 bp, Triticum aestivum
gacgcgtacggctactccagttattcacttctgctcattaggttgagttgaagatgaacctctatctcaaagacgccagtagtagctactaggtcggcgctattgcatattctgcaaaaatgtatctcggctaccaatttgttggcacgactcatttagctattttcgacaaatgaattggataaaatactgagcatctcagcccggtgccaatcaacatcctctgtccatcatgggacagatatctaacagtttgttagccagagttagcaggcacttgatttttggtttgacgtcgatgatcgtgtccgcttcttgcctgtttgccctcatgtccgccagtacgtggtgtatattccgcctagctga

SEQ ID NO: 444191 - DNA, 306 bp, Triticum aestivum
cagccgaatcgacgatgtcgccggcaggatcaccacacagctggctaccatggggatgtccaacatgaagtacgtcccagagccgaatgtgagtcctaatgccaggctaactttgtttttcgagggtgttctaggggcccctggcggggatccgatccaacagggtggtctctctggcccaagaggtccggccgcattgccggcgtgtgaagaccatggccctcatggaactggtgttccccagattttacgtcttggtcacatcttagttggatggtggagggtagggggtaacccccgtggcgc

SEQ ID NO: 444192 - DNA, 462 bp, Triticum aestivum
cggtccagaataacgggccgacgggcaggctaacccaaacgaataggcgacagacggatacttggaggacgataactatatgcctacctccgaagatgaggcgagcctcggtgatgacaaattcggcgtaccagaggatcccatagagcaggatcgctttaagcgcaggcttatagccactacaagaagcctgaaaaagaagcagcagcagctccaagcggaccaagatctgcttgcagacagatggaccgaagtcctggcggccgaagaatatggactcgaagccccaagcaggggatacccaaagcataaaccgctagaagaagaggccgaagagcttgaacttccagcacaagatgaggctgaccgaccaccacgtggccgggatgaaacggcatgtcaggccggacaccagcccgcacccccacgccggttcaccatggcctgcggcaatacgcaaga

SEQ ID NO: 444193 - DNA, 419 bp, Triticum aestivum
  unsure (1)..(419): unsure at all n locations
gggtcgacgggtttgctatagatgatgtggcaagaccatatagccagcaaccggctctactactattaactatgctcttagggcatcttcaatggctataagatagttgttggtccacataggattttgatgatgtgtcataaaataaatgaggaaagagagtaagattgtatgtacatgaaccaacaccctgtgcacaagcttcaatgtagaataagagagcaccttatttattatttcacatcttattggacacactagatacaatctattggagtagttttatgttaaggcgttggttgatgacatgccatattttacgaacaagctaacaaacaaactgttggagatgctcttaagcagtttcatgtactcgggactagcanacatgctgatgtggcagacaaaaagaagagaga

SEQ ID NO: 444194 - DNA, 261 bp, Triticum aestivum
gacggggggaatcaaagcgagggcttcgctctacaccgtgagctcccgtgggcgcgccaaacacctcgagcttaacatggcgtgaacaattgtctcgatagatttgctcgtcactcgcttttatgcacgggaggtcagttggttcgcagggtgcagcccgagcgacccaactgtattcggaaactacggatggaacccgtaagccgcgactccactaggagcatcgctggactaaggcctagattccgatcagctatggga

SEQ ID NO: 444195 - DNA, 185 bp, Triticum aestivum
gacgggtggagcgaaccagcagaggctcattcctgtgataaggccggcctgtttgacttggtcccacggtggcgggccggcccatggaatgcctgtgatcgacctgttcgtatctcgcctatttgcagcccgcgacccctcggtctgttagaccctctccgagttaggccctgtatcgtcctcta

SEQ ID NO: 444196 - DNA, 415 bp, Triticum aestivum
ggcacggaagaggcccggggctgcagcgggagagagccggacggcggggaggaaggaggcggacacgtccgccggtgggagttttgtccggcggcggaggggacgaggttagggtttgatctgcgaagatttcggggggactcacatatatatagctagagggagctaggagactcctaatggagtgcggttttctcccacacgatcgtgatcgaacgacctagagcatggaggtgacttagaggggttttgggctgtttggagggggtttttgctacaacacacaaaaggactttgcggttacccggttaaccgttggagtaccaaatgacctccaaatggaacgaaacttgacaggtggtctaccggtggtataccaaggccacttgacaagcctcggtccattccgaaaacg

SEQ ID NO: 444197 - DNA, 418 bp, Triticum aestivum
gggtcgaggcgcccgaacacgctgaacaacaggtgatcgcgcgagaagctcttcctccgtaattaagtagcggccaagcgaagaccggggcagagctgcaaatgcaagaagcaaggaggagcagagcagacactccggcgccggtggtgagctgctgctgaaccggagcgccagtcagaatttcccgctcccgagctggtccttctgcccggtgcccatcagcatcctctgtccatcatgggacagatatctatcagtttgttagccatagttagcaagcacttgatttttggtttgatgtcgatgatcttgtccgcttcctgcctgtttgcgctcttgtccgcgagtacttggtgtatattccgcctagctgatgtccttttgttctaccatcagaaacaagaattgttctcttgct

SEQ ID NO: 444198 - DNA, 378 bp, Triticum aestivum
ataagtattgtatgtgaaaccaaaattgaggatctcttgaaaggtggctcgtgacatgatacgaagccaggcgtgaggaataacctcagaaacagggggtaaaggagagtcaggtttcgatctcgtggaactgtgggttatgggcccaccatgtgggttaaaagtaggaagggtgctggcatcttgcacggttatgatagcaaggtatgttagaggatagtatgtcagttatgtcggcaacaacgttggtaccaagggcgagggatgaagagaaccattttcctgctcgttgaacgaggctgaccaataggcacagttctcatccatcggtggctaccggaatgtcaacaccaatagtaccagggtctttactgacag

SEQ ID NO: 444199 - DNA, 402 bp, Triticum aestivum
gggtcgaggccgagtcataattataggtgacaccgggtcatgattgttgcaaacactgggtcaatctgacctgctcaaaactgagaatttgaagattttttccctttatatgtatatcacctgtagcccccaagtgtcgggttgtcatgctagcagcaacctgggatttgtaattgccttatgctcataaaacttcaaccagtgtagcccccaagggccggtttagtaagatattactgagctgggactttgtatataattcattgataataatatcatatgatgtaatatccaccatggggcttgaacccacgtccaaaaggttaagagctttgtgctttacaaactgagcaatgggtccttcaatataatggattaagacttgtgtaccttgaactgttg

SEQ ID NO: 444200 - DNA, 434 bp, Triticum aestivum
gggtccacgggggcggagaacagagcgcgtaattaaactcgaatacctttccgcggcggcggtagagcactgctattaagcgattttggagaagacagatgaattcgagttcctttcagatctagtccatagatttgcaccgctgactttgagtgtgggggacgaacttcttgacaaggaggcttccggtggatctgtcggattaagccggtggttgcaccgatgacagggatgtgagcgccgcggtagccgtgaggcctatggacctgaacgacaatggtacttgcgagactgcctttgcggcggactcgggtcagttggtgctgagagatgatccacaaacgcctggctggacaaaagacgttcaacgatttagctgctactcagtcgtctaattattgtgtgttggccttttagtgctgtggcaagtctgt

SEQ ID NO: 444201 - DNA, 427 bp, Triticum aestivum
catgcagaaaacctgaagcatagtagcgtaactgaatattcatttattgaaaagccataaaacacaataagttgacacattttattggatactgtatccaattattacaaaatgacgagcacattttcgcaaggaaatggcacaccatcaaaacccttactggaagtatatggaaaggaatggaaccccgggagctatcacaccttttcgatagatgcaaagaaacaaaaataagattacacggtactggacgggacatgatgtccaattattcaagacaacaagaacatttcgactatctcggcatgaaatcccggcgtatagactttcttatgcaatagctgcggcaaattcaacatccttggtacatacacgatcgcatccagttgtgcaattctctatgacatctttcccttgttcacctacg

SEQ ID NO: 444202 - DNA, 66 bp, Triticum aestivum
tcaggtagctaactcaaagcccaacctaattgggggaaaaattttgctttttagataaagaacaaa

SEQ ID NO: 444203 - DNA, 421 bp, Triticum aestivum
gggtcgaggcgaggtgacaatgaagactgatatggttaccggcagataaaagggggctggaagggccgctggcactgcacaactaacattcaggcgtcgtcacaaggctggagaggtcctatgcatcgctgctgctattcatgtcactggaaagctgaaaactgccaagtttgattgttctcaccgtgggaaggctagcaggacaaatatattgcatcatgtgaagaagcaaacaaagcagcaacaaggttctacaagcccggtgtataggcagatgatggcgatggtcgtgaagacgatcaggctcagccatccgccatgaacatatgcccaagaacaaacaaacaattaatcaagtgaatgcatcaaaatgtgtagatacaggtgacaagtgcttgaactactagctagcattgggctg

SEQ ID NO: 444204 - DNA, 400 bp, Triticum aestivum
cgggtccacgggatgcacacaggatgtcgtcgctaagcatgctagctgttgtggtatgtgaggggctcgctgggatccggctcgtacagctccatgagcctctggctcccattggtcgatctgcgtggaccggcttcatggacgaggttgatggcgaggtggacgaggttgacggcgaggtagatgaggttgacgacggacagggccagctccggctcgccgacatggtggaagggtgcggccatagaagagcagatcgaaaaaaaattgagccttctcctcacccgaggaaacaatgcgacaaaggagggtgaatcaacgcggccgaggcgtggggcgggggagctccgacgaagccccgggaagctgcacgagtgagtcgagcaggggagctccggcg

SEQ ID NO: 444205 - DNA, 386 bp, Triticum aestivum
caagcgggcagatatggtgaagggatgggcctcaattcagtcagttccaaggacaattgctctcgacgagaagacccggacgaacctcctcctctggcccgtggaggagattgagaccctccgcctcaacgccaccgaactcagcgacgtcacccttaacaccggctccgtcatccatatcccgctccgccaaggcactcagctcgacatcgaggccactttccaccttgatgcttctgccgtcgctgccctcaatgaggccgatgtgggctacaactgcagcagcagcggcggtgctgttaaccgcggcgcgctaggccccttcggcctcctcgtcctcgctgccggtgaccgccgtggcgagcaaacggcggtgtacttctacg

SEQ ID NO: 444206 - DNA, 422 bp, Triticum aestivum
cggatggagcaggaagatcagagattgaagaagcacgtcggctgttggatggacatccaacagtcactgctgctataatcgtgtgttcactgacaaagccttgcgtaaacaagtctgcctcgaaatctgtggtatgtacagcccatttgctattatttttataatgtttactcattttctaattcatatggaatttattgcagcccgttttccattttgagaattgctggccattttctggtcagtaccagggtcaaaaaattaactaaatatgtgggaaattgcgaaaattcgcaaatttttgctggggaacgaaatattcttaatccaaaaattaatagccatactaaaacaaatttaaaaataaattagtactatgtcatgttaaatccaatgaaatacgtataagatatcagttaaaa

SEQ ID NO: 444207 - DNA, 433 bp, Triticum aestivum
gactgggagtggtactgcgagtgggctaagggtggcattgagactgcgagtttcaccgggaatgatatgcagagactgatggccgatgagcaagaagagcgcatacgaaagaaggtggagaaggcaatggccactttgcaagtctccatgaacagtatttatgacatcaatgtaccatcgaagatatccctggacgatccagatgatgaaacaacattggagcttgatcctgagttccttcctccaacggcgtacttaagctcaagactaggtgagcatgatggcaactatctcctttctgatttggaatttgagcatgaccctttttctggttgcaattttgacctgaagctcaaggatgactactgaaatgatagtttgtctagatcaacagtattactctgttgaggtttcatcgttcagtgactcagtg

SEQ ID NO: 444208 - DNA, 256 bp, Triticum aestivum
  unsure (1)..(256): unsure at all n locations
actacaaaaaaaccaaaagcccactacagggcgtggaaccgtattggagggatggctcaatgggccatgcanaattcacacgatatgggataccataccaacacacagccttagaggatgttggatacttcggcaggtggccaagacggcgaggatctcctcattaacaataccgcggagcatcatcccgcagaaacgacaatacagtgttgacagtcttcgagactttcacctcaaataacaggcgcaagagagc

SEQ ID NO: 444209 - DNA, 284 bp, Triticum aestivum
ggtggcgtggaggttttctcggtgtgggtcttcgctgggccggggcaggtgcacccgcgtggtccggatcttctcaaccgagctgtatgtcttcggctccttcaatgtggaggtcatcgtgaatgtcgtcgggaatcttatcgtgctaggtgtcatggcttgggcggccaacatcgagtcttgggagattcagatcttcgtgtttcgcttgctctttcgtgagctggccaggccacctttctgcttttggaccactgtcgtctccaacttcaatgcagcctttg

SEQ ID NO: 444210 - DNA, 394 bp, Triticum aestivum
gtaaatgcagtctgaggagggtgaggagtatttttagccggagtgaaaaacggctcgcccgaggaaaatacacaaacgtgcccctgaccttctcatcctagcgacatgtgtcacccacatacagtgtggtggagatcgtgggtgaatagataactcttatcgtgggaagtgtaatggtttgagcggcaaaagccgaaaattcagataagaatattttaaagtttcgttcgcaatttcttcagctgacaaggacacattgaagcttttgaacgagtttcaaatagaacgcacatgaagaatttgtgaacatactgggttgagtttagcagagagggggaaagggtccgatcacattcacttagcaaaaaggtcaacttgaagaattagcaataag

SEQ ID NO: 444211 - DNA, 414 bp, Triticum aestivum
gtaaaaacaattgtcagcatacttaaccagagcttccatcggctcccccatgtcactgaagtggcggttgagccgccctagcttctgcttaaggggcaaaaaatgacaattcttctctaacatcaagactactgagccgacattgatacgatccggtgagtgcaggatagttgagacgcggcgcacccaatgggttgttgactcgccctcttcttggacacaagagtccaaatccacaatcgacataggatgtttgcatgtatctttaaattctggataaaccgggcttttaacttggcccatgatccaatggagttggcaggcagcccttttaaccaagtacgggtcgtcccatccagcatcatggtgaaatatttggcacacgcagcattgctaacatccaacagctccatg

SEQ ID NO: 444212 - DNA, 111 bp, Triticum aestivum
  unsure (1)..(111): unsure at all n locations
ggnnngnatttctagccgnacggtaccgaancagnaattcncgggtcnacgggtgacngaaaattagggttcgattccggagagggagcctgagaaacggctaccacatcc

SEQ ID NO: 444213 - DNA, 350 bp, Triticum aestivum
acattcaccatgaatcatcatcgccgccatgcgtcgttgacttatggccatgagaagaagggaatgctgtgtgggtagtagggagtatgttgggtatttgtttgtttactgtaaagaggaacacttcctttaatagccattgttatgtggtaggtggtttagtggtgcaaccagaggatgcatgtgttctcatgtggaagggacagtgataatggaaatgagctggtgtttagttaataatcagttagtaaaaaaaaacataaaataaaaaaataaagtgcaaagtctagctaaagatcatggacattatggaaaatcttaaagacaaagggaaaaaaaagtgcccagag

SEQ ID NO: 444214 - DNA, 77 bp, Triticum aestivum
cgggatattacaagaccagatggtcatgttcccaatagtggtcctgtcgacgacgaagagcagacggcctctctgat

SEQ ID NO: 444215 - DNA, 432 bp, Triticum aestivum
gttcgtgactcaaaccgggactaaaggtgtaatcattagtcccggtttgagatacaaaccgggactaagggcatcacaccctttagtcctggttcgtgtcttaaaccgggactaaaaggctcatttgaaccgggaccaatgcctttagccgcacgaaccaggaccaatgctcacattaatcccggttcgtgactgaaccgggactaatgggcttatctggcccgaacgaaagccgtgttttctagtagtgaagatggagtattgggaagggccttataggtctcaaatctgaaatctcatcaaccaagacatatggtgagtggaggaatgtatctcgtactttacaaaactactcaaattaaatagatgcattaattggattaattatggtgcatgcatgtttgaccactagatgagtaggaacattacatg

SEQ ID NO: 444216 - DNA, 402 bp, Triticum aestivum
  unsure (1)..(402): unsure at all n locations
tcgacggggatggtatctacaaggtttttgatctgaagaactattcctttctatattcaatacctgataccaatgtgcaggagataaagattagtccaggaattatgctcttaatatatgatcgaacgccaagttatgttcctttgaggatattatctattgaagatggaaagccactcaaattattcaagcacttgttgcaccgcggcaagaaaattgattttatcgagcaattcaatgagaagctccttgtgaagcaagaagacgagaaccttcagatacttgatgtacgaagttctgagctaattgacatcagtattgagaagttttatgacccgtcagcattaatttttctgtatgagaacaatctcttcttgacattccganacagaacagttgctg

SEQ ID NO: 444217 - DNA, 376 bp, Triticum aestivum
ccggtcaagaatatccgggtcgactggatgctataatgaagccgtttatgctccgccgtgttaagattgatgtcatagcagaaatgacggaaaagaaagaagaaattgtgccctgcagattgagttctcgccagcaaatcttctatcaagccataaagaataagatctctcttaatgagttgcttgatggaagtcgtggcaatctaaatgataagaagctgcttagcctgatgaatattgtcatgcagctacgtaaggtctgcaatcatccagagctgttcgagcgcaatgacggaagctattacttttattttgcggaaatcccaaattctcttcatcctcccccatttggggagttgcaagataaacattatgc

SEQ ID NO: 444218 - DNA, 332 bp, Triticum aestivum
acgggataggggaggggggtggagacgggaatgctagggggtgtggtcttggcaggctgtgagggatcaagagacgcaattgtggcctgcagattgagttctcgccaggaattcgtctaggagggccatacggatatgatctctcttgatgggttgcttgatggtagtcgtgggaatcgaagtgatgagaagctgcttagcctgatgaagattgtcatgcagctacgtaaggtctggaatcatccagagctgttcgagcgcattgagggaagctattacttttattttgcggaggtcccatgttcgcctcttcttctcccatttggggagtt

SEQ ID NO: 444219 - DNA, 391 bp, Triticum aestivum
  unsure (1)..(391): unsure at all n locations
acggtcaagacatcccgggccgaccgggttgtcaaatacctcgatggcaagcacggccttgcccttgcgctttatgttgcggcgccggcacttcttcttcggggcggtggtgtcttcgtctgtggagtcggtttccgcaccagcgtcctcactggggtacttcctcccctcctcagctcgagcgcacctatcggccagaacataaagctcggccacatctttgaccttgttcatcgtcggctttcacgcatcttacggttgcacacattctgatagaatgcgctgatcacggtggcgggatgaacatctcggacgttgtactacacccggctgaacctctgtatgtacctgcgccggttttcaccttccttctggangatgatatggaaat

SEQ ID NO: 444220 - DNA, 392 bp, Triticum aestivum
cgggaaacaccagacttttggtggtacctctaattgccataacttgttccaagcatttagataaccattgcccaaaccagttgcttcagtcaacagtttgtatgctgagtgaactgaaaatagacctcggttatttggctgccatgcccaaaaatcttcccccacactaattgggattcgtacaattgcctccgcatcaatacctatgaagtttgctttcaccttttgcacatcccattcttcataattctcaacaagtagttcagaagcatgattggcagtagcatacatgggctttaacatagccttgtaagaattattggaagggattcatggattctcccacacatttatagtatccccatcgcccatccttttgataagaccaattt

SEQ ID NO: 444221 - DNA, 381 bp, Triticum aestivum
aaacactagggctgttgccgacgaaggggaagctccaccgacctaccattcatgcataaatgtacactgtaggtgctttactccttgctttggagtcgatctcctctctcctggcttcattggcttgattcttgcctgtcttttgcattctacgattgttcattgtagtcttcaggtttgttggtcttcccgacggctgtcaactatcatctacaagttcagtcatttcatgctggagcccctacagtttcgaagtgaccatgtcggccactgcgtctactacacaaatactgctactccccactattttttcagtgtagtttgttccataaatgtgttgtgtcaccgtctgggtgtgactgattttttgagatgtacctt

SEQ ID NO: 444222 - DNA, 424 bp, Triticum aestivum
ccgggccgacggggacaccaacttgcggtccgagaaggtcaaggatgagatcgtcctcgacggcaacgacatcgagctcgtctcccgctccgccgccctcatcaaccagaaatgccacgtcaagaacaaggatatcaggaagttcttggacggtatctacgtcagcgacaagggcgccatcaaggaggagtagagtgcgaaaaccgtcccagaagccgtgtttctgcctgccgtgtttcatcgtctttgtgtcgtggttgtgattttgaactttctctagactgaattttgtagtggagttaattagggatgcgctatgcaacatgttatctttattatcctacatattgtcaccgtgaaaaaaaaacaaaaaacagaaaaacaaaaataggctacaaaaaaataaaaaaaaagcggccgctct

SEQ ID NO: 444223 - DNA, 389 bp, Triticum aestivum
tagaggaacgacagcgcgaggaagaagaaggagagtgtgagaagagagtgccgggccggcctgtttataaggtaattcataagtgggcacgagattcaaggagaccacggcgtggttatctccccctcacggtgcctcgattttcggaaagacagtaacagcagagatccgttgcggatctggcggagtaaaaaatggacttaatggaggatgacgtcacggcggattatccggagtccggagaatgacgtcacaccgggttatggccttcacacgaacggtaagccggagattttttctgtcggcagagttgaaaattgacacgagccggctcaagtcaatctggccaaaaaaaaaaaaaaaaaaaaaaaaaaaaaagcggccgctct

SEQ ID NO: 444224 - DNA, 201 bp, Triticum aestivum
cctgagaacggaagggggcgtgtcgattgcgtcctctcacgggatgaacctaaacacgaaagcagggctctggaagtcaacgaacttgtaagatccttcgagtgagttcagatagattgcttcgcggggctcttcgctcacgccgctctgcatggcatactccagtgccatttcatagtcaacctgttcaacatgctgcgt

SEQ ID NO: 444225 - DNA, 422 bp, Triticum aestivum
cggtctagatatcccgggtcgaccgggagaatgagaagagacctagtcgggtctatttataaggaaaagactgttaagtgggcgcaaaaaatgaggagcccaaaaaacatagttatccaactataaggacgcctcgattttcggacggtcactaagacaaagatccgttgagatacattggaagaaccgcgtatttatagcaggtgacatcatggcgggttagcacaaattcaagggatgatgtcatggcaggttacaaaaagcttcataagcaaggagcagaagatttttcttaaagtatcgaagattgacatgaaccagttcaaatcaatctggggcctaatgttggggatataactataaggtatgaccctccctggaggggccgggttatatctatgagtattctgaagcccaagacc

SEQ ID NO: 444226 - DNA, 256 bp, Triticum aestivum
gacgggaagggccaacgagggtggagggcgcgccccctgcctcgtgccttccttgttgctttcttgacgtggactccaagtctcccgggttgctttccttccaaaaataacttctccagaaggtttcattccgttccgactccgtttgatattccttttcttcgaaacactgaaacaagggaaaaaactggaactggcactgggctctgggttaataggttagtcccatacaataaaaaaaaaaaaaaaagaaaaa

SEQ ID NO: 444227 - DNA, 374 bp, Triticum aestivum
cgggccgacggggaatgaacggtgagcaggtgagctctgctctgcctctgcccagctcctctgcatcagctgtaacgttattctgcttgcgaattttcttagatcatcaatcagggagccggagcttgaatgaaacctgagtaggcttgcgaattttgtatgcctgcaacatcatttggtcatgaattatatccctggtgtagaagttaagttgctgcaatggttgacattcgattaaaaaaaaaaaaaaaaaaaaaaaaaaaaaaaaaaaaaaaaaaaaaaaaaaaaaaaaaaaaaaaaaaaaaaaaaaaaaaaaaaattgaaaaaaaaaaaaaaaaaaaaaaaaaaaaaacgggccccccaaaaggttcaag

SEQ ID NO: 444228 - DNA, 424 bp, Triticum aestivum
cacatcgaggcattgggtcaggcgaaccacttggttttgagcacagttggccatctgaaagcacaaccacaatgcaaagacattaggatttctagggaaaattggacagcataacagttgtaaatgctcagaaaaagatttgagagatccacaaaagtttgcaataccactcaacaacatcatatcaaggttctgattcaattagcaacatactagaaatagtagaaactgaattggggcttgaaacaacaatcctataagctactacggattagtaacatgtgaacctgacagaagaagagagcctagtccttaacccacgttaaatgagaagagaatgactcagatcagagggcataaggtaaaggagtaaaagagccttacgttccctcccacaatcaattcccctacatataactaaagc

SEQ ID NO: 444229 - DNA, 361 bp, Triticum aestivum
tgacgggcggtgctttaggcccttctggccagcggagtgaacatcccatgcgaatcagcgtacttgaacatatggtgcaggccctccataaccaatataaacatcaatataaacatcagcccccttaggctcatcaatcagcagttttgtacttatagcatactaaataaaatgctcttgtatacaattctgatctatccgtaaaaatgctgacatgtcaaatatgtttgttacttttgcagtttgttagagaagcaatttcttcgatgatgctggagactcggctaatgcagttttgtgctggttgcatgaatgtacagtcgtcgcgctctcagtctcggtgtatcgggatttttaacct

SEQ ID NO: 444230 - DNA, 56 bp, Triticum aestivum
cgggtggtggaggaagcaatggtgatctcggcagggcttcgccaagctcaggaagc

SEQ ID NO: 444231 - DNA, 107 bp, Triticum aestivum
caggttgatatacattataatgacaacactttggctcccgcgggctgacaaacatgacacgcagaccatgtataatttacacacatgcatcacatacacatgagccc

SEQ ID NO: 444232 - DNA, 418 bp, Triticum aestivum
  unsure (1)..(418): unsure at all n locations
gatccttgaactaagagccctagtgcgtctacatctcgtatgctctgctactgttgcttaatgtaaggcagctagcacaccaatatttctgtatcttcacaacgcttaatttttcttcacttgtcctggctggaagtatgtaccaagtatagctatcgaaggccattctattttgctttgtaaccggttcaatcgtttatatacatatatatactactcaaaaataattgcataacgatggttgttcgtttgttattattccataatatacaggccgaatcatggctgacacggacagcaagaagatcgatctaccatactatgcgttgaaatatctcctgacgattgtatgtatcgcgctggttgcttccattgtttggtaactgacgtctactancccactatggatgactgcaag

SEQ ID NO: 444233 - DNA, 236 bp, Triticum aestivum
tctcacctccatggcctccactttcgacggtcgtacgctcagtggtgagcagacccctgatcagcctgagatgtatgaacgcgaccacattggcaccatgcttcaacacaccggagaggggcgtaccactcgcttacgaagggtcatgctgcatcctgactgtcctaagtcctatgccacccttacacatacagtgccatatggcacgtgacagaccctacgacgctcacactctg

SEQ ID NO: 444234 - DNA, 80 bp, Triticum aestivum
gacgggttaacgaaggtgtgtccagattgtctcatgggacagggagaaggtgtcgagtcatgctcttgaggctgctcgta

SEQ ID NO: 444235 - DNA, 220 bp, Triticum aestivum
gacgggctatcccactatgtgcatgcgcgcactcctttcgtgtttgatggcttcttgatttatgcactgcctagtgtaatgcattaccattccggttgagttgatagaccctgtccacgatcaaactgcaatttgggtgcccccatttggtcatttacctcatgtcatcgcattgtttaaagttggagcaaacttcgccggtgcattcaaaccccgtgca

SEQ ID NO: 444236 - DNA, 272 bp, Triticum aestivum
gtcctggcggagggaaggagcgaaggaggaagacgacagcccgtgcgatttcaaatcggtgggtgggggaggggcagtttggtaatttcactcattttcacttggtcggaaaacctcctccaacgacaattatttcggaacggagggagtatgttattgatgtgtactttactagtgttcgtagtaacccttaggtatttgatactggttctgttgctaagattagtaactcgaaacaggagttgcagaataaaacaaagactagttaacgg

SEQ ID NO: 444237 - DNA, 407 bp, Triticum aestivum
gacggggtaagggttgccttgggtaggcggcacggcatgggcatgtcacgccgtccagcggtcggcgttggtcgttgggtcgccgtacatggatgcgacaaagtggtgggatgcagactagcggagaaaagattccggcgcacccctacctggtgcgccaaatgtcggatatcgggttcctgcaaaacccttaaggttcaaactctggggtgcgcgcgaagatcttctccctactgatccacgcccacaacctcgccgcgattctaagctaacaagatgaacaacacaaggaacacgagatttatactggtttaggccaccattgtggtgtaataccctactccagtgtgtggtgtgtggattaactcttgggctgatgaggaacagtacaaggggaagaacagcct

SEQ ID NO: 444238 - DNA, 393 bp, Triticum aestivum
gcggctcagaaatgctctacagggcaccattcaaggcgccgttgtgctctacgggtagctggcgcaacgacgcgtccgttggtggccgtggttgggcctggggtggccggtgtggacagcggtgagctcggttgcggccatcggagttcgggcgtgagcggagacgcggttgcggtggccgtggcgatgtgtgtttagcacctacggcgtctacgtggtgcggtgagtttgatgggcgcatgtccgggaccaaatggtcaccggagcatcaccggagacgaacgccggcggtggcgcattcggttgcaggcgaggcgacggctatggagcatgagggaaaaacagagatggggagcaggagcaggggctcacgatgggtgcgacgagctgctc

SEQ ID NO: 444239 - DNA, 56 bp, Triticum aestivum
acacgacgggaggaagcagaggtagaggttggagaccttgagacggaagatgagcc

SEQ ID NO: 444240 - DNA, 426 bp, Triticum aestivum
tcagttcatgtatatctgggtatttcgtgtgatttgtttcacattccaccagaaccattacgaggttcccctgatcttgcttcccaccggaggaacgaactgtaacgacccgaagactcaaatgctgggtctgcatgcggtcagcggctcggggaagagggacctgagaaagcacgagacagactctgccggcgtcggaaatcatcaccgactacgtcggcgcagtccacatacagagtcaatccctaggccccatgatggacgaacaggttggactgaacctgctgatggttgggagacggagctatctagcctgcttggatgcgcaggtgcacatggtgccggacgacttgctgctgagcacggactacctgctgagtgctcatcctcctcagatatgatcgatgatagttgaagaagcgacac

SEQ ID NO: 444241 - DNA, 338 bp, Triticum aestivum
cctgccgacagatgatgatatgcagaagctggatatgctcacgaagttcatgtctcagcacccggtgatggacttcccaagggagaagattacttgtccatcggatagtattatggggcggaattatgcactatattcagcaatcgcggagcttttctacctttgtaagatgccttgatgaagttgctactcatggggatcgtttgaatggattagggtctgcgaatcttgccatgtttggggcaatttttgtggtgacttccagaggaataagggaagaccagaggagggggagaggggaaagggattttttgttttgaagttctgttaccagaaga

SEQ ID NO: 444242 - DNA, 123 bp, Triticum aestivum
catgtgaggaaaggatgatggagactatgattcccccacaagtcgggatgagactccggacgagaaaaaaaagaggccaaagaagcccaaataaaaaagaggccataaaaaaagagaaggcgc

SEQ ID NO: 444243 - DNA, 420 bp, Triticum aestivum
tagtctaaatctgatatatcaggacactatccgcacctgtcaagaatcaaccaaagtagtactacctttaaaggagtaataccaggcgtagaggcccgatgcacggtctctctaacattagaggttgtattcggttctcccgacaacttttgaagcgaataactaatcttcaacatcgctctgttccaaagcgtctatcatgcactactcggaagaatggccttcgctcgtttcaatgcagtaccgcattaggcttatctcaaacttaagatgcccggtccacgtggcgtcatcacaatcagcggaaacacagagcgttctcttcgtacggaagaatatatgggagctctagcagccgaaccactgaatggcctctccaacccaagtaacccattggtctttcgagacacggacgcggat

SEQ ID NO: 444244 - DNA, 220 bp, Triticum aestivum
gggccgacgggtatagcgaataccacgcgctatttaacccaagttcagagctctccgttcagataacacccctaggcctgcatgtccgaatagatctggtaagtatatcagggagagattgctccgggagctgtatctaatctcagtgcaatacgcatctggctttgcacatttcagttcgggagtcctgtgggtacatgtctggctaacgtcggcaacg

SEQ ID NO: 444245 - DNA, 365 bp, Triticum aestivum
gggcaagggcgccgtgcagaagggttccaagggcccaaagattggcggcggcggcgggaagcgttgaaagtgcgttgaaagtcgattacgccaatagacatagagttgtgctgcctagccttgtttcctatcctactatcatagacctttgtcaagttattaccccgccctcttgaatttgcaccttatctgtgaggctgaatggtgttaacgttttggattgtctcgatgagtttatttataatgaatggtacttaaaaaaaaaaaaaaaaaaaaaataaaaatggaataaacacaatcaatgatcaataagaaacgtactcttcgtagggaagaaaaaaacgtgagatctaacagccgaatca

SEQ ID NO: 444246 - DNA, 429 bp, Triticum aestivum
ttgtactcatttgtcaagtttgactacgtattagctagtaagatggacgttgccattgaactggtatttgaaccaagaactgtggcaggtaaaccattattatatctccatttggtgctgcattgcacagacgctcaccattgccagatcattagcattgatcttcaagattttgcatggtttcctctctcagaaaaatctcccgttaacgaaaaagcgaagggaaacctcaaagccttccatcttagaagtgtgcatcgctcgatgcagaggctgggggctgggggttatcctcctttttgaaaaacaagacaaattcctacaattttttgcagtaacctgtccggatctgatcagctctacctatctataagcagctaattgactgcaggaagtagactgagtttagaagacaattgttctactcta

SEQ ID NO: 444247 - DNA, 51 bp, Triticum aestivum
gactcgccctgaagcggagcattatgcccggaggttgtagtggttaagcgc

SEQ ID NO: 444248 - DNA, 426 bp, Triticum aestivum
gcgacgaagaccggcgaggggggagacggagaccagatgcggtggtggttgtcagaggaggatgcgagtgtggatgtgggctttggttgggtcgtcgggggttggtgagtgtgaagagtgtgcctcttgttgggctcaaatctcaatactgactacgctagtgggctgggctacgaacttcctcgcccgcatttttttccggctacaaacatggaaaaacatcccctcagaggggaaaaaacaaatttaaaaaaatagtgtagatactccctccgtttttatttactccgcgtattagttttggtccaagtcaagctttgtaaactttgacaaagtttatagacaaaagtattaacatatacaataacaaattaataccattagattcattactgaatgcactttcacataacatagatttgttgc

SEQ ID NO: 444249 - DNA, 77 bp, Triticum aestivum
  unsure (1)..(77): unsure at all n locations
gtgnngnnacatcatnaggacggccncggtcngcnaaatcccgggncgacgggtatggtcatctcctaccgaccccc

SEQ ID NO: 444250 - DNA, 398 bp, Triticum aestivum
atatttgatagagcgtgggcatatcttttgtagaaagaattaaactctcctatttcacttatatctatttagacagatgacaggaattggtcattcacatggttagtcataaaatgctacataaaacttgtagatcactgaatatgatatgtttgattccttgcaatagttttgcgatataaagatggtgatattgtagtcatgctagtgggtagttgtggattattagaaatacttgtgttgaggtttgtgattcctgcagcatgcacgtatggtgaaccattatgtaatgaagtcggagcatgatgtatttatttattgtcttccttatgagcgatggtcttttcctaccaatctatccccctaggagcatgcgcgcagtactttgtttcgatagc

SEQ ID NO: 444251 - DNA, 396 bp, Triticum aestivum
gcaacggattcatcccaattgctgagtacggattggagtttaccaaagactcgaaagaggggaagaaacgggtgccggtgagactattatacagtgggaagaaccattatgatctgctgatataaaatgggcacatgagatgtgtcccgatgaagcatcagaataccggcagccaccgcccatctgtggcgcatacacaaattcccgtttactttccatggttacattcttcgatcctgctatgctcctgcttgtcagttacgatgctgtaacagctgtttcgtcgatgacagtcatgggcatttggggatttgtggatttggagctagaattagcactgacctgatgatggcgccacacgagctaactatgtgctgcatggtgcagtgctgtttt

SEQ ID NO: 444252 - DNA, 63 bp, Triticum aestivum
  unsure (1)..(63): unsure at all n locations
ggngnantctttcggacggcaccggtcngnaatcccgggncgacgggtcagccgncgttagcc

SEQ ID NO: 444253 - DNA, 362 bp, Triticum aestivum
aatttgacacactacttttgatcgccaggatgccgatatcagctgaattgtggttacctaatgagtactttctaagaacaacttcagattcggctcaggactcctaatggccaggtttaataccttcacaatgtctgtaaacatcaaccccatctaattgtggtcagatcttacgtggatcatagcacatcgatacctgataacttcttgacgtcggtcctcatggtcggtaagatctcctagaccaaggctgttccctgtcaccaacacatgcataattcgatatttggacatgtttacacagcacttgatgagtttctcgcgagaaattgtcataacttatgatatgattaaccaagttt

SEQ ID NO: 444254 - DNA, 375 bp, Triticum aestivum
gcggcgtagcaaactggctttgtgaagcagatcatccaggcatcgccgatgctggagcgcgcccacctgttggtcgggcatgtcgtggaggacgaacatcgggagctcgtcggcctgaagatagtccggcgccgccgggattggcatgagtgtgagagatcggaggtgctcaaagacctgtcatacgggatcagttcgccgcatcttgaaatagttttggaatgacttttggtaaaagtctgctgtgccggtagaccttccgtttgtagggcttgtagctgtatgccagggcctaatgattatgttatgctggctctaaatatagaacaacatgtgtttgtacgtggtatcttgtaccttacttttgcttgatta

SEQ ID NO: 444255 - DNA, 303 bp, Triticum aestivum
cggtcaagacatcccgggtcgaccgggacaacgacaaatgggaggttagcggtattctgtgaatggaatgatgacggaattcataacaactgtagatgcacagctctggcaattcgagatcttttcttttgtctgcatggcacaaactatatgagtcaccagccgctctttccacttcaattgtactattttgttgtaccaaatgttagctaatgcaatctccattccggataaaaaaaaatatggaaaaacttataaaaaacatcaaactcaccaaaaaaaaaatcaatatgtaaggcaatg

SEQ ID NO: 444256 - DNA, 68 bp, Triticum aestivum
cgggtcgacgggggaacagtgagatggagatggagaaggagatggagatggagtggtgctatgggacc

SEQ ID NO: 444257 - DNA, 428 bp, Triticum aestivum
ccttcagatggctgaaatgtagaccgggcctttttgggcccgttatatcacgggcagttaccaggccgaaacatatctcgggccttagttggcccactaatatcatgggcctttaataggccgaaagcttagtacagacatcaacgggccgaattgtgcgacaagcctttaacaagcccaaagtcacgttgggcttaactgttgccacctttatcacgggccattagtgggcccaatgtcctgtcaggccatatatggcccatgggaagcacgggccattcctaagacgaaagtcacaccggactgaaatgggcccatgtctacatcaggcctctaacaagccgaaagtcactcggctataattggccccaaatattcaacgaacaattaatgggccagatctggctttgggccgtaaatgggcccaa

SEQ ID NO: 444258 - DNA, 97 bp, Triticum aestivum
  unsure (1)..(97): unsure at all n locations
ggnngnangttactctnccccggacggtacaagtcannaattcccgggccgacgggccactcaanagtttnnnnnnnnnnnnntcctactgaccccc

SEQ ID NO: 444259 - DNA, 428 bp, Triticum aestivum
atgacacaggtcaccaacatggatgattcaattcatgggaccttttggtgcagttcacctaaaatgaagcaatgtcccatgagctagcaacttcttcttcttctttctttaagaaatgggctcaagcccaagttcaatttccgtcagaaaacgaaacccacagagcttcttcattagttgcaataaaattgagcaacatcaaggttggtcgtgaagctcctgaaaagtaggcggaccaggacagttgcatctctaacgaaaagaagcaacttatcttaatgggaaatttagcaggagatgaaaaaagtgccattgattcatattactggaggcattacattgaaaacaacattggtttaacgtgtccttacttttaacagtgcgactgctacatttttacagtggcattacataagagtggctcgggg

SEQ ID NO: 444260 - DNA, 389 bp, Triticum aestivum
  unsure (1)..(389): unsure at all n locations
caaaacgataaacattttgatcgtcaagcgtcaggcagcgagaggcagcaggataggcccgacagcaggcagagtggctgggatggctgggataacactgggaaggctgataggtcagaatcaaaagagaggcagtagaaccatggcggcttcttctggtccgttgtcctgttttgttgtatatgcagtagctagcccgcgtgtttccgaacctacctacctacctgatgcgctgtagcgattagcatcctgctcgaactgtgtcatgtggtagaagaattgtagcttaaagcatcatgtgcatcctactcttgtgttttctttcttgccttggaaccaaactaatacattttctgaataaatcctgatgtcggagatgcaaaanaaaa

SEQ ID NO: 444261 - DNA, 333 bp, Triticum aestivum
catcatgaaattggtgatggaggatggttggtgatgacgatggcgaccgattcccctctccggagccccgaacggactccagattagccctcccgagaggttttagggcttggcggcggttccgcatcgtaaaacgtgatgatttcttctctctgattttttctccctgaaactcaatatatggaagtggagttggagtcggagaggcaacagggggcccacgaggtaggggcacgccctaagggggcaggcgcaccccccaccctcgtggcaaggtggtggccccctggccttcatctttggcaggtttttttcttattttctgaaaagtgt

SEQ ID NO: 444262 - DNA, 425 bp, Triticum aestivum
  unsure (1)..(425): unsure at all n locations
gatcgagatttggcctacaaccacaatccctgtcttgtctccaaaaaaaaaaccacaatccctgtcctctcctccgccatcgccaccgccacctcctcccgttcttctccggccgccgcctcagacttggtgcccgcgtgctgccacccgcaggagccgcagatggcgtcttcgacgtccaccctagagatcgaggctcgcgacgtggtgaagataatgctgcagttctgcaaggaaaactcgcttcatcagacgttccagaccctgcagaacgagtgccaggtctcgctcaacacggtggacagcatggacaccttcatcgccgacattaatgctgggcgctgggatgccgtgctgccgcaggtttgccagctgaagctgccgcgcaagaagcttganggactctacgagcagattgtgctgga

SEQ ID NO: 444263 - DNA, 387 bp, Triticum aestivum
  unsure (1)..(387): unsure at all n locations
ggcttccagcagccagggcgagcggtggtagcgcttccttctgactttattcctgcaatcatttaccgtgcctcgtggaggcgtaaacctttgccttgaatttgtgaaacacccctgtttttgtataactaatagaactctgcgatttccttttcgtgcttgggttccttcgtgtttgccttaacgttccgcatcggcagggcccggccccgtgcatacctcgactatcgttggggcatctggatcaccaagacgagaacaaagggtgaaggggtacgtgactttgtaaacccctgagtcaagatgctcaaagggttccctttacgtacgaacaacctcaatgttctgtgttagtanagcccaaacccgtgcatacctcgactaccg

SEQ ID NO: 444264 - DNA, 373 bp, Triticum aestivum
gtcggaatcacgggtcgaccctggatggacctcaccgacgccggggactccgacgacatctcccacaccgtcagctacagcgacatctacaggtgcagtaccccgcccccgccccgtctcagtctcatcatggtgctgtataaattcagtccaccttgtcactgctcatcgatcgacctgcttggcgtcgcggtacagttagctcaccatccgttccgtatcagagaatgctgccatgcgtacgttcacagtgattccttgccgaacgtttcgattgctatgcacctcagaactaactctgcggttggtaccctcgacctgtaattagtccattatatatgtatatgttgcatttccagagccaaaatattgt

SEQ ID NO: 444265 - DNA, 342 bp, Triticum aestivum
tcgcgggaactaaattgctgcagcatgtaaggattgctcgagttgttaccgtttgtcgctggttgaacttgtgatcgttgagatccttggtcttagatgaagaaactagtagtatgttgttccattgttgctacccattgacaattattattgtctgttgctccatcactggaattggtctggtgtatgtgagatttgttctatttgctggaaattcaccggcagttaaagttatgtgaagctcaaattgtagatttgggcatggaaggatagttgataagcacaaaaaaaaaaaaaaaaaaaaaaaaaaagaataaaaaaaaaaaaaaaaaaagaaataaa

SEQ ID NO: 444266 - DNA, 473 bp, Triticum aestivum
ggtccccccaggcacctttatatacgggggcggggggcaccccatagacacacaagttgatcaacggatcgttccgtatccgtgtgcggtgccccctccaccatattccacctcggtcatatcgtcgcggagtttaggcgaagccctgcgccggtagagcatcatcatagtcaccacgccgtcgtgctaacggaactcatccccgaacctttgctggatcggagcccggggatagtcatcgagctgaacgtgtgctgaactcagaggtgtcgtacgttcggtacttggatcggtcggatcgtgaagacgtacgactacatcaaccgcgttgtcataacgcttccgcttacggtctacgatggtacttggaccacactctctcctctcgttgctatgccatcaccatgatcttgcgtgtacgtaggaaattttttgagattactacgtccccatcaggaatgttcttttcgcat

SEQ ID NO: 444267 - DNA, 406 bp, Triticum aestivum
gtctggccagcagattgtactgctatggaatacattgaacagtttgatcgtgatggtgattgtatgattgagaatgatggttttcctgatcaaacttatgatgcttggactgttcttggagtaagtgcctattgtggttgtctttggcttgctgcccttcaagctgcagccgcaatggcccgcagccttgggcatgatgactatgctgacaggtgcatggtgaaatttgcaaaggctaagcacgtgtttgaagccaagttatggaatggttcatatttcaattatgatagtggaacaagttacagtagccactccatccaggcagatcaattgggcggacaatgggacactgcatcatctgggtttgcacctctgtttgatgaggacagaataaaatgcacgcttc

SEQ ID NO: 444268 - DNA, 420 bp, Triticum aestivum
ttgccaaaggagaatacatgtttgcctattcccaaagcaagagtccttgcaaaccaaagaatggattttgttttttgggatgtggctaacaaatcaaaaggaaaaacatgttgatgcagcagcaggtacctgttggtgctttgtgcgtgatgtacaagaacatgcctatatgctgttatcctgtaaaacatcggaatgacaatgctatattatttataatatgcaattcatagttttgttggcactagtaactgactccgcgaagacacttccattgatatgatttttagggacatgtattgccaattagtctgctgctatatgctggagtaattttctgggaatgcacttgatggtatattactaatgtgcattcagcgataacactctcctgcacaatctgcagggtcttttgtgcac

SEQ ID NO: 444269 - DNA, 388 bp, Triticum aestivum
ccgaccgggtttaaaatttattgcgggaagacttctctctaaatgggaagacccctatgttatcgaaaaagtctatcgttccggtgccataaaaatcaacaacttcgagggcacaaatccgaaggtggtaaacggtcaaagaatcaaacattatatcttaggtaatcctataaatgttgaaaccaatattattgaaaccgtaaccccgaggaatacataagggacactttccagaacgtttcagactccgaaaaggaataagtatgtggtacggtaagtaaaccgactccaaaacaatttttaaggcaatatttctccgttttggaatatttagaaaaatagaaagataagtatcagtccgggaaggacacgagggccccacaagggt

SEQ ID NO: 444270 - DNA, 425 bp, Triticum aestivum
cggggccgacgggaaacggaagaaaaacccaaggaatccgaatttaacaagaagttacgggaagttaggaacaacaaggacttgaagggaattaccaggagccacaaccttttaaaacccttaaattggaacctggggtcccaagaccaacccgggaaggaaaccccgggccggcggcttaacgggggtaacaaaacccccttcctaaccaccttgtcacaaggtcaggataacctttgcttaactctgtcgtaaaccatgcaaactaagccttgcctaaactgtcatagacaacactaaccaacgaagcgatgggctagctgatcaaagccgagcccagtcggagtcggatcaagagtgtgctgggaacgcaaaggccgcctcgccttgccaccgaaaaggacaacagcgagatacctttgtgt

SEQ ID NO: 444271 - DNA, 410 bp, Triticum aestivum
ggtgctgatggcatcgtaccgctgctggacaagccttcgttggtcgtcgccggcagagccgcacgctgctgccgattcagtccacgtaatcaccgcccttaaattgattcttgcggcagatgaatcaagccccgcgccccgatgtcaaccaaagctcccgatgagtcacatgcgcaacaatcggcttcctcctcaagaatcacctgcaccaaaggaagcctttttcagaagaacatccctgctccgtctccaggcaccttctctatggccgcaagttcggcaagtttctctcacctacgattcctctctaactgaagcacgatccgcaagaatgtgtcaacatccgatggatcatgatgatctctctgattcggttggttttgatcggaaacgatagatggttcaaaact

SEQ ID NO: 444272 - DNA, 112 bp, Triticum aestivum
gcatgtcgatcgagagtggttattgcaaagtatggaaataggataaggtaccggcgagacaaccgtttaaataagtgtcaagttgaaattcaatgatgtatgcaactgaagg

SEQ ID NO: 444273 - DNA, 358 bp, Triticum aestivum
ggtcggaatcacgggtcgaccgggcttggtatgtgagatacatgaaagttgcgagtgatataataattaagggtaaccttaaggtggcaacattaacacacatctgggtggattggtaaggggcaccctgaagaaaccagtggacttgtccgggaaccctggagaaaccagtggacttgcccagtggatcccggagtacctgtgtgatcaccctatggactgccaaccaagatcaaagggattcatcaatttttcatgactagaagcttacgtgcacagccacaagctattatgggctctggcttagttgagtaagttgtgtgacctcttacggtggtagactagcagatgtagttat

SEQ ID NO: 444274 - DNA, 367 bp, Triticum aestivum
gcatgtcgttccaagggtttattgctacaacttggcagacttcagcgaggcacggagtgcccttttgtgcctattgtttgaggcaaaagtctcgaagactgtcagcactgtatggttgttgtcttccatgggatgttgctctgcggtatttttgatgaggagatccttgctgctcttggctacccgccggagtatccaacatgctctaaggctgtgggttcgtatggtatccggtattgtgtgtatcttgcatggcctatcgagccatccctgtaggacggttccgtgccctgtaatgggctttgattttttggttactggatcgggcgaaaaacaagggtgcaacctttttgtccggacgaggggt

SEQ ID NO: 444275 - DNA, 135 bp, Triticum aestivum
gtagacgcagtcagggcggagggggccgcagcgcccgaagaagagcaaggcttgaggtgggtcctcagactccagagcagaagcaccgaggtagccgagaactggaaaaaaaaagataaaaaaaacaaagaaaaa

SEQ ID NO: 444276 - DNA, 211 bp, Triticum aestivum
ggggccgtagtgcgtgaataagagcaaggcttgaggtgggtcttcatactctagagcatatgcacctatgtagtcgtgaactgctcatcaagtatttctagtccaaatttcatttcggccctcttcacgatcctatcttaatttctcgtggattcaagttccaatctcttctatggtgtctgcgaaatgttgttcaatgccccgtcgtttt

SEQ ID NO: 444277 - DNA, 393 bp, Triticum aestivum
cgatctaaaggatatacgcctttcttcatggtttacagaccaaaggcggtactccccattgatattcgtcatgactcccccttgggttgcaaacaatgttgaagcagacaacaagcaagcacgtcaataagcactggacctgttagatgagaagggagatatggctttggctcatttggcggtttaccaacaagacccgtagcgttatcacaaccgtcgggttaaaacaataacctttcaagaaggtgacttaatgccccggctcatccaggatcagaccgatatgcacaagttatccccaccttgggaagggccctttgtggtcagcaagaatctgcacaatggatcatactacctcattgacattccgagaagactcacgcacttctgagg

SEQ ID NO: 444278 - DNA, 246 bp, Triticum aestivum
ggtcgaccgggcctacatcaaagagaatgaggatcactatccaggtgtacatgacagttacagggcttgtggagtcgatgagtttgtggctcagaagctcacaaaatggaatgataacctcatcacttatttcaatccaaaagtcaatttcaaccaaattggaaggatggccggaatttcgaaaggtataaggtacaatccaacggtgccgaattggaaaaatttgttaatggcccaaaagaaaat

SEQ ID NO: 444279 - DNA, 409 bp, Triticum aestivum
  unsure (1)..(409): unsure at all n locations
tctgtctcaacatacattctcggttctacaggacaatttacatcacccggaacaattgcacccccttcaccaggtcgtcggccgctctcacccggtactacaggacctggtaattgcatangcggggtggtggtctccgcacatgcttgttgatgtgtggttattggtgtgctcttggccggctccagacgaataagattcttcatccatagcagcacccaacccttgcagcttccaatccgcggcggggtctcgtcgtcctctcccacatgctgtactggaggaggcaaatcctcgtgccccgattccacactggacaagctaaccctgaagtgcccagcagggatcggctggttgtggaacgtgggttgcaaggggtccattatcatcncctttcctacgtccatct

SEQ ID NO: 444280 - DNA, 338 bp, Triticum aestivum
accggtcaggtactcgtcgaccggcaagaagcccaaaacgaagaagccggcccccggcttcaaaggaggccggcggcaaggggaaccaccggggcaggaagaagggcagcaaggccaaaaagggcttggaaacttccaaaatcaacacctccaaggtgctcaaccaggtgcaccccaacttggcaatctcctcaaaggcaatttcaaccatgaatcccttcatcaacaacatcttcaaaaacctcgccggcaattcgcccaacctggcaaggtacaacaggaaccccaccatcacttcccggaagatcaagacttccttcggcctcttcttccccggc

SEQ ID NO: 444281 - DNA, 488 bp, Triticum aestivum
  unsure (1)..(488): unsure at all n locations
ccctctggtagtatcttttctccaatatttattatatatttcaaagtaattctccgtaaaatttcagctcatttggagatgtgcagaataggtatctctgacatagctttttcgggtctagaatttcagctgccggtattctccctctttgtgtaaaccttgcatattatgagagaaaaggcattagaattactccataaagtgttataaaggataaaaacattataaataacattatgaaaacatgatgcaaaatggacgtatcaatgaacaatctgatcataaacacacaattcataggatcccaacaagcacactgcaaaagaaaattacatggaatagaactccaagaatatcgaagagaacattgtattgaagatgaaagagagagaagaagccatctagctactagctatggacccgtaggtctgtggtgaactactcacgcatcattggaaggcagcaaggatgatgtanaagccctccgt

SEQ ID NO: 444282 - DNA, 495 bp, Triticum aestivum
ccgggtcgacgggtggacaagattcaccttacttgggatataattcacttaaggattttttcccaacaatggaaatgagaccaaatccacaatgttcaaacccggcatgtcttgagagacagaaagaatatatgcaatcaaaacctgctagagatgcagcagcaaaggctaagatggaagccgaagcatccgcagcaattgaatacccggttcacatggataacgagtggaacattagtgttcttgatgatagtgacacagcaacgtcaagcgttcaaagggctgcaacagacatccttccagaaggccttgtccgtgaacttccagatgaagatacctacgtggaaccacctgctgcaccagccagctgtggtgccatcgatgacgatctcgaggagctccagcggcaactcgacgccctaaactcatcttgacctcgcgcagatctggctcaaacagtgcattggaaaaccaaaccagatgccattgtttgcg

SEQ ID NO: 444283 - DNA, 240 bp, Triticum aestivum
gggccgacgggaagccatagcaatgctgtagtgactgatttgtctgtaactttgtttgtttgtagtaggggtttggttgctgtagtgtatttgtactttatacttggtagagtaagaagatggattggaggctcaactttgagctgagccacccttccttacacaagaacaaaagacgatcatatatgtgtgttgcttgcagtgaatgcagtaataatcagtaagaagtattgtagccgg

SEQ ID NO: 444284 - DNA, 436 bp, Triticum aestivum
ccgggccgaccgggccttctgaatcagctgatggtgcatcgcagttgcaagagttctcccaggctgaaactgttgatgcccatgctactgccggtgaggagtatggtgatattgttgtggatggtgaacaaggtgaagatgcgatgcccatgacaccatcaggaagtgagcgtgggggcgtcgaagatgatgacgaggatgatgatgatgatgatgattcagagaggcaaaacaaatcgattgggaaaacgctatggtctttcttcacgacataacaagaggaagaataagaattgcatctgattaggttgtttctagtgtttcttgttttgcattgacgattcttggaactctaggttgttggtgtgttcggtgacgattcttgtagattttcttgcactcgttatgtcaaagcgtcatgtaattgggaatgagt

SEQ ID NO: 444285 - DNA, 405 bp, Triticum aestivum
tctttctgatcacacagttaccctacagctcactggggatcttgacaaaatggttgcactacaaaaactgttggagccttatggcatatgtgaggttccgagaacaggccgggcggcactaatccgtgaatccagggtggactccaagtacctccgcggctactctcttccactgtaataagaagtcatgtgcaacgacgacccaagaagggtcacttggttttggttgagctgagcagaatgtgtaggcagctcagctttttgtgcggctgtggtcttgtttaggatgacttgtttcctctgtggtaatgtgttgacttgtcgaataaattgctcttggtagatgcaagtcgaggtttgcccatgtattgcatcgacaagcagaataagtacatgcctcctttt

SEQ ID NO: 444286 - DNA, 399 bp, Triticum aestivum
ggtcgacgggcagaccaatgggaaagaatgcatatttaacggacacaactcgaatccttcgagatctgctttcgcaattagaatctctccgaaaggagaatagcaccctgcagaatgaatcccattatgttacaatggagaggaatgagctgcaggatgagaacgatgtgctccgcaacgaaatactggagctacagaatgaactggcgacgcgtcctgcaggcaacccaggttggggccatgctactgctggatcgcctcacgctgcgagcacagttttcccgtcacatcagccaatgcagccgagcaacatcgcaagcgcagtattcccctttgcagcagcactgcaacagacaaccatcctggaacaaccttatgcaccaccaacaccaccacggg

SEQ ID NO: 444287 - DNA, 461 bp, Triticum aestivum
ggtcgaccgtgtttgtacattcatctactcttcctgtgcatcagccatttgagtcggtgatggaaaattctagagtgaaaatagtgtctttagatcagtcagtggtacccgtcgaagcggatatgttgctggttacagatagtttctcaaaagagtattcagagataaatgaccagtcctatccccccagaggtgtacgctctaacttggtagggttatattgctcatatcaatcatatggtgtcttgcattgctgtgccatcttcttagtttagacatgctttgtgtgaatgctacttgtttagtttctatattatatatgtgaattatgcaatgccatcttgtttagctgggcaacatatatgtgaattatgcaatgccatcatgtttagccaagaatcatatatgtgaattatgtcatgccatccttttttccattacgtattccatttatcgacaat

SEQ ID NO: 444288 - DNA, 315 bp, Triticum aestivum
gtgaagagagctcattgtccaccccagtgtagtcttgcaacgtgcgtttttgttaaagtccggcactctgcacaatgacctgttcctttgagttttgtttgtcttgctggagttatagattgtgttatctcgattatgtgccgtgctggcatttggatcttaatcttaatccgttcgtctggcaaaaaagaaaaaggaaaagcaaaaaaaaagcaaatgaaaaaagaagaaaaaagaaaaaaaggattaacacaccataaaaaacaaaattgaccggaaaaaaaaaacgggccgcccaaagggttcaaactttag

SEQ ID NO: 444289 - DNA, 212 bp, Triticum aestivum
acggtcaggatctccgggccgacgggaacactaaagaaacaaagagatcactgagacgctttcatgaaattcaaggaatcagaattagctcaggaacggtccagaataaacaagatcaatgcctcgaaaaagatatggcaccataagttggggtcaggtggctacgaggtggcccagcctaagtgggatctcgctgagcaacagatgagggg

SEQ ID NO: 444290 - DNA, 479 bp, Triticum aestivum
  unsure (1)..(479): unsure at all n locations
ccgggccgaccggggcagcaacagcatcatgggcagcatcgcctcgtccatcggcaagatgggccggcgcaaaaccgacagcagcgagctgcaggtgcaggtcgacgacaagccatagccatggaatgaatgccgagcctctcagcattcattcattcactcaccgtgttatcacgaagcatcataatacgtcatcgccaatgatggagctggctgctactatttttgtagattatttttcttataattttggggagattggcaattgttccatctgtgtagattcgatcccaagctataggctagatccagtcagtccaaataagtgaagagtgcggtcgttgcttggtagcccccatccacacccctcctggagttgctgaaaggttgtacatgtccggattgagaggggttgttggccccgacatgatgataatgagaacccagtacaaatacaanaacggaaacggccccgtaac

SEQ ID NO: 444291 - DNA, 103 bp, Triticum aestivum
  unsure (1)..(103): unsure at all n locations
gnntggaanttctactcttacgggaccggtcatngccataccggggccgnccgggaatgtaaccgnanatttgtaccttgtaactgatgtttcttcttcatcg

SEQ ID NO: 444292 - DNA, 385 bp, Triticum aestivum
ggtcgacgggatgaaaatgattagaatgccatctttatgaaagcagggtttagcgactacaaaattgtcaagaagcttggagctcgtggtgtcatggaagtctatccataagtttgtgatgcaaatgttgtgatggtgaccgtttggtataaataaagtacgtagtggtgtgctataagaaataaataagggagtctggtgccttgctttttaatggaaaacacaatggaactcaaattagtagttcagcccgtgccttgtcacaacataaccggagcgtgtatttaaattagttttgagaagtattgagtcactcagtgtgtgtctgtgtacacggtatgtctgtatgctccaacatgctgaaatatcaagtttatattatgtt

SEQ ID NO: 444293 - DNA, 265 bp, Triticum aestivum
ggtcgacaggctcttcaagctgacggagggtgcaaaacccaaaggagaaaattgacaaaatgtttaaaggcgaaaagataaataccacggagaaacagttaattgctcaaggtggctttgaaacccccagaaaatgcatccataacaattgacggtgtgaacttggcccccgaatttggggcggtaaaggataaaatcaggcagtttccaaaaactttcaggattggcccatgggttggggcaaccgggaaaccgttgacaaatg

SEQ ID NO: 444294 - DNA, 395 bp, Triticum aestivum
ggtcgaccggggcacataactcagtgacgcttatatcgatctcccctatatgtacccatccatgcaatgtgtttatgcagcatcaagttaccaaccaagttcagaagattaagaaacaagcttcttgaggtccatttagccgcctgttcgatcaacaatgagctccatggacgtcacaggcaccgaaggtctcgccgttgattcgtggcagaagtcgtggccagaggtggtgggcaagtccataaaggaggccagggagatcattctcaaagacaagcccgacgccgacatcgtcgtgctgccagccgggtcgccggtgaccccggacttgaggcccaaccgcgtgcgcatcttcgtcgataccgtcgctgacacacccttcactggctagctct

SEQ ID NO: 444295 - DNA, 55 bp, Triticum aestivum
gggtcgaccggctgtccacaaggacgggaggcgcgcccaggggggttgggtgccc

SEQ ID NO: 444296 - DNA, 483 bp, Triticum aestivum
  unsure (1)..(483): unsure at all n locations
acggtcaagatctccgggtcgacgggtgggtaataaagggatatgatcaaagtgttacttgccttgctgacgatttgaaaaccctagagagtaatagtagcaagcctcgcacttcggaaactctatcgtgaacaaacaatggcatacataagcactcaagcataagatgcaagggtaaaactcaaaagaaaagatccaaactgaacgttcaactgaagagctttgatttgcaaaaagaatcaatcgaatcggacctacgaacacaaactgcgatcaaacgaagttcaaattcaaatctgcttgaaaccaaattttaatttgttaaaaccatgttcaagttgattatctggaaagagggtaacaagacgaagattttggcgttggtttcactggatttggacgaacgagcaaaaagtagcgagggtttgaagatcanggactaatctgtgatagaagtattcgtggataggtccctgnccgctc

SEQ ID NO: 444297 - DNA, 409 bp, Triticum aestivum
gggtcgacgggagactgccggacacatacgagaccttggctcggctctctcccccgctacagtaggagaggcgattttttccccttccccgttcgatctagttcgccggcggcggctcgctggtttccccccctctgccggccgcttcggcggcgggagggtggggaaacctcggttcccgtctgtacatagctaggatggagtgggtggttcgccggcagcgccgtggagaggaaggcgctgtcgggttggtggtttgtggcggcggtgatcttctccggtggcggggttctgcggaatccgaccacttccccgcctccttcctggtgctcgtaactcggcggagttgccgtgcgccttcttcccgtgccggagtccgtaggcggcggctccggttgttgaaagtttg

SEQ ID NO: 444298 - DNA, 407 bp, Triticum aestivum
ccaaggaaacaaaggccccggccttggaaaccccccccctcctcctccggcccccggcgttggcggaactaacaaccacgccaaccaacaaccccaacaccaccaccaccagcaacatgaagggaactacccaaattgttaaatttgctataagtttcatcctggaggtgcaagggcctgttggcatcggtatgatgatgaacatgaagagaagaagaaggccaacctcgtcaccaactcctacgggattgatacaaattggtacgcagattctggagctaccgagcacataacgggggaactagacaaattgacaatgcgagaaagataccacggaggtgaccaaaaagcaatccaattccccaccagccccctcgcaccttccggcgaatcaccgcacctctccc

SEQ ID NO: 444299 - DNA, 278 bp, Triticum aestivum
cggtaacaaaaaaacaacaaaatccaacggaatggcaaaatcaaggggaatcaattggttggctggcctaaccgaaattgaaggggggccctggccccccggtacaaatttccggaataatttgaagggaacccaaaggccctcccttggggggatggaccaagttttgcggttaaatttggcttgccagtttgagacaattgtagccgttgatgttggatccgtgatgtgttggattggaatgtttgtgccacaattatgcttgggtaatttgtacc

SEQ ID NO: 444300 - DNA, 380 bp, Triticum aestivum
  unsure (1)..(380): unsure at all n locations
ggtcgaccggcccaaattgctcattcagattgaaggatccacgtggcattcaaggtctggaaggtagattccgtgtccgcacctagtttgcgggctcgacatgtgcacgaccggattccaccgcgacagccaccatgcgcacctcctccgcacgggcggagacggtaatgacacgctagttcctcctcgccggcgtgctagagcatgcgctcgtcctcctcttcgtatgttgtgtgcatagactcggctccaccagctgctcacgtgtttggcatcgcagcggcatcgcanggagggactgcagacggcgtgagcgggcgagccttcggcttcatggcacagggatggcggcgacacgggggtgatgggtgagaaatttt

SEQ ID NO: 444301 - DNA, 498 bp, Triticum aestivum
tcagaatacaactaaaaagggacaactcagggaacatataactatctgagttgcagatgcatagattagtatgtcgaactaagttcaacatatttcttctggataacccatgcagaaaggtagaactggcagagtcacaacatagaggcgagaactcatcaagaacactttggctgtgatctttcggttcaacaaggaacttctgccataagaagctcatggtatttggaagaaataaataccacacaccttgaggactatcgcaaaggttattaataacctaaaggaatgagcaaacactaacaacatgaggtaagtagggtgaatctcgggttcaagaacccaggagtagaatacctactactaaatggcataacgggatgcttaggagaatgatggccagaatcatcacattgggatcacaaataataactagattactaagtgatactctagacacctagggtcatagtaatagctccaacctatataacgagg

SEQ ID NO: 444302 - DNA, 369 bp, Triticum aestivum
ggcgcaacatggtcacaaccttccatctccatcaggggtgatggagaacgtcgtggttcctactctcaagaccttctctctgcgagcgtacgacccaaagcaggtgataattgcgggcggaaacaagaaggccttgggaattcccccgaagggaacccaacgaaaatcaatcgacttcccggggcctcgaaccaagccgctaaccctcaaggatttctccggcgacggtctgactgatatcaccctggtgaacatcggggggattgtacgggtttgtgcagacaaaggaacccgggggccctcttcttcagcacgcttgtcggcttcttgattgttgtgatcggggtgatctttgtctctctgcaactc

SEQ ID NO: 444303 - DNA, 406 bp, Triticum aestivum
  unsure (1)..(406): unsure at all n locations
ggcataatgacgaaattgcaaagattcccaagtggatgactaaggcctaggaggatatcaacgctgaaaactcaaggatggccgatttgcaagctcacatcaatataaaggcggagcgtctgaaaacacgggcttggcgtctaaaccttgagcagaatgcttccaacgcagttcatgagcggaggtacctaatgcggcttgaaactacgtcggtatttccccaaagaggaagggatgatgcagtacagctatggtaggtatttccctcagttatgaaaccaaggtatcaatccggtaggagaaccaagcaacactatgtacacagtacctatgcacaaagaacaaacccttgcaacccaacatgtaaggtatcaatctggtangagaaccaagcaacactaaaccg

SEQ ID NO: 444304 - DNA, 159 bp, Triticum aestivum
ggggtgatggaaaagttcttggttcctagcctcaagaccttctctctgcaaccgtacgacccaaaccagggattaattccgggcgggaacaataaggcgttgggaattcccccgaagggtacctaatggcatccaatcaactccccggggcttcgaacc

SEQ ID NO: 444305 - DNA, 132 bp, Triticum aestivum
gggtcgaccgggcaaagcttgtcaaagatgcctttgatccggcaaaagaaaaaggcccctggcaccattttaattgaggaattggagccaattggcgcaaaccgttttgccatccagttattgggggccacc

SEQ ID NO: 444306 - DNA, 104 bp, Triticum aestivum
  unsure (1)..(104): unsure at all n locations
gngantgttttctgnnngtcggtccgganagganatcccggccggtccggctgcgaaaagacnacaggactcgacgggccccacaagtcgggatgagactctgg

SEQ ID NO: 444307 - DNA, 394 bp, Triticum aestivum
accggtcagtactccgggtcgacgggcagtaaactcacatcacgtgacaaaagggaaaaatagagcggtgcccatagaggtacgtgccatacggcctatcccagaggagtcccgccactggttgttaaaaccaatcaccttcgaccatcaggattactctagaagtatccggtatgcaggatggactgccttgatattagatctgataattgacggactccaatttacacaagtcctaatggacggcggcagtgatctaaacctgctataccaggacacaagccgcaaaatggggatagacccaaccaaaattcaccatagcaacacttcctttcaaggggtaatgccaggcccacatgcccattgtacgggctctctactgctagaagttgtg

SEQ ID NO: 444308 - DNA, 414 bp, Triticum aestivum
gaccgggaggaggccaagtcgcgaggaggcggagaagccggcaggcaggctgcgccgctgccaggtccaggtctagcgcctcaggcaagggagagggagggggaggagcaggaggaggaggttgcccgccatggggatgaaatttctgaacaagaaggggtggcacacggggagcctccgcaacgtggagaaggtgtgggtggcggagcagaaggagaaggaggagcagcacgagatcgaggagtacaagaagcagctcaaggaggagcgggagaaggccgagttccgcgccatccaggagcaggccggattcaagccgaggcaagagaggttggaattcctctatgagtcagggctgggtgttggcaaggggagttcggatggattccaagcactgcagcaacctggcccagc

SEQ ID NO: 444309 - DNA, 399 bp, Triticum aestivum
tacatgcaactgcagctgatgaaaagaatccagaacagaagcgtgtgcctgtttcaattgatgtccaagatcctgacttccatgattttgataacgatcgcacagagagagctttttatagcgaccaagtatgggctacatatgacagtgaggatggaatgcctcgtctatatgcaatggtgcagaaagttctttcaatgagacctttcacaatccgcatgagtttcctcaattccaaatccaatattgaactgtcgccaataaactgggttgcctctggtttccacaaaacatgtggcgattttagggttggaaggtaccagattaccgtaacagtcaacatattttcgcacaaagtcagctggactaaaggcccccgtgggattatcagaattattc

SEQ ID NO: 444310 - DNA, 397 bp, Triticum aestivum
ggggatctcacacaggacggcgtaaaagggcaaattgccaacaacaatggccaaaaaaactgggaaatgcaccccctgatgaaattggaccaccaccccctgctgaacctggaaatgctgcttcaactggattcaaaaaaccgcttgggaggccgaaaaaggagaaacaacctgcatcaatctctgctgaaactggagatgcaacccctgctgggactggtgatgctgaaactggagatgcaacccctgctgggactggtgatgctgaaactggagatgtaacccctactgaaactggagcagcaacgcctgctgaaggtggaaatgctgcatcgacagggatcaagagaccgcttggaaggcctagaaaggtgaagaagtttgggaggccaagaaa

SEQ ID NO: 444311 - DNA, 193 bp, Triticum aestivum
ggtcgaccggtccctgcccacggagcaacaactagcattagtaccctactgcaacgcaacgcccagggagctaggcaagccaacctacaacctaaacaattgttcaatgggaactccaataaccaactgggcggaaccttgccaaggccgaaggtaaaatccggcccctcctccctctcctccggggtttccg

SEQ ID NO: 444312 - DNA, 297 bp, Triticum aestivum
accagctcacgaaccaaagttcactgcaaatggagttgattgggaagaagttaagtaccccaggatgaatttggtcccccaacaggagaggtaggatccaacttctttcaagggaacacaggctcaagaggttctcccaccacaggaccacaggctaaaagcaagggacaagcttcaagaggagattgatgcatttgaagaagctcccaaagccttggtcaatttggttcccaagactacatcaagttctacttcatcatgtacgactacaactccagggatttccatcaaaagggg

SEQ ID NO: 444313 - DNA, 143 bp, Triticum aestivum
tccgggtcgacggggctgccaacaagaggaggcaggacgagcaagaaccgcaagcgactccagcaggcttagacttcatcagcagcctccctgatgatatgttgacagtcatcatctccctcctaccaatcaaatatggggac

SEQ ID NO: 444314 - DNA, 418 bp, Triticum aestivum
ccgggccgaccggagtcgaaaaagagatcgaaggaggtgcaggcagagaagctcaaggagacggccaaggagaagaaggagagcattgagtcggtcaagaagtggaggaagcagaggcaacaggggggattttccaaggggaacgaggacgggccaaacctcaactttgaagttgaaggactcaagcaacacaagaagcataggcctggcgtttctcctggtgacaggtctggtggtcttgctaagcgaggcaaacaaggaaagaaccataggtcaaaggattccaagtttgggcatggcggccgcaaagggatgaagaagcaaaacactgctgagacgacgaatgacttcagagggtttaacaaccagaagggcgagtcaagaaacaagaagaggaagatgttttgatacggtgttg

SEQ ID NO: 444315 - DNA, 274 bp, Triticum aestivum
  unsure (1)..(274): unsure at all n locations
ttttatttgttcgttatcgctgtgttgtaaaccgttggctgctcgagaatgatcctctgcaagtgtttgtagcaacattccttttctgttttttgactttgataagagtgtaactttatctgtggtggtgtagaattctaaagctgaatcgctgtgccttgtanaagcttgacattgccaaatggcaccaagaaaatttggcataattattaggcgtgaatgtcgatggtgataaccatctgggaatgcanaactttagacttaggtttctgat

SEQ ID NO: 444316 - DNA, 246 bp, Triticum aestivum
ggatcccgcggggcagagaaaacatgagccctggcctggaggctgaagcacgggacttggctgaatctgaattagcatggaccaacaaatcaggagcgaaccgagtgaaagaattctaggaaaagggcagggtctctgaagacagtcctaagctattctgtaactaccttaaaacggtgtgctctgtatgcttgtaaaagtaacattgaccgcattttttgtggaggttgaaatgagaggagctag

SEQ ID NO: 444317 - DNA, 112 bp, Triticum aestivum
cagataaatcggaatagtctgacaaatcggttttgctcttccccttattcataaaggcaaattcatccttggtggtatgcttggataaaacaactgggttgcctggggcggt

SEQ ID NO: 444318 - DNA, 387 bp, Triticum aestivum
agctcgtgatgtttctgcctcaccatgtccatgtattgggaacgggctcgccgatggtcacggtgcaatgcaccagcgaggatggcgcagaggagggggttggcgccggatcatcgaccaccgcattctccattgggacgtcggcgtcctctggatgcctgccggccagccagtcggtagcaatggctgccatctccttttggtccgtcgtccggccatccggaagagtgctggagcgcgaggaaaccatcgtgggagtggtgtggacaggagaaagggaacggaggcaaatgactacggctacggccggcgcagcagtttatatagcaatggtgggcggcagagggacggacgggtagcgccggagtagctgccttggcaatcgtg

SEQ ID NO: 444319 - DNA, 372 bp, Triticum aestivum
cggaaggactacataagaattgggtcaagttggagcgtgattgagctgtactcgtctatggtgcgtgatttacccgcttccagtgcgtctgaactcgacggactagcagtaatgcaaactgaaaaatggagcgtgatattacagctctatgattatatacctctcagctcacgtctaaccgagattatgacaagtatgaaagggcatattctataataagttcgacatagtcacagtagcatcaggatattctttagcgagaatactatgagagggcacattcgaatcgaactaagacgagcgagagcaacgagcacaatcttggaaccgtacatccaatacagctggtcagcgtgaacaatcgagtcggat

SEQ ID NO: 444320 - DNA, 453 bp, Triticum aestivum
ggggctccaatgcttccagacggcaccagtggacctccaaggatgcacctgccgggtggattgagctcgaggggctttggaacgtggtggaggggctgcgggggtcaccggcaagctcgggtcggggacggcgactagaggcctgcccgatcgggctgcagctaagctacggggtcgtggtggttgtgcggtgaggtttgaggcttcggagcagaggaaggggctctatatatagccggaggatgagggggtacgtggctccgtcagagttctctagaagtcggcgagcgacgacgaagggtgccagcgagggggggagagctcagcgatcatgcgggagctgttgcagctcgcggacgagcacaggaagcaaaggggggagaagacacgggcacgggcgcactatggcttttggccgcgacgtacccgtgatcgctatggcatctccggcat

SEQ ID NO: 444321 - DNA, 259 bp, Triticum aestivum
cgacgggcagagcagaggcgaagagggaggccgcggaggcgaggaggagccaagaagcggagcgaacggatgagcaggcggcgcagatccgtaagaccgggcacataccttcctcaatctcctgctggtgctggtgcctatgataaatcccatgcctctgagcatcgtagaaatgtttctcctgaaaacgaccattgtaaaaatgctactggctcatcttttaccagcaaggaatgcaaagtgtgtcgccgttttcgtc

SEQ ID NO: 444322 - DNA, 402 bp, Triticum aestivum
gacaatagacacacccaagtcgctaagcattttcatccggttttggcgcttcacattaagattcttccttatctatatgagtctgtttgcatggtatcgacgtttggctggaattaaaggttctcagcattggctccaacgcttcaagctcttatctaaattatcatcgagggccatttaccattcaacttgctcaacagtgtttttccactgggatgcacaatttgtgtttgactaataggatatccttggtgctgatctacgtagtgatttcaacatcatagcagtataatgtccaagctgtgtgtctcatcaacctcctctgccacggcttcatcctcaccctgagcatcctcttcctctggtccaacggctctgccatcggatccaagtttacttcca

SEQ ID NO: 444323 - DNA, 135 bp, Triticum aestivum
ctctcaaatgaaggtgtcagtaactatcagatgttaagtgtctcgaaaactttctgataattgtggtatttgctttgtaatggtaatcgtgaaattggtgtggttgtgttttggtcaatgcctcggcttttactc

SEQ ID NO: 444324 - DNA, 414 bp, Triticum aestivum
ggacggagacgacgcaggccagctgttggacaggctcacgagcgcgaaggcgacgagagggagaggggcccgagcaagaagacgccctggacgcggccaacgctagcggagcgcgcgcattgcatgtcaaagctcgtgttcaccgtgtgcactggtgcacacagtggcacacggcgggccaaacaatgtctgggggcttgtccttcctggggaggttgcaactgcggtggtagtttggttaaaagtgacatggttaaatgacagttaacacctgaagtttactgcagtaaacttgatcgtgtactgctgctcaacagggaggtgatttggtcaaatggagttgtctgggaggttgaggtaaagaaggacttacatcctggtaactatggaggggtttggatcaagatttaacag

SEQ ID NO: 444325 - DNA, 236 bp, Triticum aestivum
gggcactaccacttagttcaacttctccgcccacgcccagcgaggacgagactgacgacgagacccgagagaggccgagacctggaagatccgaatccatcgccgctcccccacgcaacgagatgtcttcacccgcagagtactacaattcacttccaccaataagcaaggcatatggaacattgtgtttctttacacagtgctggttcagctccagatactagacccaggccttc

SEQ ID NO: 444326 - DNA, 133 bp, Triticum aestivum
aaaatattattgcgttgcgcgtgttgttaaatttgtatcgacgagcgtacaaataatggaacatatcaaagattttttgttttggttaaaaaaaaaaacaagaaaccaaaaaaaacacaacaaacccaacaaa

SEQ ID NO: 444327 - DNA, 110 bp, Triticum aestivum
tcacctcctgggaggtactcatgttgcattccctttttaaaaaaatttttgcacggcgtgcaaaagaaaactcacggccgcgacatatatttaccacgttttattatttt

SEQ ID NO: 444328 - DNA, 232 bp, Triticum aestivum
tgacaagctgacggcggccgttgatgactatatccgctggtgtatggcaagcactgacagggcgcaaggttggtggttcggagctgctacgacgtaccgtgtatgcatgctggttctgtgggcgctatacgccgcgcatacgtacatttggacaacgccatttgtatgttgtgtttgtcgctcaattacgtcgttaggtcgatctctgtcgatccgtcctgttaagttcttg

SEQ ID NO: 444329 - DNA, 417 bp, Triticum aestivum
gacagtagagttgactagtgccgatttcctccatctccatctccagctccggctcccagatcgagacggcggcggcgatgggcgcgcacccttacgtgccggcgagcctggacctcccgggctacgtgccgctgcgcctcacccagctcgagatcctggggacctacctcggcacctccctcttcgtcctcgtcgccgtctggctcctctccgggagatgccgcaggttgtccgggaccgaccgcctgctcatgtgctggtgggcgttcaccggcctcacccacatactcatcgaggggcccttcgtctttacccccgatttcttcaccaagaccaaccccaacttcttcgacgaagtctggaaggagtacagcaaggatgactccaggtacgtcgccagggacaccgccaccgtca

SEQ ID NO: 444330 - DNA, 253 bp, Triticum aestivum
catgttaggaccctgtagtgttgtttgttagcagcatgtaaatatatgatgcaaccgtgtatgtgttggacacaggcacacagtttacacatccccatgagttgtgatgagctctatccaaggtatagtatcaggcagtaggctaatcgtctggttctatgttgcgaccggttacagagctggtgttttaaaaaaaaaaaaaaaaaaaaaaaaataagaaaaaagaaaaaaaaaaaaaaaaaaaaaacaaaaa

SEQ ID NO: 444331 - DNA, 409 bp, Triticum aestivum
aacctaaaaatgttgagccggctgccataaagccagaggcggtggagcatgatggtacagaagccgatccaagtaaagaagcatctatacctcctcaagaggaaaccactgctgtagccttggttacaggaccggaacaaaatgaagaagcagatgcacctactcaagtcaaaccagttgctgttatacctggtacgggaccagaagagaagaaagtagaggcatccacccaagaggataatgctgaagcagttgccgcagagccagaatctgctagagcccaggaaaatgcggaagcttctactcagcctagtcctatggagatagagtcagttcaggaaacagctatgctgggagaagctgaaaccaggcagcaactgccacttccgtctgccgagggtgtggtggc

SEQ ID NO: 444332 - DNA, 145 bp, Triticum aestivum
gtcgaccggtcgacgagctgcagtcaattctactacatggagccaagacaattgtggacaaaaagaagatcaatgctgtatcaattcattatgatgacaaggccatcgacattctccccaatttaaacccttcaatggggaaaat

SEQ ID NO: 444333 - DNA, 229 bp, Triticum aestivum
ggtcgtgaatttgaaagaaacttgtgttaaagtttgtgattcccgtagcatgcacgtatggtgaaccgctatgcgatgaagtcggagcatgatttattttttgattgtcttccttatgattggcggtcggggacgaccgatggccttttccaaccaatctatccccctaggagcatgcgtgtagtacttcatttcgataactaatagattttggcaataagtatgtgag

SEQ ID NO: 444334 - DNA, 483 bp, Triticum aestivum
gtgacaatagtaaccttactgaattggttgcggagctagatggtctacggaaagagcatcacagtctaagatctgccttcgagtatgagaaaaacacaaacatcaagcaagttgagcagatgcggacgatggaaatgaacttgataaccatgactaaagaggcggacaagttacgagctgatttggcaaatgctgcaaacagagcacatgcagcacaggttacacctccacagcctgggacaggacaagctgcagcggtttcagcagccacaaatccatatgcaagtgcatataccagtcacccctccgcatatcagcaaggaacttcccaagccgcggcataccagcagggaactgcccaagccgcggcataccagcaaggaactccccaatccgcggcataccagcaaggaaccccccaatccgcggcataccagcaaggagccccccaatccgcggcataccagcaaggagccccccaat

SEQ ID NO: 444335 - DNA, 472 bp, Triticum aestivum
gcacccaaatggatagttcttcgcagccatcagaaggttcaaacggcagcagggttcaaagtcttcaggtgggcgctctacatggcaaagcactgtcctccgccgagcttttggctaagatgcgtggaacgcgagagggggcagcttcagacgcactggaacatcagctcagcctgggctctgcttccaaccagagaccaggctcgacagagaacggacgcacatctaactcttcttctagtaggaacattatcgtgcaacctgaagtcctgatccgccagctgtgcaccttcatacaacaaaacggtggctccgccagctcgacgagcttgacggaacatttcaagaaccgcatacaaccaaaggatatgctggtgttcaagaaccttctgaaggagatagcaatgttgcaaaggggcgcaagcggctcaacgtgggtgctgaaacccgagtatgggtaatttgcggcagt

SEQ ID NO: 444336 - DNA, 413 bp, Triticum aestivum
tgttccatcttcatgcatgctcaactcaacacccctcttcatgcatgcttctagtgtatttgtgctaaactagtgtggactcatgcaccctccatacactctaccaaacacccaaaaggaggtcgagaagggaactcttgggcggcatttgtctcttactacgtactaccactaaatgttgtaggtgcaatgcacggtgatgttatggagtacgtgcctaagtactctactactacggtattagttggaggcacatattaacttttatatttgtttacgtgtatgccccgagaccttccaactagacgtgtctttctctccatgtcgcactttgtatcgttcatacctctaagtactactacgtgtggtctccgacccagaagtggaagaagtggagatgctctaccatgctg

SEQ ID NO: 444337 - DNA, 407 bp, Triticum aestivum
ggagtaaacgcgctctgcaaggagccggtgccgcagatcgtggcgcgcccgctgcccaacgacatattggagtggcattttgtacttgaaggaagtgtagccacaccctttgaaggtggatattactatgggaagcttaaatttccctctgattacccttttaaacctccaagtatcagcatgacaacccccagcggcaggtttgcccctcacaaaaggatatgcctatcaatgagtgattttcatccagaatcttggaatcccatgtggtctgtagcaagcattctaacaggactcctctcatttatgatggatgatgctcttacaactggaagcatcagaagtacagatggagagaagaagcgtttagcaaaggcttctcttgcgtacaactgtgagagcaaaaa

SEQ ID NO: 444338 - DNA, 422 bp, Triticum aestivum
acgcttccgtggcactcggcgttcctgttcatagacttgtgagagccgctgattcagtttcggtatgcctatcgaaaggtttaggtgctcctgttggatcagttattgttggttcgaaggacttcatatacaaggctaagattcttaggaagacactatgtggtggaatgaggcaggttggaattctctgtgctgctgcctatgttgcggttcgcgacacggtaggcaagcttgccgatgaccatacgaaggctaaagttttagcagatggactgaagaaaatcaaacagtttacagtcgatctaacttcagtggagaccaatatggtattctttgatattgcggatccacacataacgcctgacaaactgtgtcaagtcctggaacagcgcaatgtgcttgcaatgccagcaagctccaag

SEQ ID NO: 444339 - DNA, 517 bp, Triticum aestivum
  unsure (1)..(517): unsure at all n locations
ganacgtnnntaggtggtcggtccgnatgactggatcacggccngnccggttgttgnngcnnntgctgctgttgttgttgttattgttgtcgctgttgttgctgttgttgttgctgttgttgctgctgttgttgctgttgctattgctgctgttgttgctgttgttgctgctgttgttgttgctgttgttgctgttgttgttgctgttgttgctgttgttgtagctattgttgttgttgttgttgttgttgttgttgttgttgttgttgttgttgttgttgttgctcttgttgttgttgttgttgttgttgctgttgttgttgctattgttgttgctgttgttgttgttgttgttgttgttgttgttgttgttgttgttgttgttgttgttgttgttgttgttgttgttgttgttgttgttgttgttgttgttgttgttgttgttgttgttgttgttgttgttgttgctgttgntgttgttgttgttgttgttggtgttgttgcngttgttgttgtt

SEQ ID NO: 444340 - DNA, 441 bp, Triticum aestivum
ggtattctaaaaagaatggtaggaagaaaattactgcagcaaagaaaagtgacaagagagctcaaataaaggcaccacctgcaggaagagtcgtcgtgctcgatgagaatggagtgccacttggacacaggaaatctagtctgtgcaaccaggttgcgggacacaacaagctgacatgtccaacactcttggaaagaaacaatgatgaggaggtcaagcaacccaaatctcaaaaatagcagcccaaagttatggaacaaaagaagggaccacacccaaagaaagcaagtagtagactttgtagcatatgcaaggagtatgaaccacataatgcaagaacatgcccgaagcacgctgatgctgaaaagacaagcaaaaagatagagaagaaacataaagcaaaacctagagccatcaacaagaaagtggtggaagatgaag

SEQ ID NO: 444341 - DNA, 483 bp, Triticum aestivum
gggaatcaaaaaacagcgtgggaggccgagaaaagagagaccgccagaagaaatgtctccagaaactggagatgcaatgcctgctcctgaaactcgagatgcagcgcctgatgaaaatgaagcagcaacgcctgctgaagctggagatgctgcttcaactggattcaagaaaccgtgtgggaggccgagaaaggagagaccaccagcatcaatccctactgaaactgaagatgcaacccctgctgagactggtgatgcaaggcctgctgaaactggagcagcaacgcctgctgaagctggagcagcaacgcccgctgaagctggaaatgctgcatcgacagggatcaagagaccgcttggaaggcctagaaaggtgaagaagcttgggaggccaagaaaggagaagccagaagaagcagcaatatctggtgaaactggagatgatgctgcagcagctatatttgctgaatctggagcagcaac

SEQ ID NO: 444342 - DNA, 253 bp, Triticum aestivum
agtaccgcatcaacaggaacggtcttgctacaaaggtggagaagtcacgaaagcagatcaaggaaaggaaaaacaggaccaagaagatccgtggtgtgaagaagaccaaggccggagatgcgaagaagaagtaagggcctttgcttggtttaggacggtatccctgtggcaatgttgctgagtgcttaattataactagaaaagactttgtcatttatgtcatctcctggtatgctaagaggcattttgtagt

SEQ ID NO: 444343 - DNA, 395 bp, Triticum aestivum
  unsure (1)..(395): unsure at all n locations
gtcgaccggtcctaggctggaactaaagttttaccgtcgtagtctccatggcttgtgcagacttgggtttcatcggcaacttttcacactgaccacctttgtttgtaggcttgttgaacgtcgtttttgttcgatgagcgacaagctgcataaaattttctatatccatggattttgaagctaactcttcaaacgtgaggggcctcactccttgtaactggacagccacttccgancggagattgttcatgcacatgcgcactgcttccggctcattgattggctgtgggcaatgaagacttaggtttctccatctgtttatgaaatcagccgccctctcgttgaacccttgttcagtttgggtcaactcagttatgcccaccgtcctctgtgtg

SEQ ID NO: 444344 - DNA, 428 bp, Triticum aestivum
gtgtcattattgatttgcttgccatttgcaaaccgtgcatccgtttcttgtgttctttatatcgatttcgaccgaaatcatctcatctttccagtggcatgcttggtttgccaagttactgccttgttcatcttttcccttccggaccacgcatacgcatcgcatatcatatctcgcatatcatacatgttttgcatcatgttgcttgtgcatttctcgtgattgattgtggttcgttgcttgtgttcttgtcttgggtagagccaggagacgagttcgtgaacgaggaacctgtttagtacgcttacgaggatcaagctttcgacaactctgagaaccttgcaggcaagataaccacccctcgaaatcacttctatctttgctttgccaattgttccgctcaattgccatgttgcgctacctaacac

SEQ ID NO: 444345 - DNA, 470 bp, Triticum aestivum
ggggagcaaacaaacccttcccaagcaggctcaacgcagttcctccaagaatttctaatgggttaattccaggggtttcatctgaggcatatcagaaagacaacaaaatgtggaagaagcatgtgaaggcttatagcaatgtgaacaagtatctacttactggtaggtacagaaacatcatggacatgaatgcaggttttgggggctttgctgcggcgatcgagtccccaaaatcttgggtgatgaatgtggtgccaaccattgcaaagattgcaaccctgggggctgtttatgagcgaggattgattggcatttaccatgactggtgtgaagctttctctacttatccaaggacctatgatcttatccacgctagtggccttttcaccttgtatagcaataagtgcagcatggaagacatcctccttgagatggaccgcatcttgaggcctgaaggtgctgctataatg

SEQ ID NO: 444346 - DNA, 447 bp, Triticum aestivum
gggggtgtacacttagtgtcgaggaagagtgatatccatgggaatcagttgtactagtagcaaaaaaaaaaaaaaaaaaaaaaaaaaaaaaaaaaaaaaaaaaaaaaaaaaaaaaaaaaaaaaaaaaaaaaaaaaaaaaaaaaaaaaaaaaaaaacaaacgaaaaaataaaaaaaaaaaaaaaaaaaaaaggggccgcccaaaaggttcaaacttaacttacccttgaaggcaacttcaaacccctccaaaagtgcccccaaatttcattccaggggccttctttttaaaacttcttaacgggaaaacccttgggtttaccaaattaaacccccttgaaaaaaatccccttttcccaactgggcttaaaaccaaaagggccccaacgtttcccctttccaaaaatttgcccaccctaaagggcaattggaaccccccttttaccggc

SEQ ID NO: 444347 - DNA, 184 bp, Triticum aestivum
tgctatgtgcttcggtatgctggctcagggtcatatgtccttggtctcgcgcttgaggctgctgctgcagcattctcttagacatgggtggtttgacaagcttgtgccatgctggacgataccctgcgggtgcgcgcagccggtgggctcccaggatctccggcgtccactctgtttgcctttc

SEQ ID NO: 444348 - DNA, 310 bp, Triticum aestivum
gttactagtgcgacgtggtgagtgatgttttggtggctggagacgctgtgcgtgtggggatggaagtgatcttgtggttctgtcatcagtgaatctagtagcccaaatcagacacattttctatttctcaaggggccgtccgtcctcctgctgattggattgtgcttcttcgttctgttcccttcttcctctggttgttgatgcctcaagcagccgctaccgattgtgtgcttgtagttgtttcttcagttccattcctctgcttgtagatgcctcaagcagttggtgtatataaattgatcctattgat

SEQ ID NO: 444349 - DNA, 262 bp, Triticum aestivum
ggtctcagtcacgccctggtttttacttccttactgcacatggacctgcctgtggttggtgtggtatgatgatgatgatgataataagtttccgacgtcgccgaacagccttgcctttgccttgttagctgcctgcttcgacagaatctgagacttgagatgatgatggtctgtagcgcaagttgttttgctacctgtggttggtgtggtatggtggtggttaacgagagaggcgtcttggatgatgcggtttggtcctttg

SEQ ID NO: 444350 - DNA, 399 bp, Triticum aestivum
  unsure (1)..(399): unsure at all n locations
gacagagctagcaaaagctcttgccgagcagctatttgacaatgaaaatatgttggttcgctttgacatgtccgaatacggtacgaagggatctgtgttgcgcctcatcggagcacctccaagctattttggttatgacgatggaggacaactgactgaaaaagtcaagagtcacccgtacagtgtcaccctgtttgatgaggtggaaaaggcgcatcgcgaggtgtaaaatgttttccttcaacttctcgatgatggtttgttgaccgatggcaaaggccgaacagtagatttcanaaacaccatcatcattatgacctcaaatcttgggtcaaagcaccttgcagcaggaatggttgggaagaacacantgcaagaaacacacaagcttgtcatgaa

SEQ ID NO: 444351 - DNA, 394 bp, Triticum aestivum
acgggggtagcgagtggagggctgggccggccagctacagtgctgggccggtttggctaccaggtgagcgccaggtaggcttctgctccctttttttttatttctgttttctattttctgtagtttgttttgatttagtttagcaactaaatcatttaaataaattcagtagaattttatgtggcttgctaaaatatatataaagccactcacaaacttccagaattattggagtcatatttaatatatattaaatataaatccaaagcaaatagttattggattaattcaaatggccaaaataattatctctgtgactccaaaaatattggtttgaattttacctctcaccaatatttccatggaataacaggaacattttcttggacacatt

SEQ ID NO: 444352 - DNA, 402 bp, Triticum aestivum
acgggagactttaacctatcaccgtcacaagtaagatttcgtcgtgctttttatgtaaaccacctaagaacaaacctctgggaacatcgtcgctattcacgattctgcctgaaaaaaaagtaaatgaattgattaaggaaaatatggaaatgaattaaataaaaaaagtaagagatcagatgttgtaaaaataaataaaaaaacaaatgaaaagggggcgatcctaagggttcaaggtttatttcagcttgaaggcaaggtaataccccttcaaaattgccgctttaattcaattcaggggcgttgtttttaaagggactggacgggaaaaaccttgggttatccaatctaaatgccattgaagaaaatccccatttcgcaattgggggtaatatgtaaaag

SEQ ID NO: 444353 - DNA, 478 bp, Triticum aestivum
gggggagattctaagacacgattgtgtttgtccactattagcgtgacatgaaaattcctactaacgcaggatcgcatcgcattttctggaaggacttcgaagtggagttctggtttgcctttcctgatgatccttttagccttatgtaccttgagaccaacaactcttggccacgaaaacccatgatatttgtacacatttgaactatttgctctccataatgttcgttttgcctcacctggaacctgcatagattgagtagaactttggcattatgttaaaaattggagatcttaaatgttttctaatgttgttaccaacgttcgcatgatagagcatataaattaggtccgtagctgtaaatgtatctaaaattctagacaagcaaacacatcattttttgttttttctgatgttaaaccatggcattccttcttatgatggtgatatatgtaccttgggcatgtattccgcaacc

SEQ ID NO: 444354 - DNA, 416 bp, Triticum aestivum
ggaagtaggagctgcgccgctgggcctagggaagagggggagggtctttcctttttcattttatattcgtttttctttttagttgttttctgttttctatttctttttaaaataaattcttttataaaatataaaacttgcacctaaactagtataataaattagaccaccaccacaattagtttagcatttaaataaattagtttagaatttttataaattaaaaagcatttaaataattgttttagcccctattttaaatatttatgggcacttagacacattataaaaatgttggttcaccaccataattagttatgggttattttccacgtgatgaatattttagtattcatgtttgtgtatttctttatttcacttacaatttgaatttgaattcaagtggaatttgaaat

SEQ ID NO: 444355 - DNA, 382 bp, Triticum aestivum
taacctctcagagaagctcataggagtaaggtgtgcgtgtgtgcattcataaagatgagtgtatgcacgtatgtatgagcgcttgcgcctgtactgtgttaaaaaacaggagcctagtttcccaacccggctcaacacatttccgacgaaggccaacccggagaccaaacaacatgaggcgtttctccgatggccctcgtctgctgcggccccctgatgtcatctccggccacggctcctaaaaggacattgacccaccggctccgctaccaagcccgccttcggcaacagggatctcgatgcttggcggagcgaaacaggttttctttgtcgcgtcgtcgcaaaggctggactcgccagcgtcgccgcccttccttttgcc

SEQ ID NO: 444356 - DNA, 415 bp, Triticum aestivum
gaccaaaagggagagttgtataaaaaagcactactggagtccttcaaaggtgcatctccgaagaggaagggcggaagcttttggcagaaattcacgccggactcggcggccaccacgccgcagcccgggccattgtaagcaaggccttcgtacaggtttttatttgttgacggcccgggtagatgcacatgacatggtccaatgatgtgtcggttgccagcttttttcaaaccaaagccacatgccacccaccgccctccaaacaatccccattatctggcccttcacggtctgggggcttgacatggttggaccccttaaagggggaacccataagaaaaaaatacttactggtcatggtggataaattcaccaaatggatagaagacaaacctgttaaaacggccgaatcggg

SEQ ID NO: 444357 - DNA, 424 bp, Triticum aestivum
gtcccgggccgacgggaaacacaaaactgcggtggttatctgtaaaccagcctgaccgggagctcgaaatgcttctgagtagaagaagcaacctttcccacttccacaacgctcgttcgctatctatatccggtgcggtggacgacctactattccctcttgataagtttatctatctggtggtgttggaccttgaaggttggcagtgcttcaaggacgaagacatgttgttgatatgcagcagcaggatgctccttctccgttatctgagcgtgaagaatacaagagtccgcaagctcccggccaagatcaaggagctgcgcagtctggaaacgttggacatgagccacacagaggtcagtgagctcccatcagaagcgtgcgagttgtcacggttggagacgctggacctaaggagcacact

SEQ ID NO: 444358 - DNA, 318 bp, Triticum aestivum
  unsure (1)..(318): unsure at all n locations
agtcacaggaacagatttctgtgatgaactactttccaataagggagtaggtacagttacctcatcaggttcaacttccctccaattcacttctttagggagaaaccccttccctaaaaaggatcaatcctaagcagcaaatatctggcctttggatcggtgataaaaggtgtacccaacagtccctttggggtaccctataaagacacatttctcctatttgggttcgagcttatcaggttgaagctttttcacataggcatcgcaaccccanactttaagaaacgacaactttggtttcttgcaaaaccatagttc

SEQ ID NO: 444359 - DNA, 290 bp, Triticum aestivum
ggctgggagctaccgacaagtactaacatgttgcgacatcaagtttgctttttatttatgttcctgtcatgtacgtacttgttgcctcttggatcacctaggtgtgtgtatgcagggagagcacagcctgttgtctgcggcaatagcaggcttcagggtttcgatgcccctttgcagttcaagtagccataggatttcccttacttacattgcaacaagacattactgctgttgtttatcatgttgatttcgcaatcctcttatcaagcattctgattcagctgtgctat

SEQ ID NO: 444360 - DNA, 482 bp, Triticum aestivum
gatgttgatgccaaggaaaaggaggtggtggctatgcgattagagaaagagcaggatacgaaagcaagaaggttcggcagttcaagcacctctgcctcacagatgccacctggaaggactctgcctcggagcggttcagcacgcaacatgtgatgctgatatgaagcattaaaaagaccttggagcatcccttgtgtagttagttgaatcatggcatccagggaccctctgctgacttgtgtgtagagaaaacaagaagacattacatcttggttgcctgcccagaagtgtcgagcctgagcctgaccctgatcgatcgtgcctactacatctcgtggtcgcggaaatcaatcaatcaatcagcgactcgagtcgggtgaagttagtgtcgttgatgagatttggtggtgtttttattcattttctatcgtggaatcgaaacactttgttgtataggtatggtgtggccttgcaatattttt

SEQ ID NO: 444361 - DNA, 407 bp, Triticum aestivum
  unsure (1)..(407): unsure at all n locations
gaggttaaggaggacggtgccaatggaggaaatggtggggcatgcactgaggaggaccgagacctcagcaccactgtgctacgaagacatgcatttgcatacttgacaaaagggggcggtaccatatctgagggtcttgttgctgcatcgtcacctgtggacttgcaaaataaactgcaggagcttatcgaatcagagcatcctggtgctggttggaactacgccatcttctggcagctttcgcgcacaaagtctggtgatcttgtccttgggtggggtgatggctcttgccgtgaacccaatgatgctgagttggcagctgctgcttctgcacgcaatgatgatgccaaacatcggatgctgaagcgtgtactgcancagttgcacaaagcatttggtggtgctga

SEQ ID NO: 444362 - DNA, 175 bp, Triticum aestivum
ggccatgattgaccatgaattcatggtgcagcacgtggctcccctccagtcgcgaccgcgcccgctgtggaagcttggagacgaaggggacgacctccgcttgcgcttagagcccctttccgatgaggaatagcgctcgaatcttctttccttgctcggggatgaccaagggtac

SEQ ID NO: 444363 - DNA, 283 bp, Triticum aestivum
catcggacagaaagtgaaggagatgaacacggaagcggtggcagccaagaactgatcggtggcggcgatggcgacggcggcacgtcatgatcggttacctagtcataaatttgtttcagaataacgcattgcattagcatgtcatcaaccacccacacgtatgtatcacctgatccatcgatgagagttcagttcgacaacgatgtaatttcctcctgccttttttctggttttaatgtgatgaaatttaatgaaaaaaagtcaacaaaaaaaaaaacaaaaa

SEQ ID NO: 444364 - DNA, 113 bp, Triticum aestivum
ccgggccgacggggacgatacaccaagcagaggagatccggcgaggaggcattccagcaacgtggtgccggcaacatcgggccatagcatggcgtcggtgacaaggcgaggga

SEQ ID NO: 444365 - DNA, 318 bp, Triticum aestivum
attggaaaataaattcaaagggctttgaatttaattctttgaaactcccaactcatatttcatataatttgaagaagtcattttatcttctctcgtgaaaatcattgagtcgcataaagtttcagaattggaatatttccaaatgaaattcaattattctcagaaccccttgtcatttaaataaatggaagaagtcaggtcatcttctctccggggttttgtgttgaaaagaatttgaattcacggggatcagaaagccattatgaaagtttgggaaagtcgttttattccctctcatttacctttcaaaaggttttg

SEQ ID NO: 444366 - DNA, 413 bp, Triticum aestivum
gacggggatattgaagctggtgaatacgaggaaatcagttttcagcttaattagttttactccttttgcttcttcttttttgagggattactccctttaatttttgtttcagaggcctgatatatccatgttccatgtatactccccttatatataaagtcattttcactctgtgggatactagatgttgcagtaattagataagtgaagtaaagtaaaacctcatgtgcacttcatcttagtctaatcaatgtggtcaatctcaagatcatggtggaacatggtgcaatgaaagtatgcgccatgaatggacagaaacggtacagcaactagggttctcggaacatgcaaagcagccgaaaacggaaagccagccggcctggagctgggggttgcatcgattccaaatctcc

SEQ ID NO: 444367 - DNA, 412 bp, Triticum aestivum
tcattcaaccttgcaggtatgccgagtggatttctaacattgtcccagtatagaataaaggatctggcaagttgagggtgtgcattgatttcagagatttgaatagggctacacccaaagatgagtatcctatgccaatagccgatatgcttattaatgatgcttctggacataaggttattagctttctagatggtaatgccggatacactcaaatttttatggccgaacaggacatgtacaagacagctttttgatgccctgatttccttggtttattcgagtggacaatgatgacattcagattaaaaaatgctggcgccacatatcacagcgctatgaatttgatttttcatgatttactcggtgtcatacttgaagtctatattgatgatactgatgtcaaatcgga

SEQ ID NO: 444368 - DNA, 438 bp, Triticum aestivum
gtcgaccggccaagaaaagggagaaacttttcgaaaatcattttacaagtgggggaggggaaaacgagaggcaaatggcgaagaatgtaatgcaagggaagagagtttatgatgggtacttggtgtgtttgacttggcgtagatctccccggcaacggcgccagaaattcttcctactacttcttgagcttgcgttggtttttcccttgaagaggaaagggtgatgcatcacagtagagataggtatttccctcgattagagaaccaaggtatcaatccagtaggagaagaacgcacaaataacctaatacctgcgcaaacaattaaacacctgccgcccaacgcaataaaaggggtgtcaatcccttcacggtcacttgcaaagatgagatctgatagagatagataaattaaaccacaacaaagatcaattttttt

SEQ ID NO: 444369 - DNA, 182 bp, Triticum aestivum
tgtagcaccctcaccaccctcatcgtgctgctctacagctgaacgattttttaggaatagaaaaataatgactttgcgagctagacctcgttaccttctttcaggtcatgttatgagttagcaggtcattaggcaatctaattctccccccgtttagcacagctagtcttgttttacaagag

SEQ ID NO: 444370 - DNA, 475 bp, Triticum aestivum
gggccgacggggaggtggagaaatcgcaggcggagggggtgcacacgtcgacgcagatgggcagcgggcacttcccggaggaggggttcggcaaggcgagctacttcaagaacatccaggtggtggacagcaccaacaacctcaaggcgccccatgggatgggcaccttcacggagcagtccaactgctacgacgtgcagaacggcaacaacgccgactggggctcctacttctactacggcggccccggccggagcgccaactaccagtgatgacaagaacaccaccatgactgacgagtgagtgaagtgtagtgtggtgcaccatctgcattgttaggcctagatgatgataggtgtcatgtgaatgggtcctggtgttgtctcctgatttttttcttttttgattttctcccgtgtgtcaatcaagccttctgaagagaagcatggcatgtggtgtggtctgtggtggtgca

SEQ ID NO: 444371 - DNA, 417 bp, Triticum aestivum
  unsure (1)..(417): unsure at all n locations
gactaacacatataaatggccatttgtattccaggtaacagtcctgaaaagaaagaggacgatggacctgagggggaacggaggcangagagcattctggatggctatgctgaggcggctgtttatttgatccatggtgtangaagcgccggtcaacacggtggagctgcgccgtgggagggtgctggtttggagatccgcgtgactatccgagcgctagtccacctcagaatggaagcaagtggtgccttgcgggtgcctcgccatgccatggcagtgccctgtacgaaaccaatgcacattacgtttttcatgaccatgaaaagataaacgtgaaggtcgggcatacgctataacttgatgatgcatataaaatatgatgtctaagaaagattcggtacacatgtttctgaatgt

SEQ ID NO: 444372 - DNA, 62 bp, Triticum aestivum
  unsure (1)..(62): unsure at all n locations
ggangtttgctggcnctacggtccggacntnccntctcggccggnccngatctccaagagaa

SEQ ID NO: 444373 - DNA, 238 bp, Triticum aestivum
ccggtcgacatcaaggaagatggaggcgactaatttcgaacacctggaactcttttctatactgggtttttgctcttattatgcagagaatattatgtgacctgaaacttattatcatccccttgtctgtaatgtaacacatgaagtttagctttgattcagtgtaaccaacctgatgcacacgtacgttattgtgtttttgtatggcaacgaggaggatctgcactggttgctgacg

SEQ ID NO: 444374 - DNA, 235 bp, Triticum aestivum
gcgactaatttctgccacctgggactcctttccgttccggggttttggtcctaatttggcgggcatatgtatttgcctggaacttattaacaaccccttggccggaatgttacacatgaggtttaactttgagtcaatggaaccaacctgatgcacacgtacgttaatgtgtttttgtatggcaacgaggaggatctgcactggttgctgacgaaaaagaaaccagcggtggtag

SEQ ID NO: 444375 - DNA, 334 bp, Triticum aestivum
cattgtttaccgaggatcggggtgatatagattgttaggtccgcagtttgccactttgtaatgttcctccctacatagcgttgtcatgccatgtgtgccttgctctcagcagggaagttgagttgttgtatgttgtgtagcataacgatgctttctgcctgtggaattaaaccataaagattgccaaaaaaaaaaaatgacaaaaaaaaaaatcaatgggcacataaacatggtgctcacgtgttgaaatatgttctgtgacgcggaaaagctaagtgtgctgtcacgaaaaaattgggcccaccaagaggttcaagcctaacttggactggaa

SEQ ID NO: 444376 - DNA, 118 bp, Triticum aestivum
ctacaaaacgttgtcaagccatgtgttccttgctctcagcaaggaaattgagttggtggacgttgtgtagcaaaacgatgctttctgcctggggcagttaaacaataagattgccaac

SEQ ID NO: 444377 - DNA, 476 bp, Triticum aestivum
ttgcaggaaccgtcgtcggattttgctacgactgatgagatttttgctacatccatcatgatggagcttcgaccgatgacgatggtgatggagtttttgctgcaaccgccgtcaagttttgctacgactgggcgagaaatttgttacatccattctttttttacggcaaagaccggtggccgtcgttcatggcgaaacccgtgcgacgagcgtcaatggcgagggatggtaggcggtgcactgggaccatagcgcgtccaccgcgggggttggaacagatcggcggggttggattgaaaccagcgatgtcggagctgcaaccgaaattaatggtgaccggggaagaggtctttggcaaacatcggggaagagcagcgcagcaaggcggcgagatgcgagcagccggcggtcgttcgcctcgccggagccgcggacatggacggaatcatgcggataaggagggaagggcctctttt

SEQ ID NO: 444378 - DNA, 485 bp, Triticum aestivum
ccgggtcgacgtacatcatttccctagacatcaatccgatcacaatcgcccgaaacttcttggcaggtatgtactgggtcggcatgaactcccattggatggctgccttcagagaagacggtaaaaagttggtgctcatgaacttccagacctcccatgagattatccttcctccgttggattatatagagtattaccatcgcggtccaagtcatctagattactacgtcagttggacggaccttgttttgcagaagattgtaatctgccaagtacccacacgatatgcgaattacatagacttcaagctaattgccttgttcaaccgcggactcgcctatctttataccggtgccttttttagccggagacaactcggctcacaatggatcatcgtcaaggccgatacacacttctgtgatgctattgaacacaatggcatcatctacgcgatcgacaaagcagatggcaccatgtattgctgg

SEQ ID NO: 444379 - DNA, 430 bp, Triticum aestivum
cggaacggctacatgcaagtctgatcaatcgatgatcgtcggaagcaagtgcagtgcagtgcagtcagccagaggaagacgaaggcgtttcgatcagtccgatcccctgttcttttcatccagacaagtcgggagggggtttcttgtcagctagtcggtttctggcttgtcagtagctgcggtgcgtgtcgtgtggatcgagttagttgtactaccagaaattcggaatgacatggaacccatgcgtatcatagcagatggtacgggctgcctgcccttttcctgggtgttcggttgggtttggttcatggtggagtgacagtgtgacaatgtatgcctggcgatgccactacagggcgtgtatctgtaggcatattccgagctggctttatccctgtggatctgttttgtccgcttattttgacactgc

SEQ ID NO: 444380 - DNA, 429 bp, Triticum aestivum
  unsure (1)..(429): unsure at all n locations
ccgggtcgacgggctcaatcaagttatgacgaccgactcacagcccctcaaattaagacctacagttcccatccagaggtggagtcgtggacttcccccgacctcagcgcaggaggtctcggccagtctgtcaagccttcccgtcttcgatcgtacgtcatgtcgtttgattcagacacgttacaaacttacgcgacaatccggtcgaaggtggcgtttggcatcatcgagaagcacacggaggcgctattcgggaagccggagatcgtgatcaccccggaaggaacggtcgattcttccaaggatgagtatgtcaggataagcttctccgggttgagaaggctcatcttanaggctgtcaccttcggatccttcctctgggacgtcgagagctatgtggactccaggtacaatttttgtcacaactaa

SEQ ID NO: 444381 - DNA, 364 bp, Triticum aestivum
ggtcgaccggtcggagcgtcttatataatatgattctttgctttttagtttgccacaatcatccttgttgtacacaccttttgagagggacacacattaatcatgaatttattagaatactctatgtgcttcacttatatcttttgagctaggtagttgctctagtgcttcacttatatctttttagagcacggcggtgcttttattttgaataaattgatgaaccctcatgcttcactaatattattttgatagtctcgaaaatagtatggcaattttcttagcttatgaatttagtcctaatatgatgggtatttaagaggggtataataaaaactttcatgaagatcattgaatatatgag

SEQ ID NO: 444382 - DNA, 416 bp, Triticum aestivum
ccgggccgacgggcgggatcatgatactgaggaatatataggataataaggtggtgtattaccaccatgcccgttgagctgatgtttgtttcagctagagaaatcgttacgcccgctcataattcctttttcgacgctctggagaataataactactggtatatcattctatatcaaagccggcttgtgaaataaatgatccgccgtcttgccttcaaaataaaaaaaaaaaacataaaaaatagaatctggaccagtagcttgaagcatccattttctggaatacgaattaattccgcttcatgggggtctcactgattcatgtcacatggagttcgtatataatggtggatgttgagttaacgttctattagtgcatactaatcgccttgcaggagataccccttttgcaaaag

SEQ ID NO: 444383 - DNA, 464 bp, Triticum aestivum
ccgggtcgacctggctgttcttgaaattgtagtatataggtttacctatgcctcatgagtgatgttcaaatcatgtcaaataaaaatgatggttcagatgataataactattattgttgttgttgtaataaacttgccattttgtaacagaagcatattgttatgtacaggttgccttggtggtgagagccgcaaaggaagtttgagatgtacaggtgaagttgatgattaagagggcctgtgcaatgttgtatacttgttgatgtaatctggtgtagttgttattgaggtcaggtgaattgatgttggatgtgttctttgacacattttaaaaggcctttactcaatgaaacaattgaatagaaatttgtgaaatggaatagaatatggtctattcaatggaaactgtgaaagcatgtttgattatctgtaatgggtcgtgccacaactgtttggatgaatat

SEQ ID NO: 444384 - DNA, 435 bp, Triticum aestivum
  unsure (1)..(435): unsure at all n locations
atataagaaacggtgaaagggccggattctgaaaacgcagaaacagggagagacaaatccaatctcggaggggctctcgcccctcccaaacaatggaaaccatggaccaaaggggaaacccttctcccatctagggaaaaggtcaaggaagaagaataagaagggcgctctctctccctcgcttcaaatggcaccggaacgccgccgggggccatcatcatcactgcaatctacaccaacacctccgccatcttcaccaacatctccatcaccttccccctctatctacagcggtccactctcncgcaacccgctgtaccctctacttgaacatggtgctttatgcttcatattattaaccaatgatgtgttcccatcctatgatgtctgagtagattttcgttgtcctatcggtgattggtgaattactttgat

SEQ ID NO: 444385 - DNA, 361 bp, Triticum aestivum
aaaatctagctagtcgatctgacggacgctcagcggctactgcggtcgaactcagcggacgaagtgcatcgcatgatggcggagatcgacatcgacggtgacggcatcagcaacgtcaccgagatcatctccttctgcaacgccaaagccgggcgcatgaaagacgtcgccaaggtcgtctgaatcagttcatgtcacctcagccgtccgatccatgagccgatccatctacgctcagcttcgaatatcaatttcatgcaactacctactccggtcacaattcagcctcagcttcacctgaggccggccctaattttgttcgatcatgttatatgccaccactattgcctagtgatgatca

SEQ ID NO: 444386 - DNA, 414 bp, Triticum aestivum
ggtcgaccggtcacctttgaaagacaccgttggtacttttcttataaagtcctccctcatggaccttgtaggccttcgatcgccagactatgcagcgggcctcattttggtcttcgggaagttcctgcctaagtaagtaggctaggaaaggttctgtcaacgcggcgattactgcaattatgacgtgggcggaggatgttatgtcgtctgccgaatcaccggttggtgcggttttctccggtttgtcgctaccgggctcctcttcccatagtacggatggcttgaagagccgttccaggaagatatttggagggacagcatcacgtttcgcaccgatgcgtgccaggacgtcggccgcttggttattatctcgggctatgtgatggaattcgagtccttcaaaccgagctgaca

SEQ ID NO: 444387 - DNA, 467 bp, Triticum aestivum
acttgttagtgaaccatttgctgtttggggccttgcttctctgggaccttttccttcgtctactgggtatacacatattctagttgttgttgattatgttactaagtgggtacaagctattccaactagtactgttggtcataacacttctattaagatgcttaaagaagttatttttccgatgtttggagtccctagatatttaatgactgatggtggttcacattttattcatggtgcttttcgtaaaatgcttgctaagtatgatgttaaccatataattgcatctccatatcatcctcaatctagtcgtcaagtaaaattgtttattatagagattaaattgatattgcaccagactgttaatagatctatacagaattggtccacgaaacttgatgatgcactatgggcatttataactgcttattaaaatcctatgtgtatgtctccgtgtaaactggttt

SEQ ID NO: 444388 - DNA, 367 bp, Triticum aestivum
gtttatcctttgcgctatggcttcacatttatcttttagagcacggtggtggttctatctttattgatgtttctaatctctcatacttcacatcttccaatttgctcgtctttggactcatcgggtatatttactttgcatgcatcggtttaaagcatgtcgcatcattgcgtcacttcttcttgtgttgcaatagcctggtcgacctctatcaggtgtgcacattgagtactttcccctatttcctctcgattgtcttcagcttgggttctagattatcattggcggtcgatcacctctgtgtcggaccttcgattcttggggtgttgcacctgtgctttgattacagttgttcgccattggcttt

SEQ ID NO: 444389 - DNA, 369 bp, Triticum aestivum
aagatcggccatgcccccaagttgcactctttgggatatttggattcagaaaatcatgtccaagagttcggcaacactgtcatcaatgttgggacaaaggtgagcccacgcaccatggcgccaagtgtgacgatcctggctttggatgtgcgttgtggaatccgcagttatgccaagatgatccctactgtcatcagatgctttccaaacgttgagacgctccacatcatgtctggagaaactggtcaaccctctggcaagcacaaccttgatttccggaatgagtctggtaccatagcatgcatctgctcgtgcatcattctgctggttttccatgatttccgaagggatcgacatgagcttgctttc

SEQ ID NO: 444390 - DNA, 395 bp, Triticum aestivum
aagccagagcaagacgcgcagacagggcacggcggcgcggagaacgtggaggagtacctgagcctggagagccactcgaacaaggcgaggaggatggagagcacccagagcgccaagttcaagaggagcttcacgttgccggcgaggatgagctcgtccaactcgccgtccccgtcggtgtcagcctcgacggggccggcgccgtcgcagcagcagcagcagcaagggatggagtaccgagcgcagcacgagggcagcgtctactcagacctcatggagacgttcttggagtagcaacgcatgcatgcgtcgacggtcgatcgatcatccttacgacgacaagcgtacggactctatgttttcttgttcccactttttgttttgttccaaccaag

SEQ ID NO: 444391 - DNA, 398 bp, Triticum aestivum
gtcgacgggcggctgctctatagtgacatatacagatatgctcatgtagttatgtgtgctgcagatttattggatctgtggactgtggccaaccattttgattctaactgaacattttcgagctactggttgctggtgctatttttcttgcagctggccatgctcggctgcgggtggttgctggtataccggtgctcggtgaatggcattgttgcggtgtggttctttggttcttgctgtcgttgcgtcctgtgttaatgccgggatcaataatagcaatagtggtactggcagcgaagtgaaccactgatggtttgtggtaggcctgaatggatgggtataatagtatggtagtagtataatggcagtatatgcagattcaactacttatatttttc

SEQ ID NO: 444392 - DNA, 369 bp, Triticum aestivum
  unsure (1)..(369): unsure at all n locations
ccgggtcgacggccaggtacatcaactacgcggcgctgcgcgccgaccagatcccctgcgacaagcgcggggcgtcctactacatcaactgcgggtccatgcagcaggccaacccctacacgcgcggctgctccgccatcacgcactgcgcgcgcaacatgaactgatccgtcgtccgtaggcctggtggatcttgcgcacgtacggcactgatcgatgcgtacgcacggagcggcgaggaggtgtgtggccgtgcgatcacctaattactaattgtacttgtagaacgcccgtgcattgctacatacgaatgattataaataaatgaagctgactgtacanatttacangtcaaaaaaaacnnnnnnt

SEQ ID NO: 444393 - DNA, 420 bp, Triticum aestivum
cgtgaacactagtgatcatgctcatggaaacaatgtagaatttttcctgaagattctcacaaaaataattatccccttgtacaattccattgtattataaaaataatgtgccaagatttgcctttatgatgagtagatttcttgttggtatgtgcgtgcaaaaacaaaaactttggctgtagtgcgtgattttacatttttttattggaacgtcgaaagtttctgaaactttttgcacagtcttgctatacaaatttttttcttttgtcctaatttttcagaatttttggagtaccagaagtatggttaatgttcagattactacagactgtcctgtttaagacagattctgtttttgatgcattgttttgcatgttttgatgaaactatcgattctatcagtggaataagccatgaaaa

SEQ ID NO: 444394 - DNA, 343 bp, Triticum aestivum
acaacgaaggatggatctgcgtcgccgaatccctggaacaacctggcagggttatacggatgaacagtgtctcattttttattcaagcatgctgcatgaccgatcgacaccgtgagcgcgtacctcagtgtttaaatgccctggtaaacggtgatatagtagtatagtactccctccatttcataatgtagtgcttcctttatctccgtacttcaaatttgaccgtaaatttaactatcaagatcgattgtggcgggagcaaaaattatatatatcagaatttttggaataccaaaaataaggtttctctttaaattactaaaaaaagtcctgtctaagaaaa

SEQ ID NO: 444395 - DNA, 321 bp, Triticum aestivum
cgagattcactgttgcatctccagggtaatgatttgggtgcgggagggctggttcacaatgcaacttaatcctaatcatccccctgccaatagggaagggtaatcctggttaccttgcctgggttgaccaatggcgattcagaccttggttaagccttaaaatgggccaagtaatttttcctccttgtaccaggaagtttttgccaaatcgtccgttaaacggtgaggattaacccagacccatttcctgcatggtaaaccataaatggttcgacaccatgggctatctttttttgtttagtactggggccagacccatca

SEQ ID NO: 444396 - DNA, 209 bp, Triticum aestivum
cggtcgaccgggattagtgagttataaaaaaaaaaaaaaaaaaaaaaaaaaaaaaaaaaaaaaaaaaaaaaaaaaaaaaaaaaaaaaaaaaaaaaaaaaaaaaaaaaaaaaaaaaaaaaaaaaaaaaaataaaagaaaaaaaaataaaaaaaaaaaaggggccgctcaaaaggttcaaatttaacttaccctttaatgaaatttaaaac

SEQ ID NO: 444397 - DNA, 340 bp, Triticum aestivum
ggtcggaaacacgggtcgaccgcgttttaacagacagtccacctaccgcatcaggagccatagtgtgcatggcacataccaagggcaatgcatttgtttttcctattgctaaagctggagctcctccaggaggaggagaaaacaccaggccactgatcataacccacaatggtgcaattggcgtcttctcagacagcacggaccttgcctaccaacaagcggtgaaagatggcgcggatataataaattgctgggtccggatgtcgaaagacggggtcgccttctgcctgggctctacagatctcaacagcagcacgacaagcagccacaacttcttggg

SEQ ID NO: 444398 - DNA, 442 bp, Triticum aestivum
acggtctaaaatcccgggtcgacagacagatatagagacagaaatatggggagataatgagttcgaataagaaagtgttgcacttgcttcatgggctaaaagcattccctgatgcaaatgtgagcaccaatgacatcattctgcaagaccaaactccctatgttttgaagctacacaacagaagtccagaagacagggcttgttttgagataactggccaagcaccaagttcctctggctcagattctgctggtttccctacttggctcaaggtttctccaacagctggtataatctgccctggacagacggtagaggtcactttgcagcatggagtcctgcgtggaacatcgtggaataatttgtctggggctaaccatgaaaatgcagcacagttatcggtgaaaataactggggcgtgttctaccgttgccaaatgtta

SEQ ID NO: 444399 - DNA, 247 bp, Triticum aestivum
gtaccgatctatcactggccgaccggcatatggaagcagttgaattgggggaaccttaagcaaaccgggattctggtgtgggttaccgttaggaccgactggaacaaagaagtggcccaagccaagaaaagattgaacaaatgggaaaggaacaagatgcctccaataacaaggcaagaatgaaacaatggattctggaaaagattaaccggaatgttggccgttcccaaattgattcccccaaaat

SEQ ID NO: 444400 - DNA, 370 bp, Triticum aestivum
ccgggctggccatgtcacgcacgttcggcgactactgcgtcaaggactacggcgtgatctcggcgccggaggtgacgcagaggaggatcacctcccgggaccagttcgtcatcttggccaccgacggggtttgggacgtggtctccaacgaagaggcggtgcagatcgtggctgacacgccggagagggagaaggcggcgaagcggctcgtccagtgcgccgtccgcgcctggaggcgcaagcggcggggctacgccgtcgatgattgctcggcgatctgcctcttcctccacccgccgccatcgtagacgggcgcgcattgccatgtggaccaggaagagagagagagaccagaatggcggatcactgc

SEQ ID NO: 444401 - DNA, 174 bp, Triticum aestivum
ggtcgaccggacgaagaagatgaggcagatgaagaagaggaagacgaagaagaggaagacgaagaacaagaggaagaagaagacgaagaggtagaccacgacgaggaagatgacgacgaagaagatgacgacgaagattaggaagatgaagacgaagaagacgaagattgaaga

SEQ ID NO: 444402 - DNA, 388 bp, Triticum aestivum
  unsure (1)..(388): unsure at all n locations
ttgtggtgagttgatcttagcctgtaaatgcattttcagaacctctgatggatgtgatgcggcttcataatgacctgacagtaaaccacagtttcagttcctcggttttctttctttcttctgtctttctttcttgaaacttaaatatgtatttctttctttctttcttgaaacataaatatgtacatatttctttctttctaaatgtcgaaggaattatttctaacctgcatcatgtgcattcaatcttcggctgttctggctgtgcattgccattgtaaattatcgccatttatcctgngagctcatagcttcccacatgcggtgaaccgatgaaatccatccagcaaatggtctggttttcagaagaactcgtttcaagatttgt

SEQ ID NO: 444403 - DNA, 356 bp, Triticum aestivum
tccgggtcgacgggccagggggacgcagccgcgaccgtcgttaataggatgctcgtcggcgccaacgggctcaacctttacagggagatgtgaaaaaggaagatatatatatatacaaccgacctcgtcgtcatagtggtcttgtacataatagtcacccgaaggtgtgctgactattttgcctgcgtgctggaagctgttccggccatcagattagaatctgatggcgcgacttgtttcgcccttttgttttcgtcggtcggtgtgataggatatatttttgcgtctgttgttattgtcggtattgtaatgaaacaaatatgacttcgattctcttgctgctagctgggttttct

SEQ ID NO: 444404 - DNA, 398 bp, Triticum aestivum
  unsure (1)..(398): unsure at all n locations
cggtcatgtagtccgggtcgacgggggttgcgcgcacaggaagccacttctggggattcgaagggcagggtgtcatccctgatatagtcactatggcaaagggcatagggaacggaataccgataggagcggtcgttaccacacctgagattgctaaggtgttaacccgcagaagctacttcaacaccttcggtggtaaccctgtcagcacagctgccggccacgctgttctcaaggtactggagaaggagaagctgcaggagaatgcgttcgttgttggctcctacctgaaggagaaacttaacgctctgaaagagaagcatgacattatcggcgacgttagggggaaagggctccttctcggngttgagctggtgaccgatcgccagaagaaaact

SEQ ID NO: 444405 - DNA, 266 bp, Triticum aestivum
acctctgaaaggagcgaaggagaggggttgagtagcaggctgcacccttcttgacgaagaaagaacgacgggcgaccgactgcgctcctcgcacgcgcctctgcacctgccgctactgggtcgagcaggttcagcacgcctccccacggccaacaataatggccggagcaaccgccgccctgccgcatccctccctcctctctgttccgtctcctcccatggctctctctcacttctctctctctcgcagagcaccacgagaaccc

SEQ ID NO: 444406 - DNA, 448 bp, Triticum aestivum
accggtcaaactagtccgggtcgacggggtccgggagagaccggtgctgaacgtgacatccatcggcaccagcgtggtgaacatgctgagccacctgctctgcgactgcggcgagaaggccggcaagcagcagagcaggggcttcggagtgcgctgctgggtaaccagatagtagtactagcagttgtactacaagttaagcgcactcgttaattactgattgattgtccgcttgtcgccactgttgcttgtaagtaagtactaagatggaaagatgaatcaatccatgtgaatcgtgaccgattgatggattgctttgtgcatgcatgggatgggaggagggcccttttggttgtgtcgttggttagtggcagagcatgtggtcttgtggggaggaaagaaagaccattggtcccgacccacatgagagaccgacggagtgcatggc

SEQ ID NO: 444407 - DNA, 355 bp, Triticum aestivum
ggtcgacgggggtagaaatcaaaaaatagcatcaagtgttgatggttaacaaggccactagtttcaagaaaagggcaaagggaaagaaagaggaacttcaaaaaagaatagcaagcaagttgctgctcccatgaagaagcccaaagctagacccaagcctggaactaagtgcttctactgtgaatgaaatggtcactggaagcagaactgcccaaatacttggcggataagaaggatggcaaagtgaacaaaagtatatatgatatacatgttattgatgtttactttactagtgttcttagtagccctagggtatttgatataggttcggttgctatgattagtaactcgaaac

SEQ ID NO: 444408 - DNA, 401 bp, Triticum aestivum
  unsure (1)..(401): unsure at all n locations
catccctaaaaccattcaccggtgtcatgcaccggtgaccaatcccgtcatgttcattcagactcagtacttcattgaaatcaccgaaacacacccatggcagaccgtcatcctcagcgagagatctcaacacgtcccaagtcttgcctctatcactgacttgtgcttcaccgtacatcactgtgagccgccatggagaagcaccaggcaaagtaacatgagcatctatgtgataagcagagtaaccaaaattttcaatctttatttcattattccaaaaaataccgagaccaccactcctaccagagctactaacagcanatgaattatcataacctagggtgcttgctaagttttccactctatctctcgggagttgagtttcaacantacaaagcacc

SEQ ID NO: 444409 - DNA, 262 bp, Triticum aestivum
tacatacgcttttcacgaacaaggtttccatccagcttacacaggatgaagcattacatagcagttgggagcaacaagtggcttgtgatgttgaaacccataaagctggagtctacatcggtagcaatcggacgtttttgaatcgcattgcaatcgaatggactgaccttgatgcaatactcactacagatcagtcactgactaatggaaatgtgggcaagattgtcgggtacgctgtcaatgatcatcttaaggaaaaata

SEQ ID NO: 444410 - DNA, 132 bp, Triticum aestivum
cggaggccgttgcgtagtggcgctcagcacggccaacctatcacagttgaacgacgtcggccctggcgccaagctgatgaagatcggcagccgctccatgtactcaccgggattcacgtgctactcggcgta

SEQ ID NO: 444411 - DNA, 133 bp, Triticum aestivum
cgggtcgacggggtatgacagataatatcgatataggttattctacaagattactctatagatccatcagctctaagtaaactgcgtataaatcatgtatgtataaggtatgtgttactgatgttagaagttg

SEQ ID NO: 444412 - DNA, 498 bp, Triticum aestivum
gggtcgacggggatacagacaaaaacatcaagagacagattatctcgcattgaagcagaattgtcacttttgaaagaaaggcagaagggactgactgagcagtgggagcgtgagaagtcggtgatgacaaagatccaatctattaaggaagagattgacaggttaaatgtggagatccagcaggccgagcgtgagtatgatctcaatcgtgctgctgaactgaagtatggtagtctgaatgcattgcagcgggaccttcaaaaaactgaggatgagctaaatgaatatcaaagttctgggaaatccatgctaagagaagaggtgacccaagatgatattgcagagattgtgagcaagtggacaggtattccagtttccaagttaaagcaatccgacagagaaaagctactgtatcttgaggacgaactgcacaagcgtgtagtggggcaggatcctgcagtcaaagcagttgcagaggccattcagagatccagagct

SEQ ID NO: 444413 - DNA, 458 bp, Triticum aestivum
  unsure (1)..(458): unsure at all n locations
cgggacagaaaggataatgcatatgtcacaaaactcagtaagtggtatttgatggttttcagcatataaatcaaagctcactttagggggattatttgtaggcaagaaagtaaagctctgaacagagatgtttgtgaggatttggtgctggccacactcatctgcgatgaagttggtgaggccggcattagaaatatattgcatgaactcctcatgaattccagcctcttgcaggaatggggtgtgcggccatccgcacggacgtacctccgccaacccccgagggtggagatcactgtcagaagactccccgataacacccttggagttcttcttcgagccaaacttcctgaagatattcatgttcgcgtacaattttttgaaaataaaaaaatttggggtgatgaaaaatcgtcaacnaaactttataagattgatagcaactactcatagggata

SEQ ID NO: 444414 - DNA, 413 bp, Triticum aestivum
ccgggtcgaccgttgaagtcaaggacatgggttccgacaaggaggagtagggcatggaagacagccggtggcgcctcatgtctcatgtgggccagtccatgtcccatgtcgtactcatccttgccggctccgattcttcactttgcgggtctcacggccgacagacatgggcacggaagggaacaaccaaggatgggcatcaacgaagattagactaatttttaccttgcaatgtaattgtatggatttgatgatttgctagtaatgtccctagatgtgaaagaggacatttcggaggagcctgtggaggataccaaagaggatgccgctgtgtgaatccgccagaaacctggcgccaacatttaccaagtcgttgtagctggagcaccattgtttgggagctctcgttgtac

SEQ ID NO: 444415 - DNA, 537 bp, Triticum aestivum
  unsure (1)..(537): unsure at all n locations
ggantcnnctgnagnccggtccggcggtnncgggtcgaccgggtggattggatgatggaaaaaccagcaagcagcaagcgtagttagaaaagttgccgtagcgcgccctacggagttgtacaaagtcagcaaccgttttggggcgcaagcataggcaacacaggactgatgacggggtggggcgcgcagtgaactggttttctaaaaagattggaagatccggccaaagaaggtgatagccctgttcattcgttcccatggttcgatccttcccagtaaaacgcggcgtgttcgaatgatgatcgcttttacgcgagaaagggggaccaccctctaagcctaagtattcctcaatgaccgatagcgtacaagtaccgtnanggaaaggtgaaaagaaccccaatcggggaatgcaataaagaanctgagattcgatgcgaacaatcantcnaaaggaccgganccccggcgcactcactctaacggggtaccttcccatgatgggtcaacnangaaatnggaacaaccggcttaacc

SEQ ID NO: 444416 - DNA, 373 bp, Triticum aestivum
tacggcaaattattagcaacgggagatagccggagatgaaacggcgagtattaagtcagcttcgtcggtcaggtcggtccttgtttatcccgtgtcctgctggccctgaacaaacccaacagctcgagtaacgtgactttgtactctaataaatagtgtcacggtctctggaaacaaaacttctatttagatggctcagcatttttttttttgcgaagaatggctcagcattcatgacgaatggataacaacttgactgtcaatttctgtcacaaactcacaacccttggatgaataaaaatatcttaaatgaaatagaaaaatagggggcgcctacttttcgcgcaactgaaaaaggttgacctcagccgat

SEQ ID NO: 444417 - DNA, 433 bp, Triticum aestivum
  unsure (1)..(433): unsure at all n locations
gcagatcagtaagagggtgtcctcggccactctcgcgtcgatctgctatggggttgttgtcgtccgccgtgaggaaatgtaacagcaagatgctcctcggcggcggctcttcatctccgtgtggtgtgcgcggcaaggaacaaccattgacgcccagcaagcacaagcggtcgaggaagaagcgcttctggaggaagaagaagtccagcaagaagttcggctgcgtcccctgcgtcagcctcaccgagctcaccaggcgcgccgagtgcgaggccatcgccgacctcgtcaacaacatctcggccaagtcagacgttaccagccacatgtacgcggccgaggagatcctgcggatcaccaaccataacatccccagtagagtgctcaccttccgtgagttgtccgcggcgnacaacaacttcagctgcgataa

SEQ ID NO: 444418 - DNA, 349 bp, Triticum aestivum
aaggatggaggtaaaggcggttcacatcgggctcaggcttcaagcttcggcgggttccaaccaagcaaaagtcccaaaggccacaaaaaccaaggacaatccccggcaaacaatcaatgccgaaaagccaactctcaaccaaccctcgagtaaaaacgatcggagctcttgtctcgagccaaggtaatggaggaggcgatgcaactatacagggaagcttgcgccggccgcgggaccgaaggcttcctgtaggttgcagctttgaactctcctgcctgtggctgcgtggtaagtcgctcggtggcggtgcctggcacggaaacatgtcctttgttacctgcacggtgac

SEQ ID NO: 444419 - DNA, 351 bp, Triticum aestivum
gttgggaggcaacccaattttatttttgttccttactttttgattatgtttagtaataaataattcatctatcctgtgttaaaatgtggtttaaggctttaaattagggttggtgccaattaaaaccttttggaggacttggggaaattctttgcaatttggcggtaaaaaacagaaactttacggcccacaaaatttgctgccgttttttacgggaaattgcaattaggttgatcctttttgcagatgattaatagataaattcctcacgtcaaaaaatttatttcagaatttttggggtacgaaagtattcgaaacctacagattactacagactgttctgtttttgac

SEQ ID NO: 444420 - DNA, 163 bp, Triticum aestivum
ggtcgaacgggcgaagaggaggaggaagaaggagatgatgaagaagaagaagaagaagaagaagaggaggaggaggaggaagaagaaggagaagaagaagaagaagaagaagaagaagaagaaggagaagaagaagaaggaggagaagaagaaggagaaggcc

SEQ ID NO: 444421 - DNA, 463 bp, Triticum aestivum
gatggcgaacggataaggaggccagcagcgtcgcccacatcgagcacttgtttgccgagctctcctcggtcggtcagaaggtgcttcaattcaatatgctgtccacgtctggtgggcaggatgccctcaaggaatccgtggacaagcatggcggctgccccggcaacaagacggtctatctatattctgcccaatgcagcgcggactgcaacgaggcatgctctaaccactgcgacatggactgcccctacatagccgcaagatttggctacatcatggctacacctgccaataagaaagccatcgaccaagacatggaatgcttcaagcgttgctcaaaggaaaaggatgccacaaatgacaaatgccgcgttgcatgcaagctggctgcctcgctcccttgaaaatgcatactctctctttttttaacccatgcttcattcaactctcctttttttttttt

SEQ ID NO: 444422 - DNA, 481 bp, Triticum aestivum
tccgggtcgacgggtagacgattctgatggtgtatacctcgtccatttgaaagagcttgaactccggatctggctccataagggggacgattggttgctggtccacaacatttgtctgcgtggcaagtttgctggtttgagtatgctagatggcaatgcttttctccaaataaaacaggtgggggacaatgccgagtatgtgttgctggagatgatgtgtcaatgcgcactctacttggatatcaagtgcaggacactgcatacagtgtatgaggtgacaaacgaggatcgatatttgggcgatatacatcctttcatgatgatatggcctccaaagttccctgcgctcaaggatgatcctgcaacggcaagaaatgccatgtgaagaacaagcctataactgggagttgctggatggtatgtacatatgtcagtggtaagctttggcgggtgcaatcaaagatgagctgagctgcatttc

SEQ ID NO: 444423 - DNA, 486 bp, Triticum aestivum
ggggcgaaaaaaaactagcctcccttggcctcgcgagagacacatgggaacgggtacgggaacgggtgtgtatttactgaaaatacaaatacgtaaaatgtggggtatatggcccttctttttctcgtcgcaaacattttccagaccgggaacttgtgggcggggggcgcagagatagagtaccacacgcatcacatgcccctgtggaaattgcaagtagcaaaaaaggaaaaaagaagataagagccgagccccgcccggtcaagaaaaaaagagcctgccggatgcagcaaccgacccgaggctggccgactattttgccccggcatatgtcgtcggtctgatgctctcgaatctctggattatttgcggaatatcctttgccatcattaaacaccgtcgaaagagacaagcaagcgagctcgtctctgatcacaaccagctcgcccaaggggcgaaacgcactactagtctgctacagtacat

SEQ ID NO: 444424 - DNA, 492 bp, Triticum aestivum
  unsure (1)..(492): unsure at all n locations
gggccgacctttcgcataaacttagggatcgatcgatgccctaggccggcccattaatgggttgcagcgttttcggctttgggaaccttctagagtttcccagcaggtttttctggtattgggaaccttctagaaggttccaaccggttttcctgtttctttttttttcctttttagtgtttctgtttattctcttgtttcttttttatttatttttccttatgctgtttcttcatttcctcttttcttttatttttgccttttttcctttttcatgttgatttcatgttgatatttgtcttttttctaaaattaaaaaaatcagattttaaaataagctccactctattaaatatgttcataaatccgaaaaattgttaatgtaaatttgttcacaaatttagaaaatgttcatatttcanaaatacttctggaattttaaaaaatgttcacggttgcaaaatttggtccgtgattcaaaaaatgttcccg

SEQ ID NO: 444425 - DNA, 456 bp, Triticum aestivum
gtaccgtactagaattcgcgggccgacgggctaacatatgagtgtttaatttttttttgtttgccacaatcatccttgctgtacacacctttcgagtgggacacgcatgaattgtgaattattagaatactctatgtgcttcacttgtatcttttgagctaggcaattttgctctagcgcttcgcttatatcttttagagcacaatagtggttttagtttgttgaaattattgaactctcatgcttcacttatatcattttgagaatctttttaaacaacacagtaatttgctttggttataaatttagtcctattatgatagacatccaagagggatataagaaaaactttcatataacgtgcattgaattccatgagaactttgattccttataattgttttgagatataaagatggtgatattagagtcatgctagtgagtaattgtgaattg

SEQ ID NO: 444426 - DNA, 239 bp, Triticum aestivum
ggtcgaccgggctcggaggctgatcaagctgaagccccccgtggagccatgatttttgcagttgaaaaatggttccttgcggtgtaggtaccccttggtaaaacccttgatgataccccacaacaacggggaacttgtgtgatcctccggtcctgccggtacggtgtacaaaaatttctttgatggaaatgtgatttggccaaatggtttcagtttcaaaaaagaaaatgaaccggaaa

SEQ ID NO: 444427 - DNA, 314 bp, Triticum aestivum
  unsure (1)..(314): unsure at all n locations
tgatcgccgtcggcacgctacctctacatttacccacgggattattttaaaccctaaaaaatggtaattaatggccagtttggacaaggacaatggaaccggattctggttaataccaaaatggtaacccattaaatcccggaacaataagtggtccaattaaaatgagaaataggtttaagggcatggccccatgggcaatgggttattcctaatgaatctcgaacgtantgttacacatattcatagtgtgaataccaaaagatgtaaagttgataacgatagtcccacatacttgtggcactgccgccttg

SEQ ID NO: 444428 - DNA, 295 bp, Triticum aestivum
  unsure (1)..(295): unsure at all n locations
gaaaccagatgatgggaaaatgaaaggcatcgcattcatcaaggatcctgatggttactggattganatatttgacctgaagaaaatcggggaagtgactgctgcngcatcatgatgaagtgttgaaactccaatgccggtaaaatggcttcgcgccttcagaaatgatatgaactcagttatacggaccatgcttacattcttgcaccgctagttacagcgtcatgagcaaagatatcatgtgaccgatgtttgagcatagatctggcgttgtaaccattcagtaatgtaagct

SEQ ID NO: 444429 - DNA, 356 bp, Triticum aestivum
gctaaaggacgccaaggtactgcggcggcgacgggctcgtgaccccctccacatccacgcatccaaactacaggccggcgcggacgcgagctagatggctttggaaaccgaagcggtggcgtgctcgtgatcccctcccatgcgtgtttgaggagcgtgaatccaggggcagcatacgcggcgagatcccatcctaggcgtccttccgtggtggaagatgatggctggtagtggatctggtggatcctagcctaataagctcgaagccgtgatgttgtactctgctttcatatgaatacgactacgctctctcaagaaaaatcaacgtgcttacttggctgtgatttgggtttttg

SEQ ID NO: 444430 - DNA, 421 bp, Triticum aestivum
ggaaattgaagctgggaaatcctttatgttgcggaggaagttcggagatccacggtatgcctctctagatcggctatggagtttggaggatgtgtatatggatttggcggcgagcgctgccgatgcggccaagtacttccagggtcagacggaccatgaagtggaccatctattttggacacaattccattctcccgagcgtccgctttcattgattgaccaattatccgaatgggccgaactgaataggttgtccggacttgccatgaggtctgttgtggatcagctatggccggaaaggccaaaactgaacagctattttagcttggtgcatcagctccttgacgtggtgccgcgcattaatgcgatgaagaggttggcgtgcatagagggctcacggatggcctttgcccgtgttaaa

SEQ ID NO: 444431 - DNA, 238 bp, Triticum aestivum
tgtggtgaaaatccctggtacttcaattatttcgtttgaccttgccggattctgcgcaagtgtctcgattctatctatttgttcacggtggatgatgtggtttgtggatactgctctgatcgcaaggttccgctcttggattcactgagtgtttgccaaccacatcggatttgcaacctccacggaaatcatcctagtcgggagatcacccaaatagattgattctacgatgaatgcc

SEQ ID NO: 444432 - DNA, 435 bp, Triticum aestivum
attcgccggtcgacgggcaggcttagaggtacgtttttagataacgaacatttagtgtttattacgcataataacatgcatcctatgtagatagtagcccctgagactctgtgtggcgcaaagatgtgcgacatgtagaggatcttaatcccaggtacctaagatggtgccctgtatatacaggcggctgattgtccggggtcaagccggacttatgaatatgccgaaatgaaacagcaacttgacgaggcagaaaccgacatcgcgctggttaaccaacggcttgatgaggctcaaggtattcatacttcttggcgagtattagtaagaggagttataggttaatatcttaccttgtgtatgcttgatgcagatggtgcggcagccgttgaaggacttaaggccgaacttgccaaggcgaagagccaagcagag

SEQ ID NO: 444433 - DNA, 334 bp, Triticum aestivum
ggccccgtggtggcaaccgcgcctaaggtcctccggcatcgccgtcgtaccccaaaataaggcttaaggccattaaaatcggtaactgggggaaataaaggtttgaacccaaaacctaaattccaaggggtttgattcggcaaaaaaaaaaaaaaaaacaaaaaaaaaaaaaacgggcgccccaaaagattcaaacctaactaaccctggaagccaactcaaaacccctccaaaatggcaaccaaaatcaaatcaatgggcgtccgtttaaaacgtcctgaacgggaaaaacccggcggtaaccaacttaaaccccctggaacaaaatccccct

SEQ ID NO: 444434 - DNA, 306 bp, Triticum aestivum
agcccaaagcggagaagcgggcgccggcgtccaaggaggccggcggcaaggcgaagcagcggggcacgaagaaggcagcagggcaaaaaaaaccttgaaaacttacagattcaaaacctccacggtgttgaagcaggtgcacccggacttgggaatctcctcaaaggcaatgtcaatcatgaaccccttcatcaacaacatcttcaaaaacctcgccggggattcggccaatctggcccgctacaaaatgaagcccaccatcacgtcccgggagatcaagacctccgtccgcctcgtcctccccgg

SEQ ID NO: 444435 - DNA, 448 bp, Triticum aestivum
ggtcggtatcacgggtcgaccggccattaactctgaataaattaaaggcacgaagtgcgtaccatggtatcggcttggtcaaattaatgggaaaaagcattggttccattgcaaggcaggcttcccttccaagtgggcaggttgagtccggcttaataccagagggcccatttgcgctcgatggagaatatggtgttttacagcacctcgagcagttaataaagaacaagggattctgtgtggtttgtgttgctgaagctgcaggacaagagttactgcaaaactcaggtgcaactgatgcatcaggaaatgcaatacttaacgacattggtgttcacatgcaacaaaagatcaagacgcatttcaagggcatcggtgtccatgctgatataaaatacatcgacccgacgtaaatggtccgggcttgtcgtgccaatgcatccgatgc

SEQ ID NO: 444436 - DNA, 341 bp, Triticum aestivum
cctcctcgacaaaatggaggacaccgaccccaagtccagtgcctctgctccggctgctgtccagtacgtgttcttgtttttcctgttagaggtctttccacagttccttgttctagtgtttgccctacacatgttaggatctacctcatatatgcatcttgatctactgtgtgctcgatagatgatcggttctagctcctatatgcacatgttatttaccttcactttgtcagatcgcatgacttgttttatcactgctatactagtcatgatttatctagtaattctgttatcatgatcactcgataaaattgctcatatttccaacatactcactccgt

SEQ ID NO: 444437 - DNA, 170 bp, Triticum aestivum
ggggcatcaattaatctttgggttttgtttagattgaatgttcgctatagctgcatcttcgcgtacttcggttgggttcatcgagtatacagccgtgtcacagaacccgatcctgatcattgctgctttcatcttatgttcgcaatatccagattgcactcctacattct

SEQ ID NO: 444438 - DNA, 409 bp, Triticum aestivum
gccgacgggaaaattgatcctcttgatgtggacgcctgccctcgtccctctcttcgatcgcactgtgctgataatgcgatcgagggcctcgatcaactgcacaaacactatgcttcccttgtactagtacactacagtctcagatgatgataacgcgacagatatggactgtgcttgtagtaacaaaatatgggtgctggggctgcacttaagctttacgagagtacgactgaccctatatgatgcaggtgtgctctcttcgaaaatatcttgtctcctccaatgcttttgggatggatgggaacatccggggccagtggtgctgcctcatcgcgtttggctgcttcccacacttggctatctccatgaccctgtttcaagaatggggatgtacctagtcagaagtcac

SEQ ID NO: 444439 - DNA, 83 bp, Triticum aestivum
attgatccaatcaaaaaacacacttgaatattaactacacccaatacttaagtacagtcatattgcctccaagttggggcttt

SEQ ID NO: 444440 - DNA, 127 bp, Triticum aestivum
attcgccggccgacggggttaagaattgtaaatatgcattgttgtatcccaacctgaatgaatggaataaacgagctaacgctgttgttcaatcgtgagaagaaaaaccccggactttgaaaattaa

SEQ ID NO: 444441 - DNA, 431 bp, Triticum aestivum
tttgaggaggtcatgcacaagctactgcagcttcgccagactgccacggtcgccgagtatcgcgcggcgttcgacgagcaaatgtaccatctgcttgcgctggatccatccatcaacaccaagtttttcgtcacccagttcatcatgggcttgaaggacgagctacgcgccccggttcggctccaagcgccctcgagcatcacccgagcatcggtattggcgcgcattcaagaggaggaactaggcacgatgcgcgcacgcccacgcatcacgccagcgggacggcctccactggcgacgcctcctccacaaccacgggcagccgctgatacgtctaaatgtatctataattttttattgttccatgctatattaaattctgttttggatgtttaatgggctttattatacacttttatattacttttggg

SEQ ID NO: 444442 - DNA, 281 bp, Triticum aestivum
cgaccggcacgtcggccaaaatcgaccgctacaacaagaagcccaccatcacgtcaagggagatcagaacctcgttcggcctcgtcttcccgggcaagctcgcaaaccacgccttctccaagggcacaaaggccttcacaaatttaacctctcccaaggcttaacctccgtttctcaacccgttggattcggtaggtattaacctgcaggattgtgtcctgaatgtgtaaccttgtgctgctggtgggtctgaagaaatattcatgggactgcttaatcaa

SEQ ID NO: 444443 - DNA, 369 bp, Triticum aestivum
ggtcgaccggtcgagctttataaacaagacgaagcagagcaagcccggcaagacgcagtcgacctcctagaggaggagagggaaatggcgatgatcagatcgaccatctatcagcaagacttgcgtcaattcaatgctaaaaatgtgaaaagccgagccttcaagaaaggaaatttggccctccgagtggttcaacagaaaccacacaaacttgccccaacttgggaaggtcccttcatcgtcaccagagtcctccacaatggagcatatcacctctacaaggttgatcgccagatcgacgagccacgagcttggaatgcggaactattccgccccttttaaacttgagttctcccttggacgggatgt

SEQ ID NO: 444444 - DNA, 255 bp, Triticum aestivum
cgcctgcaaaggatgccaagtcagcgtttaggatcccacacagggaatttcttgacatgctcctaccggatcttggactaatcaccggctcagtatgatcgtgttgtagatgaggacggaaagatatgtgtgaccatcttattcatcacctcaacagtggatcatggacgaccaatcagtagcaacgcgtcgtgtcaacattcctcatggtcaacatcacgcgcatggcatgcaacgttgtggatcgtctgtaag

SEQ ID NO: 444445 - DNA, 325 bp, Triticum aestivum
ccggctcgacgggggtatccggtcacctaaatattttcctccctgtcgccctccctccttcctttcctccactcgcgcttcgctctcagatcccttctcctccgtctcgcccgcgtgttggggtaggagccatggcggaccagctcaccgacgaccagatcgccgagttcaaggaggccttcagcctcttcgacaaggacggagacggctgcatcaccaccaaggagcttggaactgtgatgcgctcgctggggcagaaccccactgaggcagagcttcaggatatgatcaatgaagtggatgctgatggcaatggaccgattga

SEQ ID NO: 444446 - DNA, 428 bp, Triticum aestivum
actaacaatttatcagttaaatctttggtcaaaatttaccacaaattacaatagtgaggaataaactaggacggaggtactccctccatttttgtatacaaggcaactataaaaaatacattttgcatctatacaaggccaccaacagtaatcgagacaaatattaatgatgtttcctcgtactagtaacccatggcttaattactagcatgcatgtagtggatgatagtgacaaactcatctacttcctctctcacgcccactcaatttcttctaatgtgcatgcaccctattaattaacccagtaaacgagaaaataaattgatttgtaaagcacacattgatttttatcttggtacctgcaattttagtttgtggtcgtgtatataaaaatgaagggagtactagtagtagtttagaaacccaaa

SEQ ID NO: 444447 - DNA, 129 bp, Triticum aestivum
gtcgacgggcaagtgtgatgaataaattattagaacattgcccaaagaaaaaaaaagaaaggccaaaaagaaaaaaaagaaaaaaaaggcctaaaaaaaaaaaaaaaaaaaaaaaaaaaaaaccggccg

SEQ ID NO: 444448 - DNA, 213 bp, Triticum aestivum
gtcgaccggcccccaggatcaagacagcctccccgatgccggcgcgccggtcgcccaggttaaaaaccttgaaccaattaaaaaaggtgaaaatttccaaaaaaaaggaaaaggtccttaaggtggaaaggccttccccaatgaagaaaggtgcaaaggaaaaatttaaaccgaaaaacaataaaaacctttaaggacaagttggaaaacccg

SEQ ID NO: 444449 - DNA, 375 bp, Triticum aestivum
gggaaaccagccaccggcaactcatattctcggtccgccgccggcttcccatctgctcccccgcgcagctcgcgggcaaggaggggttcgatccaatctttctttccacttcctcctgagtcctgaactaccaacgcggctgtaaatctctgccatcgccgtccgcgttcttcctcatcgcaacatcgtgcccctccgcaatatttgcccagtgggttctaaggtcaaagaccagagtataaaataaaggtgggttactgttaatatttcatacaatggagtccttgtggaagctgtcctatttgcttgagccggcgtcacttgctctcatcgtgacggctgtttcagttgcctatgcatcagcgtctcgtgctc

SEQ ID NO: 444450 - DNA, 478 bp, Triticum aestivum
ccgggccgacgggattgcttaaatagggctaaagataatggttatgtttggagagttaaacaaccgaaacaaaatccagaaaaatctccactgttgattcccacgcccaccacgagtcagcatcctactccctcgcctagggactcctcgggtatagagacgacccacgcatcggtgcagacgagtcccatcacgtcttcacctcttcccgtgcaacaccagcctgctccacctccaccagagcaagacatggcaaactttcccctagatcctctcgagtttcttccgccggggttcgagatcatcgatggaggtccaacccgtctgcctcggaccttctactctccggccattgcacctgagcgccgacacgagtagttcgccattggctttgtcgagcctccgccgccacctggacagattcatcccttctattaactggttagtgattttgtgatgacccagctgcaccgtgacg

SEQ ID NO: 444451 - DNA, 109 bp, Triticum aestivum
ggtcgaccggacgaggttcagcacggagttccagctcgtcttccgtctgatcaaggggctgatattcataacattcatctccatcatcataatcttaacagcaatcgcc

SEQ ID NO: 444452 - DNA, 422 bp, Triticum aestivum
gtaagggaaccggctccggcaaggtggaggatggggtggtggacggacgaggctggccacagtgcggcggttgtcatgccgccgacggtgtctgaatggggaaatggacgggagggggatctcaaactttgggatgcgcttctctgaaatgggggaaagttactaacttatcccccatttaaaatttcggacatagcatcggttggggatacgacagtaatctcgcatctcccaaatatttgccggtaactatttcgagccagtgttgctgttctcgcgcggcctcggtggcagccatggatgaggtgactgatgcggtgaacaaccttaccataggggaatgagcagcggcgacggcgggagcggatgggcacaagaagaaccgcatccaggtctccaacaccaagaatccgctcttcttc

SEQ ID NO: 444453 - DNA, 431 bp, Triticum aestivum
ggccgacgggtcaaaaaatcatccccctagcatttacattatttgccatttgcctctcgttttcctctcccccacttcacccttgtcgttttattttccctctccttcccaatctcctctcttttccatttgccttcccgttgccatggctgagtcaaaaagaactaagggatctctccctagttttagtgccttggatagcccctctgtcctctctaatctcttaaataatgatgctatgggaagacctaccggggttatcaatgagatttttaattaattgtgatgaagatgactccataatttttcgttatttgcttgatgagtctttaaaagatgcttgggataggttattaaggattcgggctagctatgtgccacaatatcaaattgaagtttacttaaagagtttttatgttggcttgcccgct

SEQ ID NO: 444454 - DNA, 417 bp, Triticum aestivum
ggtcgaccggacttcagatctaagtccatggttgcatgcttaggtcccatgcaataaatgagaatgaatgtcaaacaccctgccaccgtcactcggccgcaaacattgagatacctggttttaaattctagtagatcgaaagctcgtctgaaattcatgaaacttggcatgttgtcatggagcaccatcaaccggggtaaattttttgtcccatttgaggcaggtttgggatatgcttctcacaaaccagagcttctcacaaaaagcccgatggtttcggtagggaaggtttcacctttctggacgaaacgatatccattgcctcttctcgatttcaattttttcctaatgtcaacatagaacaacatgagtgttgtgtcaatttttgtgatttttgggggttcgcttggacatttt

SEQ ID NO: 444455 - DNA, 382 bp, Triticum aestivum
  unsure (1)..(382): unsure at all n locations
ggtcgaccggccaagaggaagcagncaatgtgcttagaaaaattgcatacatcagtacatgacagtttagtaaaactgaaaaaagataacagaggaagacagatgttgtagtaaggtgcccaaccaaccaaaaggcaccaaaagaccttttaattttttgcaaaaaggcaccaaaggaattattacaggagaaaccatggaatatagaccaaatgttatacctaaccaaaccaaatggtaaaagccccaggatgtgtacgggtaatgaaatcaagggccctcaatgcaattatcaccatcccaatatggcaccactgtattcaagccaaaggtgagttgaaaatacaaaaagggaattccaaaaaaaaaaaaattaattttt

SEQ ID NO: 444456 - DNA, 413 bp, Triticum aestivum
acggggagattgaataagtggtggatgccgccaacagcacgaaggtgaataataagaccaagggtaggagcatacccatcaaacgggccaagatgaaggaacaagaggtcctcagagccaataggcctctactggaccagtacaatgaaatcggtgggcatcccgacaagagacagcgggtctgcgacaatgccgagctgccaaaggccctgcagcggtttgccaagaacaagcaatcatgatcttgtttatctagcagtttgtgctgtactatcatctatcatgtatctggcaggtagtatttgagtccatgtggacatgccacatgagacatcggtgggaaaggatgcaacaaatttttgtctcgaaataacttgatgttctagttgatatttagctcataaatcaacatg

SEQ ID NO: 444457 - DNA, 343 bp, Triticum aestivum
gggccgacgggcgaagttactgacttgccattatagttgacctgaagctccgttgtttaggaccattgctgctgctgtaggttagggagaaggctcgaggcagccacgaattccgtcctgcactacttcaacaccgacctattctagcatgaatcttctgccgtgaggatttgatgcagcaagggccatttgtttgacagaaacagagtggttaccgcaagagaggtacaaatcaaggaccgaggagggacgagggcggctttgatctaagttgggtcactttctatgaatagatgatgtgattgctttgttattttgtttaattaatagaaaaattgatgag

SEQ ID NO: 444458 - DNA, 58 bp, Triticum aestivum
  unsure (1)..(58): unsure at all n locations
gtgnganatcntctaggaagnacnannnnnnnnnnnnnnnnnnnnnnnnnggatgtcc

SEQ ID NO: 444459 - DNA, 392 bp, Triticum aestivum
gacggggatagggagcaggcaagtttacagcaagctgttgatcggggttggcctgcatctctacacctgataggaaaggacatattgcggtttcatgcaatttattggccaacaatgttaatgtcagcagggataagcgttcctgatgcagtttttggccatggaatcttgacagaggatggcatgattctgggaaactcattaagcaacatacttgttacatatgatctggtaggcaaatttgatccggatgcgattcaggactacttcctgcaagcatcataccatgtgaatgatggggacgattcaaaacaattttgcatccatacagtcaatgcacatctttgctccacaattggaaaccttctgaatcgattacttggactcctaca

SEQ ID NO: 444460 - DNA, 171 bp, Triticum aestivum
gtcgaccggctgtcccaacagattccaagccaggaggaggtggtccttggaggcaccgcaaggcgacctcccggactccaggcgcaaaggggataaaacccccaagggctccgagtccggccttgacccggaaaccttgccggaacctcaaagggtcccggatccaattag

SEQ ID NO: 444461 - DNA, 98 bp, Triticum aestivum
attcgccggtcgacggggaaaatgctcggatgcatgagacaaacacgtatgcaaatgagatgcacatgatgacatgatacgagatgcatgacatgaat

SEQ ID NO: 444462 - DNA, 482 bp, Triticum aestivum
ccggctcgacgggggaggagtgtaaaaagatcgcggaaggaatcgccggaaaagtttctctcctgaagggggctgatttggggcaagggcaataaggtcattttaagtatgtcaaaccatagtgaaaatgttaccaatatttagggcttgatgagacgaagaagtgggctttggattcaccttaaaccgagttgcgcgcaagaagttgtgatagtttttctgccagggacctatctgtgaaatgttttctgcaaacaagcccctgactgagaaaactgaaaacgcattcgggaataatacgctttctgcgtaagaaaacatactttctgccgtagtacatcaaaaatatgcttttcagtgaggaaaacacatttgttcctgaagaacaactgaaatgcgcttttaggagggagagacgtatcttacggagtacgcttccacttaaatgacgtggcagtggcggggccgtctcctgtctggct

SEQ ID NO: 444463 - DNA, 482 bp, Triticum aestivum
ggctggacgggactaatcaataaaagattcttcacaaacaggcccctggctagaaaaacaaaaaacacattatctgagaatacgctttcagaactgagaaatcatattttgggctgaagtgtaaagaaaatacgctttctccaaatgactacgtatttgaccaaaaaccatcttgatcttggcaatctccagcaagccttggccagtagggacgctaccactgtctgtgcataagtgagggtataaaatacccatgttttgtacactgacaggagccccatacacattgtcgaagcatcgttgggctaggcccaaacaatgacacaaatgtggcaggaaactaatgttgcaattttagtcatgatgatttttctgacgcacgtccagtccactcattaaatgtgggtcgttggaacttggactattgtggttattccacggtagtgcgcctgtaaaagagcttgccgaggtaagtgatacat

SEQ ID NO: 444464 - DNA, 89 bp, Triticum aestivum
ggtcgaccggcgcttgcacaggaatacaagcgaatggttaaggatcccacacagggcatttcttgacatgctcctagcacaccttgggc

SEQ ID NO: 444465 - DNA, 429 bp, Triticum aestivum
aagcaggagatcatgaacaaaaagccgctttctaccagcaacaccgaaaatcaagatgttgatgcaaagcaggggctgcaggaactcaaggtccatggagagaaaaaccctgtggtggaaaacggtgtggcggcaggggctgtaaatggtgttgccccaacagacgcaagcccggcagcggtcgcagttggctgttgatttccgctgctcaagtcatttgatcatccattcgaggaggacagcttatatacagggtgaggaagagttgccgtggctgtaggaattcaagattctgctagttggatatatgcttgtgggttgcagaaaggtgcaagtctgaggcgattcaggattcaatgaaaggctttttttttggggtggttctgctcttctgtagtatcttcgccgttgctggagtctggtggttgg

SEQ ID NO: 444466 - DNA, 56 bp, Triticum aestivum
  unsure (1)..(56): unsure at all n locations
ggnggaatnctacgcggacggtaccgaacngnaattcncgggccgacggggatgga

SEQ ID NO: 444467 - DNA, 354 bp, Triticum aestivum
cgggtcgacgggatatccgcattagatcggtgtgcaaaatatagctgttacatctgaacagagaactgtgctatccattatgcctataatcaaatattagttcttatgtagttccatcacatcatatacaccaggtttctcaagctctacagttagtgctttatgaaagattgccagtgacactaaggtcagggatttgaggtccctgcagacatctactcgatctacttcaagtttcgattgtacacattcgttgagtcattcatcggaattatcatgctcttctctaatatcactacgatctaccatatcttctaagactactccagaactgtttagcactgagactgaata

SEQ ID NO: 444468 - DNA, 486 bp, Triticum aestivum
gggccgacgggcacttactatttacaatgagatgcaggctaccgaggtgaacccgaatgacgtaaccatggtcagtgtgctctctgcctgtgctgtcctgggtgcacttgagatgggcaagtgggtgcattcatacataaggagaaaggccttgccccttacagttgttctcggcactgcgctggtggacttctatgcaaagtgtggatgcattgaagatgcagtcaaggcatttgagtcgatgcctgtgaggaattcttggacgtggacagccttgataaagggcatggcaagcaacggaagaggcagagaagcgctggagctcttctcttccatgcgggaggccaatattgagcctacagatgtcacattcattggtgttctcctagcttgcagccacaactgcttagttgaggaaggtcgccggcattttgatagtatgacccaggattatggcatccatccaaggattgagcactatggctg

SEQ ID NO: 444469 - DNA, 480 bp, Triticum aestivum
gcctcaaaagacgaagccaagccagggaaagagggtatctcatccacaccaggatattttgagcccatccccgtttcagaaaccggttcctcgtcgtcgcacgaagaagccggacgaaacccgctcgaagagaaacgaggaccgtaccgctaagaggagcaggagcaagtgaccactcgtgttggtgatgtcgtttagtgcaactagttgtgagcaagaacttgtatgctatgctagtgatgtctatttggtactttcaagctttgttggtgatgtcgaattgctactttcaaactatgttcaaattatttgaaatgttaatttgctatctacaatgtatgcgatcatcctattttgaattacaaacaatatttgttgtgatgttttttttttgattgataagaccaagaaccaatttagaagttaactggcacataccctactgccggacggcacggaggtaggtgtagacagcctacc

SEQ ID NO: 444470 - DNA, 445 bp, Triticum aestivum
attcgcgggtcgacttaattttgaatcacaacgttgataaacacatagtaagtattcttgatgctggtaaaccggaattgagatcttcatctcattattcgggttacataaaccagaagcatacttgaaggcttgtaagtatgcaatcatggttacatcaaagacataattgagggccagtctttagtgactttggttcatattccgggttatatatataaggtctatgattcccggtgcggtaagccgcctagaggcttgtgacttgttttctatgcaggatggttaaagacagctattcgagcttaaggaaaataactaatcaattataacccggaggaataagaagaagaagcttcaatggagttaagcattcaacacgtgcacgacggcacgaaaaaattaagtgtttatcctactgtattacaagactccctgagtccaa

SEQ ID NO: 444471 - DNA, 425 bp, Triticum aestivum
catggctctcgaaaaagtgaaaaacgtttttttttcatccacaagaggcatagatttaggccccgtttggattctctcctactcccagcttctttgtttcagcgcatggagttgtcctgaacgcgacatctcctagaagccagcttcgcggagcaaacaacccctgtagtgcaaaaacgagaggcaggtcgaatgcaacttcaaaaatcgaaagaggcggagttggacgtaattacttgatatgccactgccaagtgactctagggcaccgtacccgttcaatcaatgtgtttatctccccgatacattctctcccatacgagaaaccactctaatgggcttcatgcttgcttactgggctgccggccgacgcagacgagagcaggagcagccgccgttgccgaacgcatcactagctccaacaa

SEQ ID NO: 444472 - DNA, 184 bp, Triticum aestivum
  unsure (1)..(184): unsure at all n locations
aaaantngcaacnaattaacttgcaaccgcaactaacttngattgattgcaacaagttacctgttgcttcaagcaaagaantttcacaattgggaaccggtgccttttcgaagcactttcacgttgtgaaccgaantcgtcttgcccaanacccacggggacctanctatagtgacgtcaaagt

SEQ ID NO: 444473 - DNA, 412 bp, Triticum aestivum
ggtcgaccggactgcggatgacaatcgatgttggttcacgtgtgggggaagcgcatggaaatccggttgttcgacgtttgtgattgatgtcaatattcttaaaagggaactcttgggttgcatatggaatagttgtcatgtctttctcggactattcttttgcttgataagggatctgtccgaattcagctgactgtctaaaaattgcactggtttatcacatattaatgtcgatctttaccaaaatattagtccttagaagttaagggggagttttcggtgaaacattgtggaaagtccgatttgattatatggctgagactgttcagggttgtggccactcaagataactcacacctgtgcaatgccatccccgtaatggacagagctttgggggaataattcggaattc

SEQ ID NO: 444474 - DNA, 491 bp, Triticum aestivum
ccgggtcgacgggtccttcaaggtaacataccacgcccgtggggcctgcttgaggccatagagggccttgttgagtctgaagactttgtcaggattctttggatcttcaaaacctgggggttgagcaacatatacttcttcctcaagcttaccattgaggaatgcacttttcacatccatttgatataaagtgatatcatgatggttagtataagcaagtaatatgcgaatagcctcaagtctagcaacaggtgcaaaagtttcatcgaaatcaattccttcaacctgtgtgtagccttgagctacaagccatgccttattcctcaccacaaggccgttttcatattgcttgttgcggtagaatcaactttgtgccaatgatattgtgcttgagaagatctggacgtttgaccagttcccagacattgttgagctcaaactgatgtaattcttcttgcatggcctgaatccactcaagctccagaaatgct

SEQ ID NO: 444475 - DNA, 370 bp, Triticum aestivum
accggtcaggtcagtccgggtcgaccggatccagtacgtcggcgcgcagaggctgctgattctcctcgctctcgtgattgaacctgtaaacaacggcgcaattatcttcactgaataccaccatgaaattatcaagcaatttggcataatcatatccgatactgttcctgataacaaagacgcagggtctgatgacgatcatgacgatgatgaagatgaggatgatgaaactggtgatgctcatgatgatgatgccgatgctggagaggacttctcgggtgaacactgcgatgacgatgacgaggatgatgaccctgacgctaactgtgatgatgctggagcggggagccatgatgatgatggtgactac

SEQ ID NO: 444476 - DNA, 420 bp, Triticum aestivum
ccctctaatggaaacggttcccgccgccggtacccctttcgggtccggaggaacgcagcggggcagcagagataagctggtaatgctgcgcactaagttgacccccctatggggttgacgggcattacggatacttggggcctgtttggagtcccccccgctctgtgactctgctcccggagtagccgtagccgcagttcaatatcatggagcgaggaaacaggtactccgcggatccttgggtttggtggagctagtggtttcccgaacagctccttagtgatataccacatagctctagatacatcgaggaaatggtcgatcgctgtctttgcggaatcggccacataggcacgtgacatttctgatgagagtatctggggtgtgatccattgactgattgttactgtacttggtaaa

SEQ ID NO: 444477 - DNA, 365 bp, Triticum aestivum
tccgggtcaacgggaagttcacaggagacaagcgacggagttagaagttgtaaatatgcattgttgtatcacgacctgaatgaaataaacgaaataatgctcttgttcaaacatcaaaaaaaaaaaaaaaaaaaaacaaacaaaaaaaaaaaaaaaaaaagaaaaaaaaaacactaaaaaaaaaaaaaacaccaaggaaaacaaattattaaaaaaatcaaaaaaaaaaggccctccaaaacaatcaaatctaacttacccttcccttcaacgcaaaatccctccccatctaaaccctaactaaaattaaaggcccggcctttaaaagtacccgcacgggaaaaacacaacctttacccaaccaa

SEQ ID NO: 444478 - DNA, 490 bp, Triticum aestivum
  unsure (1)..(490): unsure at all n locations
ggggnnggaaactgtttaccctgccggtttcggtcngnnaattcccgggtcaacggggtggnaagtcgcaaaaaaaaaaganaanaaaaaaaaaaanaagcggccgctctagaggatcaagcttacgtacgcntgcatgcgacgtcataggctcttctatagtgtcacctaaattcattcactggccgtcgttttacaacgtcntgactgggaaaaccctggcgttacccaacttatcgccttgcagcacatccccctttcgccagctggcgtaatagcgaagaggcccgcaccgtcgcccttcccaacagttgcgcagcctgaatggcgaatgggacgcnccctgtagcggcgattaancncngcgggtgtggtggttacgcncatcgtgaccgctatacttgnnaagcgcctaacgcccgcncctttcncnttcntcccttcctttctcgccaagttcgccgggctttccgncaangctcaaaatcgg

SEQ ID NO: 444479 - DNA, 124 bp, Triticum aestivum
  unsure (1)..(124): unsure at all n locations
cacncattcnattctcnaggctctgcagtannctcnngcatatcaaaancagttccnctttnacgtngtgttacttgacaagttcccctttctgctngtancatcctgcttgacatccncnntg

SEQ ID NO: 444480 - DNA, 388 bp, Triticum aestivum
  unsure (1)..(388): unsure at all n locations
ctgtttagcctgccctgtttacgcctgcnagtaccggtccaaaaattcccgggtcgacggcagcagaanctcaanaccatatatatgatcagggtggtagaaaacggtggtagggttgagatcagcaacgcaagctgcaatccgcaagctgcagtggcagcgtccgaaagagatgcgggnatgtacataantagtgcgggcgcgtggaacttttgtctgaagagatgattttttcgatgtaattgcangatttgactctcaaaatcnaagnnaagatcaanaaangnnnnnanannngaananancntannnntagtgacaacnaaanggnnnnnaganttcgnnncgccantggangngnngnngnnncccntgtnnanacngnnnc

SEQ ID NO: 444481 - DNA, 491 bp, Triticum aestivum
  unsure (1)..(491): unsure at all n locations
gngnnnngnaactgtttacgcctgccggtttcggtccgaaaattcccggggcactagagatccnagcttacgtacgcgtgcatgcgacgtcatagctcttctatagtgtcacctaaatcaattcactggccgtcgttttacaacgtcgtgactgggaaaaccctggcgttacccaactaatcgccttgcagcacatccccctttcgccagctggcgtaatagcgaagaggcccgcacgatcgcccttcccaacagttgcgcagcctgaatggcgaatgggacgcgccctgtagcgcgcattaagcgcggcgggtgtggtggttacgcgcaagcgtgaccgctacacttgccaaggccctagcgcccgctcctttcgctttcttcccttcctttctcgccacgttcgccggcttccccgtcaagctctaaatccgggggntccctttaaggttccgatttaaatgcttacgggactcgaaccccaaaaaaag

SEQ ID NO: 444482 - DNA, 77 bp, Triticum aestivum
  unsure (1)..(77): unsure at all n locations
acngtcngnaggcganacaggtnttcataaaatcccacggttcacnatcgaagtnttctnaganaggangaangaaa

SEQ ID NO: 444483 - DNA, 124 bp, Triticum aestivum
  unsure (1)..(124): unsure at all n locations
accngttnccccttccnaanntttgccnacccttnaanggccattggaaacccccctttttccgnggnntttaaccncgggcggttttnggnggtttaccccccagcttnacnggtnaaatttt

SEQ ID NO: 444484 - DNA, 72 bp, Triticum aestivum
ggtcggcgattcccgggtcaacgggaccagaccagaccaaaactcaatctttaacaaaattgaacacatcat

SEQ ID NO: 444485 - DNA, 148 bp, Triticum aestivum
tgtacgtgtgaaatgtcatgtagtggccacataagccaaccactggctgtgggtttcaaggatttttgcagtgggatttgtagggtaccatgctgcgctgtgtttgggagttgacatcggtccatgggatatgtgccacgctcttaaa

SEQ ID NO: 444486 - DNA, 473 bp, Triticum aestivum
  unsure (1)..(473): unsure at all n locations
ttacgcctgccggtttcggtcgcaaaattcccggggaactagaggatccaagcttacgtcgcgtgcatgcgacgtcatagctcttctatagtgtcacctaaattcaattcactggccgcgttttacaacgtcgtgactgggaaaaccctggcgttacccaacttaatcgccttgcagacatccccctttcgccagctggcgtaatagcgaagaggcccgcaccgatcgcccttcccacagttgcgcagcctgaatggcgaatgggacgcgccctgtagcggcgcattaagcgcgggggtgtggtggttacgcgcaagcgtgaccgctacacttgccaagcgccctaacgcccgccctttcgctttcttcccttcctttctcgccacgttcgccggctttcnccgtcaagctctaatcgggggctccctttaaggttccganttaatgcnttacggnacctccgancccaaaaa

SEQ ID NO: 444487 - DNA, 497 bp, Triticum aestivum
  unsure (1)..(497): unsure at all n locations
tacgcctgccggtttnggtcgcanaattcccggggaaatatgaggatgcnccgcttacgacgcntgcatgcgacgtcatagctcttctatangtgtcacctaaattcaattcactggcgtcgttttacaacgtcgtgactggggaaaaccctggcgttacccanngtaatcgccnngagcacatccccctttcgccagctggcgtnatagcgaagangcccgcancgatggcccttccaanagttgcgcaacctgaannggcgaatgggacgcgccctgtagcggngcattnaaggccggccnggtctggtnggttacgcgcagcgtnaccgcnacacttgncagnccccnagcnccggtcctttcgctnntcntcccntcccttngcgccacgnnncgncngcgtttcnncgtcaaacncnnaantcgtggggntccctttaacggttnccgaanntagnnctttcaccgganntnnaanccnagganaaacatgg

SEQ ID NO: 444488 - DNA, 61 bp, Triticum aestivum
  unsure (1)..(61): unsure at all n locations
agangtttcttcagattaantcannagcgtgctctanaatatatcatntgnagncagtana

SEQ ID NO: 444489 - DNA, 89 bp, Triticum aestivum
ttcccgggtcaacggggttaggagttgtaaatatgcattgttgtatcgcgacctgaatgaatggaataaacgaaataacgctgttgttc

SEQ ID NO: 444490 - DNA, 500 bp, Triticum aestivum
  unsure (1)..(500): unsure at all n locations
aactgtttacgccgnccgtttcggtcnnnaattcccgggtncacgggnnatggccgnaatgatgntnntgntnncgntcacgaanngaacgatataagaatttcatgttgagttttgtttgtggagttctcaagttttgacgtaaagcntttanggnctangnaananggantggcaagancctaagacttggngatgaccatggnaccccaanatattcaagattanccaanatctaaacttggngatgccccnggaangcatccccngtttcgtcttcgttcantgggtaacttacgtggngctatatttttantcnccacntgggtatctacctttgccttggngcngtgtntantaatantantcctttgccnttttnatttatccanantccatccttgccngtacacccntttgggganaagcctattttnnttanaaatttacttggtttttctncnngngcttccttagatctcccannaacacgggcggng

SEQ ID NO: 444491 - DNA, 518 bp, Triticum aestivum
  unsure (1)..(518): unsure at all n locations
gggnnggnaactgtttacgcctgcccgtatcggtccacaaattcccgggtcaacgngctantagtcngcggccgctcnanangatnnaagctnacntacgcgtgcatgcgacgtcatactcttctatantgtcacctaaattcaattcactggccgtcgttttacaacntcgtgactggaaaaccctggcgttanccaacttaatcgccttgcagcacatcnccctttcgccagctgcgtnatancgaanaanggccngcancgattngccttcccancagttgcgcnncctnaagggcaaatngganggcgncctgntagncggggntttanccgcggncgggnngggttggtaggncnaccttggaccgnttaaagttgccaancggnctnnnggcccggggcnatttcnccttngttcccnnccctttcncggccncnngnttnggccggngnntnncccgttcaaagcnccaaatngggggggntccctttnaggggtgccnanttngngtntt

SEQ ID NO: 444492 - DNA, 514 bp, Triticum aestivum
  unsure (1)..(514): unsure at all n locations
gnngnnngaaactgtttacgcctgcccgttccggtcncaaaattcccgggtancacgggtnccgcganggaaaatngaannanannannnaanacaaagcggccgctctataggatctagcttacgtacgcgtgcangcgacttcatanctcntctaaanggtcacctaaattcaatcactggccgtcgttttanaacgtcatgactgggaaaaccctgncgtttccnacttaancccttgnangcacatcccctttcgcnaagctggcgtnntancgaagatgcccgcgtctatctcttgttaacagttnctcaaccncgaaagcctaaatggnangcgncctttncncggcnattanagcccgggnnggngttntnggataagcgcancgttgaccggctanactttgcaaccgcnctaactcccgcctcccttcanctntcnnnccccttnccattctncgccncggtncnggncggcctttcccccgtncaaccctctaaatttcggggg

SEQ ID NO: 444493 - DNA, 190 bp, Triticum aestivum
  unsure (1)..(190): unsure at all n locations
cggtcgtagattcncgggtcaactctcacagtgttgtgtcggtaactatcaaatgttcagtgtcttaaaaactttctgaaaattgtgggatttgctttgtaatggtaatcgtgaaattggtgtggttatgttttggtcaatgcctcggcttttactcgctaaaaacaatgatcaaatgaatcaatagaag

SEQ ID NO: 444494 - DNA, 113 bp, Triticum aestivum
acgcctgccggtatcggtccgacaatcccgggtcagcggggttaggcgttgtaaatatgcaatgttgtatcgcgacctgaatgaatgggagaaacgaaataacgctgttgttc

SEQ ID NO: 444495 - DNA, 473 bp, Triticum aestivum
  unsure (1)..(473): unsure at all n locations
ttanngngncctgttacccgccagtaccggtccaaaattcccgggtcgacgggtgccctgcannactgtgcnagtttgctataacggtgcgtctangttgcaactactggttgactgtcgtgcanttttcctacagttagctgttcgtgcatcattttttcctttgtgaantagctgtcgtgcntcanttactcaaaaaaaaactgttcatgcaacattgatnattgtggtgaaacgctgaggtaagattagctcttcgtgcagcttctgcttgttggtgtcnanttctcctttttttaantcttatttncttnttccttntanttctctgttccttcanaatacaaatgccggcatgtcattgcncatggtcnangaacatgnnatagacacatatatnatcattgncaatagtttttaancagcaaaaaatcttaagttgcgcattgacagtggacgtnccantntgcatg

SEQ ID NO: 444496 - DNA, 491 bp, Triticum aestivum
  unsure (1)..(491): unsure at all n locations
ttcncgtgccttttacgccgncngtaccggtccaaaaattcccgggtcnacgggcggtgcncaancttggagctgctggaaggcaagcacctcccaggtnttcttgcccttgaccaggntaagttaacatcgcgttgcaactnccaactctgcntccctgcccattgtctcgnatcacctnggnccaacncatgnaangttatagggtcccaaaggaaactttcanataggcatgtaccaatttttcctaatatacgagtctgtgantacctatcatacttgcnctgtttngagtaactgacgtgacaggaatttaacntacccccgtggatgtgtatgtgcnatactaaaaccataggataaacnangaaaannagctnccnnnctncagcatncaancntacgtaatnctgatnccacatnagacctcttctagtantgnnatctnnntgcanctcattnggcagtcntttntccngtnngttcctngg

SEQ ID NO: 444497 - DNA, 496 bp, Triticum aestivum
  unsure (1)..(496): unsure at all n locations
ggggngagtnttgtcgtaccttgtacgccgcanntaccggtccangaattcccgggtcncgggaagatctcnctgactgagctgacggacgcgctgcggacgctggggtcgacctccgggacgangtgcagcgcatnatggcggagatcgacaccnacggtgacngcttcancgactcagngagttcatctccttctgcancgcccaccccgggctcatnnatgacntcnccanggcttctgaatcngttcatttcacctcanccgtccgatcnacggantcgatcnatctacgtcggcttcttatnatttncangnatctncctactccngtcccgattcagcctcagcttcaatggaggccggnccnnnttntgtttnatcngtttctctgctaccagtagnagctagtgngatcnnnnggttccatcanttgagnnantncagnagtccgcaccnggtnnnccngtttcttnggcacgtnnntgntgncgatg

SEQ ID NO: 444498 - DNA, 350 bp, Triticum aestivum
aacgggacgggtcgtattcttctctaaatccattttcctcataacagatgcccttgttcaccgcatcgtaacattgcacccgtcgctccgtgttgggcgtgtagcataccaaattgttcatctggagatgcacggcagttcggtccattgtaccagattcatttgaggtcagcttgatgtcctagatgctgttccaagagtgctacgtggcgtcattttcatattcttaccagagtaacgacatattgtcacttctgccatgtttactgacgatgacatgacgaacttggatataatcacacatagggcatacatgcatatttgccacgtgatttctagtgcacactatt

SEQ ID NO: 444499 - DNA, 145 bp, Triticum aestivum
gcatggagcctacattactcgaaagatacttcagatacatgaactagctagctatgaatggtatacgacacacggggaaaggacgaaagatagaggggggacgcaataactctgaggactcaacaatcgggggagatataaaata

SEQ ID NO: 444500 - DNA, 492 bp, Triticum aestivum
  unsure (1)..(492): unsure at all n locations
ggggngagtgttaccctgccgttcggtgnccanttcccgggtanaacgggaggnggccnggtacaaaanacgcgacgacgacgacgatgatgagaggaagccgcggtacaagaagcacacgacgacgatgatgaccacgagaggaggccgcggtacaatanacttgacgacnacgacggngatgacgattanncncaagccacgttacnngnngcnctncgacgacgacnactatgtgatnngangccacgttacaagaagcacgatgatgatnatgacgacnannangatacgngcagcgtcncgggaacaaccgcccgccgccacgatgacnatgactgattntgacctnantttaagctgacgcnaanaagcatncttgcnggcgggtttgcatccatgaattncgacnttcactttttttccnagccatttttcanttcgctgttcacttggccaccattcttccantgtatgctccgagcntctctg

SEQ ID NO: 444501 - DNA, 493 bp, Triticum aestivum
  unsure (1)..(493): unsure at all n locations
ggggngnngnnttngngggaccttntacgccgnccggtaccggtccannaattcccgggcnacggggagttccaacggtgcnnggactgcaacgagaacggcctcatcggatgcnccgctgctgctgctgatgcnctgtttttttccgttacantctaccgtaggcnnnngttctccgctgttttanttgcttctantttgtanaatgtnannagcatttacagaagaatcctactnatccggcaagaggttttgcttacgatcctacantaacnantttcnccctcncnaatanttctgttgtanatctatcatcgtcangatttgttngtgannantgannacnacnatatantanaannnactttaatatgacgctanntccgcanagnttgctgntgcattgcatcnaganntaccccagtncnccgttttttcnaatcattggtcanttcgctgtncactgngcnatgatgnnntnnaatctanagct

SEQ ID NO: 444502 - DNA, 497 bp, Triticum aestivum
  unsure (1)..(497): unsure at all n locations
gggnnnnnggnnttgnngnancttttacgccgnccggtaccggtccnanaattcccgggcgacgggacttacactantttgagagtcctanncaacatggtaattngctttngntntcnctcagtcntnacatgatnggcatccaccagggatatcatcnaatcttncatatganaggcantgattaccngcataantttnatangtgataattgttttgaagatatgaagatggtatgtggcgtgatgccntctcaagtttatgagccggggcnagattcaactcctnccnannacatantttctacccaanccaacttccacttcaccctcatnttcncnactagaagcttctggacttgcancatgggagcccgggcaagtgccccancncgcccggtgctgtnaccgccctcangatggtgattttaaagttgtgctagttgagtagttgtnaacttgnganctacattgtcaaacttngtnaccatgnancg

SEQ ID NO: 444503 - DNA, 277 bp, Triticum aestivum
aacggggtctacagcaacggcggtgttgttctcccacacaaggagatcaagtcaagcatcctgaagcctgagatcgtcatgtgagctcaccgctcacaaatgcttttaggaacgatgttgtgtggcgtctttgttctagtgcatactgtaaacagcttaatatatgtggaacttgcgagacttgttaaactgatgagagtgtatgtgcaaaaaaaaaaaataatttaaaaatatactatgaataaaaagtacctcaaaggtatctaaaaaagaacaa

SEQ ID NO: 444504 - DNA, 117 bp, Triticum aestivum
  unsure (1)..(117): unsure at all n locations
tnagggnaanccctgggnntcccccttttnnaccccttngcnaaaaaccccctttncccaccnggtggnttttcccaacagggcccnccccctttctccttccccaanntttgnccc

SEQ ID NO: 444505 - DNA, 491 bp, Triticum aestivum
  unsure (1)..(491): unsure at all n locations
gngcngnaactgttaccctgcccgtttcggtcgnnaattcccgggtcaacggggtttctcantggnatttttcatttttctttctgacgttattacactttggttttctttcatttccttttggtttctttgatttcattgtttttttaacttttctttttgttctttgtangtttgatcngttttgtacttttttaacacatgtttacctttttcncagtanacaatgtacattttaaagcacacatgaaatattttgggtncccattgnacnattttcatatncatgangtactgttttaanctacatgccttttgaacacnttttcgaatgcaanangagcaanatatatttccaaactatgcaaataattgtttgcatnggganaaagcatttcanaaaaatcacgaantntnctgganatanntgattacgtccttnaaatnttcnccggacaatttcntanaattantttttaggctcanacang

SEQ ID NO: 444506 - DNA, 69 bp, Triticum aestivum
  unsure (1)..(69): unsure at all n locations
tncactcatgnttacnancaccncggtctccacatgtnacgtcatgancattnattcacngcttacngc

SEQ ID NO: 444507 - DNA, 491 bp, Triticum aestivum
  unsure (1)..(491): unsure at all n locations
cgcctgccctgtttacgcctgnnagtaccggtccaaaaattcccgggtcnactcctcagaganagctcttcgccctgaggtcttnangggcgcancctgccccgatgtcntgaaaggtatgggacncgggttggcctacccntggtccattactccnacaannncnaanagaagtttatacttgatgattgttttganatatgaggatggtaatattacagtcctgctaattnagtnttgtgaatttnagaaatgcttgtgttgaangtttgcaagtcncgtagcatgcacntatgtaaacgttggtntaanaanagatgaaanatcatgtgttatttgattgtcctccttanggtggcggncggggannaagccatgggcttttcccaagnaatcnatccccctangaagcancncgtagttacnttgntgttgtnatagnatttggtngattttngcnntnangtatacgnnttcntngngaacnaatg

SEQ ID NO: 444508 - DNA, 512 bp, Triticum aestivum
  unsure (1)..(512): unsure at all n locations
ttgcnngngccctgtntacgccgnanagtaccgagtccanaaattcccgggtcnacggactgctgcnatacatactggaccaattactagagctcgtgcacgccaactaaattaccagtactttcgtttcttggtaatggttctaatgttcatgagaatatgatgctgcctaaattgntacatttgttttgcntacaaatgaacggcctacttggagaaangatgaacatttgggacacgaacanccatgggagatnatgggcatgtncangggaaacaaggaccggattacnaattgatgaattcaaggacttgaagncaaccataatggggtgcatnnaacccntnnggaccaantttncaagaattgccaactncannaaatttccgntnccaagggcnaattttanggggctgggcgtcaccttattagttgggncnaggcccanggtaatttcnanntacanaantnagggcaatttttagnggncctnnaggtgngggggaanana

SEQ ID NO: 444509 - DNA, 356 bp, Triticum aestivum
  unsure (1)..(356): unsure at all n locations
agcnngntancntcctntganctcagctctcatgttcatgattaataganactnnggncagtgttgtctacntttnntttgcttncagtatgacatggcntatacntgtnggaacgnnaacaacttgttcaacancnngacaatgtgntatgttcagcaatgttgcaatggggaaactgnaacgganttacaantgatgatntcagtgaactttgnntgccacnagtaanggggtncatgaangccttgganntaaanntacnagataccaattnacnaaatttccctnccgaggctatntttanggtgcntgcgtcacccntantattggcgccangtcccanagtnaggttcna

SEQ ID NO: 444510 - DNA, 500 bp, Triticum aestivum
  unsure (1)..(500): unsure at all n locations
atgtttacgcctgcccgttcagtgtcgnnaaantcgcgggcanctctagaggatccaagttanntacgcgtgcatgcgacgtcatagctcttctatagtgtcacctaaattcaattcatggccgtcgttttacaacgtcgtgactgggaaaaccctggcgttacccaacttaatcgcttgcagcacatccccctttcgccagctggcgtaatagcgaagaggcccgcaccgatcgccttcccaacagttgcncagcctgaatggcnaatgggacgcgccctgtancggngcattatcacggcgggtgtggtggttacgcncagnnttancgctananttgccagnngccctagctcccgcnccctttngcngttcnntcnctttccgttctctgcanggttcggcggggcttccccgttcgaagctcnaaatcggnggggccccctttagggggttccganttangtgctttaaggcancnncnnagccgaaganaanng

SEQ ID NO: 444511 - DNA, 496 bp, Triticum aestivum
  unsure (1)..(496): unsure at all n locations
aactgtttacgcctgccggtnccggtccaaaaattcccgggtccacgggcttggntggnacttgaggtgggagagcttggcggaggccttgagtgcctgggcacgggtgaggccgcagtgccgaaaaaaaaaaaaaaaanaaaaaaaaaaaaagcggccgcnctagaggatccaagctacgtacgcgtgcatgcgacgtcatanctcttctatagtgtcacctaaattcaattcacggccgtcgttttacaacgtcgtgactgggaaaaccctggcgttacccaacttaatcgcctgcagcacatccccctttcgccagctggcgtaatancgaanaggcccgcacccgatcgccttcccaacanttgcgcancctgaatgggnaatgggacgcgccctgttaccnggcgcataanccccggccggtntngtgggttaacccncaaccgttaccggctaaanctttccancgnccctaaacgcccggctncctttt

SEQ ID NO: 444512 - DNA, 506 bp, Triticum aestivum
  unsure (1)..(506): unsure at all n locations
aactgtgnacgccgggacgtnccgggtccnnaaattcccgggtcccacgggggggggagatgaatcctcacaatcgcaacattaccgngaactaagaagcaacaccgnaaagaaacaacaatatggtaaatgcacaagcataaacatggcatgatgcacaaacaactatgatgcatgccggtttaatgaggcatggcatggcaaagtgcaacaaacaacactacaaattaantggactcaatatgcaaacganttgcatattgacaaaacttcacaacatttatttagtttgctccttttacgtacgcaataatattaantgttgttaaacatgngcaanangtgaaacaacgagaaaactacctatctnnggcaaantttaaattnncgtcngaacaacaaancaanaatttccggaaaatccctcatatgcaaatttatgaatttanctacttgttcctgccctaaaccaattttantgttggttaaacaaggnaaattaaang

SEQ ID NO: 444513 - DNA, 488 bp, Triticum aestivum
  unsure (1)..(488): unsure at all n locations
ttncgngngacctgtttacgccgcnagtaccggtccaaaaattcccgggtcnacgggctggatngggacttgacgtggganagcttggcngncgccttgagtgcctgggnacnggtgagccgcangtgccnaaaaaaaacnaaangancaaaaanaaaaaagcggcngctctanaggtccaagcttacntacgcntgcatgcgacgtcatagctcttcnatagtgtcacctaaattaattcactggccgtcgttttacaacgtcctgactgggaaaancctgncnttacccaactaatcnccttgcancacatccccctttcgccagctggngtaatancgaanaggccctgcacagatcgcccttcccaacagttgcnncagcctnaatggcgaatgggacccgccctgtanggcacattaagcgcggcnggtgngggtggttacccncaacgtaacccgctacactttgcanccgccctaagcgcc

SEQ ID NO: 444514 - DNA, 334 bp, Triticum aestivum
ggggagatttcttggagggattcccagatcaattcaactagcagcgtcatcgtcaaggagtaccttctcaatgtcacttctggtaaactgggcattgagttcacccccgatgaaggatccttcgccttcatcaatgccatggaggttctacctgtgtctggcacctcaatttttgattcagtcaacaaggtggacggtcatgggttgaaaggcccttttagcctctacggcatcgggatcgagaccatgtacaggctgtgtgtgggattcatcgatgtactggctaggaaagatgatccaggattgtggaggaggtgggataaagatgaccatt

SEQ ID NO: 444515 - DNA, 195 bp, Triticum aestivum
cgggtcgacgggaggttcacgggagagaagcgacggagttagaagttgtaaatatgcattgttgtatcgcgacctgaatgaaataaacgaaataatgctcttgttcaaacgtcaaaaaaaaaaaaagaagtaaagaaaaataaatggaaaagatatattaatgtaaatgaaatgaaaaataaaatgtatccaagg

SEQ ID NO: 444516 - DNA, 506 bp, Triticum aestivum
  unsure (1)..(506): unsure at all n locations
ggnnnnnnnngnaangntatcctgccggcacggtcgaaatcccgggtcgacggggttggaagtcgcaaaaaaaaaaaaaaaaaaaaaaaaaaaaaagcggccgctctagaggatccaacttacgtacgcgtgcatgcgacgtcatagctcttctatagtgtcacctaaattcaattcctggccgtcgttttacaacgtcgtgactgggaaaaccctggcgttacccaacttaatcgcttgcagcacatccccctttcgccagctggcgtaatagcgaagaggcccgcaccgatcgccttcccaacagttgcgcagcctgaatggcgaatgggacgcgccctgtagcggcgcattagcgcggcgggtgtggtgggttaacgcncaacgtgaccgctacacttgccaagcgccctacgcccgctccntttcgcttccttccttccttcctcgcaactttcgccggntttcccgtaagctccaaaatccgggggnccctttangggtcc

SEQ ID NO: 444517 - DNA, 106 bp, Triticum aestivum
gggttattaactcgactgatctgagggacccatgcaaaggtggcctcacttctcctttttggcgttaatttgaattgattgatcgatcgatcgatcaagtgcattc

SEQ ID NO: 444518 - DNA, 396 bp, Triticum aestivum
gggtcgacgggtgtgatgtgcttaagatgcagatcctcaacaggaaccctacgacagatggtattgcagttaagaggaaactcaatgctgatggatcctactataaacctgagtagtatcccaaaacctcatgggttactgcaaaaggacctcccgtagatccatcgactttatctggttttacatgtgaatcctcatattcatctgatgagtcatctactctaactagaaattgttcaaaaataatcatggtgaggtatttgccagatatgttggaactaattgcaggaacggtcctcctatgaagaaaatctgggttcccaaaatatgccttgaaagtcttcaggtgaatgtcctcatgacaccacctgtgaagaataggaaccccacatcaaa

SEQ ID NO: 444519 - DNA, 407 bp, Triticum aestivum
gggggaaaaaacaatgttgctttcctctgtctctttatgcttggtaaattggaagattgcatacaattgcttgtagacagcaaccgtatacctgaagctgcattaatggcgcgttcttatcttcccagcaaagtttcagagattgtagcaatttggagaaaagacctcagcaaagttaatccaaaagctgcagattctctggcagatcctgctgagtatccaaatttatttgaagactggcaggttgcacttactgtagagcagaatgttgcttcccagaggggccactatccttctgcagatgagtacttgaaccatgctgagaagtcagacactactcttgtggaagctttcaaaaggatgcgggtcattgaagaagaggaaccagtggaagcactggatgaaaa

SEQ ID NO: 444520 - DNA, 309 bp, Triticum aestivum
gggtgactggagctggtagcgggccactgcctcatcaaggggggcgacgacggcgatgtctcacacatgcttacagacagcaaccgtgggacgtagactaccggcctcagccttcacgacacccacatccgacttacaaagactggctgagctaggagctcccaacacacactcaatacgcccgggtctgcagattctcaggcagatcgagcagagtaccccagtaacgtgtgtgactggcaagttccccttacgctgtagcatctgctgacatcctacaggggcagaccatccttgcgcagatgagta

SEQ ID NO: 444521 - DNA, 396 bp, Triticum aestivum
gggcagcagaagctcagaccatatatatgatcagggtggtagaaaacggtggtagggttgcagatcagcaacgcaagctgcaatccgcaagctgcagtggcagcgtccgaaagagatgcgcggaatgtacataagtagtgcgggcgcgtggaacttttgtctgaagagatgattttttcgtatgtaattgcaggatttgactctcaaaaaaaaaaaaaaaaaaaaaaaaaaaaaaaaaaaaaaaaaaaaaaaaaaaaaaagaagaacaaaaagaataaagctaaaaataaaaatccataagacatcaaaaaacttcaaaaaatgtcgccaaaattcacataagggagccatcaaataacggggccccccaaggggaaaaaccttgcgttacccaag

SEQ ID NO: 444522 - DNA, 148 bp, Triticum aestivum
cggtccaagaatcccgggtcgacggggtatgactgataatatcgatataggttattctacaagattactctatagatccatcagctctaagtaaactgcgtataaatcatgtatgtataaggtatgtgttactgatgttagaagttac

SEQ ID NO: 444523 - DNA, 505 bp, Triticum aestivum
  unsure (1)..(505): unsure at all n locations
gggnnnnnnngaatgttattctgccgcacggtcgaaanacccggggctctagaggatccagcttacgtacgcgtgcatgcgacgtcatagctcttctatagtgtcacctaaattcaatcactggccgtcgttttacaacgtcgtgactgggaaaaccctggcgttacccaacttaatgccttgcagcacatccccctttcgccagctggcgtaatagcgaagaggcccgcaccgatgcccttcccaacagttgcgcagcctgaatggcgaatgggacgcgccctgtagcggcgcataagcgcggcgggtgtggtggttacgcgcagcgtgaccgctacacttgccagcgccctacgcccgctcctttcgctttcttcccttcctttctcgccacgttcgccggctttccccgtaagctctaaatcgggggctccccttaaagggttccgaattaantgctttacggaacctcaaccccaaaaaacntgantaagggngatgggtc

SEQ ID NO: 444524 - DNA, 304 bp, Triticum aestivum
atttaaacatgtccatggattcatgtctgtacaaagtgtttaactgatgattacatcccaaagtagatgcacagtcaggaggcgatttaagtttttataaaatacccattgttcatgctccaagtgtacgctaagatgaccaactatggtcagtcagtcgtttgagggcctagcctccaggtgcattgtacctcaacatcaattatggcacagatattcaccttcctcttcaagattgatccagatgagacgcaacgatctgtataccatctcgtatgcgaatttctgaaggttgtaaatattt

SEQ ID NO: 444525 - DNA, 420 bp, Triticum aestivum
gggtgactgatgcaaactgtgagattagctttaccgctcccgtctcctgctactctttagttacttagtactactaccggtagtggttatccgtctccattttttcaccatcatttttttaatcagaaacatagtactacagtacatgtttgtatttgtgtttgatttgaaaaaaaaaaaaaaaaaaaaaaaaaaaaaaaaaaaaataaaaaaaaaaaaaaaaaaaaaaaaaaaaaaaaaaaaagaaacacaaaaagaggaaaaaaaaaaaaaaaaaaaaaaaaaaaaagggggccccccaaagggttcaaacttaatttacgctgaaaggcaagttaaaacccctccaaaggggtccccaaattaaattccaggggcgttcttttaaaacgttggaacggggaaaaccccggggtttcc

SEQ ID NO: 444526 - DNA, 86 bp, Triticum aestivum
  unsure (1)..(86): unsure at all n locations
tnccnaaaatttncccacccnaaanggcaatgggnacccccccnttnccggcccatnaacncggcgggntntgggggttcncccaa

SEQ ID NO: 444527 - DNA, 511 bp, Triticum aestivum
  unsure (1)..(511): unsure at all n locations
gnnnggngnnnnnngnantgttngttagccgcnggtncgaacnacccgggtcgacgggacaaaaaaaaaaaaaaaaacaaaaaaaaaaaaaaaaanncanaaaaaaaaaaaaaaaaaaaaaaaaaaaagcggccgctctagaggntccaagcttacgtacgcgtgcatgcgacgtcaagcncttctatagngtcacctaaattcaattcacnggccgtcgttttacaacgtcgtgangggaaaaccctggcgttacccaacttaatcgccttgcagcacatccccctttcgccagtggcgtaatagcgaanaggcccgcaccgntcgcccttcccaacanttgcncancctgaaggcaaatgggacgcgccctgtagcggcgcattaagcgcggcgggtgtggtggttacgcgagcgtgaccgctacacttgccancgccctaacgcccgntccnttcgctttctnccnttctttcngccaagnttcgccgggtttccccgttaaacttna

SEQ ID NO: 444528 - DNA, 125 bp, Triticum aestivum
aacgctaaattgagtcgtattatgtcatgtagtggccaattaaccgacacacaggatgtggttttcaaggatttttgcagtgggaattgtatggtactatgctgcgctgtgtttgggagttgaaa

SEQ ID NO: 444529 - DNA, 498 bp, Triticum aestivum
  unsure (1)..(498): unsure at all n locations
ggggnnnnnggaacgttatccgccggcacggtccaaaatcccggggctctagaggatccagcttacgtacgcgtgcatgcgacgtcatagctcttctatagtgtcacctaaattcaatcactggccgtcgttttacaacgtcgtgactgggaaaaccctggcgttacccaacttaatgccttgcagcacatccccctttcgccagctggcgtaatagcgaagaggcccgcaccgatgcccttcccaacagttgcgcagcctgaatggcgaatgggacgcgccctgtancggcgcataagcgcggcgggtgtggtggttacgcgcagcgtgaccgctacacttgccancgccctacgcccgctcctttcgctttcttcccttcctttctcgcaacgttcgccggctttccccgtaagctccaaaatcggggggncccnttaanggttccaatttaagggctttnanggaacccnanccccaaaaaattnnntttggggg

SEQ ID NO: 444530 - DNA, 486 bp, Triticum aestivum
  unsure (1)..(486): unsure at all n locations
aactgtntattccggcggccaccgggtccaaaaaatcccggggctcnagaggatccaagttacgtacgcgtgcatgcgacgtcatagctcttctatagtgtcacctaaattcaattcatggccgtcgttttacaacgtcgtgactgggaaaaccctggcgttacccaacttaatcgcttgcagcacatccccctttcgccagctggcgtaatagcgaagaggcccgcaccgatcgccttcccaacagttgcgcagcctgaatggcgaatgggacgcgccctgtagcggcgcattagcgcggcgggtgtggtggttacgcgcagcgtgaccgctacacttgccagcgccctagcgccgctcctttcgctttcttcccttcctttctcgccacgttcgccggctttccccgtcaagctctaaatcgggggctccctttanggttccgatttaagtgctttacgggnacctcggacccaaaaaacttng

SEQ ID NO: 444531 - DNA, 303 bp, Triticum aestivum
aagctcactttctatgatagtgtttattagacgcaacttggatgctcatcattctaggaccaaatttgttagcatagcagataccgtgatgttctggaatagtctcagagtggtataagtgaagcatgagagactataaatttcttcaaattaagtcaccagcgtgctctaaaatatataagtgaagcactagagcacagactatcaacgctcacgagatataagtgaagcgcagagagtatgctagcagattctaatctagtgggcttcgcccagaaggtgtgtacagcagggatgattgtg

SEQ ID NO: 444532 - DNA, 85 bp, Triticum aestivum
cgggtcgacggggttaggagttgtaaatatgcattgttgtatcgcgacctgaatgaatggaataaacgaaataacgctgttgttc

SEQ ID NO: 444533 - DNA, 157 bp, Triticum aestivum
acggtccgactattccgggtcgaccggaagatcgcactaactgagctgacagacgctcactcgaaacgggggtctcaacccgcatgataagttcagcgcaatacgacagatatcaaaaccgatggctactgctgcattgaggtcaacaagtgaagtt

SEQ ID NO: 444534 - DNA, 481 bp, Triticum aestivum
  unsure (1)..(481): unsure at all n locations
aactgtntattccggcngcaccggtccagaaatcccgggtcgacgagctcactagtcggggccgctctagaggatccaagcttacgtacgcgtgcatgcgacgtcatagctcttctatgtgtcacctaaattcaattcactggccgtcgttttacaacgtcgtgactgggaaaacccggcgttacccaacttaatcgccttgcagcacatccccctttcgccagctggcgtaataggaagaggcccgcaccgatcgcccttcccaacagttgcgcagcctgaatggcgaatgggagcgccctgtagcggcgcattaagcgcggcgggtgtggtggttacgcgcagcgtgaccgcacacttgccaagcgccctagcgcccgctcctttcgctttcntcccttcctttctcgccagttcgccggctttccccgtcaagctctaaatcgggggcccctttaagggttccganttagtgcttang

SEQ ID NO: 444535 - DNA, 184 bp, Triticum aestivum
ggggaggacgacaacgacgacaatgaggaatacaagcacaactacgccttcaacatagatcatcactcttctataatgacacccaatactctatgcagtttgccatcattttaatacgtcctaaatgtgaatatccctgtacttacacaacattatcttctttcatcacatttcccatttttca

SEQ ID NO: 444536 - DNA, 516 bp, Triticum aestivum
  unsure (1)..(516): unsure at all n locations
gnnngggggnnnnngnaantgttatntgccgcacggtccaaaancccgggtcgacgngccactagtcggnggccgctcnagatgatnnaagcttacntacgcgtgcatgcgacgtcatgcncttctatagtgtcacctanattcaattcactggccgtcgttttacaacntcgtgacgggaaaaccctggcgttacncaacttaatcgccttgcagcacatccccctttcgccagcggcntnatancgaatangcccgcatcgatngcccttcccaacagttgcgcatgccngaaggcgaatgggacgcgccctgtagcagngcattaagcgcggccgggtgtgatgnttacgccagcgtgaccgctacacntgccagcgccctatcgcccggcnccattccctttcttcgcncctttctccgccacgttccgccggctttccccgtcaagctctaaatcngggggctccccttaaggttccganttanggctttangggancntcgaaccccang

SEQ ID NO: 444537 - DNA, 67 bp, Triticum aestivum
acggtcctacaattccgggtcgacggggtaccgcgagggaaaatggattgactctacggtagaaaaa

SEQ ID NO: 444538 - DNA, 81 bp, Triticum aestivum
tcgacggggttagtcgttgtaaatacgcattgttgtatcgcgacctgaatgaatggaataaacgaaataacgctgttgttc

SEQ ID NO: 444539 - DNA, 415 bp, Triticum aestivum
gggtgccctggcaatactgtgctagtttgctataagggtgcgtctaggttgctactactggttgactgttcgtgcagttttcctagagttagctgttcgtgcatcattttttcctttgtgaattagctgttcgtgcgtcagttactcaaaaaaaaactgttcatgcatcattgatgattgtggtgaatcggctgaggtaagattagctcttcgtgcagcttctgcttgttggtgtcgagttctccttttttttaagtcttattttctttttccttgtatttctctgttccttcaaaatagaaatgccgggcatgtcattgcgcatggtcgatgaacatgcgatagacacatatataatcattggcattatgtttttaaaagcaaaaaatcttaagttgcgcattgacagtggacg

SEQ ID NO: 444540 - DNA, 124 bp, Triticum aestivum
acgcggccgtacggactgaattcggggtcgacgggaagatctcactgactgagctgacggacgcgctgcggacgctggggtcgacctccgcggacgaagtgctgcgcatgatggcggagatcca

SEQ ID NO: 444541 - DNA, 229 bp, Triticum aestivum
cgggtcgacgggacgggttgtagtctgcgagtagtacatattctgcatcttagatgcggttgtgcatttcatcgtaacgttatgggcatctaaccgtgatgggcgtgtagcatacatatgagctcaactggagatgcacatcacttcgatccattgtaccagattcatgagatgtcaacgggcagtgccagatgctgctcaactagtgctctggagcatgatcttcata

SEQ ID NO: 444542 - DNA, 158 bp, Triticum aestivum
gggtcgacgggacagctaccaccccagctccagtgcctacaaagtcatcatcgacatggtcgtcgaaaaatacttcagatacatgaactagctagctatgagtggtataggacaaagggggaaaggaggaaaaataaaggaagaacgcaataactctg

SEQ ID NO: 444543 - DNA, 497 bp, Triticum aestivum
  unsure (1)..(497): unsure at all n locations
ggnnnnnnngnaatgttatctgccggcacggtccaaaaatcccgggccgctctagaggaccaagcttacgtacgcgtgcatgcgacgtcatagctcttctatagtgtcacctaaattcattcactggccgtcgttttacaacgtcgtgactgggaaaaccctggcgttacccaacttatcgccttgcagcacatccccctttcgccagctggcgtaatagcgaagaggcccgcaccatcgcccttcccaacagttgcgcagcctgaatggcgaatgggacgcgccctgtagcggccattaagcgcggcgggtgtggtggttacgcgcagcgtgaccgctacacttgccagcgcctagcgcccgctcctttcgctttcttcccttcctttctcgccacgttcgccggctttcccgtcaagctctaaatcgggggctccctttaaggttccgatttantgctttagggaactcgacccnaaaaacntttttttgggggg

SEQ ID NO: 444544 - DNA, 406 bp, Triticum aestivum
ggggagttccaacggtgcccggactgcaacgagaacggcctcatcggatgccccgtctgctgctgctgatgctactgtttttttccgttacagtctaccgtaggctaaagttctcctgctgttttagatgcttctactttgtacaatgtgaagagcatttacagaagactcctaatatatcacggcaagaggttttgcttacgatcctacagtaataattatcaccctcacgaataagttcagtagtagatccatgatgtcaggttttgttggtgaagactgaatacaaccatagaaatataaactgagttaatactgacgctaataagcatagttgcggcggcattgcatcgatgatttacgacgtttcactttttttccaagcatttttcatatcgctgttcac

SEQ ID NO: 444545 - DNA, 293 bp, Triticum aestivum
ccgggtccacggggtctacagcaacggcggtgttgttctcccacacaaggagatcaagtcaagcatcctgaagcctgagatcgtcatgtgagctcaccgctcacaaatgcttttaggaacgatgttgtgtggcgtctttgttctagtgcatactgtaaacagcttaatatatgtggaacttgcgagacttgttaaactgatgagagtgtatgtgcaaaatgaaaaagaagttagtaaatccaataacaagcaagtaaaggtagagattgcctcacacaaataagacatcaagg

SEQ ID NO: 444546 - DNA, 376 bp, Triticum aestivum
cgggtcgaccggaggttcacaggagagaagcgacggagttagaagttgtaaatatgcattgttgtatcgcgacctgaatgaaataaacgaaataatgctcttgttcaaaaaaaaaaaaaaaaaaaaaaaaaaaaaaaaaaaaaaaaaaaaaaaaaaaaaaaaaaaaaaaaaaaaaaaaaaaaaaaaaaaaaaaaaaaaaaaaaaaaaaaaaaaaaaaaaaaaaaaaaaaggggcccccaaaaagattaaaagttaaattacccttaaaggaaaattaaaaccccttcaaaagtttcccaaaattcaaattaaggggctttcttttaaaaaattcttaaggggaaaaacccggggttaaccaaattaaacccctttg

SEQ ID NO: 444547 - DNA, 407 bp, Triticum aestivum
cggtcgtacattccgggtccacggggtttctgcattggaatttttcatttatcattctgacgttataacactttggttttctttcatttccatatttggtttcattgatgtcattgtttatttaacttttctttttgttctttgtaagtttgtaacagttttgtaattttttacacatgtttacttttttctcagtatagaatgtaaatttttaaagcacacatgaaatattttgggtacccattgaacatttttcagatacattatgtacatgttttaaatacatgctttgaacactttttcaaatgcatattatcagtatatattttctaaactatgcaaatatttgtctgcattgtacataccatttcagaataatcacgaacatctactggaaatatatgatt

SEQ ID NO: 444548 - DNA, 76 bp, Triticum aestivum
  unsure (1)..(76): unsure at all n locations
acannttataaccaatnttcnttcaaccgntcattaattgtggancatcatgaatctntttnttacttacgngnat

SEQ ID NO: 444549 - DNA, 397 bp, Triticum aestivum
tccacggggctgaagaaagtgagtgcgttgaacttacaaaagctgatataaactcacgcatttagaagctagatatggttcttggaactcgttccactgttcagcataatagtgatactgcctatagtggtctacatttgttttgcttacagttgaagggcctaacttgtagaacgatcaacattgtgtcaagaagatgcaagtgtatgtacgcatgtgcaaggggaacaagaacggagttacaagtgatgatttcaggactttgaatccaccataatgggtgcatgaagccttggactaaatatacaagatgctacttcataaatttcgttccgaggctattttaggtgctgcgtcaccttagtattgggccaggcccatgtaatttcgaaataca

SEQ ID NO: 444550 - DNA, 501 bp, Triticum aestivum
  unsure (1)..(501): unsure at all n locations
gggggnnncgtaatgtttttccggcnccaccggtccananaatcccgggccnctctagagatccaagcttacgtacgcgtgcatgcgacgtcatagctcttctatagtgtcacctaaatcaattcactggccgtcgttttacaacgtcgtgactgggaaaaccctggcgttacccaattaatcgccttgcagcacatccccctttcgccagctggcgtaatagcgaagaggcccgcccgatcgcccttcccaacagttgcgcagcctgaatggcgaatgggacgcgccctgtagcgcgcattaagcgcggcgggtgtggtggttacgcgcagcgtgaccgctacacttgccaaggccctagcgcccgctcctttcgctttcttcccttcctttctcgccacgttcgccggcttccccgtcaaagctctaaatcngggggctccctttaaggttccnatttaatggnttacgggacctcnaaaccnaaanaanttngttttg

SEQ ID NO: 444551 - DNA, 87 bp, Triticum aestivum
gggtccaccggcttggatgaagacttgaggtgggagagcttggcggaggccttgagtgcctgggcacgggtgaggccgcaggtgccg

SEQ ID NO: 444552 - DNA, 147 bp, Triticum aestivum
acggtcgtatttcacgggtcgacgggatttctgcagtagaaattgtccttgatcatgacgacattattacacggtggttcacttgacatttccattattagtactatgatttcaatgttttgaaaactaggccttcagttctatgta

SEQ ID NO: 444553 - DNA, 79 bp, Triticum aestivum
gggcttggatgaggacttgaggtgggagagcttggcggaggccttgagtgcctgggcacgggtgaggccgcaggtgccg

SEQ ID NO: 444554 - DNA, 79 bp, Triticum aestivum; identical to SEQ ID NO: 444553

SEQ ID NO: 444555 - DNA, 368 bp, Triticum aestivum
ggggagtccgcatggctcgcgaggtggggccacaagttaacgtgtctctgtcagtacgcagtgtcaggggcaaggcatgttgcgctcttttttttcctagaccgaagcaacagctttgcctttgctaacaactagtaaataaaatttggacagaaaatcccttttggaggcagagctccatggagaccggtttttgaaaaattcagagtccatatttttacatgtcaaaaactgagataatacatacatatgaacgcataatgcataagtgtgtaaattttcacgatgaaataagttgatacgaggagtgtgccaaaaaacacagatgatgacaggttaacccatgaaacggttcagcctttcaggcc

SEQ ID NO: 444556 - DNA, 503 bp, Triticum aestivum
  unsure (1)..(503): unsure at all n locations
tttgncnggccttttcttgcagtnacgtacnggtcctttaattcccgggtcccacgggcncannaanggtnaataanancaacatcaacagcaacaacagcaacaacaacagcagcaaagcaacagcaacagcagcaacaacagcaacagcaacagcaacagcaacangcagcaacacngcancancancancaacancaanatcaacaagcaacaacaacaacagcaacaacaacncaacancaacancaacaacaacaacaacaacaacancatcancagcancagcancagcacaacagcaacancagcntcaacancaacaanatnattatcnncaacaagnancancagancaannncancancnncnanangcattttcggcaacaacngcanttaacagcancagctcatcagcnttcttgcantancnaanatcntgtnanagcatgtnngtncatnnnttatttccatntntgcnncttttgtttntttttttt

SEQ ID NO: 444557 - DNA, 201 bp, Triticum aestivum
aagtgagtcgtattagtggacaatcctgtataagtcttgtgccgccatggcgttttatcacgcagttgtcgctcatgctcaaggtatatgtcatgtggctgcggactcccgtgctgcgaaaccgagactgacttggcctgaatttcgtccttgttccatgctcccggctatcctgcatcgtaggtagtgtcagcacacacg

SEQ ID NO: 444558 - DNA, 62 bp, Triticum aestivum
ggagtacacgaatacagctctggttgatatcaacctgtgtctacaaactgaggtactcagca

SEQ ID NO: 444559 - DNA, 308 bp, Triticum aestivum
gggcactagaatgtactcgcgctatctcaagaagatctactcggtctaagcttctttttgcggtgtgtttgctgacacagatgaatattgggtttacgaataaatctaactaagaccaatagttacagtcactctgaaggcatgaatgctagagcaggtctaggtttgaaggtctctgcgacgtattaaattgatttgggataatatataggtttttcatggcaaataaatactgcctagcgttgaggttaatcgaggggtgtccattcacaatgacagtaagggcagtagggcatacagcgtgttgt

SEQ ID NO: 444560 - DNA, 91 bp, Triticum aestivum
gggattgatacccgaagtcaagataccaacctaatgtgttcgtagctggtgtgggtactgatgtcttttgggatcacttccataaacaaaa

SEQ ID NO: 444561 - DNA, 131 bp, Triticum aestivum
gggacagatgtacagccttaaacgcatcagacgaacaaagttctgcagtatacgcgacgatcgcatacgatccagacgatattaggcctgcatcaccacgttcctagcgcttgcagaatcgtcacctgttc

SEQ ID NO: 444562 - DNA, 489 bp, Triticum aestivum
  unsure (1)..(489): unsure at all n locations
tttgnnnggccactgtntacgcctgccnggtaccggtccaaaaattcccgggtcgacgnctcactanncggcggccgctcnagaggatccaagcttacgtacgcgtgcatgcgacgtctagctcttcnatagtgtcacctaaattcaattcactggccgtcgttttacaacgtcgtgctgggaaaaccctggcgttacccaacttaatcgccttgcagcacatccccctttcgccactggcgtaatagcgaagaggcccgcaccgatcgcccttcccaacagttgcgcagcctgatggcgaatgggacgcnccctgtagcggcncantaagcgcggnaggtgtggtggttacgccagcgtgaccgctacacttgccagcngccctaacngcccgctcctttcgctttcttccctcctttctcgccacnttcgccggctttccccgtcaangctctaaatcgggggcctcccctttaagggttcccgatt

SEQ ID NO: 444563 - DNA, 500 bp, Triticum aestivum
  unsure (1)..(500): unsure at all n locations
ttanaactgttacgcctgccggtaacggtccaaaattcccgggtcgacgagctcactagtcggcggccgctctaagaggatccaagcttacgtacgcgtgcatgcgacgtcatagctctctatagtgtcacctaaattcaattcactggccgtcgttttacaacgtcgtgactgggaaaccctggcgttacccaacttaatcgccttgcagcacatccccctttcgccagctggcgaatagcgaagaggcccgcaccgatcgcccttcccaacagttgcgcagcctgaatggcgatgggacgcgccctgtagcggcgcattaagcgcggcgggtgtggtggttacgcgcagcgtaccgctacacntgccagccgccctagcgccccgctccnttcgntttcntccnttccntttcgccaacgttcggccgggtttccccggtcaaagctcctaaaatccgggggncncccttaagggttccgaacttaagtggctttagg

SEQ ID NO: 444564 - DNA, 245 bp, Triticum aestivum
gggtccacggggcactcgcatgccacgatgctgactgtgatgaccattaagctgatactcgctcttctcggcgtacgcatcacactagcgtgacttgtgaagatatcaagtgcagcatgtaacaggggcagttagcctgttctggaccaatgagtgatgagtaatctgctgggatattgttcaggcgttcatgtgtatgactcaaaataatgagtgtgtttcctttccacacttagcgatataaa

SEQ ID NO: 444565 - DNA, 393 bp, Triticum aestivum
ggggcagtcgcagccaggatgctgattgtgatgagcattaagctgaagctcgctcttctcggcgttcgcaagagacggcgtgacctgtgaatacatcgagtgcggcatgtaacataggcaaatagcctgcctgaagagtgagggagagaaaacctgcatagattttgttctggcgtttttgtgtgtgtttctagtgattgtttgggtttattttccgcgcttatggatgtacattacaggtatataagacagcatagtgatgatgtcttcttcatggttatggaagtgaaagtaatgttatggaagtgaaagtaatggtatgaatgctgtcttcatggttatcagacagcatagtgaaaaataagtgcgggggcgggacggtcgagagacaaa

SEQ ID NO: 444566 - DNA, 348 bp, Triticum aestivum
gggaagcacctacgtaggcaggaactgaagtggcactcagccttcactccaggcgaggataacgagtgtcttgtaccatactatcagagtctcatgctacgcctcaacattgagcagaaccgtgtatattgcagctgtggacacatctaattgctggcctgcgcgaatcactgagagacttagggtttgctgccactgtacaactacgttatcatacgtaccttacgtcattgctcggagtggtcagttctgaaacgtgtcccagtttgtgcatccagatcctgttatggttcgcattattcactgagtctcggtaagtagtcattgcccaggtaagacacccatgat

SEQ ID NO: 444567 - DNA, 487 bp, Triticum aestivum
  unsure (1)..(487): unsure at all n locations
ttacgcctgcccctgtttagcctgcccgtaccgggtccanaattcccgggtcgacgagccactagtcggcggccgctctagaggatccaagcttacgtacgcgtgcatgcgacgtcatgctcttctatagtgtcaccnaaattcanttcactggccgtcgttttanaacgtcgtgacgggaaaaccctgncgtnacccaacttaatcgccttgcagcacatccccctttcgccagcggcgtaatagcaaagangcccncaccgatcgcccttcccaacagttgcgcaccctgaatgcgaatgggacgcgccctgtancggcgcattaagcgcggcgggtgtggtggttacgcgcncgtgaccgctacacttnccangcgccctagcgcccgctcctttcgctttcttcccttcnttcncgccacgttcgccngntttccccgtcaagctctaaatcggggggctcccctttaggntccgaagtttag

SEQ ID NO: 444568 - DNA, 152 bp, Triticum aestivum
tcccgggtctacggaggaagaagatggtcggcgtctccctggcgcatgactccgctgaataacattccattgcgataatatttgagctgcctgccatcagtgtgcaagccatccagaagatcctgtcggtctcgctggctctgcaattgttc

SEQ ID NO: 444569 - DNA, 144 bp, Triticum aestivum
gggtagtccacattgctctcgaggtgaggtcacaggttaaccttgcacagtgattaaccattgtccagggccaagcatggagaacacggcattctcccagggcacaggaaccgctttaccattgctaacttcaagacattgaaa

SEQ ID NO: 444570 - DNA, 439 bp, Triticum aestivum
gggcagcaacaatggcaactatcagcaacatcaacagcaacaacagcaacaacaacagcagcaacagcaacagcaacagcagcaacaacagcaacagcaacagcaacagcaacaacagtaacaactgcaacaacaacaacatcaacaacatcaacaacaactgcatcaacagcagcaacaacaacaacaacagcaacatcaacaacatcatcaacaacaataacatcagtatcagcaacagcaacaacagcaacaacagcaacatcaacaacaacatcatcatcatcagcagcatcaacagctacatcagtatcaacaacaacaacattaacggcaataacagcaacatcagcaacagcaacaacagctatcagcaacaacaacaacagcatcagcaacttcagcaactacagcaacagtagcatcctgttcaacatca

SEQ ID NO: 444571 - DNA, 89 bp, Triticum aestivum
gctgatggtgctgttgttggtggtgatgctgttgctgttgctgatggtactgttgttggtggtaatgctgttgcagttgctgttgctgc

SEQ ID NO: 444572 - DNA, 196 bp, Triticum aestivum
ggggtagaagagtagagctctggttgccattaacgtgtgtctagaaactgatgtactcatcatgccattagcagtcgatgtaaatcttgcacgctgggttgcaaaatttgcttctctggtcagagagaccccttctgttatcagtgctctaatcccacttggccagtgatgccttttttttggaggtgcagaatat

SEQ ID NO: 444573 - DNA, 348 bp, Triticum aestivum
cggggaattgtgacaaagttgagtgtttcatgggcccctgacgtaaatgatcctcccgttacttctgactcacacacagtgacaccgcagcagagaagttcaatgaagaaccactacaaatactagcccccatatggcagcatcagcagcaaccgcactatcagtggcatcagaaaggacaagaagcattctcaccatagcagcatcagcagcagtaaaagagataagaaagcttcccatcgcagtagcaatggtggcagcagcagaactgacactagtgatcctcaacatcggaaggcatatggcagcagcattaccagcagaactgatactaatgttcctgaatat

SEQ ID NO: 444574 - DNA, 367 bp, Triticum aestivum
gggcactagaggatactgccgctatctcaagaagatctactcggtctaagcttctttttgcggtgtgtgtgtctgacacagctgaattttgggttaacgatcaagtctaacgatgaccaatagttaaagtcactctgaagtcattaaagctatgagcaggctaggtttgcaggtctctgcgaagtactaattaggtttgggataagctagtgattgatcatggcaaagagatcgatgctagccttaggtataatcatgccgtgtcctttcacactgatagaaggggcagtagagaatatagcgtattgttggtatccaggactctgatatagggttattaaccaaatgcatgaatgtaactctgtac

SEQ ID NO: 444575 - DNA, 172 bp, Triticum aestivum
tcgacgggacggtaccaatgctgctgctgctgcagatggtgctgttgttggtggtaatgctgttgctgttgctgatagtcctgttgttgctggcgatcctgttgctattactgtcgtctctgcaccgacttatcaattcagtgatcagttatctcaactaacatgaccattt

SEQ ID NO: 444576 - DNA, 135 bp, Triticum aestivum
agtcgcagcagcatgagccctcgggcctggaatgatccagtttccgagcgtactcgcggtaggctcttccaagtacagacgccaggaggctgcgataggtcgtcgcttgaggtcatcgttgcgtcgtcataatct

SEQ ID NO: 444577 - DNA, 349 bp, Triticum aestivum
gggattgattcccgaggtcaggataccaacctattgtgttcgttgctggtgtgggtactgttgtcttttgggatgagttccatatacacaactgtaatatctatcccgacccatggtggctactcccatgtatggttaaatgcctatgtatctggatgtatgcgcacgtgattcatttgcgcatccttggagcagattgatcatatttttacccaactaaaactgtgtccctaatctggcctgatacctaaggtcaatttggtttgtaccatgaatttttggcatgttgtttgacacacatactgaatggtatttttcagtaggtatatgtaattaatatgagtacttc

SEQ ID NO: 444578 - DNA, 161 bp, Triticum aestivum
aactggtaccctgcagtaccggtcgaaatccagggtcgacgggggggggcgcccccagcgggggcgccccccaatgtcttcgaaacggtgttggccccctggtcttcatccttatccaagaattttccttaatttttccaaaggtttccaacgaatttcaa

SEQ ID NO: 444579 - DNA, 75 bp, Triticum aestivum
ggtagcaatgctgcagctgctgctgatggtgctgttgttggtggtgatgcagttgctgttgctgatcgtgctgtt

SEQ ID NO: 444580 - DNA, 292 bp, Triticum aestivum
  unsure (1)..(292): unsure at all n locations
gggacagatgtacagccataatcgcatcagacgaacaaagttctgcagtataccgacgattccaaatcgatccnacacgatattctaggccctgcatcaccacgttatagcgcttccagaatctcacctgttctcatttcactggccgtcgctgtaaaaccttgtaactgaggatcacgtgctttaacacaaatcatccgccttgcattacaacacccattcgctacctaatgtaacagtcaacaggctggcagcactagaacttcagatcattgtcacatccaaagctgct

SEQ ID NO: 444581 - DNA, 485 bp, Triticum aestivum
  unsure (1)..(485): unsure at all n locations
gngnnnnnnnnnnngtaaactgttacgccgncnggtaccggtccanaattcccgggtcgcgngntcactagtcngcggccgctcnagaggatccanncttacgtacgcgtgcatgcgagtcatagctcttcnatagtgtcacctaaattcaattcactggccgtcgttttanaacgtgtgactgggaaaaccctgncgtnacccaacttaatcgccttgcaagcaaatccccctttgccaactggcntaataangaagangnccgcacngatcgcccttcccaaaanttgcacagctgaatggcgaatgggacncnccctgtagcggcacattaagcgcggnaggtgtgntggtacgcgcaacgtgaccgctacacttgctatcgccctaacgcccgctcctttcgctttcntccttcctttctcgcgacgttcgccggctttccccgtcaagctctaaatccggggttcncttaaggnttcgaa

SEQ ID NO: 444582 - DNA, 105 bp, Triticum aestivum
gggtaaatccaactttcctcgtatgacgtgcatggagcactttccaagatataaagtcacagttacctgtacaatctatcatgcgggctacctctgagtcaagtg

SEQ ID NO: 444583 - DNA, 468 bp, Triticum aestivum
  unsure (1)..(468): unsure at all n locations
ttaactgtttccgccggccggtacaggtccanaaattcccgggtcgacgagctcactagcggcggccgctctagaggatccaagcttacgtacgcgtgcatgcgacgtcatagctctttatagtgtcacctaaattcaattcactggccgtcgttttacaacgtcgtgactgggaaaccctggcgttacccaacttaatcgccttgcagcacatccccctttcgccagctggcgtatagcgaagaggcccgcaccgatcgcccttcccaacagttgcgcagcctgaatggcgaatggacgcgccctgtagcggcgcattaagcgcggcgggtgtggtggttacgcgcagcgtgacgctacacttgccagcgccctagcgcccgctcctttcgctttcttcccttcctttctcgcacgttcgccggctttccccgtcaagctccaaatcgggggctccctttaagggtt

SEQ ID NO: 444584 - DNA, 403 bp, Triticum aestivum
ggggcagtcgctgccaggatgctgattgtgatgagcattaagctgaagctcgctcttctcggcgttcgcaagagacggcgtgacctgtgaatacatcgagtgcggcatgtaacataggcaaatagcctgcctgaagagtgagggagagaaaacctgcatagattttgttctggcgtttttgtgtgtgtttctagtgattgtttgggtttattttccgcgcttatggatgtacattacaggtatataagacagcatagtgatgatgtcttcttcatggttatggaagtgaaagtaatgttatggaagtgaaagtaatggtatgaatgctgtcttcatggttataagacagcatagtgaaaaataaaagggaaagggaaagaaaaaaaaaaaaagcggccgctct

SEQ ID NO: 444585 - DNA, 317 bp, Triticum aestivum
gggaagcacctacgtaggcaggcactgaagtggcactcagccttcattccaggtgaggataaggagtgtcttgtcccatctaatcagagtctcctgccacacctcaaccttaagaagaaccgttcatatagcatctgtggcaacgtcgaattgctggccttcacgaatcaatggtcgatttatagtttgctgccactgtagatctacgtcatatacgtaccttacctcattaatgtgagtgtcacgttctgatacgtgtccccgtttgtgcttccagatcctgttatggttcgcattgcccactgaggctcggtaag

SEQ ID NO: 444586 - DNA, 420 bp, Triticum aestivum
ggtggtgtgataccatcgtcgtcatgaagttatcctcggtggtgtgatgccgtccccaagatgagtcgctgtgacgccggcggcaagacatacatgaccaggtgcgttgccggtgcaagtggagatccatgccgcggtgacaggcgctgtgacggcgtcatccacagcgagatgccctgtgtggtcttggtgctgcgaaggcaaagttcatggcaagaggtctgcatgtgatctgcatcaagattagaggagttgacatgacaagattacggacgtgaatgttacgattaatcttgtctagccgagctgagagagtcagttagtttgttagctgcgtgagggtcgtgtgcctagagtgattctaggaggaagaagtggtcaagataagattagatgggtgcatgtaaagtggcgttagtg

SEQ ID NO: 444587 - DNA, 473 bp, Triticum aestivum
  unsure (1)..(473): unsure at all n locations
ttaaacttttacgccggncngtaacggtccanaaattcccgggtcgacgagctcactagcggcggccgctctagaggatccaagcttacgtacgcgtgcatgcgacgtcatagctctttatagtgtcacctaaattcaattcactggccgtcgttttacaacgtcgtgactgggaaaccctggcgttacccaacttaatcgccttgcaacanatccccctttcncaanctggngtanaccnaaaaggcccgaaccgntggcccttccaaaaantngcgnanctngaaggncaattgaacccnccctgtaccggcnaattaaccncggcggttgtgtggttaccccaacgtnaccctaaacttgccagggccctancgcccggncctttcgctttcttcctttcctttctcgccanttngccgggntttccccgttaaagctcnaaatcnggggggtccctttangggttccga

SEQ ID NO: 444588 - DNA, 405 bp, Triticum aestivum
cacgggcaccgtcgaactggaggagctgacgtctttcttgacggtaccaccgcggtatctacatggggctggggcgtccaaggagttgcctctccacgttcgcatcgacaagatcacctcctgatctcttccactactcttaatcttccagtgggcatatgcctaagaagtgatgtattttggttacttggttgtactcccttggtcgcaaaattcttgtcttaatttttttaaataaggatgtattaagtcatattttagtattagatacatcctatctagactaatataagacaagaattttgagatggagggagtgcgtaatacatgtcttgtggcaggtattttggttgtagtactttgagatcagacgaggtacttcgctagttccgacagtggaagggt

SEQ ID NO: 444589 - DNA, 334 bp, Triticum aestivum
gggggaagaagatggtcggcgtctccttggcgcaggacgcctcggaagaacagaccaaggcgatgagataagaattgcctgccatcagtgtgcatgccatccaggagaagcggcctgcatcaatggctctgcagttgttctacgtactagtacttctttgttcgaaagaaacacaattctgtagttgatcgtggcaaaattctttgacatggatccaccaacggggcatccatctgaacttttgttgcagcatcagtatgtgcactgtttaacccgcagaaaaaagcatgtgctatgttttttggaaaaaaaaaggcaaataaaataaataaaa

SEQ ID NO: 444590 - DNA, 73 bp, Triticum aestivum
tgttttgtcagcgtgtcaaaccttaaatacaatctgttaatcgtggatcagatttgttaccacattgggttca

SEQ ID NO: 444591 - DNA, 418 bp, Triticum aestivum
ggggccacgggacgacggagatgtgggccgccgcgacgtgggcaagatggagcacgggtgcgagcattaccggcggagatgcaagatcgtagcgccgtgctgcaaggaggtgttcccctgccgccattgccacaacgacgccacggctttgggtgatcggcataatatatgtcgccaggatgttgaaaaagtagtgtgtgtactctgtgatactgaacaaccggtgtcacaagtgtgtgtaagatgtggagtcaatatgggagaatacttctgtgatgtatgcaagttttatgatgatgacacagagaaagggcagtaccattgccatgattgcggcatatgcagggttggtggcaaggaaaactacttccactgtgcaaagtgtgggtcatgttatgctgttgcgttgcgtgataac

SEQ ID NO: 444592 - DNA, 336 bp, Triticum aestivum
taccatggtcattggcgaagataatactggggaggccaagtggatgatggataacgtaaagttttcagttgaagaaccgattgaggccgtggcaaaaagagaagagctggagcaccttgccatgatttgcagatctgaagctgatgcaatggggaggatcactgctggaattctccgtctgcttaaacttgataagtctcttgggcagggaaccatcgaacagctgaggaacctaggaagtggaagcctggacaacattttctcgcctagcaggttcagcaggcacaacagttttggcatcgtaagcacccctaggacccccaggagcccaatgtt

SEQ ID NO: 444593 - DNA, 227 bp, Triticum aestivum
gtcgacggggaagaagatgaagaggaagaagaagaagaagaagaggaagaagaagaagaagaagaagaagaagaagaagaagaagaagaagaataagaagaagatgaagatgaagaagatgaagaagaagaagatgaagaagaagaagaagaagattaagatgatgtagaagaagttgtataagaagaatgaagaagaagaagatgaatttgattatgatgatgttg

SEQ ID NO: 444594 - DNA, 337 bp, Triticum aestivum
ggtaaagaaaaagatcaatgatgcaggaaggaggaccaaggccgagatgatgaagactaggataaggatcaccttgaggaagaagaggacgagtaagaggacgaagtcgatgacctcgagctgaacttgacatctacgacgactccgttgagacagctcagcgtgcgagacttgacgaggttgaagcaagccataaagagtgcgatcgttaggatcatctacgggagaaagcgtgaggaccagtcaaggcagagtagaagaagaatcggctgatgaagacgaagagtcttcaatagaagaggccgagtcgctataccggatgcaagaagatcaggtg

SEQ ID NO: 444595 - DNA, 147 bp, Triticum aestivum
gggttcagaaatgtttcctgtccaatatcttgtttgtgtcagcgtgtcagataccttaaatatcatatcgtgtttattctgttggatgcagagtttgttaaaacatttgggttcacggtattatattatgcttttgaacctagttat

SEQ ID NO: 444596 - DNA, 340 bp, Triticum aestivum
gggctgccagaaacgcctgggcggaggaaaataggcgcggaacacgcgaggatggatgctgtataaaccatgagttggagaaaaaaaatgattcttcagtttgagaaccggcgccgagagagagagggagagccgagaagaggaaggccgggatatttattatattaattaaagaaaaaaagggcaagttagttagttggtgccacagaatgcaatgcatgctcccttcatcatcatcatcatcatcatcataatgtgatcagagctgagacctgatcgatggcaaatattagtacttagatcagtactcctgcttaaaaaataaaaagtgcaatataaa

SEQ ID NO: 444597 - DNA, 88 bp, Triticum aestivum
cgggtcgacgcgggggggagattgaaagtgcaatctttctcttaaagattatttttgatattgatgacaaatttacatataggggacc

SEQ ID NO: 444598 - DNA, 489 bp, Triticum aestivum
  unsure (1)..(489): unsure at all n locations
gggnngnaattttattcggccgccacggtcaaaaaacccgggtcgacgggggtcttttgaaaaaacanaanaaaanaaaaaaaaaaaaagcggccgctctagaggattcaagcttacgacgcgtgcatgcgacgtcatagctcttctataagtgtcacctaaattcaattcactggcgtcgttttacaacgtcgtgactgggaaaaccctggcgttacccaacttaatcgccttgcgcacatccccctttcgccagctggcgtaatagcgaagaggcccgcaccgatcgcccttccaacagttgcgcaacctgaatggcgaatgggacgcgccctgtagcggcgcattaagcgcgcgggtgtggtggttacgcgcancgtgaccgctacacttgccaagcgccctaancgcccctcctttcgctttccttcctttcctttctcgcaacgttcgccgggnttccccgtnaagccnaaatcgggggctccc

SEQ ID NO: 444599 - DNA, 484 bp, Triticum aestivum
  unsure (1)..(484): unsure at all n locations
ggnnnngnagnttattggccggcaggncaaatcaaccggggccggccagctcactaatcgnggccgctctagagggatcaaagcttacgtacgcgtgaatggcaanttaataantcctcaataagtggnaactaaattnaattnaactgggccgtncgtttaaaaacgtcgtgactggaaaaacctggcgttacccaacttaatcgccttgcagcacatccccctttcgccagctgcgtaatagcgaagaggcccgcaccgatcgcccttcccaacagttgcgcagcctgaatgggaatgggacgcgccctgtagcggcgcattaagcgcggcgggtgtggtggttacgcgcaggtgaccgctacacttgccagcgccctancgcccgctcctttcgctttcttcccttccttctcgccacgttcgccggctttccccgtcaagctctaaatcggggggctccctttaaggtccgattaatgct

SEQ ID NO: 444600 - DNA, 429 bp, Triticum aestivum
  unsure (1)..(429): unsure at all n locations
cgggtcgaccggagcgccatagtatctgtgacatttacaggcctgccccgaagaagggaaaggcatgttcaaccaataatataacaagggaaatcaattttttccgggtaaaactaaaacaataatgccaagaaggtaaaaagttaagggaagggttttatccgaaaaaattgcaaattttccccaatataactgcaaccaaaagctgctgccgttgtttggtgttaaaatcaaagttactgccagaatggaattgtatcgcctggaaatcaatcttttttgtttctccaaaaaaaaaanaanaaaaaaaaaaaaaaaaaaaaaaaaaataaaaaaaaaaaaaataaaaaacaaattaaatttatataaaataaattaatataaaaaatatcctaaaattaaaattaaaaaaaaaaaaaaaaggggccc

SEQ ID NO: 444601 - DNA, 131 bp, Triticum aestivum
ggggatggctggctgcgtctttgttcttcttaacataaacttaaattgtcacccgcaaaaaaaaaacttaaattgtaccttggtacattgtaatatcatacagtatgcatgcataaacacttttaattttt

SEQ ID NO: 444602 - DNA, 294 bp, Triticum aestivum
gggggaggagggcagggagctcctgaagaagtacacggtgctcatgaagaagaggatggggatcgagagacgcctggtggagaagatcgggcgtgcgtagatatactataggacatttcatatggcactggggccatatgagcatagggattatataggaaatataataaagtcattgtatcaactgttgacgctagctggtgtcgtgcgcgtcagccgtgaagaatgtgccgcggtcctgtgaacgaataatttgtgatgcattcgttatgaaaaactgtcacatgtttctac

SEQ ID NO: 444603 - DNA, 390 bp, Triticum aestivum
ggaagtaaccaactggacagcacatcattgttcacattatccctgtttcttctttttcttctttctttttctgttctttttatttatatttttcgttttttattttttgttaaattcatggacatcttagtagggaataccaaaggaaaaaaaaaactccgtgaacaatttttccaaaaggaaaaaaaggcccaattttttaaaaaaaattttaacggtttaagaattaatttcaatggttttaaaaggaatttaaaaattttccaaaggaaaagttcccggaattttgaaaaaatttgtaaaattgaaaaaatttcttggatttgaaaaaattcaacggtttcaaaaaaattcaacaatttcggtaaaaattttcacgcattagttaaa

SEQ ID NO: 444604 - DNA, 417 bp, Triticum aestivum
  unsure (1)..(417): unsure at all n locations
gggacgacggatggtggtggcgccagagggatgcacggggtaaagctcatccgagctgtcacatcggtggagtaccatccgtgtacgggtgtgccaaagatcgacactagcggcgaaggcggcgggacgacgggtggtggtggcgccagagggatgcacggggtaaagctcatccgagctgtcacatcggtggagtaccatccgtgtacgggcgtccttcacagaaaagccgatatcgtcaaattcaacagtgataggattctcacgagcaaggcggcgaacagaaactagattagtgactaagtcaggagacacaagaacattagatatgttaacgggagtagaagtagaagggaatgacgtttgaccgacatgtgtaatgggtangaaggaaccgttaccaacggtgatgcgagt

SEQ ID NO: 444605 - DNA, 314 bp, Triticum aestivum
gacgggatcattccggggatgtccgtcgaatgatgtggaatggggaactgatgggtttggctaatctcagtattaattattactgagtagtatcatcgtactgcagggtgcgcgcgcgtgtggattacttactttagttaatttattattactggattgtactgcgtggcgttagttaaattattaccttcaggtgtgtgcctcgatctctcttaatcagtagtagtccgcgttggtgcggtgacaataataaaacacgacctactacttgtgcatgttgtgatgcatgcatgtgtactggtcattcatgctgt

SEQ ID NO: 444606 - DNA, 466 bp, Triticum aestivum
  unsure (1)..(466): unsure at all n locations
ggnnnnnnggttattntnccggcggtacggtcanaaattcccgggncgacgagctcactatcggcggccgctctagaggatccaagcttacgtacgcgtgcatgcgacgtcatagctctctatagtgtcacctaaattcaattcactggccgtcgttttacaacgtcgtgactgggaaaccctggcgttacccaacttaatcgccttgcagcacatccccctttcgccagctggcgaatagcgaagaggcccgcaccgatcgcccttcccaacagttgcgcagcctgaatggcgatgggacgcgccctgtagcggcgcattaagcgcggcgggtgtggtggttacgcgcagcgtaccgctacacttgccagcgccctagcgcccgctcctttcgctttcttcccttcctttctgccacgttcgccggctttccccgtcaagctctaaatcgggggctccctttagg

SEQ ID NO: 444607 - DNA, 350 bp, Triticum aestivum
agggctgatggcagggaatcgtgctcccaagagggtgaataactatgctcggatcgttggccgcatctgggcgcagatcccattcatgtgcggaagcagcatgcacatcaacaatcgactactcactggtcaccatccatacgacggcagtggggctcagcatgttcgcgtcggggacgtgcataacgcggaagtcgctgttcgtcgcgtgcggctacacgatcgcgtctgtgtctatggtgctcacgttcctgataggcctcgtggtgatgctgctcgcgtcgctcgccatctgcatgcacggtaccctgctgcacattgctgttgtacatgccgtactagccctatct

SEQ ID NO: 444608 - DNA, 433 bp, Triticum aestivum
ggcgccgtcgatgacgcacatcgcgttgatggcagggaagaaggttctcaagattccgaatacctatgccagcttccttggcctcatctgggccctgatcgcattcaagtgcggaatcaagatgccaaaaataatcgacgactcactgttcaccatccagacgacggcggtggggctcagcatgttcgcgtcggggacgttcatagcgcggcagtcgcggttcgtcccgtgcggctacgcgatcgcgtcggtgtcgatggtgctcaagttcctggtaggcccggtggtgatgctgctcgcgtcgctcgccatcggcatgcacggcaccctgctgcacattgctgttgtacaggcggcactacccctagctgtgacttcatttgtgtacgctgaagaatacaaggtcatgcagacatcatgagcacaggggtaa

SEQ ID NO: 444609 - DNA, 347 bp, Triticum aestivum
aattcgccggtcgacgaggatacggtcctctcagccgcagaggcccagggcttcaggctcgtggacaaatggataaatggagtgcacgagagcaatggtatcattagctcttggttccgtggcaatgacgtttgcggtgctttccggaatgtaacgctttccatattgtactttgaagtgtgatacattggtgtttacctgcatctcatggttaacttgcaggttttgttttaccttcctgcattggtgtaccgaatgaatgtttttgtatactaaaaggaatgaatgtggcagttgtatactaaaagaatgttatttttttaaaaaaaaaaaaaaaccaacaaaaa

SEQ ID NO: 444610 - DNA, 412 bp, Triticum aestivum
ggggacgaccggatctgcctcgccacctttgtttctgccttgcctagcagcaccgcgcatatgccccacctccccagccagcgcagccgcccctccgtgtcgagtcctgtgctggccacgcccgccgtctgcccagcaccgctctcccgttgccttaaacaatccagctccaccactaatccatgcccctgccctccgactcaagaggatcagctgctagcatagcggtgtgcagggggaggccttgagcagacaggtgactgcgtcgctggggcggatatgaggcacatctgcaggcagcggactgtaggcaagaggcacatggcagtgtggcgagatggtcggtggcttgctgctgttgcgagtgggctacctagaagatggacacgaagaatatggtgccagaaatggc

SEQ ID NO: 444611 - DNA, 208 bp, Triticum aestivum
gggggagaggacgaggggatcggcgagagaagacgaggtgggaggcggcgctggatgaggacgagagggagagatgggatcgagaggaagagaagatgggctctctccctgcgctagggttagctggggagtgggccttgggaggccggcccaatggagaggaaaacggccaggggcctgctgggctgctctctctcctactctctac

SEQ ID NO: 444612 - DNA, 228 bp, Triticum aestivum
ggggacacgcattttggtccaaactttttttgtcttgttttgtgggagtaaaagtaggaactgtatatattaattgtccacatgacagagttgtcttgtgggatttgcctcgacatggctcgtcaataatgtaccatgattcttgtgctgtatgtcactacttgggttgtagacaaattgctggacgtggacgcatttgctaaattcacttcaggtaattaccaatct

SEQ ID NO: 444613 - DNA, 101 bp, Triticum aestivum
ggaggtccacgtgcaggagagaagcgacggagttaggagttgtaaatatgcattgttgtatcgcgacctgaatgaatgggaaaaagtgacattaatgtaat

SEQ ID NO: 444614 - DNA, 363 bp, Triticum aestivum
cgggaacactaaagaatcaaagagatcactggccagctttcatgaaattaacggaatcagaattagctaagtgaacggccgatgaataaacactatcactgccatgataaagaggattaccataggctggggccaagtggctacatggtggcccggcctacgcgggataaggctgagcaagagatgctggatgcacgggtcagtccagttacattgagctggctccccaggtgcaggacttggttctatgtgcatgggggagcgttggccccaacgacagccaaggttttgaacaacgcaagccttaaaggagcccacctaaaattacttgttgcaatagaataggctcaaacaagggttttc

SEQ ID NO: 444615 - DNA, 304 bp, Triticum aestivum
gggatgcacgaggttagctctcctaaccaacaagacaaagatcttggccaggatacggcaccagacaccgatgacatacctggtgatcagtaactatatttgacctaccgtccagtccagtgatagtttataatgttatttataccgagaagaaggcccggtggatctgacctgtaactgtaagtaacttagtccaaatctgatgtgattggctgcctcaaagaaggatgagtaagagaccttgtggtgtatacactgttggcttctttatgtatatctgtgaaatggccgatatagggcaccc

SEQ ID NO: 444616 - DNA, 475 bp, Triticum aestivum
  unsure (1)..(475): unsure at all n locations
ggnnnnngnaangtttantttgcccgggccggtaccagtcanaaattcccgggtcgacggctcactaatcggcggccgctctagaggatccaagcttacgtacgcgtgcatgcgacgtatagctcttctatagtgtcacctaaattcaattcactggccgtcgttttacaacgtcgtactgggaaaaccctggcgttacccaacttaatcgccttgcagcacatccccctttcgccgctggcgtaatagcgaagaggcccgcaccgatcgcccttcccaacagttgcgcagcctgatggcgaatgggacgcgccctgtagcggcgcattaagcgcggcgggtgtggtggttacggcagcgtgaccgctacacttgccagcgccctancgcccgctcctttcgctttcttccctcctttctcgccacgttcgccggctttccccgtcaagctctaaatcgggggctccctttaggg

SEQ ID NO: 444617 - DNA, 150 bp, Triticum aestivum
ggggagcacaagaaggcggaggagcacaagaagaaggacggggagcacaagaaggacggcgagcacaaggagggcatgatggagaagatcaaggacaagatcagcggcgacggccacggcgacggcaagaaggacggcgaccacaaggag

SEQ ID NO: 444618 - DNA, 489 bp, Triticum aestivum
  unsure (1)..(489): unsure at all n locations
ggnnnnnngnatcttngccggcacggtccagaantcccgggtcgacgagctcactagtcgcggccgctctagaggatccaagcttacgtacgcgtgcatgcgacgtcatagctcttcttagtgtcacctaaattcaattcactggccgtcgttttacaacgtcgtgactgggaaaacctggcgttacccaacttaatcgccttgcagcacatccccctttcgccagctggcgtaatgcgaagaggcccgcaccgatcgcccttcccaacagttgcgcagcctgaatggcgaatggacgcgccctgtagcggcgcattaagcgcggcgggtgtggtggttacgcgcagcgtgaccctacacttgccagcgccctaagccgcccgctcctttcgctttcttccttcctttctcgcacgttcgccggctttcccgtcaagctctaaatcgggggctccctttaaggttccgatttagtgctttacggcaacc

SEQ ID NO: 444619 - DNA, 418 bp, Triticum aestivum
gggggggcgtaaaacgatagcgcttattgggaggcaacccaattttatttttagtttttttgcttctgtttaggaatcaataatccatctagcctctgtttagatgtggttttatcttttaattagtgtttttgccaagttaaacctattagatcttcttgggagatagtcatttgatcttgctgtaatttccagaatctttgcgctcagtgcccgaattgttaaaaatcaccagaatgtgataaatagtgattccaattgctgctgatcaataaagaaattttccaggtcgtctaattttggtagaattgtttgggttccagaagttggtgttagttacagattactacaaactgttctgtttttgatagattctgttttgcgtgtgttgtttgcttaatttgatgaatctatgact

SEQ ID NO: 444620 - DNA, 421 bp, Triticum aestivum
taccattgactgaaatgaacgattactgccagaaacttaatcatagataacctgacatgatctggtctgatccgattggcttattcagagaaaccactttcaccgacctgtgcatgcatgtgaggatcgtcggaggagtgtgcagagacctagccgtgtgtatacacgtctgcataccctcaggtgcaccggcagtacagcgatgcttctcgaccgaccatgtcgtgcttgtcatcagcccagctggtgtgcattgttccttgcttgtacgacagcattggggaaacagaatctgatgcgtttggcatgggtggttcagttgagcgctgaaacaagatcaggacggagcagtggatcgcgcatgagcctgcttgtgatagccttttgttcacagccagctgtcccatgaaccgggaagggc

SEQ ID NO: 444621 - DNA, 505 bp, Triticum aestivum
  unsure (1)..(505): unsure at all n locations
gnnnnnggaantgttactttngccnggcccgtaccantcanaaattcccgggccgacggggcacacaaaaaaaaaaaaaaaaaaaaaacaaaaaaaaaaaaaaaaaaaaaaaaaaaaacggccgcnctanaggatccaagcttacgtacgcgtgcatgcgacgtcatagctcttctaagtgtcacctaaattcaattcactggccgtcgttttacaacgtcgtgactgggaaaacctggcgttacccaacttaatcgccttgcagcacatccccctttcgccagctggcgtaatacgaagaggcccgcaccgatcgcccttcccaacanttgcgcagcctgaatggcnaatgggcgcgccctgtagcggcgcattaagcgcggcgggtgtggtggttacgcncagcgtgaccgtacacttgccaagcgccctaacgccggtccttttcgccttccttcccttccnttcccnnaacnttcngccgggtttcccccgttaaacctca

SEQ ID NO: 444622 - DNA, 427 bp, Triticum aestivum
ttccgggtcgacggggtgtgccgacggcgggcgcccctggtccaatggtgccgccgccggcatctcctgtcccatgccgctgacggttcctcctcccactttgctcaaaatcgctagggagcacatcgccgccgtccggcccttttccattgcacaacgacatattttttttcactgcaccgcccagccatctcatcttccctcaagatcttgtatgtcgtgttgcgagatcaagtaacgtctccccaccaaaggaattgagtatggaggaggcgaggacgtgttcatctcccgctccggcgagattcagttctgctcttgggtttccacgacatcatgaagttcctttgtgtagacaagcacctcagcactctagatcgataatcctaatacttcaaagccaaggagtagaaaaactgaaacgacg

SEQ ID NO: 444623 - DNA, 440 bp, Triticum aestivum
  unsure (1)..(440): unsure at all n locations
gggtccgcaataaggctcttcagcttgcatcttcgacacggacatcttatctccgtctcgttcttttgaagcatctcggccttcgcggaccttaaaaacctattcacgatgccttcggtcatcgtgcggaccatggtcgcctgcggggtagagcaaaacgatattttagaaccaaacaaaaatttggcatgaccttccctaaaaataggaccaaaaagaatgcttaatgccaaaattctcgccgaaacggaaatgaatcaacattccggcaaaatattggcaactatcgcatatcaaataccggtacacctccaaacacaaacacatatgcaacaccacaaacatatgcaacaccacanacatacatagatctagctaggccgtaaaaagtgcatgtgcacattgttgtaaggagaacaacctaaatatagctttccccc

SEQ ID NO: 444624 - DNA, 410 bp, Triticum aestivum
  unsure (1)..(410): unsure at all n locations
cggcggaggacgcctgcttgaccagatgggccatgtttgggactaggctccgtcgggctggtactgggaggcgctacctactgggggcgcatcttggtgaggagttagcctgtcattgacccgaaccttctttggtggcggttgcttgggccagtgacggtccagaggcttgagcaccccgcggaggtggtacgtcaccatgtcagcgaggaggacgtgcacgtccgtcgctacttggttacgttggagcataggttctccaatacctgngaggtttctcanggatctcactggagctatgatcctgtgatggttccttctctttgggtgtcaaacgcccttcgctanggttttagttgtattagtgatgttatatgtatgatactattcgggatgtattagtgataata

SEQ ID NO: 444625 - DNA, 286 bp, Triticum aestivum
tctacagtcaacgtgcaacgcatgatgggtgctatcgacaccgcaggtgaccgcttcatcaacttcagccaattcagtctccttctgcaactccagcccggcgctcataaatgacgtcgacatcgtcctctgagtcacttcatttcacctcagcagtccgatccatgagccgtctccatcaacttccggcttcatacatcaatttcatgcaactatctattccggtcacgatccagcctcaacttcacctggcgccaggcctaaatttgtttgatcaatttttttg

SEQ ID NO: 444626 - DNA, 87 bp, Triticum aestivum
accctaaagtagagtcgtagtacgctctctcactcagcagcttcatcccagctgcgaatcttgtgcacattggatattcactcatat

SEQ ID NO: 444627 - DNA, 456 bp, Triticum aestivum
  unsure (1)..(456): unsure at all n locations
cgggtcgaccggggacgtgagtgtgcaggacgcgcagctctttgacgtcttcagccaggtcggctcggtggtgtctgtgcgcgtgtgccgggacgtcaacaccaggatgtccctaggctacgcgtacgtcaacttcagcatccctgccgatgctgcaagggcattggaaatgctgaacttcactcctgttaatgggaagcctataaggataatgtattctaaccgtgaccccagctcacgtaaaagtggtgctgcaaatatatttatcaagaatcttgacaagtcaatagataacanagcgctctatgacacattttctgcctttggaaacattctttcatgcanagttgctacagaaatgtctggagaatccaaggttatggttttgttcagtatgagcaggaccaatcaacacagaatgcaatcaatgagctcaatgggatgcttttgaatgac

SEQ ID NO: 444628 - DNA, 402 bp, Triticum aestivum
ggggagaattaaaatagtagctgctattaataatccgtggtacgatgaagaaaaaaataaaaaagaaaaatggatgatcaacgatcttagcacaaggaataaaaaatgatgatcaacgaccttagcggcattgaataaaagagaagagagaaaaaaaagacttacttcactggttagctagaccaatgaacgctttttttcctcggcagacctgataggccaagcttagctaggataagctggctcatttctgcgtcgtgggagtcgcctcagcaaactcgatcgaccagcgaccaactagcatggctggtccgcgaatgcctcctaagccgatacagagctcagtaacgggctaattaagctggccagattgcttgcacgggagcgatgtgggactacaca

SEQ ID NO: 444629 - DNA, 402 bp, Triticum aestivum
gggcatgccaagttgttttgggctttgctacaagtttgttttttttggtgttttctgagtcaaaaagggcgataaatggtcttgataggcgagggaggctccatctgagagcacgttgtttctcgatatccttgaagtggcccaattttttttccatggccttgtctgaccaattcaaggtaccatgccaagttgttttgatgttcaatgaattttgcattttctcgagttttctcagtcaaaaaggttgataaatggctggacatgtcacaacttgcgtatggtgacaaaaattgttcaaacctgacatggatgcctaccattggcatgcccacccacttgcataagttggggtcatttcaaggatgtacaatcatagaccatactgaatggatggtgttc

SEQ ID NO: 444630 - DNA, 161 bp, Triticum aestivum
ggggtgaggcattttcttgtttctgtttcgggatgatgaataattgactggagttgttcagggaaactggtacctggtgctccgcattgtcggtcgctattggtcttggatgcaactgtaacattctgcggtgtcgctgatgaactagccttgttggccgc

SEQ ID NO: 444631 - DNA, 370 bp, Triticum aestivum
gggatcgaagacgaaggagtagtgtagttagctcagctgtgttcatctgcctctgttgcagaactgaattcctgctcgtatggttggactgatggatcaggggtgtagtaatccttgtttttcgaatctatagaggttggattacctgattgttcttggcaaacaacatttatccgccttcttcagtcaaaaatacgtcgggaacaggtaaaaacaggcaaaataaaaaaaaaaaaaaaaaaaaaaaaaaaaaaaaaaaaaaaaaaaaaaaaaagaaaaaaaaaaaaataaaaaaaaaaaaaaaaaaaaaaaaaaaacaaaaacaaaaaacaaaaaaaaaaaaaaaaaaaaaaaaaaaaactcctctaaa

SEQ ID NO: 444632 - DNA, 480 bp, Triticum aestivum
  unsure (1)..(480): unsure at all n locations
ggnnnnngnacgttaacttcgccanggccngtacaagtcanaaattcccgggccgacggagctaaaaaaaaaaaaaaaaaaaaaaaaaagcggccgctctagaggatccaagcttacgacgcgtgcatgcgacgtcatagctcttctatagtgtcacctaaattcaattcactggcctcgttttacaacgtcgtgactgggaaaaccctggcgttacccaacttaatcgccttgcacacatccccctttcgccagctggcgtaatagcgaagaggcccgcaccgatcgcccttccaacagttgcgcagcctgaatggcgaatgggacgcgccctgtagcggcgcattaagcgcgcgggtgtggtggttacgcgcagcgtgaccgctacacttgccagcgccctagcgcccgctctttcgctttcttcccttcctttctcgccaagttcgccgggtttccccgtcaaagctccaaatcggg

SEQ ID NO: 444633 - DNA, 311 bp, Triticum aestivum
  unsure (1)..(311): unsure at all n locations
actcactggcctcatccatgatttgngcaaagtgctgctgcattccagcttccgggagcttcctcagtgggcagtcgtangtgacacctttcccgtcngctgcccgttcgacgaatgcaacgtcaacttcaagtacttcaaggagaacctgactaccacaacccggagttcaacaccaagttcggggtctactccgangngtgcgggctggacaacgtgctcatgtcatggggccatgacgactacatgtgcctggttgccaaggagaacaagaacacccttccttccgcanggctgttcatcatcagata

SEQ ID NO: 444634 - DNA, 104 bp, Triticum aestivum
cgggtcgacggggaacgtaatcaccatcttcgaagaggaaggcagacggccggacgccatcatgatcctgacggtgaagccagacaacatctgcagcttcatct

SEQ ID NO: 444635 - DNA, 422 bp, Triticum aestivum
gggcgtaccaaggagatgcagagccgtgccacggtcctcctttggcacgccggctccaccatcgcctatgtcgttgacgacctctcgtcatcttcgacggggagctatagcctgctgtggagcggcaggatgcagctggtcggcacgtgcaacggcctgctatgcctctgcgacgacggcggcagcatcaccctggtcaacgcagcaacaagggagacgctgcctgtcccacggcggccgccatgcgccggccaactattcggcgaggacaggaggtggcacagggagtacaacttcgcgtaccatccgacaacggggcgctacaaggtggtgcacgtcccctgcagcttcaaccgggtccgcgacgcggtacacgtgctcacgctaggggaggaggcgtggcgagaggtgccagcccccgg

SEQ ID NO: 444636 - DNA, 482 bp, Triticum aestivum
  unsure (1)..(482): unsure at all n locations
gnnnngnaggtcttagccggcggtacggtcaaaattcccgggtcgacggggatagggagcttgatgcatacaccaaaaaaaaaaaaaaaaaaaaaaaaaaaaaagcggccgctctagagatccaagcttacgtacgcgtgcatgcgacgtcatagctcttctatagtgtcacctaaatcaattcactggccgtcgttttacaacgtcgtgactgggaaaaccctggcgttacccaattaatcgccttgcagcacatccccctttcgccagctggcgtaatagcgaagaggcccgcccgatcgcccttcccaacagttgcgcagcctgaatggcgaatgggacgcgccctgtagcgcgcattaagcgcggcgggtgtggtggttacgcgcagcgtgaccgctacacttgccagcccctancgcccgctcctttcgctttcctcccttccnttctcgncaagnttcgccggnttcccgttaagc

SEQ ID NO: 444637 - DNA, 417 bp, Triticum aestivum
gggagaacaggtgctggatcgaatcaagaatgatctcattgattggacgttggcaggcaagcataaggtggccctaatgatccacagacctagggaaccagattaatttttgtgctgttggtaggctagtaatggggttcagactgtaattcggtggctggatactagctttgtatcctgggtaacttgctagttgctatacccctgtaaaactcttttctaatttcaatgaaatgctgcatcatgcagtcttttcgtcaaaaaaaaaaacaaaataaaaaagaacaaaaaataaagaaaaaaaaaaaaaagacaaaattaaaatgaatacaccctaaaaaacaaataaatacaaaatcaaaaaactacaaaaaatgaccccaaactttaaattaaaaaaaaactgcggccccccca

SEQ ID NO: 444638 - DNA, 403 bp, Triticum aestivum
gggtatgatgagaaattatctggtgtttgttaacccggcctggctttggacaataagtcgccagtatctatttggattgcgcccttggaatcatgcgcttataaatcattgggtatattgttcaaatctttaatagccaacatggctggatttttattatggttatcaataaccagtattatgattaaggttttcaaagtcgctttaacgcaatggatatcgtattatcaatggatatgatttattctacagttgaaggaatagtcccaagttgctgcaggcttacgacccggcacttgggggctacattatttcaagttgagattacatcaaatatgcaagtctcatgtcactgcaagcatgcaccatgacacttgggggctaatgcaaagtcattttttgc

SEQ ID NO: 444639 - DNA, 350 bp, Triticum aestivum
  unsure (1)..(350): unsure at all n locations
gggtcagatgagattgtccgggtggaaagcccgcttgacatgaaaatagtagacctggtgattttgggcaaactagtgaattgagatagctgtgcaggcgagatcagttaacctggtaagcgtcctagcccgcataattagacaaaataggtgttttttggtcaacttagcaaaattagatctctgacangtcagatagattgttcttaatcccacttgtcangtattatgtgaactattggaccacgttgtagatattcgtaaatgctgtccggagatatactcgtccactcgggaaaaaaaannaaaaaaaaaaaaaaaaaaaaaaaaaaaaaaaaaagaacaaaaag

SEQ ID NO: 444640 - DNA, 486 bp, Triticum aestivum
  unsure (1)..(486): unsure at all n locations
gnnnnnnngnatcttagccgccagtaccggtcaagaattcccgggtcgacgagctcactatcggcggccgctctagaggatccaagcttacgtacgcgtgcatgcgacgtcatagctctctatagtgtcacctaaattcaattcactggccgtcgttttacaacgtcgtgactgggaaaccctggcgttacccaacttaatcgccttgcagcacatccccctttcgccagctggcgaatagcgaagaggcccgcaccgatcgcccttcccaacagttgcgcagcctgaatggcgatgggacgcgccctgtagcggcgcattaagcgcggcgggtgtggtggttacgcgcagcgtaccgctacacttgccagcgccctagcgcccgctcctttcgctttcttcccttcctttctgccacgttcgccggctttcccccgtcaagctctaaaatcgggggctcccttaagggttcgatttagtgcttta

SEQ ID NO: 444641 - DNA, 404 bp, Triticum aestivum
atcatgcgtaagcacgggatgcacgccaccgtcagttcgattcacgtcaacggctggttcggcaagcacgacaagctgagcgccagcgtgtcgctcgcgcgccgcgcattcggtctcgacctgcatgccgagcgcgaacgctgggtgttcgtgggagactccgccaacgatgcggcaatgttcgagttcttcccgctctcggtgggtgtggccaatgtgctggacgtgatcgatacgctgcccgtgccccccgcgtacctcaccgaggccgaaggcggcggcggttttgccgaagtcgccgagcgcatcctggaagcgcgttccctagccctccccgcgccgcgcgactgacacggcattcctgcaccgcaacacgcgctggagacccagcgtcgcttgccgca

SEQ ID NO: 444642 - DNA, 363 bp, Triticum aestivum
ttctgggctctcccccctctcttcgggtaacccccaggtttggcaaccgggtaaccggttaaaatccccgcccccttgtttcgcggtcctctcgttggttgtaatctccaggcaaacgttcggtttgggttgtgctgccccttataacgttgatgtccatcgaggccaatttccggtggtttgtcctcctcggttccgttgacgttgggaccgtcttctgaacctccctgctttggtttaagtcccggctaatctattttgctttgacttctgatcctgattgggtccaggctaaacccatcatgctctgattgccaatatgttttatggtcctgggctaaccatttttaacccaaatgccga

SEQ ID NO: 444643 - DNA, 54 bp, Triticum aestivum
ggggaccactaagaacagcaactacacacatacagacacagcggagctctattt

SEQ ID NO: 444644 - DNA, 403 bp, Triticum aestivum
accggaagccgaagccgtcccacggcgacgacgaccggcccagctacggccgcaagatgaacgacgacgacgacgacgacgacaggcggtcgcggtacaaaaagcgcgacgacgacgactatgatgagaggaagccgcggtacaagaagcacgacgacgacgatgatggacacgataggaggccgcggtacaagaaacgtgacgacgacgacgatgatgacgatgacagaaagccacgttacaagaagcgctacgacgacgacgacgatgatgatacgaagccacgttacatgaagcacgatgattatgatgacgacgacgatgataggaagcagcgtcgcgggaacaaccgccgccgccacgatgacgatgactgattatgacatgagtttaagctgacgct

SEQ ID NO: 444645 - DNA, 433 bp, Triticum aestivum
  unsure (1)..(433): unsure at all n locations
gggatcgaaattccatcttacaacatgaggaaacacgctctcgccctcttcctcttgctcctcacctttgcctcccatggggcatggtgcgcagcagcagcgcgaagcgccatggctgaggatgcggctcgtcatcatctgaggcctcatcaccatggcaagaggctcctggagatacagactcccaggaaggtcgggcacgcgacaggcggatccgganggggcagcagcggagcctgcatgagcggtggcggcggcacggacacaaggccacacaacagcaagaatggcggcgccatggcgctgccagctccagcgacctccctcctggcgctggttctcaccgctaccattcttctctcggcgcacagcttctgaagcactccctccgttcctttctacaaggcgttttggacagctgacattgaactgt

SEQ ID NO: 444646 - DNA, 412 bp, Triticum aestivum
cgggtcgactgcacacagcaccgtcataccatttgacgacaacataaacttccacaaggttatcgcggttggaattgcaattggagcgggtatgcatacggttgttcacctgacctgcgacttcccaaggctggtctcctgcccaagtgacaagttccaggagaagctggggcccttcttcaactatgttcaaccaacatggggaactctgttcgcgagcactccagggtggactggtatcctcctggtcctcataatgtcattctcctttacactggcgacaacctccttcaggaggagcgtcgtgaagctgccatcgccactgcaccacctggctggcttcaattccttctggtatgcccaccacctgctggtgtttgcatatatccttctggtgatgcactcctactac

SEQ ID NO: 444647 - DNA, 490 bp, Triticum aestivum
  unsure (1)..(490): unsure at all n locations
ggnnngnaattctactcngcccgggtcggtacaaancanannaggccgggncgacgagccactaatcggcggccgctctagaggatccaagcttacgtacgcgtgcatgcgacgtcatgctcttctatagtgtcacctaaattcaattcactggccgtcgttttacaacgtcgtgacgggaaaaccctggcgttacccaacttaatcgccttgcagcacatccccctttcgccagcggcgtaatagcgaagaggcccgcaccgatcgcccttcccaacagttgcgcagcctgaatgcgaatgggacgcgccctgtagcggcgcattaagcgcggcgggtgtggtggttacgcgcgcgtgaccgctacacttgccagcgccctagcgcccgctcctttcgcttcttcccttccttctcgccaagttcgccggctttccccgtcaaagctctaaatcgggggctcccnttaaggttccgattaantgcttaa

SEQ ID NO: 444648 - DNA, 68 bp, Triticum aestivum
gggggagagagtgagtgagagggagagtgagggggttgtcggccgcgcggggatgataaggtagggac

SEQ ID NO: 444649 - DNA, 472 bp, Triticum aestivum
  unsure (1)..(472): unsure at all n locations
ggnnnngnaangtctacctgcncgtgnccggtccanaaattnccgggtcgacgggctagaaaaaaaaaaaaaaaaaaaaaaanaanaaaaanaaaaaaaaaaaaaaaccgaaaaaaaaaaaaaaaaaaaaaaaaaaaaaagcggccgcnctaaaggntcnaancttacntacncgtgatgcnacgtcanagcncttcnanagngtcncctaaattcaattcacnggccgtcgttttaaacgtcgtgacngggaaaaccctggngttacccaacttaancnccttgcagnaaatcccctttcncnancnggngtaatancnaaaaggcccncaccgttngcccttcccaaaanttcncaccctgaatggcnaatgggaccccccctgtaccggcncattaaccccggcgggtntgnggttacccncagcgttgaccgctaaacttgcnagcgccctancgcccgctcctttnt

SEQ ID NO: 444650 - DNA, 56 bp, Triticum aestivum
  unsure (1)..(56): unsure at all n locations
aaaatttttgcaaatattttatggtgttgaaaaactnggnagcccttannnnnttt

SEQ ID NO: 444651 - DNA, 265 bp, Triticum aestivum
gggccaacgggaaggacaccttgtggccccggtgaacaagttaaaccgacgttaccaacaagccaactcaacttcggggtcctgtaatgcaagcatgcatgcacaaataaatccttcaagttcaagggccaagatttggaccaataattcaactccttggttccaaataacccaatggataattaaatccaatacaaccaaaatccaataacctttaaattgccccattatacccaaaatgatgttttccacgagcacatatgat

SEQ ID NO: 444652 - DNA, 334 bp, Triticum aestivum
gggccggcccgagcagttacgaaagcgaatgaagctgcggttgcacggacaagcttatggaggtgtcagtatgcacgcacacgtccctgatttggagcacgcctctggcctggtaggattctcgctctgcctcgacctcaagggcgttcgtctatctgtgtcatgctcgggacgatgcactaatgcagggtgtggttcttcagattttctttgtctttttcttggtatgtatatctctgaatcttgtgagccgtgattttcatgctgcccattgtgtcatgtataatgattcttcttattatttttgaatggcataattattcttattgaggcg

SEQ ID NO: 444653 - DNA, 437 bp, Triticum aestivum
ggggtaaacttttgctatatgatagacctgattgctagatttctacaagctgttggaaagtaagaggtttgagccaagctattctcagaataaagcttaagaccgaccttgttgttggttggtattgtaataagaagaaaataaagaggcatgaaaagatgttatctaccacatatggtgaacttggatgcagtttaccacatcttttcggtcttgaagatcaatgcatcaatatagatgtcatgtatttatcattataatcatgttgttccgggaatattggttcttgtatttagtcattgatggcaacagattgaaactattactcaaaagtacaagcatatatcatgtcgtcgccaaatgtcatgcgtatacccattttggctgtgccgtaaagtttcctttgttacattcacggatgaaataaagtttgtttt

SEQ ID NO: 444654 - DNA, 430 bp, Triticum aestivum
attcccgggccgacgggggtgcagaacaaggacgaccctaccatcttggcgtgggagctgatgaacgagcccagatgcatcaccgatccgtccggtaacactctgcagcgctggatccaggagatggctgggtacgtgaagtcgatcgacaggaggcatctgctgaccgtcggcaccgaggggttctacggcccgacgagcccaccggagaagctcagcgtgaatccggggcactggttcaacaactacggcctcgacttcatccgcaactccaagatctctgacatcgacttcgcctccgtccacctttacccggacacctggctgctgcacgcgaatttggaagagaagctcaagttcgtgacgcagtgggtgagctcccacttcgaggacggcgacacggagctcggcggcaagcccgtggtgctca

SEQ ID NO: 444655 - DNA, 494 bp, Triticum aestivum
  unsure (1)..(494): unsure at all n locations
gngnnnggnaagtgtttnttttgnccngncccgggtcaaantaacccgggncgacgggccacnaangcngaggcggnacttcangtnctnnantaaggnntncgaggannggatgncnagnnnntctngganggtcacnaaactttcntcacngggnantagctnttacnaagcagctgcnnacanaagcctgcgcttntgganctnatgntncnntgaagatcatcgcgcttnnatnacagnccccaaaangtgctgcgacttgcaccnttcgccattaacttgnctagccttcctcatgcaagttctctaacctcccctcttgcaagttcnaaagccttcctcntgttcgtncttgcagctgattcnacacntcgatagtcactcaaaatgctgnattcccntccgttcatcgtatgaaancnaatttacagtgttttgcattaaanctctaaatcgggggtnccatttaggggtccaaantgattcaattc

SEQ ID NO: 444656 - DNA, 386 bp, Triticum aestivum
ctcaacaaccaacgcgaacaacggaaagaagatggcgcaatccgtcctccggttcctccaacaaaggtacaatgcaatccgctcccccaagaaaggccgttaatttaacaatccgctggcaacggaaagccaacctcccgtaaattcctcgccgtccttgctggccactttcgacagccttgacatcttggacgcctgcaatggcctcctgctctgccgctgctggaaggctgctgatcccctggaattggattatgttgtttgcaatcccaccactgagaaaatggtgtccttccctgccatcgactggtccagcaaagtgagcgtcgctcgcctcggatttgacccggccgttacttcccacttccatgtattcgagttcatag

SEQ ID NO: 444657 - DNA, 430 bp, Triticum aestivum
  unsure (1)..(430): unsure at all n locations
gggccaaccggaagttgaaggtaccggtgggtggcctcccaatcaatcaaggaaacaatttggaatggctaacggggggtaatggttaaccgggaatcaataaggaattggtgacaaaaaaaccattaaaggcattagaattacctaaggagcaaaaccaaaccttgtggaggatcccatcaaccctattctcgcacattgcttccgatgcgacgcttaagccattgggccactttgctgaagcacccaatgctcatagttatccgcctatatgtgccggggagtatgtggaacaagagctctcggcgatcaatctgaaagggaaggttgcactttangtgcacacagaccgccgattaatctggtgacttggtgactcgttggtctgccttctatggtcagaatgcgaattgcgataatccaagctgat

SEQ ID NO: 444658 - DNA, 485 bp, Triticum aestivum
  unsure (1)..(485): unsure at all n locations
gnnnnngnannttacttgnccggcccgggncaancaacccgggncgaccccaaaaanctgattagggtgatggttcacgtagtgggccatcgccctgatagacggtttttcgccctttacgttggagtccacgttcttaatagtggactcttgttccaaactggaacaacactcaacctatctcggtctattcttttgatttataagggattttgccgatttcggcctattggttaaaaatgagctgatttaacaaaaatttaacgcgaattttaacaaaatattaacgcttacatttaggtggcacttttcggggaaatgtgcgcggnaccctaattgtttaattttccaaatcattcaaatatgtatccgctcangagacaataacccctggataaatgctcaataataatgaaaaanggaanaanatgagtattcaaaatttccgtgtcgcccctaatcccctttttggggnattttgccct

SEQ ID NO: 444659 - DNA, 436 bp, Triticum aestivum
ggggcagcaaacagatgcgctacccacgattagcagacaggttcatatgcatgctccaacttgatcaaggaggagagctacacatgttttatgttattttacctaagatagagcagcagcagtgattagctagctagaaatgagtttgaggatgatgatgtgctacgctattactatgatgataaaatagcgagtgttggtagtaatgactatgatgattattattagctagtgttagtggtgattaaataaatattgttgatggtaatggctatgatgatgattaaatagcttgtgctggcgcattagattcaagtggaggtaacatgtggtgcacattgaaagtactactagtccaaactgatcacgtttggattagtagtatacttttgacatgcaccacatattgcctccacttgaacctaatccaccttca

SEQ ID NO: 444660 - DNA, 442 bp, Triticum aestivum
ggtaccagtctagaatcccgggccgacgggcggttggagccaccaaccgggactaaagggcctcctgtctgtactcgcagcaccggccacgtggaggcccatctgtcccggttagtataagaaccgggacgaaaggcctaggcattggtaacgaccctttagtcccggttccccaaccgggacagatgggccttatgaaccgggacaaatgaccctttttctactagtgttacaaagccagtaggtcacactgaatttttgatgtgatatggccacagctatcatgttgtaatatcttctaacctgaacacgatttatacaacttgaatttaaaatgttacattaacggatacaaaaattagctgatattccctgtaattttctcttttctttccaaaaaggttgtatttttgcaagcacttctgcttattattaactggta

SEQ ID NO: 444661 - DNA, 492 bp, Triticum aestivum
  unsure (1)..(492): unsure at all n locations
gnnnnngnaatgttacttggcngcccgggtcaaaaantcccgggtcgacnagctcactatcgggggccgctctanaggatcnaagcttacgtacgcgtgnangcnacgtcatacctctcnaaantgtcacctaaattcaattcactggccgtcgttttacaacgtcgtgactggggaaaccctggcgttacccaacttaatcgccttgcagcacatccccctttcgccanctggcgaatagcgaanaggcccgnancgatcgcccttccnaacanttgcgcaacctgaatggcgatgggacncgccctgtancggngcaataancgcggcagntgtggtgggtacgcgcagcgtacngctacacttgccaacgcctaacggccggtcctttcgccttccntcccttcctttctncaacgttccgccggctttccccgtcaaagntctaaaatcggggggctccctttaanggtccnatttagngctttaacg

SEQ ID NO: 444662 - DNA, 389 bp, Triticum aestivum
gggagatcactgcacggtgatccccagggaaaacttggcgctgggcaaggaggaggtggtggccttctgccggaagaacctggcggcgttcaaggtgcccaagaaggtgtacatcgccgccgacctgcccaagacggccaccggcaagatccagcgccgcatcgtcgcgcagcacttcttcgtcgtgcccgccgccgccgccaaggcctataagagctcgtcggtccgtcgatcgatcacgtcgccgtcttttgtcccttttttttacgtgccagacagaacaggggattgataatgaaattgcgcgccacatgacattggagagcggtaaaagttgtggttgatttgattgatgaagattaaaaaaagacaaccaacaaaaaacaaaa

SEQ ID NO: 444663 - DNA, 358 bp, Triticum aestivum
cccccgttctccgactgggcaacctccccgtggtcctgggggtccccaacccgcaacaattccaaccccacaaaaccggacccggcaaccccgaacctgccttaaggcttaaaaggccaaccaccggatgaaggagaactttttcaaggaaaccttaaaattgaaaaaaatggacttttagggtggatcaaaaaggtaggaacctccggcaaaattgctactgcaatttggcagctttggggtttgcggcttacttacactgctgtttgtgtctctgactttttctgctctgagtttaacacaaaaaatatgggtgcgtctagtgctcactggactcgcagctagcgtccgttgccat

SEQ ID NO: 444664 - DNA, 56 bp, Triticum aestivum
  unsure (1)..(56): unsure at all n locations
aanttgccaagtgcggngaatgccggtantnactgncccgttntaatccntgcggg

SEQ ID NO: 444665 - DNA, 446 bp, Triticum aestivum
gggtcgacttcctcagcaccaagtttggggtgcctttcctgccaccgtccaaggcgaacggcacggacttcaagcacggcgcgaacatggcgatcacgggcgcgacggccatggacgcgcccttcttccgcggcctcggcctgtcggacaagatctggaacaacgggcccatcagcttccaaatccagtggttccagcagatcaccgccaccgtgtgcgggaacgactgcatgcggtacctgcgggactcgctggtggtgttcggcgagttcggcgggaacgactacaacgcgatgctgttcggcaactacaacccggaccaagcgagcaggtaccaatgtttcaacggttcgaacggagtgccgctagctaaatgaaatcctgtccgcgctatagcctgatttttcaccggcatatagccgatttggatgagtagtaccgctact

SEQ ID NO: 444666 - DNA, 65 bp, Triticum aestivum
  unsure (1)..(65): unsure at all n locations
cgctattaccctaattttttcanncnccncntannccctttttcccttcccttctaccccccttt

SEQ ID NO: 444667 - DNA, 425 bp, Triticum aestivum
gaccttcaaaaccggaaaaaaggatcccatacagggggcaacggcaacgacaatgggaacagatcaagggaccacaaccgtgaccgctacaaaaaccggacccgtgacagaaagaggccctattaccagggaggtagagggtcggactatataggcggttcctataacagccggagggattctgaaagggcaaggcccacagacaggaacggtggtgatttttcaagaacaggagacccggggaggatgaggagcaggtctcggtctccgggcatgcatggttattaatcatttcaagttatatgagactcgtgaggtaaacattatgctcctttgtttattcattcagtcgcaatgtctgggtgttgtcatgattaaatttaaaccttactctgctctagcagctctttgttgaaaccatacct

SEQ ID NO: 444668 - DNA, 302 bp, Triticum aestivum
ggggaagacgaggacgaagaataagactaggaagaagaagacgacgaatatgactaggatgacgatgatgaagaatactatgactaagaagaagaagtagattatgaagaggaggaatatgaagaataagattgagattaagaagatgaatattaataattattcgaagattatgaagaagaataagaagaagaagatgatgatgaagtagatcgaatatcaagacgactgataataataataatgagaagatcgtgacttcgaagatgaagacgaagattaggattgataagaagacgaac

SEQ ID NO: 444669 - DNA, 238 bp, Triticum aestivum
ccggccgacggggaaaacaatgaccgtccgtacgacgacgaaggatagcactacagcggccaccgggatgaccatgaggagagatccatagatcagcaccgtcagtgctgtaatcaccggatgcctgtcacgctgatgtccgattcaccttgaggtacagggtcgcactctcctggctgttcctatcactgcctgatggattctcatggggcaacgctcaaagacacgaccggttgtg

SEQ ID NO: 444670 - DNA, 367 bp, Triticum aestivum
ggggacctgaagaagttcaggaagatggcgctcggcaccagcagcttccagagcagccagctaacaccgtccagcggcgagcacgagcaggagcaccagaacccgtccgtcccgagcagcgacggccatcagcagacgcaggaggtggagttggggactagtacgaagcgagacgacggcgacgtcgagagccaggcttccatgagatgaccactttccctttccttggagagagttaacctcaggacatcatttgtaaatccacagcatagctgaattcacataagctgccagctgacttggttgcaacgaacaaaaatgatattttgttcttgagatatatatatatagttcttttgttagacac

SEQ ID NO: 444671 - DNA, 490 bp, Triticum aestivum
  unsure (1)..(490): unsure at all n locations
ggnnngnangnttctttgcccggcaggtacnantcaagaattcccggggctctagaggaccaagcttacgtacgcgtgcatgcgacgtcatagctcttctatagtgtcacctaaattcattcactggccgtcgttttacaacgtcgtgactgggaaaaccctggcgttacccaacttatcgccttgcagcacatccccctttcgccagctggcgtaatagcgaagaggcccgcaccatcgcccttcccaacagttgcgcagcctgaatggcgaatgggacgcgccctgtagcggccattaagcgcggcgggtgtggtggttacgcgcagcgtgaccgctacacttgccagcgcctaacgcccgctcctttcgctttcttcccttcctttctcgccacgttcgccggctttcccgtcaagctctaaatcgggggctccctttaagggttccgatttagtgctttacggcacctgaccccaaaaaacttgat

SEQ ID NO: 444672 - DNA, 308 bp, Triticum aestivum
ttgagaaacgaatgaccgagacatagtttttcagaagcgctagcaccttacgatcgggtagacagttacacctactttcccctacatctgctagtctaccactgtaagagttcacatgacttaatcaactatgctagatcccatagtagcttgcggctgcacacggaagtttctagcatgaataatttcatgatccctttgagcctgggtggcggtccataaagaaaacgaccaatcgctggaatacccaggtgcctcaatccacccagatgtgtgttaaagttgccaccttaaataaactattaaat

SEQ ID NO: 444673 - DNA, 362 bp, Triticum aestivum
  unsure (1)..(362): unsure at all n locations
gggcatcccagttgagggtccctacaagcctgcggcgtaccggtactatggtgtttgtccagcatgactagcggctggcctgagcctgagcggcggcactctgccacggcgacctatgaacctgttttcctttgcattgtctatctagatctaggcatgtgttcacttaggccgaggatttgtcatggttatgtttttagatcggtgagggtgtggtggacggaggtggcgtttgcttttgcccagaaataatggtgttattattttggatttaaatgaggaggtgtgatttgacggatatagtgttgcctttttgattctacatgtctgatgctccctacgccacaatttactanggatgc

SEQ ID NO: 444674 - DNA, 427 bp, Triticum aestivum
gggccgaccgggcttggtaggtatggtttggagggtcctaacaagggtcctcctgtggggaattccccgggaaaatgggggctttcctccaatccttggtgccttgggttaaccggaaaaacccggaatggattgccggcacaattggcgggaatttttgcagtagtccctttcgtgctcaagggcaaaagaatgcgtccgttcttttttttgagagcgaatgcgtcctttctggtgacgctgggaactgggaagtcgtcaatccagattcttaacggccttattctgtcatgctggaagtcggcaatccaaacccacatgttcctcaccatatttgtcatgtccatagttgtactatatacagttcatccatgtgaataacacaatcgattatcctaaaaaaaaaaaaagaagaaaggagaaaacg

SEQ ID NO: 444675 - DNA, 122 bp, Triticum aestivum
  unsure (1)..(122): unsure at all n locations
gnntgtgaatncagnttttaaccaannaaacnnctctttttttaaacttngggtttttgacnntaatttaggncccattttaagttnaactcncaagtttataaatctntttttgnccngta

SEQ ID NO: 444676 - DNA, 496 bp, Triticum aestivum
  unsure (1)..(496): unsure at all n locations
gnnnnnngcaatgtttacttggcnggccagtaccaatcaaagaattcgcgggncgacgactcactaatcggcggccgctctagaggatccaagcttacgtacgcgtgcatgcgacgtctagctcttctatagtgtcacctaaattcaattcactggccgtcgttttacaacgtcgtgctgggaaaaccctggcgttacccaacttaatcgccttgcagcacatccccctttcgccactggcgtaatagcgaagaggcccgcaccgatcgcccttcccaacagttgcgcagcctgatggcgaatgggacgcgccctgtagcggcgcattaagcgcggcgggtgtggtggttacgccagcgtgaccgctacacttgcnagcgccctagcgcccgctcctttcgctttcttcccttctttctcgccacgttcgccggctttccccgtnaaagctctaaatcggggggctcctttaggttccganttnatgcttacggca

SEQ ID NO: 444677 - DNA, 422 bp, Triticum aestivum
aacgggttccacaaaaaacatcaagttaagattggcaagttcaaaaccccgaaaattggacatcctaataaagctaatcaaccatctctggaacttcacaacaccaacaaatggaagcaagcaggacgaaacctacactgagcaacctggagtctttccatgttggcaagcaccacaatttccgtgtaccgacctgccagcgaagccccggcacagcaagtatccctggcacagcaagcaccgattagcattcaggcatgagtaaccaagtgtgtccgagcccaggagcccaaatggccctgcgcaccgagagcccatgagcccaaatggccctgcgcaccgagagcagcccggactgtatgttcacagccagaaactattatactggaactcaattgccaacaaacctcccaagaacaaaa

SEQ ID NO: 444678 - DNA, 205 bp, Triticum aestivum
cccgggccaacggggcagaaaggcgaaatcggtggccttttgcaagcaaaaagcaattcctgataaacaagccaatggtccccctagcccaacaaaaagctctgctttgtttaagtcgggccagacataaatgggcctccccaaagaagttacgaacagaccatagtgtgagaaatcctataaagtttctttatttaacctgcgc

SEQ ID NO: 444679 - DNA, 61 bp, Triticum aestivum
  unsure (1)..(61): unsure at all n locations
ccactggcngnatcggcaanccgtgcctantancttcaaatnttgccgcctttgccngnca

SEQ ID NO: 444680 - DNA, 426 bp, Triticum aestivum
cgggtcgacgggatgacggaaggctcgccatacgcgcgcggcaaccagcaagcggaggatggaggagacatgtgtcggagtcccggtgaccagcaagcgaagagccgatgggacagcgtcgtctgtgcgccgcgaccacctagcggggaggagctagatcggggaaggtgccgtcgccaggtggtcgaggaatcgggcagcaaagtgccgaaaaaaacgtggagctggagaggccgttggggaggaggaaacttacattctaatgcatgaggcgccgggagggaggtgctgagcggttatgatcggcggtaggatcctgcgccatgtgcgatggtggttaggaccctttctttccttttttgtatgacagctggcaaaaggtgcgggacaccgctgccatatttaggtgtgtgctccggaacgcta

SEQ ID NO: 444681 - DNA, 149 bp, Triticum aestivum
  unsure (1)..(149): unsure at all n locations
atgcngacatnngtnacgacaaatcctgtgaaaaacacnatntcctgccancngnttcgccatctgcgttcangtcaatccactcagagtnantcngtccctnangaacccccgatnggcngncctcnggtgggtacantantagtgnc

SEQ ID NO: 444682 - DNA, 449 bp, Triticum aestivum
  unsure (1)..(449): unsure at all n locations
gggcgcggggtaaaaatggatctgggagccctgccatcctatttatagacagggtaaatacccaagcatcacggtcaaaccctaggtggcgtagtaactttttgctaagaaggcgcctcggttctctctttgacgtgatttggcctagattgggagtaccaaaagagaacgggcaaaaataaaagataagtatgaaagaagtattcatgaccagtgaaatggccgagaggtggaataagagacatcttagctcgaagcatgggccaaagctgactcttgctggtgagacccgtattttggtccttgatacttttaactgactctcattttcagggaaagcttagcaggaataaatccaatctaacttgagggataatgttggggatactccccacgggcgagacatanagatctatatattggaagcctatgtttggacatcagaatgg

SEQ ID NO: 444683 - DNA, 362 bp, Triticum aestivum
  unsure (1)..(362): unsure at all n locations
aaggaggttttggggttggaaatggaatggcttaccattaccgccctataaaaaaaggccctactgctaaatgacctaccattaccgcctttcacaaagaacccactactgctaggtgtcagcatgtaaaattagacatcanaaatacattcatcatcaatgatccttttgtgtagaatctgaattgtcaatatgaatcctcactggtttaagaaccggtgaggattcctattgcgggcacagatcctacacatagagttcaatgaacactactangaaaaggcctgctagtggcgcacctgttttggctactaatggcgcactacangtgcgccactagcatcacgccattagaattttta

SEQ ID NO: 444684 - DNA, 198 bp, Triticum aestivum
  unsure (1)..(198): unsure at all n locations
caaagatatcatctgttcctgtctatccagagaccaattcnggctcattatgcatctttgcaatgcaaaacttatctgggaccgaatctccgacgtctatgaaggttatccaaacagtcatgatccttggtttgaagacttcaangaatctctcaaaacgatgactttcgaaccagaatcatcatcttctgcatcatg

SEQ ID NO: 444685 - DNA, 476 bp, Triticum aestivum
  unsure (1)..(476): unsure at all n locations
ggnnnngnnngttactcgcccggcggtacaagncaacngggncaggngtgtncggntnaggnccctncggtggtnncggttgncctnnngaaccaaccggngnccnncgttanncnaaanctgattccttcancgccgnanacngccantgacncgngangagtttcngagggctgaatcntgattccggcnnacccttatgangtcttatcantcctcatggatttctctcnctccacgagcacggtcatctttggtcaggtcgcagggtggctgttgagcnacacgccgcgatatatggtcaatcattttgtccagtggggagatatnaacccgcttcaggccactttaaagtcanaatgnatngcncnagtcctcccccacnctgttgacgntttgaccnnnttccantgcctgggacctctcggtacgactgtangtcntnccnggtggcttcggaaatctgtcccttaagg

SEQ ID NO: 444686 - DNA, 347 bp, Triticum aestivum
  unsure (1)..(347): unsure at all n locations
ctatgggaggaatagaataccatgatggaggttgtgtggagaagacaaaaaaggagaaagtctcacattgacgaggataatcaatgagctatggagatgtccatcaattgatgtcaacatgaggagtanggattgccatgcaacggatgcactagagctataaatatatgaatgctcaacaaaagaaactagtgggtgtgcatccaacttgcttgctcacgaagacctagggaattttgangaagcccattgtacgaatatacaagccaagttctataatgaaaaattcccactagtatatgaaagtgacaacataaaagactttctatatgaagaacatggtgcta

SEQ ID NO: 444687 - DNA, 286 bp, Triticum aestivum
cgggagcgccgagccggcgccggcgcccggcccgtcttgaactcgcggcgagaaataatactaatacccattcgcacgtgttgcagtaacgtagtttttttcgacgcagagtaacgtacttcttgatgttctttttttctgatcgacaagcttttctatggtagctatatgttcatcttgatctgtgcttcttttactttacatcatttattagctttgtgatctccttttgtcattgttgagatattgtttagtgctaaaaacaaaaggaaatttgaggaagacc

SEQ ID NO: 444688 - DNA, 392 bp, Triticum aestivum
gggcaatggaagatgtaggtgtgatatgtcaagtagtggacagataagccaaccactggatgtggttttgagggatttttgcagtggggtttgtagggtgctatgccgcgctgggtttgggatttgaaataaaacgaagggagatgtgccacgctcttaaaaaaaaaaaaaaaaaaaaaaaaaaaaaaaaaaaaaaaaaaaaaaaaaaaaaaaaaataaaaaaaaaaaaaaaaaaaaaaaaaaaaaaatttaaaaaaaaaaaaaaaaaaaaaaaaaaaaaagggggccccccaaaaggttcaaacttaattaccccttcaagcaaatttaaaacccctcaaaaggggcccccaaattcaattcaagggccctccttttaaaaacttctaaac

SEQ ID NO: 444689 - DNA, 430 bp, Triticum aestivum
ggggaagaagaagatcaaaagagagatcaaaatactacagaatctctgtggaggtccaaatattgtgaagctgcttgatattgtcagggatcagcattcaaaaacaccaagcttgatctttgaatacatcaataacacagatttcaaagtgctatatccgacattgacagattatgacattcgctactatatctatgagttactgaaggctttggattactgccattcacaaggcattatgcaccgagatgtgaagcctcacaatgttatgatagatcatgagcttcgaaaactccggttaatagactggggccttgctgaattctaccatcctggaaaggagtataacgttcgtgttgcatcaaggtacttcaagggacctgagcttcttgttgactttcaagattacgactactctttggacatgtgg

SEQ ID NO: 444690 - DNA, 309 bp, Triticum aestivum
caaggtgattggtttgcggtctttttcacatttactggtttttccagctctgctgccgcctgccacactttgtaatgcaattttttttgtcacatcggtcatataatcaggattctagccaaaaaaaaaaaaaaaaaaaaaaaaaaaaaaaaaaaaaaaaaaaaaaaaaaaaaaaaaacaaaaaaaaaaaaaaaaaaaaaaaaaaaaaaaagaaaaaaaaaaaaaataggcggtacaaaaagattaaaactaaactttcacgtgcatcaaaggtcaaagcccatacaaaatggtgccatactttcattt

SEQ ID NO: 444691 - DNA, 473 bp, Triticum aestivum
  unsure (1)..(473): unsure at all n locations
gnnnnggcaactgtctactnggnnctggcccggtccanactacccggggtccgancccaaaaacttgattagggtgatggttcacgtantgggccatcgcccngatagacggttttncccctttgccgttggngtccacgttcttaatagtggacnctgttccaaactggaacaacatcaaccctatctcggtctattcttttggtttataagggattttgccgatttcggcctanggggtaaaanntgagctgatttaccaaaantttancgcgaaantttaacataatattnagcttacaatttangtggcacttttcggggaaatgtgnncggnacccccaattgtttattttccaaaatacattcaaaatatgtatccgctcatganacaaataacctgaataaatgctcaataatattgaaaaagggaaagaagtatgagtattcaacatttccgtgtcgcccttaat

SEQ ID NO: 444692 - DNA, 383 bp, Triticum aestivum
gcaacgcaagaaggggaaatcccaaatggaatttggcaaccggtaataaccggggcgggccaagtggacaataaccgggaaatggggacaagttttcaaaatccaggacaattttttaacccctggacggaattggaatccgggaaaattttcaaattcggaaacaaatttaaggcaattcaaacattttccaaaaacaaggacaattactgaatttaagaacaatttaaaccgattggtaacactttttaaacaatgtcacaagaataacatatttattaaatgaaaaaaaatagaatagatgaacatttttttagaagtttctggaacaaaattttaaattctcaaacatttttttatttaatacaaattttttgaaatgc

SEQ ID NO: 444693 - DNA, 494 bp, Triticum aestivum
  unsure (1)..(494): unsure at all n locations
gnnnnnngnaangttatttgcccgccaggntcaagantacccgggtcagngggcaacacaacacnagcaaaaaaaaaaaaaaaaaaaaaaaaaaaaaagcggccgcncnaaaggatcnagcttacgtacgcgtgcatgcgacgtcatagctcttctatagtgtcacctaaattcaatcactggccgtcgttttacaacgtcgtgactgggaaaaccctggcgttacccaacttaatgccttgcagcacatccccctttcgccagctggcgtaatagcgaagaggcccgcaccgatgcccttcccaacagttgcgcagcctgaatggcgaatgggacgcgccctgtagcggcgcataagcgcggcgggtgtggtggttacgcgcagcgtgaccgctacacttgccaacgccctacgcccgctcctttcgctttcttcccttcctttctcgccacgttcgccggctttccccgtaagctctaaatcgggggctccc

SEQ ID NO: 444694 - DNA, 440 bp, Triticum aestivum
gggtggactactcgtagctacccgaaccgcaactcaaagaattctgacaagacatccatcttccttgatacggacgctccaccactagggaacctggaggtaaagagaataataaagaaacagagctcgcatgaatgtattttttccttacttctacgtatatcctgtacgcatgaaggacaagcttgacgacgtgtcgccgttcgtgcctatgagccgcggtatggaacaactcctagacgaggtgatggaaaacatggaccaagatgagccgtccaccaaatccgcacctctggccaagtctagttcggtggcgatgcacacgcccccggcaatgagtgatccagctgcgaattcttcaactgtggcagggagcaatctcgtcgcaaaacccgcctccctggtgaccaagcccgctttctttaacacatcaacaggca

SEQ ID NO: 444695 - DNA, 442 bp, Triticum aestivum
gggcgggtaactttagcaaagaacaccacaataagtgaagcgagaaaatagatgacgacttaccaagtttgggggattgtacacggagaatccgtcccgcggtttgatatggaggaagtctttctcttctcctttgtacaggtcggatagtatccttgccagagcggtgggggagtccggacccttacggccacagcgcgtggcatcgtctgtcccgttgtagtgccacatgggattgctccgatattgaagtggttgcactccccgcattatgcatattgccatcacctcgactatcgtcagtcaggatttggccagtaattttatcctgctcatcaggaaatgtacttccttgcaatcctcctcttgggggcctcgggggtgccagcttagacgtgccctcggcggggtgttacagaacttggggagtcctatccggact

SEQ ID NO: 444696 - DNA, 437 bp, Triticum aestivum
  unsure (1)..(437): unsure at all n locations
gggtcatcataaggacatggtctatcaacctggcgaaaaggcttatcttcgcgttacaccaatgaagggtgctcaccgcttcgggatcaagggcaaactagctcctcgctatattggccctttcactattctggaaaggcgtggaaaagtggcttatcagctggagcttccgccgaacctttctcaggttcacgatgtgttccacgtgtcacaactccgacgctgcttcaaggacccaatccgagcagtggaccatgaagtgctcgaattgcaacaggacctctcctataaagagcatccggtccgcattctcgaccaagctgaacgccgcacacgtcagaaggcgatcaagttcctcaaagtccagtggtcgaatcactctgaagacgaagccacctgngaacgcgaggatcgtctacgagatgaatatcccgcac

SEQ ID NO: 444697 - DNA, 417 bp, Triticum aestivum
  unsure (1)..(417): unsure at all n locations
gggagttggaggagaggacgacanagatgatggaggaggaaaggccacggaatgacatgcaagcaagggccatgtacgagctccttatggtaagtttcttctgcagattagccaaaacattcatgtagtgtttgtctcattactaagtagtatgactgagtcgtcaaaaccaaatgtgcagtctgtgtgcgagaagacaggtcagaccgctccgccgatgccagtgattgttcctgggaccacggtgagttttatttgaatggaaattacttgctagtcttaacatttgagtgtcatcatgctaacaagacattggaaatgatccttggtgcagcgtaactccagacaagcatcgcacgagccttctccagcttacgacatgagccaccccgctcctacacctcctggatcttggta

SEQ ID NO: 444698 - DNA, 233 bp, Triticum aestivum
aaatcgtgctttgggcgtgatgtcctgtgtggagcaccaccgcgccagaaaagcttaccgcactggacgctgctcgacggctgaactaagtttagcattgttgaagcatatctagtcctcatccgtgactagtgtgcaagcagactgtggcagtttggctccagttgtgaaagtcatttttgtttgtctgagacatcttggaaagaacagtgtaggaatgaagtatttctgtt

SEQ ID NO: 444699 - DNA, 473 bp, Triticum aestivum
  unsure (1)..(473): unsure at all n locations
ggnnnnngnaattttacgttntcggngccggtcanaaattaacgggtcgacgggtcctgaaaaaaaaaaaaaaaaaaaaaaaaaaaagcggccgctctagaggatccaagcttacgtagcgtgcatgcgacgtcatagctcttctatagtgtcacctaaattcaattcactggccgtgttttacaacgtcgtgactgggaaaaccctggcgttacccaacttaatcgccttgcagccatccccctttcgccagctggcgtaatagcgaagaggcccgcaccgatcgcccttcccacagttgcgcagcctgaatggcgaatgggacgcgccctgtagcggcgcattaagcgcggcggtgtggtggttacgcgcagcgtgaccgctacacttgccagcgccctagcgcccgctccttcgctttcttcccttcctttctcgccaagttcgccgggtttccccgttaaagctcaaaa

SEQ ID NO: 444700 - DNA, 264 bp, Triticum aestivum
acacactccttgtgtctttgtcacacatgcactctgtcctcctccactcaccctctctctctcacacacatgggctttttgcaacatctagcaagatgcccatgcgttgcacggcacatcaagatgcatttgtctgaataatttatcttgtaggggaaatagtctacttgtggcatgtccatctttcaaaagttggcttagggtgtgaggtagcttcttagccatttgccttcccagcagttgtaccgcatgaatgtcgattgg

SEQ ID NO: 444701 - DNA, 209 bp, Triticum aestivum
gtattccttctaatttgcttttactttttactttgcatctctatactatcatatattatttatcatctcagtcagatctcactttcgtacgttaccgatattggattgacaacccctaagcacgttggttgcgttaatctactgaactttgtgtacgtacgagggactccagcgttgcctcctactgggttgttactttggctcacaga

SEQ ID NO: 444702 - DNA, 358 bp, Triticum aestivum
ctgttcgacgcgaccaagtgatctggccgccgagcagcgacgccatgcgacgcgatgatccgggagcagagcggcttcggttaagaaataaataaagaggatcggtgctccaccgtgctgcggccgtgtggtgttgggtgtgattgtttgcttgttgcagtggctgcattcactggctgggcaccaggatccgtaagataagataaatgtgtacgtacgtgctgtattcctgaacttgtactgtgacgagcgagactcgctttgtaacgtgctattctgtttctacgtggccttcttctaaaaaaaaaaaaaaaaaaaaaaaaaaaaaaaaaaaaaaaaaaaaaaaaaatcggccgct

SEQ ID NO: 444703 - DNA, 475 bp, Triticum aestivum
  unsure (1)..(475): unsure at all n locations
ggnnnngnaatttattgccnggtcngtacngtcacagaattcccgggtcgacgagctcataatcggcggccgctctagaggatccaagcttacgtacgcgtgcatgcgacgtcatagccttctatagtgtcacctaaattcaattcactggccgtcgttttacaacgtcgtgactggaaaaccctggcgttacccaacttaatcgccttgcagcacatccccctttcgccagctgggtaatagcgaagaggcccgcaccgatcgcccttcccaacagttgcgcagcctgaatggcaatgggacgcgccctgtagcggcgcattaagcgcggcgggtgtggtggttacgcgcagctgaccgctacacttgccagcgccctagcgcccgctcctttcgctttcttcccttccttttcgccacgttcgccggctttccccgtcaaagctctaaatcngggggctccccttaagggtcc

SEQ ID NO: 444704 - DNA, 475 bp, Triticum aestivum
  unsure (1)..(475): unsure at all n locations
gnnnnngnannttcttgcctggcnggtaccagtcanaaattcccgggncgacgagctcataatcggcggccgctctagaggatccaagcttacgtacgcgtgcatgcgacgtcatagccttctatagtgtcacctaaattcaattcactggccgtcgttttacaacgtcgtgactggaaaaccctggcgttacccaacttaatcgccttgcagcacatccccctttcgccagctgggtaatagcgaagaggcccgcaccgatcgcccttcccaacagttgcgcagcctgaatggcaatgggacgcgccctgtagcggcgcattaagcgcggcgggtgtggtggttacgcgcagctgaccgctacacttgccagcgccctagcgcccgctcctttcgctttcttcccttccttttcgccacgttcgccggctttccccgtcaagctctaaatccgggggctccccttaagggtcga

SEQ ID NO: 444705 - DNA, 393 bp, Triticum aestivum
tggatcatgtcatgctaccacccggaatctggtgggttcggggggaacgtggggcacgacccgcatgtcctctacacgctcagcgccgtgcaggtcctctgcctcttcgatcggctcgatgttcatgatgcagacaaaattgctgactatattactggacttcaaaatgaggatggatcattttctggtgatatttggggtgaagttgatactaggttctcgtacatttccatatgcaccttgtcattactgcatcgtctgcacaaaattaatgtggaaaatgctgtacaatatattgttagctgtaagaacatggacggcggatttggagctatgccaggaggggagtctcacgctgggcagatattctgctgtgttggtgctctcgcaatc

SEQ ID NO: 444706 - DNA, 115 bp, Triticum aestivum
ggtcgagaatttacgggtcgacggcgaagaggaggaggaagaggtcgaaccgccgcgctcagaaaggcggtcgaagcttggccacgacccttcgaccgaacgcggtaagggggac

SEQ ID NO: 444707 - DNA, 474 bp, Triticum aestivum
  unsure (1)..(474): unsure at all n locations
gnnnnngnaangttacgttgnccggcccggtcaagaattcccgggtcgaccccaaaaaattgattagggtgatggttcacgtagtgggccatcgccctgatagacggtttttcgcccttgacgttggagtccacgttcttaatagtggactcttgttccaaactggaacaacactcaccctatctcggtctattcttttgatttataagggattttgccgatttcggcctattggtaaaaaatgagctgatttaacaaaaatttaacgcgaattttaacaaaatattaacgcttaaatttaggtggcacttttcggggaaatgtgcgcggaacccctatttgtttatttttctaatacattcaaatatgtatccgctcatgagacaataaccctgataaatgcttcaataatatgaaaaaggaagagtatgagtattcaacatttccgtgtcgccctaatcccttttttgccgg

SEQ ID NO: 444708 - DNA, 177 bp, Triticum aestivum
accatcttcgacatggctgccgtcgccaccgccgtcgctcccacgcccgccaccgctgccggtggctacaaaagctgagctagtgacctcaccgtacctatgctgcatatgcgtacgtgcgtatgtgactgtggcggcagcatttttgatcgacaatcaatatcaattcttcttttt

SEQ ID NO: 444709 - DNA, 424 bp, Triticum aestivum
cccgggccgacgggggcctgcatgacctaagggctagggcgagggacgtgacggcgtcacaactcaaggcggcgactgccatcggtcaagtgtggctcatcgaggctgctcgctgtgtttcgtcgcagctgcaggccgcgagatcaggtcgggaaggcgccgcgcattgacgagtgagccaattttcggattggaccataacaacgtgtttcggtctccgacgtctagaagtagtggtaaagttttgaatttgtatggcaagaaccacttacgtaggtagctgacacgcacgacagtgtgtttacactcttacttatgtaaaagatatgaattatacatgagttgcctccacaatgaggaattgcgatagtagatatggcaattatgtgatagaaaaaaaaccaaaccggggaaccggcgccac

SEQ ID NO: 444710 - DNA, 384 bp, Triticum aestivum
gggtagtaccattagctgagaaaactatggcggatcccttggtgtatcatcatcttgtactaccaccagccagcagtaataaagtggcgcctatgaagaataaaggttgtgccatctccaagaattgttatccttgtatcatgtttgctgctgcaatgcaatgcagatgtagtggtaacttgcctgcttctttttcatgctcccatccgtgcttcctcatacatggcctcttgaaagaaaataagccccggtcccattccctgaaaatcaggggatgattagattagaaaagaaaaagaaaaaagaacagccgtaagatgaagtgagagcacggatgcatacatggcttgatttgattggaagaaaataaagtccggcaacact

SEQ ID NO: 444711 - DNA, 83 bp, Triticum aestivum
cacgcggaggaaagtggtggtggcgcggcgggccggcctggctcggctcggcttcggcccagtcgggtgctggagtttttttt

SEQ ID NO: 444712 - DNA, 176 bp, Triticum aestivum
ggaagaataggaggaggaagaagacgatgaagaagaagacgaagaagaagaagaacgaagaagaagaagaggaagaggaagaatcagcagcagtatacgaacacgaagacgaccaagaggaagcagaggaacacgacgaagaagaccacgaagaacaagacgaagccctccacgaa

SEQ ID NO: 444713 - DNA, 475 bp, Triticum aestivum
  unsure (1)..(475): unsure at all n locations
ttctttgcccggccaggtaccaatccaagaattcccgggtcgacgagctcactagtcggggccgctctagaggatccaagcttacgtacgcgtgcatgcgacgtcatagctcttctatgtgtcacctaaattcaattcactggccgtcgttttacaacgtcgtgactgggaaaacccggcgttacccaacttaatcgccttgcagcacatccccctttcgccagctggcgtaataggaagaggcccgcaccgatcgcccttcccaacagttgcgcagcctgaatggcgaatgggagcgccctgtagcggcgcattaagcgcggcgggtgtggtggttacgcgcagcgtgaccgcacacttgccagcgccctagcgcccgctcctttcgctttcttcccttcctttctccgccagttccgccngcttttccccgtcaagctctaaaatcgggggggctccctttaaggggtccant

SEQ ID NO: 444714 - DNA, 390 bp, Triticum aestivum
gggtcgagcgccataatttatgaaacttgctccataaatgacctcatagccccatatttccacgtgggatagaggtcccacttgccaaatgtgggaagtctcagcttcttcacggccgtcacgccatgactggattttaaagccgcgtggcgcaggtacatgcacaatcgtgcgccggtaaacaccgatgaaccatggtcacggcaaggctaaccacgcatccattaatagcatccatcgctccctcccaattaccaatgcagtcatttgaatggcctcacgacttcatcccttcctagaaaagccctatggcgaggtgtccccatcaccgaagtcagtgctggagcccgacgacccgattgatgccgtgtcacggatatccgctatcga

SEQ ID NO: 444715 - DNA, 432 bp, Triticum aestivum
ggtccagatatccgggtcgacacggattgcgattttctcgagcaggaaaacattatggattacagtcttttggtgggcgtacattttagagacaaaagagttataatgactgaaggttcctttgacagtgatagcagcagaggatcatcaccccacctatcacctcacctatctagaggagatactgatccaaacaggttgtccaagataaagctcgggtcgaacatgccaacaaaagctggattgacaattcgaaagagtgattgtgaaccacagcttattggagaacctaccggggagttgtacgatgttatattgtactttgggattatagacatacttcaggactatgatatcagcaaaaagcttgagcatgcatacaagtctttccaatatgacccaacgtctatttcagcagtagattcaaaactg

SEQ ID NO: 444716 - DNA, 406 bp, Triticum aestivum
gggaaggcgagacataagggcgccccgctgaaggcgttgattcagagctcccccaactagaaacgaaaaatattttaaattagattgtttttttgagacaatctcgcgaaactttatttaaaccaaaccaatgttcagaggtacaaaagaaagatcaccagggtgtcctaatcaaacatggcggcccatccttaactttaaactatgcttcgctagattatgagccttgaaattcgaactcctaaactcataaacaaagctacatctactaaaagaagagttttgatctattatttcatgtaagatcccacatgctggcgtccaactgggctgacccattagcgtgaagttcacacgtagtgcacagtagctactcgggtcatgctgattggaaatatcactatag

SEQ ID NO: 444717 - DNA, 475 bp, Triticum aestivum
  unsure (1)..(475): unsure at all n locations
ggnnnnngnaatgttacgttngccggtgccggtccaaaattaacgggtcgacggggtatgaaaaaaaaaaaaaaaaaaaaaaaaaaaaaaagcggccgctctagaggatccaagcttagtacgcgtgcatgcgacgtcatagctcttctatagtgtcacctaaattcaattcactggcgtcgttttacaacgtcgtgactgggaaaaccctggcgttacccaacttaatcgccttgagcacatccccctttcgccagctggcgtaatagcgaagaggcccgcaccgatcgcccttccaacagttgcgcagcctgaatggcgaatgggacgcgccctgtagcggcgcattaagcgggcgggtgtggtggttacgcgcagcgtgaccgctacacttgccagcgccctagcgcccgtcctttcgctttcttcccttcctttctcgccaagttcgccgggtttccccgtnaaacccnaa

SEQ ID NO: 444718 - DNA, 421 bp, Triticum aestivum
  unsure (1)..(421): unsure at all n locations
gggaagggtttctcatttaaatctatttatatctatttatatatcaagtatactccatatatagatatatggtatggaagcctatcccccatataagataagacggggggataaaaagaagggaaaatgaaaatagttaattaagttcagaatggtattccataaaggaaaggaattccaatcaaaacaaaaaatactgagtctcttaaacaagacattctaaaacttaggtaatttatagtcattaggattttagttctatatgaagtaaggactattcgataatttcttataaacataggttttcattggaattcactcaatcagttaattatggaacaagagagctgtttcatctttgttttaaagaaatataaaaatgaattatgaatagaaagtanaatgattcaacttttttttt

SEQ ID NO: 444719 - DNA, 311 bp, Triticum aestivum
gggtcgacgcgggatgactaggtgacttatgtccatccgtgacatgaatatctgattttgcggtgagtcagtcactttgctcaatttagttttgcttgatgtttgaataaagtaccttgatccgaaattattaagtgttagagagtcttcacatggtcgtcacaaatgttcgactactcattgatcgtcacttagactctcatcggactactttattgtcgctcaaatgcaacacatagatcgtcgtatatcatggtcgtaactggaatatgccgagatttatcaactgtaatgtctcagctacatatccc

SEQ ID NO: 444720 - DNA, 428 bp, Triticum aestivum
ggggcgactaaagggctggttctgctcgatgtaggcatctcgatgacgagggcgtggctgctgcgttcgttctgggtcaacaggtaagtgctctagcccatttagtgatccataggtatataggcttatcagaaatcccagggtgggccgcggcccaccctggccaccctgtagctccgcccctgacgggatacatgggtagggacttcatggaaggcggactccatttaatcctttctagctgcttactgaacaccaagccctatttgatatgttgaatgattgttatataggtgaaggaatcgacgaagaagcttccgttcagcatgctatgtcaatggaagaatatctgaagcagacctctgctacttctctattctctttcattcgtcgtgggcagccgaattggttgaaataattatgggcag

SEQ ID NO: 444721 - DNA, 297 bp, Triticum aestivum
gggagacagtatgtttgtcccaccgtgagaccacatagaaacagttgtgctagaactgatctagataacatagcatttggtctcaatcagagggagcagataaatgtgaaatatggggcttgacgcatcaatgcgatcaaaccctacgtagaatgacatgagactctcatagctcgtcatacaagctcaccacatcacagatcagaggacgtcattgaacgaactgacaactgtgatggaacgcgagttaccccatatgatcaccatgcataacttggctcattcaccacgtgacat

SEQ ID NO: 444722 - DNA, 402 bp, Triticum aestivum
  unsure (1)..(402): unsure at all n locations
ggggacaggaattagaaaatgagatgtggagctccatttttaatccgctgctttattttgttttcatgaaattaagaggcaactttatatttatcctggctaggttggtttattcagttgctaaaacgagaatgtacaacttagttatttttctagatggctagaaaatagtggtatcaataaatcttattaggaatttccatcatacttaatagacgtacaaacaatttgatttttttttttgtgaagtacacattgtttccaatgtttggattaccgcccgtanatggggggcctacccgttggtcttggagaaaaaacgagacatttcttaactactctttttgtagaactaattttgtgcaatctttcatttttaaacggaatgcattacacattttg

SEQ ID NO: 444723 - DNA, 471 bp, Triticum aestivum
  unsure (1)..(471): unsure at all n locations
ggnnnngnaantcactngntcggcccggtcaanaaancgggtcttaacagtggactctttnccaaactggaacaacactcaaccctatctcggtctattcttttgatttataagggatttgccgatttcggcctattggttaaaaaatgagctgatttaacaaaaatttaacgcgaatttaacaaaatattaacgcttacaatttaggtggcacttttcggggaaatgtgcgcggacccctatttgtttatttttctaaatacattcaaatatgtatccgctcatgagacaataacctgataaatgcttcaataatattgaaaaaggaagagtatgagtattcaacatttccgttcgcccttattcccttttttgcggcattttgccttcctgtttttgctcacccagaaacgtggtgaaagtaaaagatgctgaaagatcanttgggtgcacnagtggggttacatccaa

SEQ ID NO: 444724 - DNA, 424 bp, Triticum aestivum
  unsure (1)..(424): unsure at all n locations
gggttaaacttggatgatgacggtgatgatgatgagtcggaggtagagcttgactctctcggttcattttttatacatctcattgacaatgattgttattaggaggaagccaaggccagccgtgcgggtgacgacgaggtaattgttctttcctccggctcagagtctgtgccaaaacagaaaactcgtcaggcaagccggaaagtaaggttttctcatcctttggcttatttggatcccaactttattttgaaaaagcagcaacatgaagcttgccgcacgacccggaatagggaaagcgggatcctttcctccggcttaccgaacaccccagcccctcacaaacgtcgtccagaggtctcaacaaactctgacttaacttatcccaaggccggtctnttacgacaacctcttaaccccttca

SEQ ID NO: 444725 - DNA, 470 bp, Triticum aestivum
  unsure (1)..(470): unsure at all n locations
gnaangttacttgnccngcccggtcaagaatacccgggtcgaccccaaaaaacttgattgggtgatggttcacgtagtgggccatcgccctgatagacggtttttcgccctttgacgtggagtccacgttcttaatagtggactcttgttccaaactggaacaacactcaaccctattcggtctattcttttgatttataagggattttgccgatttcggcctattggttaaaaaagagctgatttaacaaaaatttaacgcgaattttaacaaaatattaacgcttacaatttagtggcacttttcggggaaatgtgcgcggaacccctatttgtttatttttctaaatacatcaaatatgtatccgctcatgagacaataaccctgataaatgcttcaataatattgaaaaggaagagtatgantattcaacatttccgtgtcgccttaatcccttttttgcggnatt

SEQ ID NO: 444726 - DNA, 119 bp, Triticum aestivum
ggggtatcacatccagcatggtggaggagggcagcggtggatggggtggcggacggaggagactggggtggagagggtgttttgccgcccatggagtatgaatgggaaaatggaggggc

SEQ ID NO: 444727 - DNA, 377 bp, Triticum aestivum
ggtgaaattttagtgccataaaaatgtctctcttctttgaaacaatatactctggcatggattatatcaaggatcactatgtcaattcgtgctgtcattcattccacatcgataattaagacgatcatactgacatgatgcacgaattctttatagatgtttctcatattctgtacaaaatgtattcacatttaatgggtcgatcaagggttgtcatgtaatgaatcgtccaaggaaacagtgcatttgatgcttatagacgacaattttgctccattaatcctatttgaggatatcttttgctggtatttcgagatgtgaaaaattgtgtatgatcgactctacaatggtatccagccgtatgatgactatttcat

SEQ ID NO: 444728 - DNA, 475 bp, Triticum aestivum
  unsure (1)..(475): unsure at all n locations
ggntgnngnaattctacttcntncggggtcggtcacagatanacgggncgacggcgtctatagcttgacaaaaaaaanaaaaaaaaaaaaaaaaaaaaagcggccgctctagaggatcaagcttacgtacgcgtgcatgcgacgtcatanctcttctatagtgtcacctaaattcaatcactggccgtcgttttanaacgtcgtgactgggaaaaccctggcgttacccaacttaacgccttgcancacatccccctttcgccagctggcgtaatagcgaagaggcccgcaccgacgcccttcccaacagttgcgcagcctgaatggcgaatgggacgcgccctgtagcggcgcttaagcgcggcgggtgtggtggttacgcgcaagcgtgaccgctacacttgccagcgcccancgcccgctcctttcgctttctcccttcctttccgccaaattngcnccgggttttcccgtt

SEQ ID NO: 444729 - DNA, 477 bp, Triticum aestivum
  unsure (1)..(477): unsure at all n locations
ggnnngngnaattntacgtngncggtgccggtccacaaattaacgggtcgacganctcatanancggcggccgctctagaggatccaagcttacgtacgcgtgcatgcgacgtcatagtcttctatagtgtcacctaaattcaattcactggccgtcgttttacaacgtcgtgactggaaaaccctggcgttacccaacttaatcgccttgcagcacatccccctttcgccagctgcgtaatagcgaagaggcccgcaccgatcgcccttcccaacagttgcgcagcctgaatgggaatgggacgcgccctgtagcggcgcattaagcgcggcgggtgtggtggttacgcgcaggtgaccgctacacttgccaagcgccctaacgcccgctcctttcgctttcttcccttccttctcgccaagttcgccggctttcccccgtcaagctctaaatccgggggtccccttaaggttcct

SEQ ID NO: 444730 - DNA, 472 bp, Triticum aestivum
  unsure (1)..(472): unsure at all n locations
ggnnnnngnaatttacttggcggcccgggcaatcaagaggatccaagcttacgtacgcggcatgcgacgtcatagctcttctatagtgtcacctaaattcaattcactggccgtcgtttacaacgtcgtgactgggaaaaccctggcgttacccaacttaatcgccttgcagcacatcccctttcgccagctggcgtaatagcgaagaggcccgcaccgatcgcccttcccaacagtgcgcagcctgaatggcgaatgggacgcgccctgtagcggcgcattaagcgcggcgggttggtggttacgcgcagcgtgaccgctacacttgccagcgccctagcgcccgctcctttcctttcttcccttcctttctcgccacgttcgccggctttccccgtcaagctctaaatcggggctccctttaaggttccgatttantgctttacggnaacctcgacccaaaaaacttggg

SEQ ID NO: 444731 - DNA, 421 bp, Triticum aestivum
cggtcgacgggtgattgtattgtatatgagtacaaaatctacacttattgcttcctttcaagttgcgtcgagcgagattgtctttagttagcataactcctcttcaaagataccacatgaaaatcttaactttagtggcatcttcgatttccagatttgtttataattgtccatttgaaaatgttgaataagtattatatatgttgaagaagtatttgaaaatgttgaataaatattaaaaatgttgaacaagtatttgaaaaatgttgaataagcattaaaatgttgaacaagtatgtaaaaattgttgaatatgtgttcggacaatgtcgaacgtgtatacaaaaaatgtttgatcacttattaaaaaatgttttttgacatataagaaaaatgcagcgaaaacgaaaacaagcataag

SEQ ID NO: 444732 - DNA, 67 bp, Triticum aestivum
aggtagagtgagctatgcgcaggcgaaggggttttggtgaattttcgataattttgcccgtgagata

SEQ ID NO: 444733 - DNA, 411 bp, Triticum aestivum
ggggaagtgaacggcgccgcaggtggaagaagctctcagatggatctccaagaagcatgccaacgcatcgagcaacgtgatgcccctggggatatctttggtgctgtccttgaggccgctgcccaggcttatggcaacgacgagagcatcgaggtcatgcttgaagagcttgccagtgacccagagctcgctgatgagtacatgaagcttctgctggagcaggtcggcgagagggtggagtccgaatccgaggccaagacgcagtcgtgaagcgtggcccgggagtcggtccggtcggtcaagtgggcggtacatttcaggcgcggcgtggttgacaatgtggtgaaaacatatatacagaactcatgacttgtggatgtaattgtgtctcctgactgtggatggtattgt

SEQ ID NO: 444734 - DNA, 420 bp, Triticum aestivum
ggggaagtacactgcacatttcagaggccagtctcacttcttcgggtaagtatatattgttgcattttcacattttccaaattaacaaacatgctctcatgcttttgcttcataatttgcagatatgaaggaagatgcggcctccctaccaattttgattccagctattgctatgcattaggctatggtgctggtgctcttctccaatttggcaagacaggacttatttcgtcggtatgctcactatatttttctacttgatagatgtttggcattgcttaaccatcggagtcatatttactctgtttacctcctaacttctgaccagttctccatcatgcgaacattgtcatatgttctcttccagtttccacgccatattcattattggataaaacattaaatttcacaaaacaaaca

SEQ ID NO: 444735 - DNA, 478 bp, Triticum aestivum
  unsure (1)..(478): unsure at all n locations
ggnnggngnaattctacgcttnttcgggccggtcatgagattaacgggtcgacgacctcctaaaacggcngccgctctagaggatccaagcttacgtacgcgtgcatgcgacgtcatactcttctatagtgtcacctaaattcaattcactggccgtcgttttacaacgtcgtgactggaaaaccctggcgttacccaacttaatcgccttgcagcacatccccctttcgccagctgcgtaatancgaagaggcccgcaccgatcgcccttcncaacanttgcgcagcctgaatgcgaatgggacgcgccctgtancggcgcattaancgcngcgggtgtggtggttacgcgcacgtgaccnctacacttgccaagcgccctagcgcccgctcctttcgctttcttcccttccttctcgccacgtncgccggcnttccccgtcaagctctaaatcggggggtcccnttaangttccta

SEQ ID NO: 444736 - DNA, 315 bp, Triticum aestivum
gtcgtgttaccagtcgtgcacggtgcgcgtggtgggcacgctcaagcgtgcctggaagcgctccgccatcatctaaatcgtcgtcctcgtcttcagcgtcatcgtggacgccgtcggctgctgtgccttcaggaacaagcgccgctagctatacaacggtggcggatagtgggatcaaggcgcgtacgcgtgatcgcgcgcttgtctcggttatttaatgcttggtttggatggatgcgatggtctcttcgtgtcattcatcttcgttggcgttgtttctcttacgatggtctggtctagctttgtgcatgcgag

SEQ ID NO: 444737 - DNA, 411 bp, Triticum aestivum
ggtcgacgggctatgatagatacactgccgcatacaacttttgtgaaattatcagttacactatgggcaatatggtggtttagaagaaaagctattcacgaggagatcttccagagccctgcttccacgcatcagcttatctgtagcttcataagggagctagaatacatgccgggcaaccagcatggttttatgaagatccatgtagacgctagcattgcaaggaatcagaacaagggcgctgctgcagccgtctgcagagatggcgatggaaatttcatgggaaattcttcattagtgatttatggaattaatgatgctgcaacaacggaagctatcgcatgtcgtgaggccctttcattggtggatgatttgatgttacaaagcttcgtaatagcatcggactcgaag

SEQ ID NO: 444738 - DNA, 425 bp, Triticum aestivum
  unsure (1)..(425): unsure at all n locations
gggtcgaggcgacagccaaagccatggacctcatcagcaagggcaccaactagctcgtctcggtgtcgcgacgtccgggtggaatcttaggagagtttagctccatttttattagggatgagttaagtttagttcgtgtgccagtcttaataaaaatcaagcatctgtataattaaggaggctactgattgttgtagccttcacctgcaatttatccgagccttgaatgaatggacttgtgttcggaaaaagaaaaatacagtgctgctggcttagagtagagtttgttttctagtcgtataatgcaatgtttacttatctcttgctcttagtttcatcatcagtaatgattttattcctcttggcggtcgcatcaggcatgtnttaataagatcgtattttatgggaaggagggagtacttttt

SEQ ID NO: 444739 - DNA, 233 bp, Triticum aestivum
cgggccgacgggatagcctagtatcctaggatctatcgtttgataatgggatccaaggtgtactatatggatttatgtggcattttagcaagaccacacttggtcatgtattccgtagtccagtttaggttcatcgactcaaatgtgggttctcaaggaagattctcttaacggtggttatctatcatggtgtcacgcatgtcgaagtaaacttgctcattgatgttgcacat

SEQ ID NO: 444740 - DNA, 416 bp, Triticum aestivum
gacgggccagtcgagcgccacgccacgaaattgtcgatgggatccaccttcctctctccacctcccactgacagtgccgccaatccatgagatccagtcctggcgccctcctctattcatcgccttgccttgggacccgtcaagatccatggcataggatcctgaccaccagcgccacgagtcatggggagatcctccctcggcttctgcggcaccggcgagatcctccccagcttatacggcagtggccttctcctcccatggtggcctgaggaggaggctccacctaccctggttccgctccaccaccacgacttgcatagctagatcaccgcacgggctgccatcaggcgaccacctctctgctccagcgcatgggctcaccgttccccatgtgtgtgctccctgttgaccat

SEQ ID NO: 444741 - DNA, 409 bp, Triticum aestivum
cgggtcgagccgaaggagcaactcctccacgaggtcatgcgtcgttcgcttacctcggcggagacggacgctaggcgactccagcacaagaatgtgatggcgctttggctcgggatcgaggtgtcgaagcgccttgcgagggagaatgagattgctaagaccagggcagagcaccacacgaaggagtgggaccgcgccatccagcgcctctccggctacatctcctcgacgtcggacatcagcagcaccggcacgaaaaatgacgatgaggatcctccctccgcggacgcctacacacagcagatgtaccaccgctccggatactgcaaaggcaagggcccagacaagaaatggtgatctctgccccctctagctaatatagtttgtatccagtaatctatcctgcaaa

SEQ ID NO: 444742 - DNA, 380 bp, Triticum aestivum
gccataatgcatggcaaattaagacaatctaaaggaggaagaatggagatccattttgaggcacgtttaaaaaggtcacatgatgctacatagtcagccaagttagtatcagaagcagccagtgttgttacgtgtcaagcacgtatcctcccatcatggttctactacagggatgagaaacatactagccagtttaacaccttccttgacgatttaaccgtaactacagttattccacacactttgtaatcttgtcttgcacagtaccataccttcaatacttgtcatgtgatcactcatattcatttttcatcaaatgatgttcaagttggatccactagatgctgcacctatcaatgcatgcactcatgtttttcagt

SEQ ID NO: 444743 - DNA, 425 bp, Triticum aestivum
gggtcgacggggttttttgacatacctctgcgccagcgtctctgtcctggccgccttcctctttggcctacccggcctcggtgcctcttgttggcgagttgctgcgggttcgacacggcgtcccgaatgtcttccctataaaacaccatatgtatatggtaggtgaagtgtctaaagggggatcctagtttttggagttgggattttggtttttcttacgtgcgatgcagggagcagtccgggatagtcgcccgtaatggccaccatggcgtcatcatagctcaattgatagaactgtctgtctatcagctccacgaatatgtccggatcttcttcgagtacgggaccaacggcccggtcagggtcctctggttgtggagatgggctgttttcctcccttacagcttttcacagtttctccataa

SEQ ID NO: 444744 - DNA, 413 bp, Triticum aestivum
taccagaaatggaggtggcagcctgatgcctgcgacctcccaaggttcgatgctaagttgcttcttgagaagctaaggaacaaaaggatgatgtttgtgggggattcactgaacaggaaccagtgggagtccatggtgtgcctggtccagtctgtggctccatgggataagaaaaagcttgtcaagaatggatctctaaatgtgttccgccttcatgagtacaatgcaacgattgagttctattgggctcctttcctagttgagtcgaactcagatgatccagacattcgtagcatcactgaccgaatgatcacgccaacatcgatcgccaagcatgcagcaaattggataggggtggactatttgatcttcaacacttacatttggtggatgaacaccccgaacatgaaaat

SEQ ID NO: 444745 - DNA, 335 bp, Triticum aestivum
ttattgggctttatgggaaagagagcatagcatgccactcactcccaaggcctagtccgaagtggactagggggaacggatgcgcccctctttccttctcttcacgtttccctttccttctcacgtactcctacgaggtggaacggctcctagttctacgaggaaagggggaatccgattcccggttggacttgcactctcctgttgctcaccatagatcgggcccagccctcttgaccactacacccttatatacctggtcaatgggcatcccatacactcattaattgatctcctgatctcttaaccatgtgcggtgcccccctccaccatat

SEQ ID NO: 444746 - DNA, 470 bp, Triticum aestivum
  unsure (1)..(470): unsure at all n locations
ggnnngngnaattcacgtngcgggccggtcacagataacgggtcgacganctcactagaggcggccgctctagaggatccaagcttacgtacgcgtgcatgcgacgtcatagctcttcatagtgtcacctaaattcaattcactggccgtcgttttacaacgtcgtgactgggaaaacctggcgttacccaacttaatcgccttgcagcacatccccctttcgccagctggcgtaaagcgaagaggcccgcaccgatcgcccttcccaacagttgcgcagcctgaatggcgaatggacgcgccctgtagcggcgcattaagcgcggcgggtgtggtggttacgcgcagcgtgacgctacacttgccaagcgccctagcgcccgctcctttcgctttcttcccttcctttctcgcacgttcgccggctttccccgtcaagctctaaatccggggctccctttaagggttcg

SEQ ID NO: 444747 - DNA, 433 bp, Triticum aestivum
gggcttgaaaagatgggagcaaaggtcacatggactgacactagtgtaactgttactggcccaccgcgtcagccatttggaaggaaacacctaaaagctgttgatgtcaacatgaacaaaatgccagatgtcgcgatgactctagccgttgttgccctgtttgccgatggtccaaccgctatcagagatgttgcctcctggagagtgaaggaaactgaaagaatggtcgcgatccggaccgagctgacgaagctgggagcaacggtggaggaaggcccggactactgcatcatcacgccgccggagaagctgaacatcacggcgatcgacacctacgatgaccaccggatggcgatggccttctccctggcggcctgtgctgaggtgccagttcacatcagggaccctggatgcaacccgaaagaaccttccc

SEQ ID NO: 444748 - DNA, 413 bp, Triticum aestivum
gtcccgggccgacggggggattgattttcctgcaggaggcgcggtcgccgagtctgattcggacgaggaagatcagatccaggtcaatggaaaagcaccctcaatcgggtcaaggtgcagcgtgaagaagttgcacgacctgatttcctcatttgatgaggagaaacgacagtatgtagccgagatggagtttggggggctgctagagctaccaaagataacaaggacggataggcatttcttgatgtctatcctaagccacatcgatgaggaggcaagttcaattacaattgatcacaaacgcgacatgcaatttttcgatgaagatgtcaaactggtcatcggcataccatgtggaactgctcctgttcgccctccagaccacgctgttccggaggcagtggtgacacaga

SEQ ID NO: 444749 - DNA, 428 bp, Triticum aestivum
gggagctagcaggaatgcatagcttgttagcacggaacacaaatccatcattaacgacaaacttgttccaggttcttccttctttacaattctacaatacatctttaaaatcagcatcatgcacatattgatctttgatggtctccaaaccaaatattttgaagtcaagttgtgaaagcatagtatagcgacgagacaatgcatcagcaataacattttctttacccttcttgtgtttaatgacataagggaaagtttcaatgaattcaacccatttagcatgtctacgattcagtttagcttgacttttaatatgtttcaaagattcatgatcagaatgtataacaaattctttgggccataaataatgttgccatgtttctaaagtccgaacaagagcataaagttctttatcaaaagtagaataa

SEQ ID NO: 444750 - DNA, 423 bp, Triticum aestivum
acgggtcacttcaaacaaacatgtatcttttttttttctttcgattctgcctctggcaccggaatagttctatgtcacaaaaatcaagcccaatcaagcgtggcacaggtcctagatacacgggacacacgcacctagtggagcggtcctatatggcgccttaggcggcaaatctcttccctggcgctctcgcgaagctcgcctgagcctagcccaacaaaggctagtcgatcggggcgcagttctcctacgttcgctgggacaatggttgatcggtcaaccgttggccatttggacttctgtaaaaaatgaatctgaaaaattgtacaaaaacatgaaatttgaaaagaacatggatttgaaaaaagtacatatatttgcaaaaaaaatgcaaatatgaactaataaattttgataaaattc

SEQ ID NO: 444751 - DNA, 429 bp, Triticum aestivum
  unsure (1)..(429): unsure at all n locations
ggggaatcatagtcctgcacataccaaagtgattgttttttgacaaaaaacaatatgcgctaataaaataatcttagatggatatcacctgatttgttcggatgaccgatgatccattcaacgcaacagaaaacagctcaggtagaccggcaacccaaaatagcccggcggcttatcatagcagtggcggctcaatgcggccccggtgaattaatacagcagaggggctcaatgttgcgcattttttaacttcgtccgttttttttaaatctccagacacgtatttttgcaccatagtttcgtgtagccttctgatgtccatcttgagccggacagataaatagtagtaacaaagtattgccagtaatggcagcgcacactgacggagctgactgctgacgcgaccgcagtccagagtggncaacgttt

SEQ ID NO: 444752 - DNA, 394 bp, Triticum aestivum
gggcatattccaaattggctacacctaatgatgtggccgttgaaagatgaattacatatgccacgcacgtcattttgcgtggttctgtatttttagctgtgggcgttgctaaacattcaccatcatgttggtgccatctactgtaagctgtattggcagctcggatattctaaggttgcctgaatttatgtttagtatgacaacaaacaatttccagtatgcatgcctacccatataatgttaatgggctgtgggccgattaccggtaacatgcttggtcttgtgcgacctgagaatccctgcctcacacactcgacgaatttagcccatgcatctggtatctagatacaattactcctacaaatattgtttctatagttgtgatctaaatgct

SEQ ID NO: 444753 - DNA, 229 bp, Triticum aestivum
acgggggcccaaaagagccacatagcattaagtacaagcaagggtcacatgacccatcattcggaccatacaagcaacaagcggaagaattacatgtctgagtacagacaactacaaatgaaaaaggcctaggagcccgactatctacaacatccgatcaagatcgtagctgaggtacaagctacttgtcgaagtccacgtaaactagtaagaccgaagtctccgctac

SEQ ID NO: 444754 - DNA, 373 bp, Triticum aestivum
cgggatcatgatcatgaggaatatataggataataaggtggtgtattaccaccatgcccgttgagctgatgtttgtttcagctagagaaatcgttacgcccgctcataattcctttttcgacgctctggagaataataactactggtatatcattctatatcaaagccggcttgtgaaataaatgatccgccgtcttgccttcaaaaaaaaaaaaaaaaaaaaaaaaaaaaaaaacggacgcacaaaaggattaaaacataaagtagacgtaaataaaaaatcataacatctacaataaagtcaacaaaattaaatataaatgaccgtcgttttaaaaaagtcatgactgggaaaaaaaaaagagtggccccc

SEQ ID NO: 444755 - DNA, 478 bp, Triticum aestivum
  unsure (1)..(478): unsure at all n locations
tggnngnagatttttctgcccgttcggtaccantcncgaattcccgggtcgacggggtaaaaaaaaaaaaaaaaaaaaaaaaaaaaaaaaaaaaaaaaaaacaaaaaaaaaaaaaaaaaaaaaaaaaaaaagcggccgcncnanaggntcnaancttacntacncgtgcatgcnacgcananctcttctatagtgtcaccnaaattcaattcacnggccgtcgttttanaacgtcggacnggnaaaaccctggngttacccaacttaatcnccttgcannanatccccctttcgcagctggngtaatancnaanaggcccgcaccgntcgcccttccnaananttgcncancctaatggcaaatgggacncnccctgtaccggcncattaancncggcggntgtggtggttaccgcagcgtgaccgctaaacttgcnagcgccctaacgcccgctcctttcgctttcttccctccttt

SEQ ID NO: 444756 - DNA, 232 bp, Triticum aestivum
attcccggtcgacgggcaacagtaagagcgtcgagtcactgagctacatgtaccacacagcctctggcactacgtgtaaaaagctcagccacgcttttacaaataaataacgagctgtgtatgtatgcatgcatgtaccgatgtacttgtcttccatcggaataaaaatacttgtgttttgtaagaatttgaacgggaaatatattttcattggcgtacagggttgatttac

SEQ ID NO: 444757 - DNA, 72 bp, Triticum aestivum
ggggttaggaattgtaaatatgcattgttgtatcgcgacctgaatgaaataaacgaaataatgctcttgtcc

SEQ ID NO: 444758 - DNA, 352 bp, Triticum aestivum
ccgggtcgacgggccgcacgacaagcgcaagagcaaggcctccatggaacagggggtgatggacaacctcaacaaggctacgccgcctactgcaagcgtgaaagcaaagccccgcagaagcttctgaacccgatgggccacgcagtcacagagttagtgatctcctttgactgatttcgctaggatgatactacatgagttagaagtttgtcgtgccggggacggaggcgagacggaggcttggcttgtgaagtgacgcttggatgcacgcgtaattttctttacattttttgttctcgttttgactttgaggatcgcgccataattcttttgaactgtcaactgcattcag

SEQ ID NO: 444759 - DNA, 416 bp, Triticum aestivum
ggggtacatgcacagtaaactgttttactgacctgaatttgttttttttgccgagagttgctcagttgtccaaatgatttgaaaattagagcggacctcatgcatcaaattgtctgccattggaaaaatttgtaactttttgaatgtttctagtatttgttttgatttgttttttatttaacacgggtgcagatgagctcgggctcacaaaagcatttctcaaagtctggtctctaaatctgggcagtgtttgcgttattgccgctctaggactttgcttccctatctctgtcttcctttcgttttcgtttcttcaaagtcagagaaagagactgggtaaacaaaccaaaaattttgcgcttttgactggaattgtgataggcacgtttcaacaagcagggcataaacaaaacgaa

SEQ ID NO: 444760 - DNA, 426 bp, Triticum aestivum
gggtcgacgggtattattcacgtcatgggttttacaagtacaaaaacgacgtaacctagatgaggtcacaacctgaatatagtccgtgtggttatggagcactgctagaaaccaagaggtgctgggttcgataccatgttctgcaagttttttaccaacgagggaaaaacaagtcccgagcgggaatcacggataagttgcaaaaatcctgccggcaggatttgagcttttccgattaaaaaaatatgcatctagtgtaaaaaaaaacattgtgctacttttgaaaaatgtcaatagcatttggaaaatatttgtgaaattcaagaaaaatcacgtgtttcagaacaatgttcatttccataaaatgtttatgcaatgaaaataaatgtttgcataatttaaaaaaatccatcgaataaaaataaa

SEQ ID NO: 444761 - DNA, 403 bp, Triticum aestivum
attcccgggccgacgggtccggagaaacaactctgcactgcgagcatctgctgagcctggagtcaggaccgaccatcgtgaaggcccggaccatgtggcggccaaagggggccaagtcccaggaaacggcggctctgtcgtggtgattttcggcggggacggttcggtcaagcccggagcaaccacccgtacgcgttctcttctggaaaaaatcacacattgcacatacatatggatgcctataatcccatcatggcattgcgaagggatgcccaagttatatacatatacatagaatggaagtgtgtgaaggtggagggggtcagaggggtataggagagcgatcagaagccgagaaggcaaattggtgttgtaattatctgagtttgtagctactgcggtg

SEQ ID NO: 444762 - DNA, 107 bp, Triticum aestivum
gggtcgaccgggatgttaaacttagaataatggatgaacttggaattgcccaaaattttacatgtctggtgcgagctgaatgctggtgtttgagctgtgtgttttcc

SEQ ID NO: 444763 - DNA, 370 bp, Triticum aestivum
ttgacgggccaaagaagattgaggaggttcgaagggatgctgtgaaacagaaaatgagccaatcaactagggtaggttcttcccctaactataactcatctgctagctccattagctcatcagcaagaccagggcctccaccagattatggtgttcgaggatcttctgcttctcgtggatcctctcaggttcgtgtatatggatcccagaatgttaatctggatacaagataccagacttcaaacagagccatgtcagtcccacttcatcaaaggcgatctgataaatccattcgacttagtcctcaaggtgacttgggaagagaaatgtcaatttgtgggaagccaccagcttcaaatgacattttgcc

SEQ ID NO: 444764 - DNA, 476 bp, Triticum aestivum
  unsure (1)..(476): unsure at all n locations
ggnnngnanattatccgccngctccgtaccaatcaanaattcccgggccattttgccgattangcctattggttaaaaaatgagctgatttaacaaaaatttaacgcgaattttaacaaatattaacgcttacaatttaggtggcacttttcggggaaatgtgcgcggaacccctattgtttatttttctaaatacattcaaatatgtatccgctcatgagacaataaccctgataatgcttcaataatattgaaaaaggaagagtatgagtattcaacatttccgtgtcgccctattcccttttttgcggcattttgccttcctgtttttgctcacccaagaaacgctggtgaagtaaaagatgctgaagatcaagttgggtgcacgaagtgggttacatcgaactggatctaacagcggtaaagatccttgagagttttcgccccgaaagaacgttttccaatgatgagccttt

SEQ ID NO: 444765 - DNA, 464 bp, Triticum aestivum
  unsure (1)..(464): unsure at all n locations
ttnattctccgcggtcggtacanagtcnnnaattcccgggnctctagaggatccaanctacgtacgcgtgcatgcgacgtcatagctcttctatagtgtcacctaaattcaattcactgccgtcgttttacaacgtcgtgactgggaaaaccctggcgttacccaacttaatcgcctgcagcacatccccctttcgccagctggcgtaatagcgaagaggcccgcaccgatcgccctcccaacagttgcgcagcctgaatggcgaatgggacgcgccctgtagcggcgcattaaggcggcgggtgtggtggttacgcgcagcgtgaccgctacacttgccagcgccctagcgccgctcctttcgctttcttcccttcctttctcgccacgttcgccggctttccccgtcaagcctaaatcgggggctccctttanggttccgaattaatgccttaanggaacnc

SEQ ID NO: 444766 - DNA, 408 bp, Triticum aestivum
gggtatcataaataacaataggaaaacatgatgcaaaatgaacgtatcaactcccccaagcttagacctcgcttgtccgcaaacaaaaaccgaaatcgaaaaacatgtccacatgcttagagagagagaggtgtcgataaaaacaaaatacggacatagaagcatgatgtttattattatagcagcaacaaacttaaacaaaatacatatctttgtcataaataacagtaagtgattacatacggagcaaaataagtgaatctacactctaaaatgtctaaaaacaagtgagtctacatatatccgtatgttacagttcatttgaaatgtctaaaatgacttatatttaaaaacgaagggagtagatgggttggctatgacaatactaatgtgaccggaagtcctgag

SEQ ID NO: 444767 - DNA, 256 bp, Triticum aestivum
ggggagcgacaaattatggtttaacacaacatcacgtgcacatgcacacatgtacctcattaatttggatcgtgcatgcatgcatgcatgcgtcgtgacttattattaattatgtgcatgtgtgcgtatgcatgtgcaaactaagtgagacggcaaagtgtatgaaatgggaaatagatgtgatctatgatgccttttttgtttgtttttggaagtgggtaattttattaaagcatcaagcaacttttttttttgg

SEQ ID NO: 444768 - DNA, 266 bp, Triticum aestivum
cgggtcgacgggggtagtaagaccaaaggacctaagcagctgtaggttgagaggaggttcaacatggattggaagtgaagaagtggtcattactaggtgatgacttctctttggaagccttttcaaaatgaaattctaaggcagcagcgtcgtttacctatctgacacttgctttttctatttatggacttctagctattggggatgattcttatggatgcctggtttggtttgatttatatgcataaatgaaatgattcttttgc

SEQ ID NO: 444769 - DNA, 81 bp, Triticum aestivum
gggtcgaccggtatgtttagttcatttttctgtgcggcaatgccaactctgtaaaaaaaaaaaaaaaaaaaaaaagaaaaa

SEQ ID NO: 444770 - DNA, 437 bp, Triticum aestivum
cgggtcgaccgggatgaaggaggagaaaagaaaatgacccttcggtcctatttatgaagcaaaagacaagtgtcaggcgcgcgaatccaggagccacaaatttcggaagcggagttgtcgcctcgattattgcggatctgttaaacaaagaaggcatcataaatgttagcttcatgatgatgtcatgccggtttacagtaaccaggaaagatgatgacacgacggttcaacgactacaagaagattttgaagacaaagatttttgctaaggattgacatgaacccgttcaaatcaatctggggcctaatgtcggggatattactactgggcgtaaaccggcctacctgggccgggttaacttcatcagtagttcaatggtgttaaagcccaaagaggcagataagggcccaaggcctaaaatcggtttagaacctat

SEQ ID NO: 444771 - DNA, 72 bp, Triticum aestivum
ggggtaaggaattgtaaatatccattgttgtgacgcgacctgaataaaataaacgatctaatgctctagtcc

SEQ ID NO: 444772 - DNA, 482 bp, Triticum aestivum
  unsure (1)..(482): unsure at all n locations
ggngnnngnaagatttatctggcctgtncgggtaccaatcagnaattcccgggtcgacggcacacttaanattctgtacatgaagcgttttgattcaaaaaaaaaaaaaaaaaaaaaaaaaaaaagcggccgctctagaggatccaagcttacgtacgcgtgcatgcgacgtcatagtcttctatagtgtcacctaaattcaattcactggccgtcgttttacaacgtcgtgactggaaaaccctggcgttacccaacttaatcgccttgcagcacatccccctttcgccagctgcgtaatagcgaagaggcccgcaccgatcgcccttcccaacagttgcgcagcctgaatgggaatgggacgcgccctgtagcggcgcattaagcgcggcgggtgtggtggttacgcgcaagtgaccgctacacttgccancgccctaancgcccgctcctttcgctttcntnccttccttcctcgccag

SEQ ID NO: 444773 - DNA, 426 bp, Triticum aestivum
taaggtctagaattcccgggccgacgggccgtttaagcatattcatattgtccctgggtgttcatatagggtgaatttttttggtttccaataagtttcccaacaagaataagcaatgaagtgtaagccaagtcctcaaaagattccaacctgaagaagccaagaaccaagtcctgtgtgggccaatccccaattaatggcgaatcctaaggtcaacccaagaatggcgggcgatgttgcgtgcaacccctaatccaagacaccaataataacccttaaactaatcctcaagtccaagacattgataacttccttaaggttgcctcaactcctgtggacatttttgcccctaattgcacatgccacttacacgtgggaccgacccagtataaagaaaaagaactctctgtcacacctcactctcac

SEQ ID NO: 444774 - DNA, 384 bp, Triticum aestivum
gggacgctggactgcgacgagttcgtgacggtgtcgctgcacctcaagaagatgaccaacgagaagtacctggcggcggcgttccgctacttcgacaaggacggcagcggcttcatcgagatcgacgagctccggcaggagctggggcccaacgagcaggccatcctcgagatcatccgcgacgtcgacaccgaccgggacggacgcatcagctaccaggagttcgagctgatgatgaagtccggggcggactggaggacccgccagttctcgcgggccaacttcagcaccctcagccggaaactatgcaaagaagaaacttcctcctcgtgaattcaatttgttctactgctagatgtgattctttttgtgcatgtaagctgc

SEQ ID NO: 444775 - DNA, 397 bp, Triticum aestivum
gaggacgacgacgtggatgtggacgagtcggatagaaagctcttagatgatgaaaagaaacccgatatcacgaaacgaccacacactcctattggagatgatgtggaatgcaagaagccaaagatagcagaaggctcaaggtgccaaggagaagaacctgaggctggagggataaagaattcctcctgggtctgatgacaggggaatgcagtaaacaccagaagcatcaaaactatgatctggtacagtatcctgaatacactattttctggattatgaatgaattctgaagcatggggctataagtgaattatgtaacatggatttgtaactatggtggatgttaagttaatgttctatcacgtacatgccgccgcagcactactacgttccgaac

SEQ ID NO: 444776 - DNA, 446 bp, Triticum aestivum
cgggtcgacggggaaaatgaaaaaaaaaaaaaaatataaaaaatgaaaaagaaaaaaaaaaaaaaaaaaaaaaataaatactaacaaaagaatcaacacaataaaaacaaaaaacaaacaaaacaaatcctttttcgaagacttaaaaaaaaaaaaattaaataagaaaccaatccataacatcaaaatcgtaaaaaaaaaacaaaatcaaaaaacataaccgccccccccaaaatttccacctttactttcccgtgcaacccaattaaaacccccccacaagtggccccccaattttatttcagggcctcttttttaaaaaattcgacccgtgaaaaacccctgtttttcccaattttaccccttttaaaaaaaacccctttttccaaatttggataaacctaaaaggcccccccttttttccccttccccaaatttttcccccc

SEQ ID NO: 444777 - DNA, 67 bp, Triticum aestivum
gggcgcggtgacactagcttgtactactaattgagaaatgttatacggtcttgatggatgcattgag

SEQ ID NO: 444778 - DNA, 382 bp, Triticum aestivum
gggggcatggacattggcatgggtgttgtggccgtgagcggtgatggtaaaggggatcaggggggcgaggctggccaggatgagcaggtgaagaaaaagcgcgggaggccaaggaagtataagcctgatgggtcagtgacgttggggctctcgccatctccatccacgcctcattcgtcgagcccaggaatgggcgcgatggttaccacacctggctcaggatttgggccggggacagggtcagggggttctggttcaggcgcactgacggagaaacgtggcagagggcggccacctgggtccgggaagatgcagcagctggcttcgcttggaaaatggtttcttggctctgttggaacagggtttactcctcacgtgatta

SEQ ID NO: 444779 - DNA, 431 bp, Triticum aestivum
tccgggtcgacggggacatcgacgatgagttgccgtcgttcagcacccacaagaccatcctcggtcactgggaggatccggtgctcgaagtctgacatctaagtgtatggttgtgtcttctcgcattcgcgttgatagtgtagttgtgatgttgcccagaagaaaatatgagacacaggaagagccgatgagatgagatagtgatcgtccctgttaatatcgtggacgttcgggaagaagttgtagattctagtaaccgatctggcctagttttggtcatcctagtgttggccttgggatttttgcagtgggaggtaccgactcactgtttcgccttggaccttcatttcttcacttttagttacattctttttagcttttacttggctttttcgtatgtacctttttattcaacacatgtccaagttttt

SEQ ID NO: 444780 - DNA, 473 bp, Triticum aestivum
  unsure (1)..(473): unsure at all n locations
gnnnnngnaattccagttgctcggcccggtcacnaatacccgggtcgaccccaaaaaacngattagggtgatggttcacgtagtgggccatcgccctgatagacggtttttcgcccttgacgttggagtccacgttcttaatagtggactcttgttccaaactggaacaacactcaacctatctcggtctattcttttgatttataagggattttgccgatttcggcctattggttaaaaatgagctgatttaacaaaaatttaacgcgaattttaacaaaatattaacgcttacatttaggtggcacttttcggggaaatgtgcgcggaacccctatttgtttatttttctaatacattcaaatatgtatccgctcatgagacaataaccctgataaatgcttcaataatatgaaaaangaagagtatgagtattcaacatttccgtgtcgcccctaatccctttttggcng

SEQ ID NO: 444781 - DNA, 479 bp, Triticum aestivum
  unsure (1)..(479): unsure at all n locations
gnnnnngnnggnttnttttagcccggcaggtaccggtcaagaattcccgggtcgacgagtcactantcggcggccgctctagaggatccaagcttacgtacgcgtgcatgcgacgtcaagctcttctatagtgtcacctaaattcaattcactggccgtcgttttacaacgtcgtgatgggaaaaccctggcgttacccaacttaatcgccttgcagcacatccccctttcgccagtggcgtaatagcgaagaggcccgcaccgatcgcccttcccaacagttgcgcagcctgaaggcgaatgggacgcgccctgtagcggcgcattaagcgcggcgggtgtggtggttacgcgagcgtgaccgctacacttgccaagcgccctaacgcccgctcctttcgctttcttcccttctttctcgccacgttcgccggctttccccgtcaagctctaaatcggggggctcccttaaggttcca

SEQ ID NO: 444782 - DNA, 477 bp, Triticum aestivum
  unsure (1)..(477): unsure at all n locations
ggnnnnnnggantcttctancccgtacggtaccggtcanaaattcccgggtcgacggggaagccggcggtagctcaaaatcaacaaaaaaaaaaaaaaaaaaaaaaaaaaaaaagcggcgctctagaggatccaagcttacgtacgcgtgcatgcgacgtcatagctcttctatagttcacctaaattcaattcactggccgtcgttttacaacgtcgtgactgggaaaaccctgggttacccaacttaatcgccttgcagcacatccccctttcgccagctggcgtaatagcgagaggcccgcaccgatcgcccttcccaacagttgcgcagcctgaatggcgaatgggacgcccctgtagcggcgcattaagcgcggcgggtgtggtggttacgcgcaacgtgaccgctaccttgccaagcgccctagcgcccgctcctttcgctttctcccttcctttctcgccaacttgccgg

SEQ ID NO: 444783 - DNA, 87 bp, Triticum aestivum
tgtagggcagaatcaaacagatttgttaacattcatgatgattgatacgtcagcactagatgatcaaatacttaaatcttctgctca

SEQ ID NO: 444784 - DNA, 374 bp, Triticum aestivum
ggcagttccagcttaaaagactcattgcgtccggcggtcctccgccggggaggccgccgttctcgcgtccgagctctctcccgtactagggatcttcttccccactccaccgcttggtttttctgactgcgaagtttttggcctcttcgggtcttgttttggaggagggctgattggggtagcagatccgttcttgccggagagcaccacttccagccccgtatttcctttgtggttttgcaaaccctgcacctcatcagaaggacgtttgcgattggcatcagaatcctccgtctccatcttctcttgcttaggatcatcatcctccttcgtagcttgctggcccgacccttgttggtttgaagtcctgttcc

SEQ ID NO: 444785 - DNA, 408 bp, Triticum aestivum
ggggatccacagaaagaaaaaaagagttgttttggtgaacatcaaagaaaaaacttgctcttcttccataaaaaattcttctaaaaatgccgaacccaaccgttgcataaaagttcgtaccgtgcttttatgtttacgagctaaagttctagcgcatgaaagtcgaagtatatactttagtcgatacaaagtccgttttttcgaagatccactatgataatgaaaaagatttctacatatccgaccaaatcgatcaagaatatcccaatctgataaatctgtccaaatgggtttactaataggatgccccgatccagtacaaaattgagcttttgataagtatcctatgaggagagtagcggggactatggtatcgaatttttttcattcgagtatctattagaaatg

SEQ ID NO: 444786 - DNA, 396 bp, Triticum aestivum
cggggagcagaaggaagagatggactggaagggctcgtgtcgtcccgtacatatagccgagggaggccaaccgtcggcctccatgatcacaggtaatcatgacccgttttgcatgcagggacttgtcaattcgtgcagttgccgaggcatcgtggggagccaggatgcccacgtccaatcaaccgccacgcgtctcccaaggccgcaggctattgggcccgtggcgcttcgtacttgccccttcgcttccctgctaagccaagtctgggcgcgccttgggcccgggggctactgtcagcattctgggaacggggttacctagacttgcctgcctgcggcctgcagcgtggctcagggagcggcccagtacggcccatcttcatcagcgcatgccca

SEQ ID NO: 444787 - DNA, 417 bp, Triticum aestivum
cgggtcgacgggggaatggtcttttccatccccttacatattgaagttcatcacaaagctcttgtagctcgatggaagcgactgaaggattctgtcaatgaccgcgtcatccgggagattaactcccagctgagttaagcggttatgtaatccagacatagtgagtatgtgctcactgacagaactattttcctccatcttacagctgaagaacttgtcggaggcttcatatctctcgacccgggcatgagcttgaaaaaccattttcagctcttcgaacatctcatatgctccgtgtctctcaaaacgcttttggagccccggttctaagctgtaaagcatgccgcactgaacgaaggagtagtcatcagcatgtgtctgccaagcgttcaaaacatcctgttctgcaagggaaac

SEQ ID NO: 444788 - DNA, 403 bp, Triticum aestivum
tcgacgggaggtgctcgaggggcccacgatataagattcaactacatcataaggctcttgtaactcgatggatccgagtgaacgattctgtcaatgatcgcctcatcctcggagattaactcccatctgagttaagcggttatgtccaccagacatagtgagtatgtgctcactgacagaactattttcttccatcttacatctgaagaacttgtcagacgcatcatatctctcgacccaggcatgatcttgatataccattttcagctcatcgaacatctcatatgctccgtgtctctcaatacgcttttggtgccgcggatctaagctgtaaagcatgccgcactaaactaaggattactcatcagcaatatgtctcacaagcgttcataacatcatgttc

SEQ ID NO: 444789 - DNA, 384 bp, Triticum aestivum
cgggtcgacgcggaagactcgacaatggttgcccacgcggtggggagtacgagggtttactggtccggctgccgtcgctggaaaataataggaggtgtgggtgagtagaggaatggcctggccagcaatgaagtagggtagggcggtgcggcccgtgcggcagcacagccggccacgggaggcgggagcaggcagtcccaccagagctggtttgggcggctggagcaagaagatcagatattgaagaagcagcacggtcgttagattaacatccaacgatcactgctgctacaatcgtttgtggactaacttgataagaccaaagtacacgtcaacctagtatacccacaaatcagcctccaaatctgtcccaaacaacataca

SEQ ID NO: 444790 - DNA, 98 bp, Triticum aestivum
gggcacctgcacgtagagggacgaaaacagcagatttgttaagattcatgatgattgttacatcataagaggatagcatagaaagaaatcttccgatc

SEQ ID NO: 444791 - DNA, 410 bp, Triticum aestivum
attcccgggccgacgggccggcacaacgacacggagctccacctcgccgcgcagcgcggggacctcgacgccgtgcgccagatcatcgtcgaaatcgacgcgcagatgaccgggactggcgaggagttcgacagcgaggtggcggagatccgcgccgccgtgctcaacgagcccaacgaggtcggggagaccgcgctgctcatcgcagctgagaaagggttcatcgacgtcgtcctcgagctgctcaatcactctgacaaggagagccttgcgaggaagaacaaatcaggattcgatgctctgcatgtcgctgcaaaggaaggccaccgagatattgtgaaggtactcctggaccatgatccatcccttgggaagacgtttggccaatcaaatgtgactcctctgataac

SEQ ID NO: 444792 - DNA, 398 bp, Triticum aestivum
gggtataacaatccaccatgaacttctgcagggatttcattggcgaccaagcgattcataatattcacctggaggacgacagttctctggcgccatattaccttcacgacatattacatctcaaggggaacaatacaaggaggccacatcagttcatcgagtctatcgacgaatgataaaggatacagtttcaagcgaatatgagggtgtaacaaactgatgtatcttgggggcattctttgcctgagactgtttctgttggagcaaagtgtttgtaccataatgatctagattatctatgtggacctatatattattgtcagcacaacatggaatgaatttgaatgtcaagtacaaaccacggtattcgggcatgaccgatctaaaaaaaaaaataa

SEQ ID NO: 444793 - DNA, 482 bp, Triticum aestivum
  unsure (1)..(482): unsure at all n locations
ggnnnnngnanttttacnntggccnggcccggtcanatcataantnntcgggtcgatcngaatngganggtcgcnctagaggatccaagcttacgtacgcgtgcatgcgacgtcatagtcttctatagtgtcacctaaattcaattcactggccgtcgttttacaacgtcgtgactggaaaaccctggcgttacccaacttaatcgccttgcagcacatccccctttcgccagctgcgtaatagcgaagaggcccgcaccgatcgcccttcccaacagttgcgcagcctgaatgggaatgggacgcgccctgtagcggcgcattaagcgcggcgggtgtggtggttacgcgcaggtgaccgctacacttgccagcgccctancgcccgctcctttcgctttcttcccttccttctcgccacgttcgccggctttccccgtcaagctcctaaatccggggctcccttaagggtccaattaatt

SEQ ID NO: 444794 - DNA, 255 bp, Triticum aestivum
gggaggaggaattgcgcatgggcgaggtcgaggtagagaagagtctgtccgtcgaggaatcggcggtggagtaccaacgcgagcgctggtgcaaccactactacgagtactacaaccttgagggcggcgccgaggacgaggacgaggatgaggacgctgtcaacttcagcaggggggatgcggagtccaccaacggcggcatgtcgccaggacagtcatcgacgtctcatctcacaccggtgatgcataggcctc

SEQ ID NO: 444795 - DNA, 315 bp, Triticum aestivum
attcacgggccgacgggtaccggaacacgctcagcgcctacaacttcgaccgcttcaagcggctccataccaagatgatgaaggacgttgacgacatgctcgcctatgacattcccgacctgctcaagcagttcaggaacccctacgagtgagtcaactcaatgaccatggatggaaattccagaccccaattttatttctcgtggggttcagcggaaacttgaacttgaggtgtatgtatgttaactttgatcataacgctttgatgtactatataagtatcagtcaatcaatatttacatgacctcgttgatc

SEQ ID NO: 444796 - DNA, 96 bp, Triticum aestivum
tcgatataggttattctacaagattactctatagatccatcagctctaagtaaactgcgtataaatcatgtatgtataaggtatgtgttactgaag

SEQ ID NO: 444797 - DNA, 171 bp, Triticum aestivum
gaggtgttcccttggggtatgttcgcccgcattcatggcctgcccaaagccattacctctgcaatttgtaggtcaaccactacgcttggtatctgtatgtgtaatgtgatcttggtactatacaacttgccacttcccgcagtataagtaatattgagcttctgaatgttt

SEQ ID NO: 444798 - DNA, 411 bp, Triticum aestivum
cgggtcgacacggcgtcgcaactgggtatatgtcacgtcagtacccccattcctatccaggagtgggaataggccctcagcgccttaattgcaccagatgcctgccgcgtcgtacttgcatcagacgcccgccacgccattcgccttgtccgcggaccgataggctcaaccgcctccttggcccaagtgtccaccgggcccagtggaggaacatgcccgtcgcattctcgagctggtgatctccgatgaaatagccaacttggatgaacgcctgcaaacacgagttcaggcagagccaagagctactgtacgcaacggctgctggtcatggtctcatggacgcgtttcattttgttgagtcgtttcgacgtggatagcaatgtatttacagcaattatagtattgctctgt

SEQ ID NO: 444799 - DNA, 188 bp, Triticum aestivum
ggggctgtatacatgtcctttgaaaaatgctacgtggctactcttaatgtactgtgatactcgtacaaaagcaatctgtttgtgaaaactaacgcaggctgtctgtctgtcactcggaatacattgtctaagcagtaacgtggacaattttgcaaacgagttactgaaccaaggtgacaaaaagcagt

SEQ ID NO: 444800 - DNA, 479 bp, Triticum aestivum
  unsure (1)..(479): unsure at all n locations
ggnnngnagnttcttgccngccngtacaatcaagaattcccgggtcgacgggaaaaaaaaaaaaaaaaaaaaaaaaaaaaagcggccgctctagaggatccaagcttacgtacgcgtgatgcgacgtcatagctcttctatagtgtcacctaaattcaattcactggccgtcgttttcaacgtcgtgactgggaaaaccctggcgttacccaacttaatcgccttgcagcacatcccctttcgccagctggcgtaatagcgaagaggcccgcaccgatcgcccttcccaacagttcgcagcctgaatggcgaatgggacgcgccctgtagcggcgcattaagcgcggcgggtgtgtggttacgcgcagcgtgaccgctacacttgccaagcgccctagcgcccgctcctttcgtttcttcccttcctttctcgccaagttcgccggctttccccgtnaagctccaaaancggggcccct

SEQ ID NO: 444801 - DNA, 112 bp, Triticum aestivum
  unsure (1)..(112): unsure at all n locations
tcaattnactggnngtcnttttagaaggttntgaatggnaaaacggtgnatttagacanttattctcgttganagtatntctctttcancaattgggggtnanntntgaaaa

SEQ ID NO: 444802 - DNA, 415 bp, Triticum aestivum
gggtcgaggggctcgaagcgaactgctgcggcacattcttggcatgatctggagataggacctgaagcccctctaatcttcaatgccgttgttgagatcacaaaggggagcaaagtcaagtatgaacttgacaagaagactgggatgataaaggttgacaggattctgtactcgtccgtagtctacccacataactacggtttcgtaccacggacgctgtgtgaagatggagatccaattgacgtcttggtcctgatgcaggaaccagtcatacctggttgctttcttcgagctaaggctattgggcttatgcccatgattgatcagggtgagaaagatgataagctcattgctgtttgcgttgatgatcccgagtaccgtcatctcaacgaccttaaggagctctctccccaac

SEQ ID NO: 444803 - DNA, 446 bp, Triticum aestivum
  unsure (1)..(446): unsure at all n locations
ggggctgacgcgtggatgcctattggtcccggttgatgccaccaaccgggaccaaagggtctcctgactgggctctgcacactgcccacgtggatgggctttagtcccggttctggattgaaccgggactaaaggtgggaggtattagtaccgacactttagtcccggttcaggaaccgggactaaaggcccttacgaatcgggactataggccctttttctaccagtgcagccacacatgacggccaccgtcgagagataaagcatgatttgctaagttgtgagcttcaaaattcaagctcctaaattcatggctagatttacagaaatcaaaagtggcatattatttcatgtatggtagctccataaacagatgagttttccttcttcaagtctaccancaccactttgcaatccgaaggcaacttggaaatcacacacataaa

SEQ ID NO: 444804 - DNA, 476 bp, Triticum aestivum
  unsure (1)..(476): unsure at all n locations
gggnngnaagttttntggcggccggtccaaaacaaccgggtcgaccagctcactaatcgnggccgctctagaggatcaaagcttacgtacgcgtgcatgcgacgtcatagctcttcatgtgtcacctaaaattcaattcactggccgtcgttttacaacgtcgtgactgggaaaacctggcgttacccaacttaatcgccttgcagcacatccccctttcgccagctggcgtaatacgaagaggcccgcaccgatcgcccttcccaacagttgcgcagcctgaatggcgaatgggcgcgccctgtagcggcgcattaagcgcggcgggtgtggtggttacgcgcagcgtgaccgtacacttgccagcgccctagcgcccgctcctttcgctttcttcccttcctttctcgccagttcgccggctttccccgtcaaagctctaaatccggggntccccttaagggttcnaattatgg

SEQ ID NO: 444805 - DNA, 197 bp, Triticum aestivum
ggtcgacgggatcaacgaagggatacgggaagaccataacatgtatgtacggtcgatctatttcagaacgcatactatcggtctcgtacactcactacagttgtcttcgacttatgacgtcatcagtggtagcacggtgaccttgcttaacatccgtgcactcaacattatgcacgtttcactcgcatgcttgttac

SEQ ID NO: 444806 - DNA, 342 bp, Triticum aestivum
gaagaagatctaaaacgtctcctgtgaacggtacttcggtttcgggtgtgagatcgacgaggagacatccaacaaactggaaggcattcctggtgttttgtttgtgcttcctgattcgtatgttgatcctgagcacaaggactatggagctgagctttttgtgaatggggagattgttcagaggtctccagagatgcagagaagggtggagcctgtgccgcagagagcatcagataggcctcggtacaacgacagaacccgctaccaacggatgacggagaaccaatagcggtgatgagccgaggtgctcgattgaagatcaaataacaagccctggtggtt

SEQ ID NO: 444807 - DNA, 327 bp, Triticum aestivum
gtatgacagagaatatcgatatacgttattctacagtattactctacagatccatcagctctaagtaaactgcgtataaatcatgtatgtataacgtatgtgttactgatgttacaagttgagtccatgtgtgacggtgcggctgtaacacaacatgtgattcataatatccacatgcctcaccatgtaagaaatatgccctaaaaaacaaataataaagttgttaattaaaattccataataacatgataaatgtttaataaatcaatgctaaaattgtaaataaccgaaaacttaataaaatgtgtgaatacggccccccaaaag

SEQ ID NO: 444808 - DNA, 383 bp, Triticum aestivum
gggtcgaccggaggaagagaagaaaaagcagctatttcacctggtgtcgtaataaccactgttttcgggtttgaaggcataagcgcagcagagatcttctttcatttaagaagaagccaccgtaaagaagaggaaacaaggcgtttaagggacaccgactcccattattttctccaggcctgctttggctaaatcgacggaggcttagcttattatgtttcgggcgtttagctagcttagagaataaagaaatctatctctaaagggggagcggtacgactattttaggttagaggaaggttgaagagagaatagctaaaatagccagtcgggtaggcaagtgcgggtggctgtggtcaaagtgaatatgtcctgtttcggtt

SEQ ID NO: 444809 - DNA, 494 bp, Triticum aestivum
  unsure (1)..(494): unsure at all n locations
ggnngaactttattnggccgccnnggtccaaaaaacccggggtcgacgagctcactaanggcggccgctctagaggatcaaagcttacgtacgcgtgcatgcgacttcatagcccctttaataagtgtcacctaaaattcaattcactgggccgtcgttttaacaacgtcgtgactgggaaaaccctggcgttacccaacttaatcgccttgcagcacatccccctttcgccagctgcgtaatagcgaagaggcccgcaccgatcgcccttcccaacagttgcgcagcctgaatgcgaatgggacgcgccctgtagcggcgcattaagcgcggcgggtgtggtggttacgcgcacgtgaccgctacacttgccaagcgccctagcgcccgctcctttcgctttcttcccttccttctcgccacgttcgccggctttccccgtcaagctctaaatcgggggctccctttaaggtccgaattaattgcttaacggg

SEQ ID NO: 444810 - DNA, 473 bp, Triticum aestivum
  unsure (1)..(473): unsure at all n locations
ggnnnganttatnggcgtccggtcaacaaccgggtcgnccggtgcactaaaaaaaaaaaaannanaanaaaaaaaaaagcggccgctctagaggatccaagcttacgtacgcgtgcatcgacgtcatagctcttctatagtgtcacctaaattcaattcactggccgtcgttttacacgtcgtgactgggaaaaccctggcgttacccaacttaatcgccttgcagcacatcccccttcgccagctggcgtaatagcgaagaggcccgcaccgatcgcccttcccaacagttgcgagcctgaatggcgaatgggacgcgccctgtagcggcgcattaagcgcggcgggtgtggtgttacgcgcagcgtgaccgctacacttgccagcgccctagcgcccgctcctttcgctttttcccttcctttctcgccacgttcgccggctttccccgtnaaactccaaatncgggggtc

SEQ ID NO: 444811 - DNA, 422 bp, Triticum aestivum
  unsure (1)..(422): unsure at all n locations
cgggtcgaccggatactaaaaaaagattgaaaaggatcaaattttgtcatatcacgaagaaatctatcccttccatagcaataacaagaattaaaaaaaagggaatgacaaagcatctgggaataaacgattaatttctatcaataaacctgctaaagcaccaaaccatagagtacttagcacgggtgctacagagagatatgtttttatatcccgcattgaaaatcctccttccttgttggaatacatatatgatcataaactcttgcccaagattgttatgctatatataaaatgaaccatatcgacgaaattttcctatccctaaaaaagaaaaagatgaccccttcttcctatatattaccaaggaaaagtaatccttcttttatangcgaaattatattggattttatatgtatata

SEQ ID NO: 444812 - DNA, 484 bp, Triticum aestivum
  unsure (1)..(484): unsure at all n locations
gnnngnactttattagncggcggtacgatcaagaattcccgggccgctctagaggatccagcttacgtacgcgtgcatgcgacgtcatagctcttctatagtgtcacctaaattcaatcactggccgtcgttttacaacgtcgtgactgggaaaaccctggcgttacccaacttaatgccttgcagcacatccccctttcgccagctggcgtaatagcgaagaggcccgcaccgatgcccttcccaacagttgcgcagcctgaatggcgaatgggacgcgccctgtagcggcgcataagcgcggcgggtgtggtggttacgcgcagcgtgaccgctacacttgccagcgccctacgcccgctcctttcgctttcttcccttcctttctcgccacgttcgccggctttccccgtaagctctaaatcgggggctccctttagggttccgatttaatgcnttaangnaactccaaccnaaaaaattt

SEQ ID NO: 444813 - DNA, 481 bp, Triticum aestivum
  unsure (1)..(481): unsure at all n locations
gnnnngnagnttttctagccgggtcggtacgatcatnaattcncgggtcgacgagctcataancggcggccgctctagaggatccaagcttacgtacgcgtgcatgcgacgtcatagccttctatagtgtcacctaaattcaattcactggccgtcgttttacaacgtcgtgactggaaaaccctggcgttacccaacttaatcgccttgcagcacatccccctttcgccagctgggtaatagcgaagaggcccgcaccgatcgcccttcccaacagttgcgcagcctgaatggcaatgggacgcgccctgtagcggcgcattaagcgcggcgggtgtggtggttacgcgcagctgaccgctacacttgccagcgccctagcgcccgctcctttcgctttcttcccttccttttcgccacgttcgccggctttccccgtcaagctctaaatcnggggctccctttaagggttcaattaatt

SEQ ID NO: 444814 - DNA, 387 bp, Triticum aestivum
gggcacgatcacggattcgctcggcagatcagcgcgcaccagcccccaagcctccggatcctccttcgtcgtcctccccaccgcaagcttcagccatggcaggaatggcaccagagggttcccagtttgatgctaagcagtatgacagcaagatgaccgagttactgaaccaaggtgacaccggggagtttttcacctcgtatgatgaggtgcacgaaagttttgatgacatgggcctccaatagaaccttcttagaggcatctacgcttatggttttgagaagccatcagccattcagcaaagaggaattgttcccttctgcaagggtcttgatgtgattcagcaagctcagtctggaacaggaaaaactgccaccttctgttctg

SEQ ID NO: 444815 - DNA, 335 bp, Triticum aestivum
agctagataaaaaatcgcttccatttttgaagacgatggctgaggtttcagggtggcctttgaatagatatgaaacacttgctttgctaatcttttcttcggttcttgcagtggatctatggttttgggagtttctcgtggaaagcagtctgaattgggcatctttggctggttcctggatcgatcaatttagtgctccattttgacaaagagtttacaaaaccatttactgttgcagttagtttcagatattagttggagtgctgtctatgcaaacttgtagataacaatttattgaatcaacttggaatgagattagtgagaaagttgaagcc

SEQ ID NO: 444816 - DNA, 416 bp, Triticum aestivum
gggtcgacgggtctgccaaggtgacatcaccaaggtactcaccaagatggtgcactggaaccccgaccttgacttcgacgcctcgctggacagcttgccggagggtgtggacctcgcggcgctcagggagcgtatcaagcccgtcatcagccatatcggcggaatccagtggatagagggccagcaccgagattaggcaccctgtctcgcactgccgctgcaggttcctgaccaagacatttttatctttagttagaaccgcagcaacaaatgatgtaatataactctgcagtacttttgagacaatgcatgttaatttcctgtccgatcttcgctttgtacgttcaccctacgctaatcgggtaggcttgccggcgcgtaaacccagggcggcaccttgaggatggatccccaat

SEQ ID NO: 444817 - DNA, 275 bp, Triticum aestivum
aacaaaaaaaatagaaaaaaaaaaaaaaaaaaataaaaaaaaaaaaaaaaaaattaaaaaaaaaaagaaaaaaataaaaaaaaaacgggcggcccaaaagattcaaacttaacttacccttaaagtcaagttaaaacccctcaaaaattttcaccaaatttaaattaatgggctttcttttaaaaagttcttaacgggaaaaaccttgggttaaccaaatttaacccctttgaagaaaatccccttttcgcaatttggcgtaataccaaaaaggc

SEQ ID NO: 444818 - DNA, 475 bp, Triticum aestivum
  unsure (1)..(475): unsure at all n locations
ggnnngantnattgtcgcccggtcaaacaaccgggtcgaccggcactggaacaataatgctgtggcttatcaaaagaaaaaaaaaaaaaaaaaaaaaaaaaaaaaagcggccgctctaaggatccaagcttacgtacgcgtgcatgcgacgtcatagctcttctatagtgtcacctaattcaattcactggccgtcgttttacaacgtcgtgactgggaaaaccctggcgttacccacttaatcgccttgcagcacatccccctttcgccagctggcgtaatagcgaagaggccccaccgatcgcccttcccaacagttgcgcagcctgaatggcgaatgggacgcgccctgtacggcgcattaagcgcggcgggtgtggtggttacgcgcagcgtgaccgctacacttgccacgccctaacgcccgctcctttcgctttcctcccttcctttctcgccaantttggccgggttc

SEQ ID NO: 444819 - DNA, 105 bp, Triticum aestivum
cgggtcgaccggagtgtgaaaatcatcattattagagcattgtcccagtgagaaaaggatgatggagactatgattcccccacaagtcaggatgagactttgggg

SEQ ID NO: 444820 - DNA, 427 bp, Triticum aestivum
gggcggcgacagtgccggccacggtggcgagctgggcgctctgaagcggtcgtcgtcgtacaatgccgacaggggcagagaatccacgatgaacgctgctagcaccacgggtggtggttgcaagctggagcttgcggcggaggaggtggacggcgtccgcgcccgctgcatcccggccgggaggaaacccagcggcagcagcagcaagaagtctccgaccacccacgtccacgttagcagccggcgcggcgaccaaccggaaactaccgacgacggacggactgactgatttcacccaagaaaactcatgaaaacatactagtactagcatcaaaatgttgatcgacgtgcgtccgctgcagactgaacgaatgtcttgctacggcacgcgctcttgcatcgactaactttcctttttaaaatttcc

SEQ ID NO: 444821 - DNA, 219 bp, Triticum aestivum
gggagagtatatataggcaaaagaattaggtcaggggactctcgaggggcccacaaggtcgggggcgcaccccacccccctaggcacaccctccacccttatggccgcctcgaggctcctctgacttgaactccaagtctcctgggcgtcttctggtccaagaaaaatcatggcgaaagttttattccgtttggactccgtttggtattccttttctac

SEQ ID NO: 444822 - DNA, 476 bp, Triticum aestivum
  unsure (1)..(476): unsure at all n locations
ggnnngaantttattggcngcccggtcaaaaaccgggtcgacgagctcactagtcggcgccgctctagaggatccaagcttacgtacgcgtgcatgcgacgtcatagctcttctataggtcacctaaattcaattcactggccgtcgttttacaacgtcgtgactgggaaaaccctgcgttacccaacttaatcgccttgcagcacatccccctttcgccagctggcgtaatagcgagaggcccgcaccgatcgcccttcccaacagttgcgcagcctgaatggcgaatgggacggccctgtagcggcgcattaagcgcggcgggtgtggtggttacgcgcagcgtgaccgctaacttgccaagcgccctagcgcccgctcctttcgctttcttcccttcctttctcgccacgtcgccggctttccccgtcaagctctaaatcgggggntccccttaagggttccaattaangctt

SEQ ID NO: 444823 - DNA, 376 bp, Triticum aestivum
aagctaaagaacaccctgcgcaagcataactccaacaccgtgaacacttcccggactccgccgagaaggggccatcacggtaacacacacggttgattcattttaattaagtttagttcaagtcatctacaaccgggcattaacaaattcccatccgcccataaccgcgggcacggctttcgaaagatcgatccctgcaggggggtcccaacttagcccataacaagctctcacgatcaacgaaggaatagacctccacccaagacacaccgatcagactcggtaccttggtacaacaagatgattcggcaggttaaaacaagtccagcaacaccgcccgaatgtgccgacaaatcccgataggagctgcacatat

SEQ ID NO: 444824 - DNA, 426 bp, Triticum aestivum
cgggtcgaccggtcctatggagccatagcacgacgacttcccgactatcttccaacttagtatgatagaagactttaaaattctcttttgggaaacaaagtgcaagtaagtgaataaaatttcctttgtcccaactgtttaagacaaacaaatgaaagctaaactcctctgagacctcttttagacacttcctatggatacgtagtagaaacaatcataactttctacaacaatatgtagaaagtgttactttctctattctcattaagaaacattagtaacaccaattttatttacactttttttgaacatgtcatttacactttaattagatgtatatgttccttttttattgctaaccggtccgaccgatgggtgatgactagtaaaattcattaagtaaaattcgttttgtcaaatcaagaa

SEQ ID NO: 444825 - DNA, 82 bp, Triticum aestivum
  unsure (1)..(82): unsure at all n locations
ggtcngtaanttgtgannntacttcttttnccncctctcctcattgcnaanggggaatncttgttcattantatcagtattt

SEQ ID NO: 444826 - DNA, 483 bp, Triticum aestivum
  unsure (1)..(483): unsure at all n locations
tgnnngnagngtttttagccnggtcggtaccgatcacaaattcccgggtcgacgagctcctaatcggcggccgctctagaggatccaagcttacgtacgcgtgcatgcgacgtcatagtcttctatagtgtcacctaaattcaattcactggccgtcgttttacaacgtcgtgactggaaaaccctggcgttacccaacttaatcgccttgcagcacatccccctttcgccagctgcgtaatagcgaagaggcccgcaccgatcgcccttcccaacagttgcgcagcctgaatgggaatgggacgcgccctgtagcggcgcattaagcgcggcgggtgtggtggttacgcgcaggtgaccgctacacttgccagcgccctagcgcccgctcctttcgctttcttcccttccttctcgccacgttcgccggctttccccgtcaagctctaaatcnggggntncccttaagggtccnattaattg

SEQ ID NO: 444827 - DNA, 484 bp, Triticum aestivum
  unsure (1)..(484): unsure at all n locations
ggngnagttnattagncgnncggtaccgaacaagaattcccgggtcgaccccaaaaaactgattagggtgatggttcacgtagtgggccatcgccctgatagacggtttttcgcccttgacgttggagtccacgttcttaatagtggactcttgttccaaactggaacaacactcaacctatctcggtctattcttttgatttataagggattttgccgatttcggcctattggttaaaaatgagctgatttaacaaaaatttaacgcgaattttaacaaaatattaacgcttacatttaggtggcacttttcggggaaatgtgcgcggaacccctatttgtttatttttctaatacattcaaatatgtatccgctcatgagacaataaccctgataaatgcttcaataatatgaaaaaggaagagtatgagtattcaacatttccgtgtcgcccttaatcccttttttgccgaatttgcctcc

SEQ ID NO: 444828 - DNA, 386 bp, Triticum aestivum
ggtcagaataccgggtcgacggggatgaaagatgccggcgccgacatgccactaagatcccataggctcgttgtgcacgtccctgctcttcctgagggcaccgctcgggcctcaacatagcaggaacagcggtactgctggataggcgaaagagatggcattttcgatctgaccagactcatccttgacattctcatatataaagatctgcggttgactccagctccggcaccattgatggtgtgagctaattttcgttggtcaacgctgtaggttctacagtgctaatgcgaaaatctgagatctgaaaatgtcactgcttcccgtgtgataccctaatcatccatgcagttggtgacttaatcaatccgatggaatttgctgct

SEQ ID NO: 444829 - DNA, 402 bp, Triticum aestivum
ggtcgagctatccgggtcgaccggggacaagacggcgttctgggagccggaccccaagaccggcgactaccggccggtgaccagcaccaaggaggtggatccggctgacctgcgtgcagagatgctcaagcggaggttgctgcagcagcaatgatgcgcgtgctgcaaacacgctaccggcccataggttcataccgtcatgtacaacaaaacgttaacgggcgtgctaaactatatttactaggtgccatgtcggacaacgacttgtcaggaaattgcttcctgtaagtatgtaagtcttcaacagacacttacatatttacttgttctacgcaaatcgtccaaaatttcccagtggtttcgcacaccacgacaatatttcagcacaaaaaaaaatgaaaa

SEQ ID NO: 444830 - DNA, 378 bp, Triticum aestivum
  unsure (1)..(378): unsure at all n locations
gggtcgaccggaacactgaagaagcanagagaacactggcccgctttcgtgagaattcaaggaacaaaattaccaaaggaacggccaaaaaaaaaaaaggcaattgccgaaaaaattaccaatttcaaaaggctggttcaaggtggcaacccggtggcaatgccaaattggaataagtctgagcaagagatggaggatgcaggggtcactccggttactaagagctggccccccaggtgcagaacttggttctatgcgcatggggggacgttggacccgaagacaagcctagtttcgaagaangcaagtctaaaangagcagaacaaaagttacttgacgcaatagaagatgctcgaaagggggtgttcacgcccaac

SEQ ID NO: 444831 - DNA, 373 bp, Triticum aestivum
gggggaaaatacattctgcatctcccattgcccatggtagcagacgctcatggaggagtgcgcaaaagactgcggatcagaaaccctcagagccagtcaatactcggcctcgccgtactccgagcagaagtcattatcacgcagcatcccggcggactatacggctgagctgtctgatgccatcaagctgcacatcgggttgtaatcacagatagcatatgcatctatatgatgctataagcaattgacgatatagagtaaatagtatatgcatgttgctgaaatgtggcgcggatattagatatgactagcgtgcatgcggtagtttgtaaaaaatgcatcttgatgttccgtgcagggcactcgaaacgat

SEQ ID NO: 444832 - DNA, 379 bp, Triticum aestivum
ggtcaagaattaccgggccgactatcacaatgaccggggtcttgtcgcgaatgatccgcatctccatactcagcgaaaatagccgaacgaaggtgtagtgcagcggatgaaggttaaacatagcaaagatgtcatcaaaccgcaggacgatcgtacccccgatgtcgccatccacaaagcccttgccctctggcaccttggccacgaaaaccgggtatgccacatccttctctctgagacgccgcttctccaaagaaagaacactgtcgtgcagactcctcctcgagatatcctgcggtgaaggtggcccgtcctgagcacggatcgtactcggtgccggctggctcgcacccttcttagtctttcttttgtgtgcctt

SEQ ID NO: 444833 - DNA, 476 bp, Triticum aestivum
  unsure (1)..(476): unsure at all n locations
ggnnnnngnaattctacctntcgcggacggtnacagtcagaganggccgaggngctcacaatcggaggccgctctagaggatccaagcttacgtacgcgtgcatgcgacgtcatagctttctatagtgtcacctaaattcaattcactggccgtcgttttacaacgtcgtgactgggaaaccctggcgttacccaacttaatcgccttgcagcacatccccctttcgccagctggctaatagcgaagaggcccgcaccgatcgcccttcccaacagttgcgcagcctgaatggcgatgggacgcgccctgtagcggcgcattaagcgcggcgggtgtggtggttacgcgcagcggaccgctacacttgccaacgccctancgcccgctcctttcgctttcctcccttcccttccggcaagttngncnggntttccccgttaaagctcnaaatcgggggctcccctttanggtccga

SEQ ID NO: 444834 - DNA, 399 bp, Triticum aestivum
ggggcaggggagagaaagagatgggatttggcgaaaactgctaagtcctaatgcccttttagtcccggttggtccaacgaaccgggaccaaagagcggcattggtaccggttggttccgtgtaactacttttttattttctgcagctatttttttgttgattcttcctgcagctgtttttttagtcccacctcgccaagcgagaggcagtcgcagttgtttataagccctgagtgcagagatgatgacgaagaggctcaatgctcctgcatattggttagcttcaagccttgaggaatacggtagactgcacagagctatgtgcagtgcagttgacactattccgaaaggcttgaagcaaatttaacgagcattgcgccccttttttatttttaatgac

SEQ ID NO: 444835 - DNA, 399 bp, Triticum aestivum
gtcgacgggttgaggcaactggcttgtactatgatgcttgtatgacgtatttacgttttagagttgtgttgtgatatcttcccgtgagtccctgatcttgatcgtacacgtttgcgtgcatgattagtgtacgattggatcgggggcgtcacacaaacaagatttcaagtgaccgaacaatagcacaagcaattaccatacgaactccactttaactttgtaacacaaacatatgcacaatatacacccattaacccgacagttcttgcgccgacgcataagcaagacacaatacatactcgttaaccgtgataccaagagaacaagaaaggttaatcacttaaaaatcgaatagttgtggtggtgtcaccttaaagaacaaacggacaaaaatgaaag

SEQ ID NO: 444836 - DNA, 194 bp, Triticum aestivum
gacgcggagttgttatacacgggcatcaaaaaggaagatattattgcgttgcgcgtgttgttaaatttgtatcgacgagcgtacaaataatggaacatatcaaagattttttgtttaaaaaaaaaaaaaaaaaaaaaaaaaaaaaaaaaaaaaaaaaaaaaaaaaaaaaaaaaaaaaacaaaaagataaaaaca

SEQ ID NO: 444837 - DNA, 331 bp, Triticum aestivum
gggtggaacaaaaaggtctcgcaccttccatttgcttggaacacaaagaattatgtattgctatgccatggttaattgtagggttattgtttggcattcatgttaagtttagttgaaactgtatcatcatgggttcagtttaaaagtagaaactgtctatcaactgacatgcttttgttgactgctatggagtaattttgatacgaacaaggctgctaattgatttggtccttggtatagcttgtttattccgagatgatgttaatttctaagtttaatctgttgaattagcatggttatgctacccttcaagttgtaattcaacggatat

SEQ ID NO: 444838 - DNA, 376 bp, Triticum aestivum
gggggcggtatctctgtctcgatctcccccaatccaatccgccgcggaagaagcgatcgacaggcgctcgctcgcgaggatgatctaccgcaactggtcgctgctctcctccatggtcgtcatctggggcagcgtcagcgccgccggcctcgccgggatcttcctcttcggcggcaaggagaaattccagggctatctttctcgcgaaggcgagaggctaatgcagcaggacagagccatgatgggcaagaactagtgcacagcacggctcactttcgacgtgtcaacatgtgaatcagacatgaaacgacgtatctctgtggtttagaacataactttctcttcctgccaatggcaccttttgcttctgggcccc

SEQ ID NO: 444839 - DNA, 384 bp, Triticum aestivum
gtcccgggccgacggggaccgcaaaatggaatgcctccaagagccccgcgtactacaagcgcggggactatgtgcccggattgaacgttgatggtatggattttcttgcagtgaagcacgcttgtaaatttgccaaagaacatgttctggaaattggaccgattattcttgagatggacacatatagataccatggacactctatgtcagatccaggcagcacttaccgcactagagatgagattgcaggaataagacaggagcgtgatccgattgagcgagtcagaaagctattattgacccatgacttggcaacagcccaggagctcaaggacatggagaaggaaatcaggaatgaagttgacactgcaattgccaaaacaa

SEQ ID NO: 444840 - DNA, 126 bp, Triticum aestivum
ctggtgtccgctttgatgcagaaaccaagatgggaatggaaacattttatggttatatacaggacatatgggaacttgactattgacgtggtttgacggtccctttgtttcggtgcatattgggtc

SEQ ID NO: 444841 - DNA, 329 bp, Triticum aestivum
tttgacacgggcaatggccatccgcgagccttctatgaacgacgacctcttcatcgcattgatgcgcgacaccgcaccaaggaactgctgcactaagctgaaatagctgttcggcttcggcttttccggtcacagatgatctacgacgaacctcatggcaagtccggacaatctattgagttcggcccattcggcaagctaatcagttagtggaagtggatgctctggaacgttaaactgcgaccagaatagcttgtccacttcacgacctgtttgatctcggaagtattcggccgcatcgatagcactcgccgtcaaatccggatatg

SEQ ID NO: 444842 - DNA, 385 bp, Triticum aestivum
ctggaatacaaaaagtgtccacggagccgactgcttagcaagaggtggtacagcgggaaggtacctaaccagaggtggcgatgctgacagttagcagtctgcctatgctggtggaagctgcagtctaatgcgacaagatatcagcacgccgaccccgcgcaaaggctacatcacagccttctgatccgatcgagatgaccaattcactcaccggcgcaagccttcaggagatgcatcaggatctaacgattggcaaaccgctcgccagaacagatacgtttatatagttcataacttcactcgcacgcatgaaatggactgcacgaatagcacattccagtgagtgttgacgtcccatggactgatatagcgggcagccgggcaa

SEQ ID NO: 444843 - DNA, 363 bp, Triticum aestivum
tttgctatggattttttacttctcaaacaaaaaaatacttgttaaaaacgtagtcaatggagtaatgagtactcacattattagcatggctgaatgtgaatgatttaatttgcgctgagcagtttccatgattaactctggtcaaaagctgcttgttgaccgcagctccttgctgtaacctgacaggcatgtgcacacattttgatgattctttctcccctttgcaagcaatttatatgtttatttaatccgtagttactagtgcaacctgtaaccatcaatgtacctaccgattcctttcacgttaatggtgacagtttaattttcctgtaatgccttgctttgttagtaacgtctgaacaa

SEQ ID NO: 444844 - DNA, 365 bp, Triticum aestivum
  unsure (1)..(365): unsure at all n locations
ggtcgacgcgtacaacacaaaaatatataaatagttcataataatgacaatgaaactatatttagttcattgcaagaacaaggagacaatcctattataatttattacattgtaaaaacatcttggaccagtacgttgggatggcatggtgtgtaaacagggaaaggtatactaaggcgagaggcatagatgcgaccaacgagccggccaaaaaaaaccattgccaaccgtgcacgcgaagagcagtgatttaattgatgtaccaacaatcactcagatagaaatggaacatacacacacaaatagatgtgaaacatgcgtcacccncaaaagtgccaccgaaatgaaaaaaagagccttgaaaa

SEQ ID NO: 444845 - DNA, 482 bp, Triticum aestivum
  unsure (1)..(482): unsure at all n locations
ggggnantctatcntacggtccggtcacnaaataacgggtcgaggggcagctgtanctttcatctctaaaaaaaaaaaaaaaaaaaaaaaaataaaaanaaatnaatnaaaanaaaaaaaaaagcggccgctctagaggatccaagcttacgtacgcgtgcatgcgacgtcatagctttctatagtgtcacctaaattcaattcactggccgtcgttttacaacgtcgtgactgggaaaccctggcgttacccaacttaatcgccttgcagcaatccccctttcgccagctgggtatancnaaaaggcccgcaccgattgcccttcccaaaagttnccgcaacctgaatngccaagggangccccctgtaacggggcaataaacccggcgggttttgtggttacccncaacgtaccgctaaacttgccaacgccctaacgcccgntcctttcgctttcttcccttcctttctgccaagttgg

SEQ ID NO: 444846 - DNA, 274 bp, Triticum aestivum
gacgggaaccgcgagagcccgtgccccagcactgctgccccttagtctccggatcatcgtcatctccgcctgtgcgccgtcgccgcgggtctctgccgctgtccacaagattcctcttcgccattgtcgcaccatgatatgctactgttgatactcgaacctcagagcgaaactgtgctgtgaatcctgtgaaaaaacttacataaagaccagtatagttatgtgttgtgaagttttcaagttatgggtagtccttttaaggactatggaataa

SEQ ID NO: 444847 - DNA, 315 bp, Triticum aestivum
gggtcgaggcgaaaatatagtccatgcattggaagatttactggctcaagcagaagttgctctatgcttctgctgtgtcaagcattagcttagttgcagccttgctggaaggatggattcaggtgtgcaagattgatgatgtacctgcaaacggcttcgttaattttaggaaggatggagtcgtgcatggactggatcctaaccgactgacatgaaaacttgaggctattacacggattcagctttgaaacacggctttgaagtccgaggcgtgccttatgattttttgtgggctgggacgataggttgtactgt

SEQ ID NO: 444848 - DNA, 471 bp, Triticum aestivum
  unsure (1)..(471): unsure at all n locations
ggngnangttactcncccgtacggtacangtcacaaattcccgggncgacggggttggaaatttccttgccaaaaaaaaaaaaaaaaaaaaataaaaaaaaaaaaaaaaaaaaaaaaaaaaaagcggccgctcnanaggatccaagcttacgtacgcgtgcatgcgacgtcatanctttctatagtgtcacctaaattcaattcactggccgtcgttttacaacgtcgtgactgggaaaccctggcgttacccaacttaatcgccttgcagcacatccccctttcgccagctggctaatancgaanaggcccgcaccgatcgcccttcccaacagttgcgcagcctgaatggcnatgggacgcgccctgtagcggcgcattaancgcggcgggtgtggtggttanncccaacgnaacggcnaanttttccaanggnccnnagcgccngcncctttcgctttcttcccttcc

SEQ ID NO: 444849 - DNA, 271 bp, Triticum aestivum
  unsure (1)..(271): unsure at all n locations
gggtcgagcgcgaagctccaacggaggcagccctgcttccaagaatcacaaggtcactctgtccgggctgctcaacatggtggacggcctctggtccagcagcggccatgagcggatcctcatcttcaccaccaaccacagggaccggctcgacccggcgctgctccggcctggccggatggacatgcacgtccacatgggctactgtggcttcgtcgccttcagggagctcgcggccaactaccacggcatccanngacacccgctcttc

SEQ ID NO: 444850 - DNA, 477 bp, Triticum aestivum
  unsure (1)..(477): unsure at all n locations
tgngnantttatcngncggggacggtcacnaataaccgggtcgacgagctcactaatcgcggccgctctagaggatccaagcttacgtacgcgtgcatgcgacgtcatagctcttctaagtgtcacctaaattcaattcactggccgtcgttttacaacgtcgtgactgggaaaacctggcgttacccaacttaatcgccttgcagcacatccccctttcgccagctggcgtaatacgaagaggcccgcaccgatcgcccttcccaacagttgcgcagcctgaatggcgaatgggcgcgccctgtagcggcgcattaagcgcggcgggtgtggtggttacgcgcagcttgacgcaanacttgcaacngcctaaccgccgctcctttcgcttcctcccttccttctcgccangtcgccggctttccccgtcaagctctaaatcnggggctcccnttaaggttccgatttaatgtttag

SEQ ID NO: 444851 - DNA, 364 bp, Triticum aestivum
atctcacaccttctaagatcaaaccagccactcacagatgatcactgtcagtattttctctaccaagtgctccgaggattgaagtatgtgcattcagcacaggtcttgcaccgggacctcaggccgagcaacctgctgctcaatgccaagtgtgaactcaagattggagattttggcttggctaggaccaccactgagactgacttcatgatggagtatgttgttactcggtggtacagggcaccggaactcctgctcaactgccccgagtacactgcagcaattgatatccggtcagtgggttgcatcctcggtgagattgctacgagggaaccactgtttcctggaaaagattaagttcaac

SEQ ID NO: 444852 - DNA, 339 bp, Triticum aestivum
  unsure (1)..(339): unsure at all n locations
ggcgatgccgatgtccgagacgctccagctcctgcagatggggaaggttcccccaaccgactttgacgcactcatctgcggtagtggcagtgaggtgtactacccgggctcggcacagtgcttggatgcccacgggaagctccagcctgaccaggactacctgcagcacatcaaccaccggtggtctcacgacggcgccaggcagaccatanggaagctcatggcctcacaggacggctccggcaatgtcgtcgagcctgacgtggagtcctgcaatgcgcattgcgtctccttcttcgtcaaggaccctaagaaggtccaaactatcaataaaatccg

SEQ ID NO: 444853 - DNA, 331 bp, Triticum aestivum
ggggacgagactctgatcgaacaactggagggaagtagtttggatggggatgagcccgtgatagaactggaggaaagtaaggaacctgagacagaagtctcagcaaatgtttgatttagctgtaaaggccaagggcgccatctctgattgtagaaggtaccaatactgttcatgtaaatacaaggatggtgctattgtacttgtactcgccgtcctttgcctgatgaagcagaagagctgtccaacaccgccgttccctggggagtcagacaaaacaaaacctgtgaaaacaaaaacttgggggtaacaacctgacaatttgggtttgggg

SEQ ID NO: 444854 - DNA, 129 bp, Triticum aestivum
ccgggccgacggggaaacgagagcgtgcgagaggtatatatgcgagggtgggtgtaaaatgtaaatttgtacgcgtgctgcgtgcatgcttgtaatatttatatcgtgctacgaaaattagtgcattgc

SEQ ID NO: 444855 - DNA, 326 bp, Triticum aestivum
  unsure (1)..(326): unsure at all n locations
atctgacgaggcaatggagagcgtcgagaaccctggctggtgcattgccaaagccgtggggtacctgattctcggtgctaccatttgtgccgcatttgcagacccgctcgttgatgctgtccacaacttctctaacgccacacacatcccgtccttctttgtctcgttcatcggcctcccgctggcaaccaattccagcgaggctgtctcggccatcatcttcgccagcaggaagaagcagaggacttgctcccttactttctcggaggtgtacggcggtgtgaccatgancaacacacggtgcctgggcgtgtccttagcgctca

SEQ ID NO: 444856 - DNA, 189 bp, Triticum aestivum
gggcaaggaagcagtcccgacggttgttctcactgatgaggcggaggaagaaggaagtgaggggcaatatctaaccgacggagagttctcctttccttctctctttgtacttttcgctctgtctagtaggcagtgctgataatgtgtttgagatcaaaatgaaatctctatcattgatagattgagagc

SEQ ID NO: 444857 - DNA, 379 bp, Triticum aestivum
agctggcatagattcatcggccttgacctccatggggacggcatcaaaatcttcctctgatgccttgtttttgcttttggatttcttattgtcatcgtcgtcctcgtaggactcgctcttgcttttagatttcttctcggcatcatcatcctcggacgagtcgcttttttctttggatttcttctcatcatcgtcatcatccttgttttccaatttcttttcgttcttctcatcatcatcgtcatcatccttgtttttcaatttcttctctttcttctcatcatcatcatcattgtcgtcgtcgtcgtccttgcatttagacttgttagctttcttctcatcatcatcatcatcatcatcatccttgtttttggatttc

SEQ ID NO: 444858 - DNA, 386 bp, Triticum aestivum
ggggccgacaagcagtacaacctccacatgccccaggagcgccaccagatcggcccggaccagatcgaggccctctaccagtacgccaagttccagtacgagtgcgggatgtactcggacgccgccgatttcctgtcccagtaccgcgctctgtgcaccaacagcgagaggagcctcagcgccctgtgggggaagctggcggcggagatactgatgcagaactgggatgtcgcgcaggaggagctcaacaggctcaaggagatgattgattccagcagcttcacctcgtcgcctgtcaaccagctccacagcaggatatggctgatgcactggagcctcttcatcttcttcaaccatgagaatggaaggaacgggatcatcgaact

SEQ ID NO: 444859 - DNA, 142 bp, Triticum aestivum
acgacgtgatgtcgcacgtaaagatctcggtctggattatcgaggaagtcatctcatgttcggatacctatagtgcctacttccacacagacgccattcatctacttccacgctcactcatcttgacgcatccttcaggttc

SEQ ID NO: 444860 - DNA, 72 bp, Triticum aestivum
ttagaaattgtaaatatgcattgttgtatcgcgacctgaatgaatgaaataaacgaaataacgctcttgttc

SEQ ID NO: 444861 - DNA, 296 bp, Triticum aestivum
  unsure (1)..(296): unsure at all n locations
agcacaaagagaagaaggacaagaagaaggacggggagcacaagaaggacggcgagcacaagaaggacggggagcacaaggagggcatgatggagaagatcaaggacaagatcagcggcgacggccacggcgacggcaagaaggacggcgagcacaaggagaagaaggacaagaagaagaagaaggacaagaagcacggcgagggccacaaggacgacgacggccacngcagcagcagcagcgacagcgacagcaactgaaccagctcccgccgcgtgcagtgcaagggagatgaa

SEQ ID NO: 444862 - DNA, 56 bp, Triticum aestivum
gacggggttgaccaaaagatttatgtattgaattaattgtataattatatcaccac

SEQ ID NO: 444863 - DNA, 317 bp, Triticum aestivum
ccgggtcgacgggggcctacagctgaacatcctcatgacaattcaacatacccctgccctttcggaaagggaaggtttcccactcatggacacctagctgaatgcctgaacctgaacctcgtttttcttcttcttcttcttcttcttctccttggtaattccttgttgattccttctgggcatgctatattattgggtgcaacaacaaattattgtccttgttttgatttccttcctgtcaagttcatcctttagtgctagtactagtggtacatcagtttgatttaggaaaaacacaagcctctgcttaacattaa

SEQ ID NO: 444864 - DNA, 83 bp, Triticum aestivum
  unsure (1)..(83): unsure at all n locations
tgnncgttgtatctancttggggngaattgccccgnngatttanccncctcctttctgtggttccatttccnacccnngttaa

SEQ ID NO: 444865 - DNA, 155 bp, Triticum aestivum
  unsure (1)..(155): unsure at all n locations
actccctatagtacgtcgtattaagcctcgtcncagtggggtacttggtcctgctgatgtagacttctgtgactcgctcgggtgcgaggctggagggcgtctgcagctccagcaccgtgggggtgtgccaaggtgccggagtttacttggggggt

SEQ ID NO: 444866 - DNA, 407 bp, Triticum aestivum
gtactagtctagaatgcccgggccgacggggatgatattgatatggcagtttcatgcttccccgaaatgctggaaagaagaagtggcaatcaggttggtagcgctcttgaggtgcttgtgtatgggctgtgcaggaagaaagaagcaaaggaagcgttcaaagttctgaaggacctggtgttggaaaaggatgtggttccttggcaaagtacctacaagtatttgatccacaagttgatccgccaagggcatcttaaagaagcatttgatgtgctaggtttaatgaaaagtaatggatttccgccttatatcaatccatttatcacacacattttgaaatctggtactgtggacgatgccctgggtctgctaaacgcaatgtcttcagaggagttcccatcaagaac

SEQ ID NO: 444867 - DNA, 360 bp, Triticum aestivum
ggggggtgaactactccctctttgtcatggagaccgccgggatgatgaagatggcctccgatgatggtttcctcctccggcagggtgtcgaaatgggctctcggttggtttttcgtggctacagaggcttgcggcattttgggatttatcagaatttttggcgtcggattcacatcagggggttctcgagggacccacaagccagggtggcgcacccaggggtagggcgcgcctcccactctagtggttccctccggactcttctggcccaacttcgatgctcctgggcttgttgtggtccataaaaaatcaccgtaaattttcagctcgtttggactccgtttgatattccttttctgt

SEQ ID NO: 444868 - DNA, 371 bp, Triticum aestivum
gggaatcaacaggatcaggtcctaacacatatgttgagactgagacacttgctaaatttgagctgatggatggtgccccagtcagaggagaatctattccagtaaggctattcttgactccatacgagctaaccccgacttaccgcaacataaacaacaagttctgtgtcaagtactacctcaacctggtccttgtggacgaggaagaccggagatacttcaagcagcaagagataaacatgttccgtcttgacgaaactccacagccttcatagacatctatcgctgggaacctggcctgaatcgtgtgttgcaagagttagcaatttggcatcctgttatgctgtatataactctccaggagagcatgc

SEQ ID NO: 444869 - DNA, 279 bp, Triticum aestivum
  unsure (1)..(279): unsure at all n locations
ggtcgacgggtaccttgaagtgtcttttgttttctttcgctaacggagctcacgagtttcctatcttgagttttgtgttgtgaagttttctagttttgggtgaattcttttgatagatcatggtacaaggagtggcaagagcctatagcttcggattcncatggcgcccccaagataatccaaggacaccaaaaattcttgtattatttggggatgcnccgaaattatcncctctttttcgtcaacttccatcggtaatttactttggagctataattt

SEQ ID NO: 444870 - DNA, 273 bp, Triticum aestivum
catcctcattttataaaaaaaaaaatctctcgttcatggttcatgaccacgaaccatgcaagtacaggggtgtggataagcttcggttttcgctccgcttgaagttggacgtgaaagacacccgatgagatagcctcatgtgccggcgagtaccacgcacgttgggtggagttgcataaaagaaaggcaatgtgctaaaggtcttctctattttttttaatactggccttcttctgtttttacattcttccctagtttgataatgcttctttt

SEQ ID NO: 444871 - DNA, 436 bp, Triticum aestivum
  unsure (1)..(436): unsure at all n locations
cgggtcgacgcggataaggatcaatcggtattgcaagcatgtgatattcgtccactccctttgactgttcatcggcccaccttgaaagaagcgaaacgcgtatacaataacctaacacagctctattatgagacggaatgttctattatgggtgaagtcttaccccttgtggaaaatgtgacaaagtttgagcaaagtacagaagcaagggaagagaacagtgtggcccctgaggaacctattttggactcatcagattcgcatgaagcaatggccataccatctaataatgcaacaacaactctccatgaagctgcaaaagctggcaatgttgaacaaactatggaattgctccagcaaggtttggattcntgtatcaaagatgaaagaagaaagacaccttacctgctggcttccgacaaagaagtagaaatac

SEQ ID NO: 444872 - DNA, 360 bp, Triticum aestivum
gggggaggagaagctggcggaggcgaacgagatcgggtacaaggtggtcggcccgctcggcgccgacgagaagcccttcaagccctacgagcccgtcttcgccgtcgtccagattggttcgcaccagttcaaggtgagcaacggcgactccatcttcacggagaggctcaagttctgcgatgtgaatgacaagttagttttagatcgagttctcatgcttggctcacaagctcaaacaataattgggagggcaattcttactgatgctaacggtcatgctgtcgtccaagaacatgctccaaaatgcaaagttaacatattccagaagaaaaggaagaaaaattaacgccgaacaagggg

SEQ ID NO: 444873 - DNA, 386 bp, Triticum aestivum
cgggtcgacgccgaatggaaagtgtgcagaggatgcaaggatggacgcccggggtgcgtcttcgtcgaagcgacgtaatgctggcagtggtctgttcacgatcgccaaacgtatgagaaaataattggcttactcgtagtgtatcatgcctgtctgtcattatagcatgttccgttcaagtttatgtgtagctcacgtttcgacattttgcttggcaaccctgtagtgcatcacttgctactgcttttctatagatctgttcgcgtgcaaaaaacaaaaatacaaacagaaataaaaaaacaaaaaaaaaaaaaaaaaaataaaaaaatccaaaaaaaaaacaaaaaaaaaataaaggaaaaaaaaaaggaccacgtcaagaaaaa

SEQ ID NO: 444874 - DNA, 370 bp, Triticum aestivum
gacggggaacctatgggtctgcacaattacttttcaggttctttatttttattttatatattatttttaccatttcaaaaaagaaatgtaaggacgaaatagaactgccataaactttaagaaattgttagtgtatttcaaaaatgttcaacatgtttttggaaaatgtttcacatgtgttaaaaaattataacgtgtttttgaaaaatgtttgtcttgcgcaaaaaaattttacaccaggtattttaaaacaagttcaacgtgtgtgaaaaagttcttttgtaaattaccctttcacttatacaaacatggttgtcatttttaatcctaaattttacacattaatttcaaatataggcgaaaatattta

SEQ ID NO: 444875 - DNA, 388 bp, Triticum aestivum
gggaacatgtaccagtttgtgattgcttgtaaagtaaagcccataaacacccaaaacgggtaatataatagcatggaacaatcaaaaaaaaaaaaaaaaaaaaaaaaaaaaaaaaaaaaaaaaaaaaaaaaataaacaaaaaaaaaaaaacaatcaaaaaaaaaaaaaaaaaaaaaaatcaacaaaaaaaaaaaaaaaaaaataaaaaaaataaaaaaaaaaaataagggctacccaaattgactcaactttaaattcctctgattaatacatcctgcgctccttacataatactccaaatctattaacaacactgtcattgaaaaaatgtatcataggaaaacacctgcatttcgaaaacttaaacccattttaaaaaccacccttt

SEQ ID NO: 444876 - DNA, 308 bp, Triticum aestivum
atctcgaagcatctcgggctcctcgcagaacaccttccccgacatcgatttcaccgaggagggcgggatctccggcgccgggcctagcagccccaagtcgctccggtgccttgcagagccgaaagtggtcaggaagatgagggtggtcgccgagaagactccgattcagcacgtccttcagccgccgaacatcgcctccttgctcgccatcatcatcggcatggtccccgtgctcaaggccttcgtgtttggggctgatgcgccgctctccctctttcacgacagtttggagaatctccctgctgctg

SEQ ID NO: 444877 - DNA, 74 bp, Triticum aestivum
taggaattgtaaatatgcattgttgtatcgcgacctgaatgaatggaataaacgaaataacgctgttgttcaca

SEQ ID NO: 444878 - DNA, 86 bp, Triticum aestivum
gacgggttccaaaaaaataataaaaagaattcaaaaaagtaaaaaaagaaaaatgaataagcagcagctccatgtgaatgaaccat

SEQ ID NO: 444879 - DNA, 253 bp, Triticum aestivum
gacgggggatataacgaacacaatcgttcgctagcttctaccgttctataaccaactactcttgctccaatctggtatctgtctctatccggttccgtaagactgctggataccagatcccccactcccagcgagtatcctggtctcatctcacattcatctcgcctaagccgtcttctctccatccactactgacgattactgcgggacagcgtggcagcaactcattcgatgtcgtccggcgctcatcctc

SEQ ID NO: 444880 - DNA, 617 bp, Triticum aestivum
  unsure (1)..(617): unsure at all n locations
gtnggngnggnnnanggtgttttattnttttggcccctngggggctcccnngggtttacaanagntcccaagaagnanantttcccccggggggggntcccggaaacgaggggtaaacnggnccntattatatntccngcatcccnttacncatncncttgccacattccctatttccaaaaaccttaacnaatgggacgatttggctttncaggaacttganttggcgactggccactggcgcnaaaaaggggcacaaanggggaaaggaattcngctacngactnatcacgggtgcacacnggttcgggttggctcatntcttagcgatcctggttnatnggcctncaaanancatctctcacgtntcagccttttctccaatngattcgtcnaantttctgagcgggcgggtggcgaggacttgctcacggnttcttgttgcnctgtnaacgnatctgatttcgggtgtncngttggcnttctcttggnattcgctgtactgtttctctncgtctcntgtctntattctgatgttatanctgttctttnatctaattgtgatgganttgtttaaanttatncnggaattggcnttccanttatnngttggttaa

SEQ ID NO: 444881 - DNA, 479 bp, Triticum aestivum
  unsure (1)..(479): unsure at all n locations
ggnngnaattcnactctnnccgntcggtacanagtctccnaattcccgggcccgacggggattgttgggaccacaaaaaaaaaaaaaaaaaaaaaaaaaaaaaaaaaaaaaaaaaaaaaaaaaaaaaaaaaaaaaaaaaaaaaaaaaaaaaaaaaaaaaaaaaaaaaaaaaaaaaaaaaaaaaaaaaaaaaaaannggccncccaaaaggntcaaaccttacttacncttgnatgcanttnanaccncttcnaaattntcnccnaanttcatttnacngnccttctttttanaactcttaacgggaaaanccntggntttnccnaatttaanccccttgcannaaatccccnttcccaanctggcttaataccaaaaaggcccnnacnnttncccnttccnaaaatttncccacccaaatggcnaatggggaacccccctttacngggcccttaanccccnggngnttttgngtttnnc

SEQ ID NO: 444882 - DNA, 471 bp, Triticum aestivum
  unsure (1)..(471): unsure at all n locations
ggnngaattntactnngcaggccggtaaagtcacagaattcccgggctctagaggatccancttacgtacgcgtgcatgcgacgtcatagctcttctatagtgtcacctaaattcaatcactggccgtcgttttacaacgtcgtgactgggaaaaccctggcgttacccaacttaatgccttgcagcacatccccctttcgccagctggcgtaatagcgaagaggcccgcaccgatgcccttcccaacagttgcgcagcctgaatggcgaatgggacgcgccctgtagcggcgcataagcgcggcgggtgtggtggttacgcgcagcgtgaccgctacacttgccagcgccctacgcccgctcctttcgctttcttcccttcctttctcgccacgttcgccggctttccccgtaagctctaaatccggggggncccttaagggttccgattaagtgctttacggcacctca

SEQ ID NO: 444883 - DNA, 298 bp, Triticum aestivum
cgcatctcatctaattcctggatatgtttgcgtctatggcgttctccatggaatcacgagtcgtaagcagcaagtaggaatctatcatcaaagggcttaacagagactgattttaccacaggtgtatagacgttattagtcagtggacagggtctactaagtggtattggatcatgcttgcataggtatcacattactctcaacatagacagcatatgtattgatactaaaatgcacaggaacagtacgtgttaccttaaccttgctgctgttattgaaatattggatgtagtaaaga

SEQ ID NO: 444884 - DNA, 486 bp, Triticum aestivum
  unsure (1)..(486): unsure at all n locations
gngngnacgtttntcttccgttcggtaatnaanaaacgggtcgangagctcactaatcgcngccgctctagaggatccaagcttacgtacgcgtgcatgcgacgtcatagctcttctaagtgtcacctaaattcaattcactggccgtcgttttacaacgtcgtgactgggaaaacctggcgttacccaacttaatcgccttgcagcacatccccctttcgccagctggcgtaatacgaagaagcccgcancgatngcccttcccaacagttgcgcaacctgaatggcgaatgggcgcgccctgtaacggcgcaataagccccggcnggtttngtggttacgcccaaccgtnaacgctacaattgccaacgccctaacgcccgctcctttcgctttcctccctttctttctcgcaagttcgccggntttccccgtnaaagctctaaatccggggnccccnttanggttccaatantgctttacggg

SEQ ID NO: 444885 - DNA, 237 bp, Triticum aestivum
  unsure (1)..(237): unsure at all n locations
tcancnanttnnaacnnctnnccaaaantggcccnccaanttttattncanggggnnggtttttaaaaatnccccttcngggaaaaaccccgggggttaaccaaaattttaacnccctnggnaaaaaanccccctttttcccnancggggggtaatcccaaaaagggcccnccctttccccttccnaaaaantntccaacccccaaaagngncaaaggggaanccccccntttncgg

SEQ ID NO: 444886 - DNA, 275 bp, Triticum aestivum
ccgggccgacggggtccgtcaagaatggcggcgccatgaccgagaccagcagatgaattccagccggtcgatgccttacattgttcgtgatcggaattcagaggaggactctgttgctgagttgctgctgattacaattcagaagaggacactgttgctagctgttggcatcacagagccacaggcgtgcctgcactgtatatcgtcatcggctaggaataggatggccgggaaaatatctggtgataccggagctaaaatgctcccatgatacg

SEQ ID NO: 444887 - DNA, 359 bp, Triticum aestivum
gggaacaccatctgcgtcgccgccatcctcggctccacactcaacggcgagttcgaggacgtcaagatgctcaacgacctcctcgtcgccaagaatgcagagacagggtgggacacgccgattcacgtggacgcggccagcggcgggttcatcgcgcccttcatctacccggagctggagtgggacttccggctgccgctggtgaagagcatcaacgtcagcggccacaagtacggcctcgtctatgccggcgtcgggtggatcatttggaggaacaaggaggacctgcccgacgagctcatcttccacatcaactacctcggcgccgaccaaccaaccttcacgctcaacttctccaa

SEQ ID NO: 444888 - DNA, 55 bp, Triticum aestivum
gggtcgacggcgaggagaatgatgaatgggctgatatgccgctttgtctcaacca

SEQ ID NO: 444889 - DNA, 287 bp, Triticum aestivum
tcgacggggatgaatacaaatatagaaaaaaagttctgtaataatgttggaacaatgaaagtatttaatgattgtcttccttatgaatggtggactgagacgaacgatggtcttttcctaaaaatctatccccctagggggtatgcgcgtactactttgtttcaatgactaggagatttttggagttaagtatgtcagttctttatcactaatgtttagtccacggattatacgcactcacactcttccatcagtgctattctttcaagttccgggcaaggtaaaac

SEQ ID NO: 444890 - DNA, 106 bp, Triticum aestivum
ccggcgggaggttcacgggagagaagcgacggagttagaagttgtaaatatgcattgttgtatcgcgacctgaatgaatgaaataaacgaaataacgctcttgtgc

SEQ ID NO: 444891 - DNA, 189 bp, Triticum aestivum
ttgctagtcgtgtagacaggatgggttttgttttcttatgttactacttttggttacagcgggagcggggtgagagagacgatgaagatgccttcagttcttgatcaatgtgaacctctagaatttattaaacatatacatatttgatattttgattaaaaaatgcatgctgcagctgttggtaatgtt

SEQ ID NO: 444892 - DNA, 484 bp, Triticum aestivum
  unsure (1)..(484): unsure at all n locations
gnnngntggnnnnngnaattttacgctngncggtnccggtcanaaattcangggccctaangatccaagcttacgtacgcgtgcatgcgacgtcatagctcttctatagtgtcacctaattcaattcactggccgtcgttttacaacgtcgtgactgggaaaaccctggcgttacccacttaatcgccttgcagcacatccccctttcgccagctggcgtaatagcgaagaggccccaccgatcgcccttcccaacagttgcgcagcctgaatggcgaatgggacgcgccctgtacggcgcattaagcgcggcgggtgtggtggttacgcgcagcgtgaccgctacacttgccagcgccctagcgcccgctcctttcgctttcttcccttcctttctcgccacgttcgccggcttccccgtcaagctctaaatcgggggctccctttaaggttccgatttantgctttacggactcnaacccaa

SEQ ID NO: 444893 - DNA, 388 bp, Triticum aestivum
gaggggaggtaagcgagctgcgtccgccacgccgccaactcgctctccggcggctcgctcgtcccggcgtccttggccactcccttgcctctgctggtcttgggtgccatggcggctgcgggcagcaagggacagaagacatcgaagacacagcggcggtgagcaaaggcgaagacttacgaaggaaggagaatgggatggcggttccgagattggggaaggcacggagggtaaatgagcagcgtgcccgcggttattcctctttacggggaaggcgcgggccgcctcttttcccattaactgcgacatgacgcatgcgtgtgagaaccgccccacgcatgacccccacatcatgctcaaccctccacgtcgcgcgttcaacgcgggt

SEQ ID NO: 444894 - DNA, 386 bp, Triticum aestivum
aaccatattttaatctctcataataattacatgtaggaccataataaaattcaacaatgtagccatcatataaaatcttctcttcatgatccacatgcataaaagttttataatcttccaaaatagtgggattaacatcaaacccactttcataaaaagtttcataagattgaacactctccaaatatgtgggattacttttacctaaagttgacgctcttccaaccccactttcaatattaatgcaaacattattatcaatagcatattcatcatgaggcataaacaatttttcaagatcataagaaacgtgatcacttcaatcatgatcattgcaataagtagtggacatatcaaaattagcatccccaagcttggggttttgc

SEQ ID NO: 444895 - DNA, 490 bp, Triticum aestivum
  unsure (1)..(490): unsure at all n locations
ggttgngaaatntcnccgttnnggcctgtcttcacacttnaaggccaggccctncaaaacctaaattacgtacgcgtgcatgcgacgtcatagctcttctatagtgtcanctaaattcattcactggccgtcgttttacancgtcgtgactgggaaaaccctggcgttanncaacttatcgccttgcagcacatccccctttcgccagctggcgtaatancnaagaggcccgcaccatngcccttcccancagttgcgcagcctgaatggcgantgggacgcgccctgtngcggccattaagcgcggcgggtgtggtggttangcgcangcntgaccgctacacttgncaagcncctancgccngctccnttcgctttcttcnnttcctttctcgnnanngttcgtcggctttcccgtcnaggctctnnctggtggggggtcccttnngnggntttggatttagtggttttatggganttttngtcnctt

SEQ ID NO: 444896 - DNA, 382 bp, Triticum aestivum
gggggcggcaaccctggacctcgacttcgacgacatccagcgcgaccgcgagtgcgtcatgtgcctgagcgaggagatgtcggtggtgttcctcccctgtgcccaccaggtggtctgcgccaagtgcaacgacctccacgacaagcaggggatgaaggagtgcccgtcgtgccggaccctcatccagcgcagggtctgcgcccgcaccgtgggctgctgagtgagaagagagagattttgcgttcgcgtcgccgtcgctataccgtttttccttttctttttgatgattgcccagcttgaatttgatggagattggaaaaaagaataacgagtgtcggtcggacgaataacgcttggtcgagacatcgtacaccccccaaag

SEQ ID NO: 444897 - DNA, 395 bp, Triticum aestivum
gggggacggcacagatggcgagcgacggcgcggtgaccacgcccgcgaaggtgaccccgaagaaggccaacctccttgacccccactccatcaaacacctcctcgacgagaccgtcgccgaggtcgtgaagggcaagggctatgtggagaacacgcggctgggcaactggaagctcctgatcgggacggccgtgatcgccatcgcgctcctcgcgcagttctacccgaagaagttcccgcagaaccgcgagttcctgctcggttgcatcgcgctgtatgtggtgatgaacgtggtgctactgatccttagctataccaaggaaaaggatgccatcatcttcacccaccctcctgctggttctttcaataacactggccttgttatatcttcaaag

SEQ ID NO: 444898 - DNA, 402 bp, Triticum aestivum
  unsure (1)..(402): unsure at all n locations
ggggaatacaacttggaactcctgcaatagagaagacaacactaaaggtaattgtgtgaggtgttagttttaggtgcctcgtccttgcacaagaggaaatagtgcataacacttgatgggttctcacacacttctctcatctcatttttggtggcaaatagtactaagtttttcttgtcgctcatcatggaggcactcaattttggcttgtggcactcactctatttgtggtggctcgctttctcacttttctctccacgatgggtggcttgcttgtcggcgatcacttgacttggtgacatangtcgtagcacgtactcctttcccttcatcttgaagctatagtgattggttcgcccattgtagatgacgcattggtcaaatttccatgatcgtccaaga

SEQ ID NO: 444899 - DNA, 300 bp, Triticum aestivum
cggatctgcacagaggactctgatggttggtatagaaaattttctgactggggatcaaggataatgttgctactggagcagtttgtacaatttttgaccttctttactgaacattcgggaatagggatgccaccctggatgcatctctagatctgtggatgtatgtgtgtaatcatcactgtatttagggtttgaggcgctaatttagatgttcgttaccttgatgttcgatggagaacaaattactatttctgaaatggcggtcaatacacagagcccttcagtgttaacaaagaatac

SEQ ID NO: 444900 - DNA, 412 bp, Triticum aestivum
ccgggtcgacgcgaagtgacaggaaaatagctcaacagcatagccaaaaatatataatactcctatacatgcatatattcatagtgtgatataactacatgcataggaaacaataggtaaaggatgatcaacatgtaacttgccttggttctggttcataaagtcacactcctgacaatagctcgcgtcgtactccggaaaatctacacgtttcacacaattcaacaaatcaatcaccgaaacacgaatagaaccaaaacaaaaccaacagcaagaaaaccattttttaaactcaacaacagaatcttaacagcacctaaattgctctatggtcacaatgcaaaaggaatcactaaatttcgttaaacggttgggaagttacggcctcggaagatttgattaaaatccgaac

SEQ ID NO: 444901 - DNA, 109 bp, Triticum aestivum
aattcccgggccgacgggaggttcaagggagagaagcgacggagttagaagttgtaaatatgcattgttgtatcgcgacctgaatgaaataaacgaaataatgctcttg

SEQ ID NO: 444902 - DNA, 406 bp, Triticum aestivum
  unsure (1)..(406): unsure at all n locations
ttgaactttatgttcatgcccatggacacgatgtcgatcctatcatgaaacttcttgtaataataactattttcttgatataatatccattggtatcggtgaattgatcctttgcaattgtggttccgaccatatgttcttctttgattccatatggaacactgctacgatagcataggtatgactatcttgattctgtcataaaatcgtcatcgatgtacatgcatgatagaaaacgtgacctactgtgacaaacacgtatcatcacggaagtgtatttttttgtagtggaagaggtagcacacgtctccggggtgtgggccccctcatagacggtgccgccgcaggcacctagaggggggaaatagccgcatcaggtctacgcggagggatcntgctatgggtt

SEQ ID NO: 444903 - DNA, 276 bp, Triticum aestivum
gggttgagctataatgtcatatgctcggaggttgtcaaatgtcaccctcaagtcgtctactagagtttcgacgtgcttggtcttgacgaccacatcgtctatgtatgcctctactgttttgcctatctgggtagctagacatgtctgaatcatgcgctgatatgttgtgccggcgtttttgagtccgaagggcattgtgttgaagcagaatggcccatatggagtaatgaatgccgttgtggcctggtctttttctgccatcttgatttgatggcg

SEQ ID NO: 444904 - DNA, 413 bp, Triticum aestivum
  unsure (1)..(413): unsure at all n locations
gtcgacgggcaaggcggagcagggatggccggcggtcgatgaagatggccgggaccagacggatctgactggagatggtggccggcaggctggagctccttgcagcttccatggcatactcttgcgaagaatagagagggcgggagatactagagtgagaaagaaaagaggaaccaagggaggaaggggacaggaagagaagggaggcgaggccggcctgggggagctggtcgccggcacgacgtccggttgagggagaggcggcgggatcgacgcgcgggcgcagaagctcatgtgcgtgctcgcacacgagcgtgaggctctttcctcggttggttcctagaggcagcgcaaggacgaggtangggattgcgcgagggacttggcggcggggctgggctgaaactgctgct

SEQ ID NO: 444905 - DNA, 60 bp, Triticum aestivum
ggggtgatttcacataagcaaatgcaatacagttgatgagattgcgccgctttttagttc

SEQ ID NO: 444906 - DNA, 419 bp, Triticum aestivum
attcacgggtcgacggctacttgaaatctcatttatggtagtgtgcattaatttgtaagatttaacttgcaaatcatgacattgctcgcaaccttttggaatgtatttggatatcactgaatatcaattatttcttcataaattaattatttaaattcaagacttgcttgcgctataggatcccttcaacatggtacaagttgcatgatacctcgtgatctcattgtttatcagttcatttcctgttaattagttaaatatcttagttatcgctctaccttaacagtacgctgctacagcctacaaattgtgataatctgtttgttccacataatacacttacacttctgaatcatcgcttgttacaaatattttaaggcatgcgatctaattcttgattgttttgcagcttactaaaa

SEQ ID NO: 444907 - DNA, 477 bp, Triticum aestivum
  unsure (1)..(477): unsure at all n locations
ggtnngngnaattctacgccnctcggtgccggtcngnnattaacgggtcgacgagctcataaacggcgagccgctctagaggatccaagcttacgtacgcgtgcatgcgacgtcatagtcttctatagtgtcacctaaattcaattcactggccgtcgttttacaacgtcgtgactggaaaaccctggcgttacccaacttaatcgccttgcagcacatccccctttcgccagctgcgtaatagcgaagaggcccgcaccgatcgcccttcccaacagttgcgcagcctgaatgggaatgggacgcgccctgtagcggcgcattaagcgcggcgggtgtggtggttacgcgcaggtgaccgctacacttgccagcgccctagcgcccgctcctttcgctttcttcccttccttctcgccacgttcgccggctttccccgtcaagctctaaaatcgggggctccctttaagggccnaa

SEQ ID NO: 444908 - DNA, 306 bp, Triticum aestivum
ggtcgaaaattcacgggtcgacggcgggggtggcggcgccgaagacatgaacgacgatgattgatcgtagcagcctcatagcactcttcacttgaaacaagggcgtccttttgacccccgcaacaatagctctcttgtacataggcactctccggtccaggatagttgagtggtgatagtggtgttggtgtaaatgtttgctgtgggtaaaatgcgttcatctgatactatggtttacacatccctgttcttggccaaagaaagaaagaagacgacgatgaaatcgagcggtttcgcgtgtttttg

SEQ ID NO: 444909 - DNA, 394 bp, Triticum aestivum
cggcgtcggccaacgcttacgacttgatgacggtgcggggctgatagtagatggtgtaaggggccaaatatatggcccatttggccactcggcccgaagcatctcggcttccaatgatctcggcaagcggtgcattgcagacaacagtgattgggtgctcctgaaaagagtaaaatgcatccgtgggcatcgaacttgtgtcgaaagctcactttggtcattgtacttaagaatacgatcaatatggtcattatatacgacttggggtgattatacagtcactgcctcactgtatagctctgtattttgctctgttgactggtcaaacatcacaattcacaacaccctctctctatcctatgagggtcccacttgtcagttgacctctggcata

SEQ ID NO: 444910 - DNA, 410 bp, Triticum aestivum
gggtcgacgcgggagtggagttgagacttgttgagttttgatgtttggagtgggcttgacccttgatagatgtattgggttttgcttggttttctgtaattaactgggcaacaatcttcttaattaatagaactggtaaagcttttgcccgtgtttaaaaaaaaaaaaaaaaaaaaaaaaaaaaaaaaaaaaaaaaaaaaaaaaaaaaaaaaaaaaaaaaaaaaaaaaaaaaaaaaaaaaaaaaaaaaaaaaaaaaaaaaaaaaaaaaaaaaaaaaaaaaaaaaaaaaaaaaaaaaaaaaaaaaaaaaaaaaaaaaaaaaaaaaaaaaaaaaaaaaaaaaggcgccccccaaaaggatcaaaactttatagcggctaaacaaaaataaaaacccttctaaaagagccccc

SEQ ID NO: 444911 - DNA, 410 bp, Triticum aestivum
gggtcgacgggggaacccggacgaatgcaagttttgaaaacatgatgatgcaatgcaaatgatgacatgataagatgcaacacgcaagtagaatgacaaggcaacaacagcgaataactggaggacacctggcacatcggtctcggggcgttacattcaagtacaagttccagaaggccgttcttgccaacttctaaacccatagagttttcttttgaagcacccacctggagtctaggcaagaccatggcagcccacattaccatgggacgcattggagaggtctacaacagggagcttaaggacattatctaccaagtatgtgggcgccgagacgagcaatgggaagtaatcagcaccaggaaggatagatccattgtagctttcatccaggagttaaaccagcacat

SEQ ID NO: 444912 - DNA, 383 bp, Triticum aestivum
  unsure (1)..(383): unsure at all n locations
taagcacatagaaagctggtcatatgtacttctggggtgtagaagaattcacgtgtaatttacgctccgataccctgtttgtttaaatggtttgttgttatcacctgtagcattagtaatgtttgcatgttcatagatagacaactgtcaggtttatatganggacatcgtctttttaacttatatatgtgttggaatcattttgcttacatcaaagaaattttcagaattttaaattatgttaacacaataaaacaaattgttaaggtcaatataaaaaatgttgatggcattcaaaaaatgtttgtgacatttaaaatgtttaacacctattaaaaaaatggtcaaacacatatatttgcaaattgttagtcttgtatttt

SEQ ID NO: 444913 - DNA, 479 bp, Triticum aestivum
  unsure (1)..(479): unsure at all n locations
tggngnngnnnngttattctccgcggtcggtacaggtcagaaattcccgggccgacgagtcactaatcggcggccgctctagaggatccaagcttacgtacgcgtgcatgcgacgtcaagctcttctatagtgtcacctaaattcaattcactggccgtcgttttacaacgtcgtgatgggaaaaccctggcgttacccaacttaatcgccttgcagcacatccccctttcgccagtggcgtaatagcgaagaggcccgcaccgatcgcccttcccaacagttgcgcagcctgaaggcgaatgggacgcgccctgtagcggcgcattaagcgcggcgggtgtggtggttacgcgagcgtgaccgctacacttgccagcgccctagcgcccgctcctttcgctttcttcccttctttctcgccacgttcgccggctttccccgtcaagctcnaaatccgggggtncctttaaggttcgat

SEQ ID NO: 444914 - DNA, 399 bp, Triticum aestivum
gggcatgagaatttggagctcgactcgaagacgcgagcgtccgagctttctgtggcccttaaaactgccatatccgccaaggccgaagcccagaaggccctccaggaattggatgcggtgaaaaagacagcggcgagtaaggcattctctatggaaagcagacatataaaagtaaactacttgttacttacccgaatccggagctctccaggggcattcgcagatcttccccgcagcgtatccgatgccgccgcattctaccgagccacggaaggcaccttgacggagaaggtgttctggtctcagtacgctgaggccggacaccctgtgcccttgagcgaccagctgaagcagctggtcgagctccacaaggcggccaaacaggccctgaagggtttc

SEQ ID NO: 444915 - DNA, 417 bp, Triticum aestivum
ggggaaccttggaagcagcccctcccaaaggacgatgacactattgtcattgagatctcacaccaaggccaggtgaccatgctagcaaacgaaccctgcaagtcaatgagcctcagtgacccgttgtcgtcacacggccacaacgaccacagtgacgaacacaagaacgacgtggatgacgaggagtgggaggatggcaggaggaagtttggggctgcggagaccttcaagctccctgatgagatcgacattgctcatctcagctgagctgcatatccattcttatgacaaagatcatatcttgccggttcacaatatttgtccagtaaagtgatatcactatatgcaaatagcttcatgcaaaaccctgtatagctggagtttagtgaaccaagcgcggaacaactaattttaatt

SEQ ID NO: 444916 - DNA, 423 bp, Triticum aestivum
ggtcgacggccaggccaaccccacacccgagcccggtgagtatgtcgtctttgtatcccacctccgtcggggtttaggcttcccgacggatccttttgtgagagggatcatgttttactatgggttggaattccacgacttggctccggagtccatcctccatattttcgcgtttattgttgtctgcgaagccttcctccgtgtcaccccccacttcggcctgtggctgaagaccttcaatgtggagccgaagatgatcggggggtgtcaagcagagtgcggcggggcggccgtaagcaagagggctgatgcctcgtggcccgagggctccttccaagaggagctcggcttgtggttctatatcaccgctccgaagagcagcaggtagaagccgctgcctccattccgctcgggaactccacg

SEQ ID NO: 444917 - DNA, 409 bp, Triticum aestivum
gggtcgacgcggacaaaaatttctacatgtgtgaaatcagcaaagattttacaatagatgcaacttttaaaggaaacacttcacgttttctaaaccatagttgtgatcccaactgtaaactagaaaagtggcaagttgagggtgagacaagagttggtgtttttgcctctcgtttcattgaagttggagagcccttaacttatgactacaggtttgtgcattttggcgagaaggttaagtgccattgcggagcaaagagttgccaaggatacttgggcagccaactaaagaatccaacacagaacgctcttgcggctgcggcgcttgagaataagttgctcgtgcaacagggcggctgctctccttcaagggtcaaaacagagactcgcctgttaccctggaccaactg

SEQ ID NO: 444918 - DNA, 227 bp, Triticum aestivum
ggggtacacaaagttcttcatggtttatggagcggaagtggttcttcctagtgacatctgtcatgactcaccccgtgtagcggcatatgtcgaagctgacaatgagaaggcacagcaggaagctcttgacctgttagatgaagagcgtgaaatggcagcagcccgttcggcgatttatcaacaagatctgcacagacaacagagaaaagtggaactaaacacaaaaa

SEQ ID NO: 444919 - DNA, 481 bp, Triticum aestivum
  unsure (1)..(481): unsure at all n locations
gnnggtgngngtttantctacncgttcggtacaggtcngtnaattcccgggccgacgagtcactaatcggcggccgctctagaggatccaagcttacgtacgcgtgcatgcgacgtcaagctcttctatagtgtcacctaaattcaattcactggccgtcgttttacaacgtcgtgatgggaaaaccctggcgttacccaacttaatcgccttgcagcacatccccctttcgccagtggcgtaatagcgaagaggcccgcaccgatcgcccttcccaacagttgcgcagcctgaaggcgaatgggacgcgccctgtagcggcgcattaagcgcggcgggtgtggtggttacgcgagcgtgaccgctacacttgccagcgccctagcgcccgctcctttcgctttcttcccttctttctcgccacgttcgccggctttccccgtcaaagctccaaatccgggggtccccttaaggttccnat

SEQ ID NO: 444920 - DNA, 402 bp, Triticum aestivum
  unsure (1)..(402): unsure at all n locations
ggagtgtccctgtgctatggagttcatctacgtcgttcttccggtgccgtgtagttcgtgcgatcgaggccccgtcatgttcattaaatactgtacatactgtctagtagcaccgtgtgtgcggcttggcctcgaatctcgatgtaatataagacctatgtaattcgctagcatcaataaagcggttgtttctataccatgttgttgtgtattgccagaagacttgatctccgggctggcaatgcaaggtaaaccggttgctctgagccggggtgccacatccccataaagctaaatgtggtcgcactgagaataactcgattcagtggcaccatgactcgattaacattatattcaagtgggattattatcaggtttaacttgaaaataaaatcanccaag

SEQ ID NO: 444921 - DNA, 482 bp, Triticum aestivum
  unsure (1)..(482): unsure at all n locations
tggngnngnagnttantntgcccggtcggtacangtcacaaattcccgggncgacggggaaaaaaaaaaaaaaaaaaaaaaaaaaaaagcggccgctctagaggatccaagcttacgtcgcgtgcatgcgacgtcatagctcttctatagtgtcacctaaattcaattcactggccgcgttttacaacgtcgtgactgggaaaaccctggcgttacccaacttaatcgccttgcagacatccccctttcgccagctggcgtaatagcgaagaggcccgcaccgatcgcccttcccacagttgcgcagcctgaatggcgaatgggacgcgccctgtagcggcgcattaagcgcgggggtgtggtggttacgcgcagcgtgaccgctacacttgccagcgccctagcgcccgctctttcgctttcttcccttcctttctcgcaagttcgncggntttccccgtnaagncccaaancggggggcc

SEQ ID NO: 444922 - DNA, 204 bp, Triticum aestivum
ctccagttatattaccattctcatcgggattaggtagaagatctgccagcccctctgttcatatcacgaatatgtatggctagataggatctccctgccgcaaacctcaatttagtttaaaactctcagtctcttcagtattaaagtgattcctgtactttagcgatggtacacattgcatagttaactttacccatttctctt

SEQ ID NO: 444923 - DNA, 478 bp, Triticum aestivum
  unsure (1)..(478): unsure at all n locations
gnnngnngnaatttacgttggcgggcccggtcaagaataaccgggtcgacgagctcactntcggnggccgctctagaggatccaagcttacgtacgcgtgcatgcgacgtcatagctctctatagtgtcacctaaattcaattcactggccgtcgttttacaacgtcgtgactgggaaaccctggcgttacccaacttaatcgccttgcagcacatccccctttcgccagctggcgaatagcgaagaggcccgcaccgatcgcccttcccaacagttgcgcagcctgaatggcgatgggacgcgccctgtagcggcgcattaagcgcggcgggtgtggtggttacgcgcagcgtaccgctacacttgccaagcgccctagcgcccgctcctttcgctttcttcccttcctttccgccaagttcgccggntttccccgtcaaactctaaatcggggggcccccttaagggttcaattaa

SEQ ID NO: 444924 - DNA, 192 bp, Triticum aestivum
gggtattaggcagccaggcccggctgatccctggaggatggaacgccgatcgatcgattggccgatctgttggtttcttgcgtccttcaattggttgtgtacatatagttttaacgtctgattcagggttggcaccgccatgtagaccatcgatcgttttagatctctacctattgattgattctttcttcg

SEQ ID NO: 444925 - DNA, 262 bp, Triticum aestivum
gggtcgacggcggagaacaaagacaagtagggcattgctgtttgcaaaggagatatacattctccttagccttaagttgcatcgtcagattttagttaatgaactttattcgtggaattttgtttccattctcagggataatgctgtttaaacctctgcaagttcgtgtcacttgcatgttgggattctcagagccataaaacaaaaggaaattttgaacccaattagtttctgttttggcatcagttaatggttgggcaag

SEQ ID NO: 444926 - DNA, 404 bp, Triticum aestivum
gggtcggaatcggtttgactccccttgtagttttttcttttcttgattgcttcttcagatccgacttgtgctagtagcacttgatatcttcttttcacgtacatagcaagcggggatcaaactctgtagcttaccatgatgagtactagtacttcttgataatttggtatgggctagctgactagctcagtcttcacgcggccggttcagacggcgcaacagacacgggtggcttagcttggagcaggcgaccgcgacccaacatgcaacaagagtcacccgagtccgtgctcacgcccggtcccttctccaagtcgcggccggtttgaccaatccattccagtcgtggttgatctctgattttgtgcttgactgtacgcgcgtggattcgatcgacagcgtgt

SEQ ID NO: 444927 - DNA, 254 bp, Triticum aestivum
cggcgacggcgaccacctcctcctagtctcagatcagtgggttcccgacactaccagcgggcataggaaacaataatgaaagcaccgatgcattggttgtaatattggatctttcaaaaaaatgaaataatacgatacttataggaagataacatggattccacagctttggccggaaaaaaaaaaaaaaaaaaaaaaaaaaaaaaaaaggacgcacaaaaagataaaaccttaacataaacgtaaataccact

SEQ ID NO: 444928 - DNA, 358 bp, Triticum aestivum
ggcagagacagcagcagaagcagagcaccccgaggatcccggtctgggcgtggtagctgctctccggcgaccaagccgaacgtatgattttcagcagcagttgatgaacaaaagctcgatgatgagttgggcagtctagatccagctgagggaagcttgggtcgccggttcgacgggacgaccaccgccagcagcaggcggcaaacctgctgcatcttatgctgtctctgaaccgcagggatgggttctcatccttttgatctccgaagatggagactaagagttaaattttgcgtgtgaattatcgctggttttttgttcttgtgtcgcgtaaggtgtaccatagcctgtcgatatg

SEQ ID NO: 444929 - DNA, 388 bp, Triticum aestivum
gggacggtttatactatacatctattttgctgatccgacatgccacaggtcccgaggcatcgattcgtggatgtttgtgatattcccatcgtgtgaaaaccaaaggcatgttcatctactagtactactgacgtggaggcagtacctactaaagtactatatttcatatttataaatccttcaatggctgttgagcactacatctactgatccatcaagccatcacgtcaaggcgtgtgccgatctcaacacagagatcaaggaatactacagatacaagatcagatcaacatgggtctccagaccagcgatgacccggacacggattaattaaaccaaccatgatgtggaggaagactcggattggactcggattctgacatctctg

SEQ ID NO: 444930 - DNA, 364 bp, Triticum aestivum
gggctatccgagaaggtctccaagatgcatgcctagtgcagcaacaacgacggaagtcggcaccacatttctcatttctgtcaggtacaccggatgctgatagcaaagcagtgcactgcaagttggagatggtttagcgagtgcatgttcctgtcaagcgtcgttgctgcacgcaggggctggccctgcatggattgatgtatttttacactcaagctcgcaatgtaacaccgagatttgttgttctctagcatctactactatacgtgattgcaacgaacggaccaagacatctgatgaacacttgtcatgtttccctgtcgaacatccttaatatatcaagaagcgttgctgctctgtatct

SEQ ID NO: 444931 - DNA, 340 bp, Triticum aestivum
acgggttaccctagaatgccacctccaagtacctttacaggaacatgatcacccagcaaatttcataggtaagtatcaacaaaattgtaactgcacatgtactgccaactgaatcaatacagacattaccaggctacgacgataacgatggtcgccgtagcctctgtgagccatggacggcaactcgagtcagctcattatctacgactgtggtacttctgcgcttggcgtcaacttctgggaagcggatccgagaccgtggaatactatgcccgggaagaggctccgtgtacgactactactgtggaccggctccattgcatcatacaaggtcgtcgat

SEQ ID NO: 444932 - DNA, 385 bp, Triticum aestivum
ggggacgcgaggatagttagttcatcggaagtagtagtagttttcttcattggtacgttaaataaagagtttagtttcgtatttacacaatttaaaatgattgttatggagagaataagaaaaccactccactatatattagtcgtatacacgagtactatatggacgcagcttcattgactttagtgcacttgcctttgggtttatgataggtgggcccaaaatgtggctggcccacctgtcatacagccaaaagcaggtgcagttaagacactggagctcagtccgtactacagtatatatataagctggagcctcagcacttgttctctagggtttgcactctccacactctcgctgcactacatatatatatacacgctgg

SEQ ID NO: 444933 - DNA, 407 bp, Triticum aestivum
gggggtgcccataaggcaggcttgccggagcaaagggcagtgaactagaggcggatcgttggtcaggctggccgcgccgctgctgctgctgctaattgctctgtaagagtgtacaatatggaaagcgtccttgagttatacagaacgtgccagcttccttttgtgatcggggaaagaggggaatggggatggataacacggaagagcaacgcaatgcatgcatcctatcttcaatagtctgtaaaagtttttggtatgggcactgccggtaagcatgaaatatgttggcacttggcagtcttgtattgttttgatttcgttgtggtttgaggcgagtacttggattaccaacacgaagcaacgggcttgagggagtgcagatacttcgttgatgctcgacgaatgga

SEQ ID NO: 444934 - DNA, 477 bp, Triticum aestivum
  unsure (1)..(477): unsure at all n locations
ggttgngnaattctacctngtcngtgncgtcacanattaaagggtcgacgacctcactaacggcggccgctctagaggatccaagcttacgtacgcgtgcatgcgacgtcatagctctctatagtgtcacctaaattcaattcactggccgtcgttttacaacgtcgtgactgggaaaccctggcgttacccaacttaatcgccttgcagcacatccccctttcgccagctggcgtatagcgaagaggcccgcaccgatcgcccttcccaacagttgcgcagcctgaatggcgaagggacgcgccctgtagcggcgcattaagcgcggcgggtgtggtggttacgcgcagcgtgccgctacacttgccaagcgccctagcgcccgctcctttcgctttcttcccttcctttctgccacgttcgccgggtttcccgttaaagctnctaaaatcnggggntcccctttaaggggcccat

SEQ ID NO: 444935 - DNA, 201 bp, Triticum aestivum
ggtcgacggcgaagacgaaagcacaaaggaagtcgccgggttctgggggtacctgctgcagattatctatcagacaaatgcaagagctgtgaagcctacagactgcatcatctgggtcaacaatttcccattcctcaccgtaaaagaatacagtatggattttctactgataagaatggactcggtcaaagctgttttcct

SEQ ID NO: 444936 - DNA, 422 bp, Triticum aestivum
  unsure (1)..(422): unsure at all n locations
tccatctcggagttgtggttccatattcatttggttgctgggcggcaggcgaccttcgaggcacggttacttcgaccactttctcctacgacaacataactggatggattactaattgcagcgcataaattatgtttcattagcataaccatcgcataaccaggcatgaatgtcccatcattatcagggtttattctcttcaactatttttgcgctcatgtgctcataaattttattattagagcaaaatcagcatattctcttttactagcacatgcccacaattttttcccattatagccaacccgcatattgtcttttattggcacgtgcaagttatctccagcaataatttgtggagtccctcattctgctcataattctcganacaacctccttattctcaaataacctccttaatt

SEQ ID NO: 444937 - DNA, 413 bp, Triticum aestivum
ggtcgacggccatgcgatacttccaccttgggtacacacatgcgtacacacctacatcgagagaaaattatggacttgattgcggttaccacgccctaattaattgagcattaaaccaaacacgtctaaaacctctcttgtggtggaaatgcatgagaatgaagcgcaccctgtaaactatgacggagggaggagtagtatgaacgtgcaaaaccaagtacgcgtatggctagtcggtcaacgcacttcctcttggcatatcactgacatgtgggaccggagtgtgagcaaaccggtcacagttgacggctaaatggccaacccgccgttccttgagagagatgaggagcaagaacacacagacgggctcgcacggaggccaagatatattcgagcatggttgattgatatca

SEQ ID NO: 444938 - DNA, 252 bp, Triticum aestivum
ttgactaggagaacttaatgaacaaggagcttcatgataagtttcagcaaatgatgactgaacaggtgcaagatgggctgaacaattttgaagaggccatggagaagatcactggccttgagaagacgttcgaaacaaagctcgataacagatttaatgaactgcttgcgcgtcttccaacggctgcacctgccgcacctctgcaacaacaactactaataactccatggtcgcaaacaaacctccgctgaa

SEQ ID NO: 444939 - DNA, 369 bp, Triticum aestivum
cccgggtcgacggggatccaaagaggatggctgggaactgtgctgaactgaagatggctgaagatcgtcagggtttgcctgagtttgctccatataaataaataaaaatggcggtaataatcatttagaacgtctctattttgtgcgagcaaaattagtgaacttacgggacttgtcatggaattgctttgccttttgggaggcgactgaatatcagtatttgagataaggtaaaatggtgctgacatgatatgtatatatcgagattctagcttaatctatagtataaataaatgattagtgccatgtcaaaaaaaaaaaaaaaaaaaaaaaggtaaaaaaaaaattgaaaaataaaatttcaatagt

SEQ ID NO: 444940 - DNA, 393 bp, Triticum aestivum
gacgggatgagcaacacgaagtactgcttcgccatgagaacaacgagaagcgcccccatcaacgccagaaacacgacgtagacgatctccaggatgtagacgaaggcgagcgtgagcaggggggccttcagctgcgccttagctttcccgaggagctcgctgaaggtagcgcgctgctcgccggagtacgtcaagacggtggcgaagaggaggaggatccggacggcggagctgacgacgaccgcgaacagcaggtaccccgcgcttacgagcaggagctccttggtgtcatcctggatctcctgtacgagcttggcgtactccaggctgccggggtcggtgccgtttagcgccttgacgtcgagctggatctcgtcggcgaggggctggacg

SEQ ID NO: 444941 - DNA, 391 bp, Triticum aestivum
cgggccgacgggttacgaactgtaacgagagggctttcggtacatgcagctattaccgaaaacgattatcgacccttggtaccgagaaagcaacgacatcatatttacctttttatttttgtgtgtatctttgccactctcattttgtgtctgatatttcatgacttttaatgactcaattttcaaaatgacatgacttttcatgacttgtgttttgggctagattattacaaatctcaacttctaagaactataaagtaaaagaatgaatacaaagacccgtcgcaacacggagaagcatgtattcataaaccccgacccctctcggtgcatgtcaacatcgtagaccgtccgggcctccgtaagggcgcacggccggaaaaccccatct

SEQ ID NO: 444942 - DNA, 151 bp, Triticum aestivum
tacggcaacggaatggtgtatttaacaaatttaatgctcgtaatggagaccacctaagtgttcgtcgtagcctttgtccctccctggctgttgcatcgtgagttcggcagatctactgccggacagggcctctgatgaacggagtcctgtg

SEQ ID NO: 444943 - DNA, 374 bp, Triticum aestivum
  unsure (1)..(374): unsure at all n locations
cattcagtcctcatacgccacggcggcaggagtccgcacgcaacaacgaggcggtcgaggcacgcgcgagatcaagctcgctgcgagctagctgccacgtaganacaaccgttgaaccgcagcgtcgtcgagcgcccatcggagaccgtcatggacgacaccgatggccacgcgaccgctcgcaatccgcagctcaatctccacgcctgaactactagtacattccaacaccatgaagctcgatcacgtgcgcctcttcctgcaccgctgctactctctagtcactcatcaacccaatttgtcatcgtctcacacttatctataagtacggtatcgcataaactttgcacagacgcatactatttcggggttaa

SEQ ID NO: 444944 - DNA, 399 bp, Triticum aestivum
cccgggccgacgggaatagcattcgtgatcttcttgctcgcgtggtcgtggaggaaccaccagaaattccgcagaaagaatctctgatagtttggtgggaagagtgatttctactgaatcacttcaaagttactttttctatacataggctgtacatatatgatgtaactgaaaaacctcaggggagccaattccatgtggctcctgacagtgacacgaacctggtctgtcacagtagcccattgttgccagcttcataagattgacaattatagatcaatcaacaataatgcatcaaggcatgatgtattgttgccagcttcataagattgacaattatagatcaatcaacaataatgcatcaaggcatgatgtaacgagctaataaatcgagaattc

SEQ ID NO: 444945 - DNA, 370 bp, Triticum aestivum
gacgggtgatgcaagtatctaatgtatgttgtgactgtagatggagcttctgccgtggagacccttagggaggaacttgcccgagccaaggaacaagccaggagaagtgatgcggccgccctaaaggcggccgaagacttaagagccgaacaggctactcatggcaagagcaaagataaaatagccaagatggctgctgagctgaaagatgtcgccggccgatatgagcttcttgaaaaggaaagccaagtgagagcggctgacctgaagagagccatggaggcagacaaggaaacccgttctaaaatcagagcgggaggaggagctccgtcaagccagatatatcacggctgggaagccctttttgttg

SEQ ID NO: 444946 - DNA, 473 bp, Triticum aestivum
  unsure (1)..(473): unsure at all n locations
tgggngnnnnnnggttaactctgccgcgtncgggtacaggtngtngaattcccgggccgcgagctcactaatcggcggncgctcnagaggatccaagcttangtacgcgtgcatgcgagtcatagctcttcnatagtgtcacctaaattcaattcactggncgtcgttttacaacgtgtgactgggaaaaccctggcgttacccaanttaatcgccttgcagcacatccccctttcccagctggcgtantagcgannaggcccncaccgatcgcccttcccaacagttgcgcagctgaatggcgaatgggacgcgccctgtagcggcgcattaagcgcggcgggtgtggtggttcgcgcatcgtgaccgctacacttgccagcgccctatcgcccgctcctttcgctttcntccttcctttctcgccacgttcgccggnttttcccgtnaaaccccnaaatcgggggctcctt

SEQ ID NO: 444947 - DNA, 478 bp, Triticum aestivum
  unsure (1)..(478): unsure at all n locations
ggnnnnngnatntctcnnngccngngccnnnanaannnaaaggcccnnggccaacnngacactaaacggcggccgctctanaggatccaagcttacntncgcgtgcatgnnacntcatnctcttctatagtgtcacctanattcaattcactggccgtcgttttanaangncntgacgggaaaaccctgncgttacccaacttaatcgccttgcagcacatcnccctttcgccagcggcgtaatagcgaagaggcccgcaccgatcgcccttcccaacagttgcncagcctgaatgcgaatgggacgcnccctgtagcggnncattaancgcggtgggtgtggtggttacnccgancgtgaccgctacacntgccaacgccctagcgcncgctcctttcgctttcntcncttctttctcgccacgttcgccggcnttccccgtcaagctctnaatctggggctccctttaagttccca

SEQ ID NO: 444948 - DNA, 392 bp, Triticum aestivum
ggccgagaccctggaaagcctccaggaggtgcacctcagagtcaatagcgcagcagatgaaataaccaacttcatagtagaagatttgaaggccatcaagaagccgaagataatcgtggatcatgtcatcaccagctgaaatgtggcattctattggagcacttttcttactcatcatccatctttcccctctgtttgtcgagattaccgattttatttgcgccattcgtacttcaataaaaacaggatgctgccgcattcctgtacaccgcaagactcctattgtttttgcttttgaaattcgcgctgtatttcgttatgggcttgtaagttggtatcggaggagttgattttaacttgaaactgcaaatgttggtcaaagatgttttaat

SEQ ID NO: 444949 - DNA, 422 bp, Triticum aestivum
cccgggtcgacggggatggcaagagggcgtccggattcaatagcttgtctcagcctgagagaaggaacagcagcaagaagctccagcgccagctttccttgcactattaattttagttgcctaattcgtccatcatccatccatcattttgctgctgaagtgtattaattcttggttctgcttactagattccaccttatgcgctagctgttggcgcaagtacctcaaccacctcaaaatttagtagatttgtaatatcgttttcattagccattagtctctatgttgaaagagtctctgttgaagaaatagctagctaggcctacaacttttcctatgtctttttttggaagtatttgatgtcttgatgttttcttttggaagtatttgatgtcttgatgttggaaaaaaaaagaagaaaa

SEQ ID NO: 444950 - DNA, 221 bp, Triticum aestivum
aaattatcgggtctcatgatgtaacaccgaatcatcattgtaatctccatatgtagatttctttgtactcataaatatatatgcttaagtcgttggacatcaactaatcacttagccgctcaggtgaatctattcgtagttcagagtacgggataggaggttagacgtttactgttgacgtggtgtactccatcacctcatgatttatacatgatgtcctc

SEQ ID NO: 444951 - DNA, 399 bp, Triticum aestivum
gggccgacggggtccgtaatatgttataaagaccgaacaccttagggagtgttcggcatcgtgagtttggccctatatgcatcagctccgaatgaggtctttggtcaaatgttgggtttgcccggctcccacgttttggtaccttacgttctgttatatcggctaaggtagcactgggagaactactgcgattgtgccctggttcatccggatgagcacctcagtagagaaagccgaaaactgactatcgtgatatagcgagagactggttaaccactcgatgactcatcagaatttttgggattcctccgcattaatgaagggccgtttcccgatcatgaacgtatgtgccccatattcggacgagcgcagaagtaccaagggctatatagtagcccc

SEQ ID NO: 444952 - DNA, 178 bp, Triticum aestivum
aagtgccggatgatatgctgttgtgttttatatgtctatcccatcatatatgtgttgttatttgaattgaattgatttgaacacaaacaggatagagaataactagcaaatgcaaacgatgccgacggcctagccgtctgcataaggccaacgtgagctcccagtagctcgcagttaa

SEQ ID NO: 444953 - DNA, 395 bp, Triticum aestivum
ccgggccgacgggaagaacaaatctgaggctgcctcagagaagaaatccaaaaaaaagagcgagccctcccagccttccacaactgagaagaaacccaaagggaaaaacgaccatggtaccgagaagaagtccaaaggcaagaaggacgcctctggatacacaggtgcggagaagaaacgaaaagcaaaagtagattcgcccaagaaggctggggccaagaagaaaccagagatgctaaagaaggaagagcctaagaagaatgacaagcccaagtcgtcagcgccggccacaactgatgcttacgtcgcaccgaaggaagagacgaagaagccagaagctgccacgcccgatacctacaccgcaccaaaggtggaaccaaagaaggaagaaccaa

SEQ ID NO: 444954 - DNA, 471 bp, Triticum aestivum
  unsure (1)..(471): unsure at all n locations
ggnngnngnangttactcnccgcgttcnggtaaaggtacagaattcccgggncgacgagtcactantcggcggccgctctagaggatccaagcttacgtacgcgtgcatgcgacgtcaagctcttctatagtgtcacctaaattcaattcactggccgtcgttttacaacgtcgtgatgggaaaaccctggcgttacccaacttaatcgccttgcagcacatccccctttcgccagtggcgtaatagcgaagaggcccgcaccgatcgcccttcccaacagttgcgcagcctgaaggcgaatgggacgcgccctgtagcggcgcattaagcgcggcgggtgtggtggttacgcgagcgtgaccgctacacttgccaagcgccctagcgcccgctcctttcgctttcttcccttctttctcgccaacgttcgccggctttccccgttcaagctcnaaacccgggggctccct

SEQ ID NO: 444955 - DNA, 390 bp, Triticum aestivum
  unsure (1)..(390): unsure at all n locations
cccgggccgacgggacgggaacacagaacgtggatcattgatcatctctgcgcgctcccaagacactaacgggtttggatatgtgaactgagtaggcctctggccttttcgcactaaccaccatgcgggaataagtatggacactcaaggtcgtacgattctccgaaagctcttttgacggcagtggttgagcggcgcgcgcccagttggacgggaactagctgctcttgtattagggggtgggtctgctccaggttgcgtacataatgtgcaggtgtgccaagggcgatgggcccaagacccctgagcgcttaggatgtagatcaacatgctggcctctctgttgagcctaggtangactacggcgtgttgatcagccgaggtcgggca

SEQ ID NO: 444956 - DNA, 254 bp, Triticum aestivum
aaggtgcgtggtccaggaggggttttggatgaaccgggggtgttggagtcctacgtggctgctgtccagactcctgcaaagtcctcatagtttgtttcgactttgcggggaaaaatgcgtccgaaccgatacaattccatactggatggctaaatttgtccagacgtgccgtttggatggttgcgatcagttagagggtccgctttacgtatgcccttacaaatctacgaccaaaaaaaatagacgtcatccgc

SEQ ID NO: 444957 - DNA, 376 bp, Triticum aestivum
  unsure (1)..(376): unsure at all n locations
gggccgaggggcaagatgaaggaggctgagctgatgcgaggaaacccactgatcaatatgaataactctggctccttcaatgtgaagagaaggtgggatgatgatgttgtattcaagaaccaagctcgtggagagactaagacaccgaaacggttcatcaacgacaccatcagaagtgatttccaccgcaagtttctgcataggtacatgaaatgatgctgctgtatgctttacagtatacatgctggaagaggagcctgtgatgtttctgaattctgaagatcaatttgtatgacataactgtaacatctatgttacctgtacggtgatatatttaccctgttcctaagagtaaagaanagaacccactgtttgc

SEQ ID NO: 444958 - DNA, 425 bp, Triticum aestivum
  unsure (1)..(425): unsure at all n locations
ccgggtcgacgggtacgttgatcgataaatacagtatactcattaaagaaatttaaaggatgacccggatgcagtacacttttgtgtatgagcgtcgcgaataggcccatcttgccgtcccggcacagagcaggctcgagcttgcttagaggagcaaattaccaacttcttctaccagcctgtcagaagtggtcgtcgcttagttcctatggcagctagtcatgagacgaacaggaagatacaacacgtaggaaatgagcaaacttttgctgggatgttcgtggccccatgtttggcagtcggtagctcagttcagacttcgctcggcccgaaatcatgcaccgacaggaactagttatgcggatagtattgctgaacatgaagctgacggcacctgcanagaatacaaatctatttaaaaacac

SEQ ID NO: 444959 - DNA, 429 bp, Triticum aestivum
cccgggtcgacggggatggtgaagatgcgactgagtatgctcataagaaaaattctaacgctatgacggatccaatgcattgcagtgtgccatatgtggaagactcgtggagcttacgttcacgatacaaagacatctaggcacttacaaatttgggaaagattacatcatggtcgacacatcagatcaaaagtcacagacccatatgtctcagagcacatctgctacatatggtggtccagatggggcatgttagatgtcttcaaacattaggaggaatggtggagatggagttacaatagtcggtagtaacagttcagacatcgcacgtggcaaagtcactcacaggatcgcacgtggtattgggataataggtcatgcactgactataacagtgaactgcgatggtaaagttctcatcatgcaaac

SEQ ID NO: 444960 - DNA, 192 bp, Triticum aestivum
agccagatcaaaacgcagagacaaccgtggcacagatcctcaagtaattgtgtggaaagctctatggtatgcaggcaaaactacgtgtttggtaaatcagatggaagtgggatcgcgttaatgctcttctagagagtgatctgtacaactttgcgaggagttcatgatatgataagagtttacaaatttcca

SEQ ID NO: 444961 - DNA, 374 bp, Triticum aestivum
  unsure (1)..(374): unsure at all n locations
gggcacggcaggctgtagcagtggggatcgctagtagggatgccacgctgcaagggcaggatcctgggcgtcccctggcgtcgctgccctgacgaccttgctggaagttctgtggcgtcgctgccctgacgacctcggggaaggaagcgacactgctcgcggacggtctccatgttggtcggcaacaatggcgatgacgttggcgaaccgtgattgtacggggtggatggggggtgctggaagcggaacacggtcagtcaagggaaaagggccttgtgtgatggaggcgtgcgggctgtgcgttcccctggtgaacgaatctgtatcgacnccatcgtactgaacgactcatgtggtacaaatataatactggg

SEQ ID NO: 444962 - DNA, 413 bp, Triticum aestivum
gggtcgacggggtgtggtattactggcacgtctcatcaaagcagagatcatgtccctttatttacaggattttcattaatgcaggcgtagggaacctaaccgtcccctgggtacaactccttggtgataggtaagtttagagacccagggggaaacgcccggtattctgggcctttatatagagatcctagtctcgtcttcttcccttgcgctcgctccttcctcaaccccggccaccccaagttccaaccctcgggtcacaattgccaccagccttagtcatgtccggatccagccgtcagggccggtgggtggcttcttctgtcatggatgaggatattgcgaagctccgcatagcgaggtatctcaccccaaaaatctttcatcagcttccggcacaagggaaagtcata

SEQ ID NO: 444963 - DNA, 402 bp, Triticum aestivum
gggccgacggggagacaaggttgatagcattggccgactacctgctcccacaaagccacttcccttcacatcggaggaattagagtttactgccaagcgtgaagctgctaaagtgatcgctgcataggagggagtgcaaatcactgaagaagcccatccgaacttttattacttacataagtcctgcaccgggcatttataacaatcacctgctcttccctataggtgcattccttgtgggatccttgtgtttccttgtcatttgtgctacgcgggaatgacattgtcttcttctggtggcagtagtacctcctggtaagcaccagggctggcgggtaaaatatcctgtaactgtcttttgagagattagttcattgttttcgttaatagaaactttttccc

SEQ ID NO: 444964 - DNA, 480 bp, Triticum aestivum
  unsure (1)..(480): unsure at all n locations
ggnnnnngnaantttaantttnncgccggncaggtaanagtcaaagaattcccgggtcgcgagctcactantcggcggccgctctagaggatccaagcttacgtacgcgtgcatgcgagtcatagctcttctatagtgtcacctaaattcaattcactggccgtcgttttacaacgtgtgactgggaaaaccctggcgttacccaacttaatcgccttgcagcacatccccctttcccagctggcgtaatagcgaagaggcccgcaccgatcgcccttcccaacagttgcgcagctgaatggcgaatgggacgcgccctgtagcggcgcattaagcgcggcgggtgtggtggttcgcgcagcgtgaccgctacacttgccagcgccctagcgcccgctcctttcgctttcttccttcctttctcgccaagttcgccggctttccccgttcaagctctaaatccgggggtcccttaaggtt

SEQ ID NO: 444965 - DNA, 478 bp, Triticum aestivum
  unsure (1)..(478): unsure at all n locations
gtgggtggngncnctttanntggncgcggtcggcatagtcatanngtcncgggncganggnacacnaancgggggncgctctagaggatccaagcttacgtacgcgtgcatgcgacgtatagctcttctatagtgtcacctaaattcaattcactggccgtcgttttacaacgtcgtactgggaaaaccctggcgttacccaacttaatcgccttgcagcacatccccctttcgccgctggcgtaatagcgaagaggcccgcaccgatcgcccttcccaacagttgcgcagcctgatggcgaatgggacgcgccctgtagcggcgcattaagcgcggngggtgtggtggttacggcagcgtgaccgctacacttgccagcgccctagcgcccgctcctttcgntttcttccctcctttcncgccacnttcgccngctttcccgtnaagctctnaatccgggggcccccctttggggtt

SEQ ID NO: 444966 - DNA, 367 bp, Triticum aestivum
gggaacacggagctagctccactctgaattacgaaaccatgtgacgtgtgctatggcgctcttgggcctcacatgaatgtgtcttgcagtgcatatgtaatgaatgtgactccaaatttgtacagcaaacggtgctgactactgcacaatgacgtctgatcgtctatgtacaccatgtctgtacaatttacaccgtgattaacagcggtacactctcttttgcacatatccagcagagatcaacgaaacgaaggccggcactgttcaaaatttgtacccacttcgaaaagtatagattgattgtatcacatgaaactgtgaaatctgatatatccattcaccactcagtgtgaagtaaagtatgtcc

SEQ ID NO: 444967 - DNA, 268 bp, Triticum aestivum
acgggtcataaatagggactcaggtctcaagtgaggactatagactgggaagatgacgatgcatgacagttatctctgggaatagagaattgtactacttagtactttaccgatgcagcgttcgtttcttttttgtgggtagatctgatgtctcgacgtactgagacatagcgagtgtctggtggtgggtcattccattcttttgggttcgtagttgccatgtacatgttggttgatcgattccttaggtttttgcgtcctgcggtaa

SEQ ID NO: 444968 - DNA, 157 bp, Triticum aestivum
agtcatgagagcgatcggcgtcatgcaggaccttttcctaaccaagacgtggtaacatcgtacggagtaccgcgcgtaatttttagtttgtttcttcttcaggtggtggatgtccatcatgtctatgagcacaggcttctgggttttgacagagtct

SEQ ID NO: 444969 - DNA, 305 bp, Triticum aestivum
ataggcagtcaagacttccagctccaccatctcaagctcctgttcccactcccaataatggtctgtgctacaagtgtggacaacgaggtcatcgtgccagggactgcaatcagaatcagaatcaacttgcccttgcagcatcgggccgtggtaacaaacagccccgcagcaacaacgctaagtcctaccgtcgtgctcatgctaaatacgttgatctcaaccaagctcactaccagccagctactgtgatcggtacactcctcgtaaattcagtaccaggaaccggtccgatgtgacacaggtgc

SEQ ID NO: 444970 - DNA, 413 bp, Triticum aestivum
gggccgacgggatggtaatacttcacacattattaatttcttgataataaagtatattaatgtaatgataatttgcataaaaattattcacgcatacttctattttaaaaatattcatgtaattaaaaaatagttcacttttttttaatgaaaaatgatcgtgcaattcaaaataatattcacatattttaaaaaaatcttcttgtaatttacaaagttgatcgtgtatttttttcaaattttcatgtcattttaaaatgtttacttataattccaaaatgttgacgtattttcaaaagtgctaatcattttttacaaaattatactatgttttgaacaattttcacacatcattttaaggtttatgtaactgaggaaacatgaaaattggttatttaatttaatacaacaat

SEQ ID NO: 444971 - DNA, 375 bp, Triticum aestivum
  unsure (1)..(375): unsure at all n locations
tcgacgggaaacccaagactgagtcttattagcagattactcacgatgcgaacgagttcatcatgtgagtcgtggcccttgcatctgactcaagatctgcgtcatgaggcgacagacagtctgaggcacatacatcacttcgttcacactgaattgagttcttgggactcgagctgtcttcaacagcttcatcagcacttacatgtattgctcggtctgctcacgttcaatgtatacgcagcatgcaacttctggggctgactgagaggcanatccctcacgtacatcagtttcaggtcacatagtttttgagtaccatcagatatccattcgatcacccatgctatcacatcttcagagtttccggtgatctgc

SEQ ID NO: 444972 - DNA, 395 bp, Triticum aestivum
  unsure (1)..(395): unsure at all n locations
tcacgggtgaatcaatgccttgaaatgtatctccggtgtgcagtccatgaaacacccaaacaatggcgcaagtggcttccaacagctaaattttggtatgacaccactcatcactcctccttgaatacttctccattcaaagctctctatggtcaagaaccaaacctcggtggcctgcccaccttatctctgaacctgccagacaacaaggatgcagacttggactgggcaacacacaatgacaggctacgtgctcaacttgcccaggcacaaaacagatgcaaacagaaggctgatcggaacaggacagagcattctttcaatgtcggtgatcaagttntgctcanattacagccctatgctcagtccatcgtggccaatcgcccctgccaaaa

SEQ ID NO: 444973 - DNA, 399 bp, Triticum aestivum
gtcccgggtcgacggggatttcaaaccgccacccaaggagcctgataggcccgtggatgacgatgagctcttaactatatccacagtgaagcggaaattagtgaacccgggggatggcaaacatgcagatggggaagttcgcaagagacaaaagattgaaacaaggattacttgtgccaagatttctgctttgactaatctggctagcaaacacaaggatacacttgcctcaagctcgccaagttgcgaggccaatggtgttttgggggagcatgctacacattctgatgagcatcaacattccacagacactgcagaaacctcacggcaagttggcggtgattgtatcaaagcaatgggcagtttgtctagtgagaaggctgtaaataccaccaaaac

SEQ ID NO: 444974 - DNA, 327 bp, Triticum aestivum
acgtgatacatcatgatcgtgccatatcaagaacatatagagagagatcgtacagataactactggtatataatctcatccccgatcggtgaattactctctcctcgtcatgcatagcgccggcatgatgaacatggccattcatgtgaacgactccctcgccggcaaggttacttcatgggctcacgagatggtttgtggtggctacagaggcgtgcggtaacggagctcccgatctatgtgatgtcctgggggtttctgtagctcttggacgctttggcatctgaagcttgtcgtgggcgtcaccgaggctaccatgaggtacgg

SEQ ID NO: 444975 - DNA, 382 bp, Triticum aestivum
ggggcatctctacaaatcttaactccagaaatattaccattctcctcggcattagctagaagagccgccagcccctctgtacatagcaagaataaatatggagagagaggatctccctgcctcaaacctctagtaggtttaaaactctcagtctcttcagtattaaagcgaacccggtactccaccgaagatacacattgcataattaaatttacccagttctcttggaatcccaatttcaacataatatccttcagaaaagaccactctacccggtcgtacgctttgtgcatatccaatttgatggcacacataccctctttaccattccttttttctttattgtatggaaacactcgtacgccactaaaatgttatctgt

SEQ ID NO: 444976 - DNA, 409 bp, Triticum aestivum
gggctatgcatatgcatcatgaaaagaatgctttatgtgatggttatatttttgaattccttcatgatgttactgaaaattattatgagagatgaacatatgcttctacatattgcaatattatcaagtttcctctctatgtattgaaaatcttgaagttttgcttattttaccttcctatgctagttgattcttgctctcataaattgtttgttcacaaaatccctatgcataggaagtgggttagacttaaatgtgctagccatatgcttaatgatgctcctgttatgtttcaattcttatcttttatgtgagcatcatcgaaatcatcatgactagctaaaaaggcattaaagaaaagctcttgttgggagacaacccaatatttacccctacttttttaaggttt

SEQ ID NO: 444977 - DNA, 375 bp, Triticum aestivum
gggggtgttaaattgcaacacatacgaagttgcgacagcatgtgctttggctatcgaggcggacaagcttatctgtgttgtcgatggccaaatatatgatgagcatggccgagtcaatcgtttcatgtctatcgaggaagcagatatgctcatcagaacacgcgctaagcagagtgaaactgctgcaaattatgtaaaggttgtaggggaggaggacattagttatgcccacaattttcctatcaaagaggagaaagagcaagtatgagttggaagagatttcatcagtgattacactgcatcctttcggaatggtgtgggtttcaataatggaaatggtctgtctggtgagcaagggtttgctattggcggggc

SEQ ID NO: 444978 - DNA, 358 bp, Triticum aestivum
  unsure (1)..(358): unsure at all n locations
gggaggtggcacagacatgagtaagcttgagagagtgagaggaattgtgcggtgccactgtgctgtgaggataaggatgtatattaggtggaaaagaaaacaccttcgaattgtagcaagctcgagcttagcccatcttcttgacgtacccataactgtaggtgcttaaagagttttcagcgtgggtggacgcctcaggttgtctacaaaaactaattaggagtactcagtgttttttcgaataaaaacatctgtgttattctcacttttattttaatatattttatatgtttatataaaananaaaaaaaaaggtgagagtttaaaaaaaggaaaaagaaagataggaaaaacaaag

SEQ ID NO: 444979 - DNA, 393 bp, Triticum aestivum
atacccgggccgacggggaatggactatgaaaagtttattcaggcacacagagaaacagatgctgatattactgttgctgcgttgcccatggatgaggaacgtgcaactgcatttggccttatgaaaatcgatgaagaagggaggataattgaattcgcagagaaaccaaaaggagaacagttgaaagctatgatggttgatacgaccatacttggccttgatgatgcgagggcaaaggaaatgccttatattgctagcatgggtatctatgttattagcaaacatgtgatgcttcagcttctccgtgagcaatttcctggagctaatgactttggaagtgaggttattcctggtgcaactagcactggcatgagggtacaagcatacctata

SEQ ID NO: 444980 - DNA, 245 bp, Triticum aestivum
acgcggcgcattaaagattgatgcgacgctctacagtggacttgttgtatgatatacagtgcaatatttcttaatgtcaattcatcgagttaacctttccattttgagtcgctgagactgaggagtgatgtgcagtttgctctgttagacgcgtctgtcactttcacttttcatatgctttgttgtgtggatccgcagagtgctctttcctcctgagtctcggcaagaatattagcaagccatgt

SEQ ID NO: 444981 - DNA, 341 bp, Triticum aestivum
ggggtaacgaaccaccacatgtccattaacgaagtgtgggtcagtgaactcatcatcatggtcgttccttactctgcattcgttaagcatcactccacatgtataacagcagatacactcttcatggtaagacatagagttactgcaggcattcagatcgagatggggtagatcttaagaaagcacttacagaatgtaacacctgacgggagacttagcgaactcgcacatattaatgagctggtacacttcactcagttcaatttgtgcatattcatgcctgatctgatgctcatgtccaacttccacataaatacattctttggcgtcattagctttta

SEQ ID NO: 444982 - DNA, 322 bp, Triticum aestivum
cccgggtcgacgggaggatggatgatgtgcgtactgtcgctcatcggaactatgtgcacgtatagtttatcattcatgatttagattgaaatcctacatgtcccattactcgagtgatgcctttccttaggacgaatggtgcacatggagacatgaaatttcgtgtatatgagattcaaatttctgtttcggacaggcatgggcagctttcctgaaacgattattacagtgcctgaagagtcagttatgagatcaacttatggattgcatacaacagatgacattatttacatgtattcttgcttttatgactagcaacggg

SEQ ID NO: 444983 - DNA, 382 bp, Triticum aestivum
gggccgaccgggaggccacggacgtgcagcaggcacggcggtgatcggcgtcagcatgcaaggtcgagtctgtggcggtggcgaccggcctttggtgcgccaggtcaggtccgcgagctgggtcacggtcgtggcgacgacatcgacatgagctactccggcgatggcgaggccgtggcttagggggcgtgtgttggaataagccacggcgtttattgttgtcggacccgacgggcgcgtcggatgcgcgcgggacgtgtgggtcgcactggtgtagtcgggctcgtcgggctcgtcggatgcgcgcgggatgtgcgggatggaccgccgtggcgagtgtgcatgctggtgaaaatgggcaccggttcgtggccgtgcccag

SEQ ID NO: 444984 - DNA, 374 bp, Triticum aestivum
gggccgacgggtcccggagtaatagtcgtactagcgcctgttacgccatggaatgcttctgttaattgggaatcaactggccagaaattaaaattcaggggggcgacggacctctagctaaggtgaaatagtatatcaggagaaaccttgtgcatcgcgagttactacgaacatctagtatcaagaagaagcggtcaagtagtgtcatctgtgggatgaataccatgcaagcagagacgtaagatttgcacgaataagggaagaggagtaccttcttcggttgtcggtgtggtcacctccacatgtcgcgccgatcttcttctttttatcggggaaaccgatgttctggatggtgcaagcttggacgaacccat

SEQ ID NO: 444985 - DNA, 368 bp, Triticum aestivum
gggataagtaagcttacatccaggatgatcatgaccataacaagtgcactacattgatgttagtgtgtagagtaggcaaatttgcatgtctcttgctagttgattttactcttctccgaatcataacttgtgatgtgtgcaagtacagttaacaaagaacagcaacataaaagtgtgcaatagtttggatccttctgtgttgaatgatgaaatcatactttagatccttctgtgttgaaagatgaaatcttactttaaaaaaggtaaaaccttaaaatacagttaaagaaaaatgaaaagcccaacaaaaggtgcacaaatttcaattcaaggggcatctgttaaaaaaatccgtaactgggaaaacc

SEQ ID NO: 444986 - DNA, 299 bp, Triticum aestivum
tcccgggccgacgggaatctaaaactgatcactttgttgtgtacatatggatgcacattcgaatgtgcagcctattaaatgatgacatagcctcagtgatgctgcggacatctttgcaaacgtcacataatattaccagaaaatccatgatcagcccaatggagtactacaatctcttataaaccgcaaacattctgctttgctcgtcaatcagattaaaataagttcccaatgaccgtgggatgttctgaatgtggggtagaggtatatccactgctatcatctatctagccaacact

SEQ ID NO: 444987 - DNA, 371 bp, Triticum aestivum
ggggcttcacaggcttggaatataccggttgcgttcatcagtgttattttacttccaattgtggggaatgctgcagaacatgctagtgcggtcatgttcgcaatgaaagataaattagatctttccctgggagttgcaatagggtcatcaacacaaatgtccatgtttgggataccattttgtgtagtgatagggtggatgatgggccagcccatggacttgaactttcatctcttcgagaccgcaagcctcttaatgacggtactggttgtcgcatttttgttgcaggatgggacttcaaattgcttaaaagggttgatgctgtttctatgctatctgatagtcgctgctagtttctatgtacattccga

SEQ ID NO: 444988 - DNA, 419 bp, Triticum aestivum
cccgggtcgacggggagcatttgattttgctgatgaacagtaaaatcaaaagaaatagaaataataaacatttcgaaattttttggcacaaaagttgcacaggctttctaggtgtatgcaaaaactggtggcgatatgacatcataggagctcaggaaaaaaaaatagagtattgagaaaggttcatttttttgatttggagcactaattttgttttttctgtcccgagctcctcccatgtcacattgccatgaaactttgcacgcacacagaaaacttgttcatgtttgatgtatagaatttttagattttttgctgttttattttatttttagatatgatcgtgtctagctatggattttcactacaaaaccctagtggataagatttccctattgtatactctaggggcaatgccc

SEQ ID NO: 444989 - DNA, 227 bp, Triticum aestivum
taatagagtggagacctgagaggatgtcaggatgggatgagaatccaccgagtatatatgctgctgcaacagaggcagcgagtaaataaaatatgatgattctcgctgttgtaagtcaaatgagcgaactgtatgtatgtatgtgcctatctattgtgtatataccgaatctgtcgccggttgattcggttggtgaaaaagaaaatcagtcaaagcacatcaacatg

SEQ ID NO: 444990 - DNA, 367 bp, Triticum aestivum
gggtcgacgggcaagaggtaatgacaaaaaaaaaaaaaaaaaaaaaaaaaaaaaaaaaaaaaaaaaaaaaaaaaaaaaaaaaaaaaaaaaaaaaaaaaaaattaaaaaaaaaaattaaaaaattaaaaaaaaaaataaaaaaaaaaaaaaaaacgggccgctcaaaaggttcaaagctaacttaaccttgaatgcaacttaaaatctcttcaaaagtgtcaccaaatttaatttaaggggccttcttttaaaaacttcataacgggaaaaaccctgggtttaccaaatttaacccctttaaaaaaaatccccttttcccaatttggcttaaaaccaaaaaggccctaacaatttgcctttccaaaaa

SEQ ID NO: 444991 - DNA, 369 bp, Triticum aestivum
gggatctcctacagtcagggtatcaaagttatttactcaaatggccagctgggcatggtaagacaacagttatgtaatctctgttgccaactggtcaggtatgtgctggtttatgccctgatgcagtatatcactttcccgttcgtggtcagggtacgatgaaattaggcagaatggcaaaatcagcagcatctactgtgaacacaaggcgaagagaaaagggattgcttcctcgtccggtaactcaattgatttgttttgcttcctgtcttttttttctctatacatgcaaattatttgttctgaaacttttccataagaagaggtacactgtgcaacttggttacgatgtcatagaagtaatgtttg

SEQ ID NO: 444992 - DNA, 381 bp, Triticum aestivum
ggggacgctgatctcaatctgcccgtccctccacgggcctgcgccgcctccctcactccccgccgcatcgccggcggcctcagctttgcacgctccgatggtgccgagattggtcacttgctagtgctggcggctcaacctgcggaatcgcggcaccgccatggagactccgctgacggtgcagattgtcgagttcaacaccaaggtgtgcctttctgggctccatttccccccggttcattttgggttttcgtgcagtgctgtgaggctgttgctctacatgctggtgttggtggacctgctttgcaggtgatgcaggaggagctgaagaagctggggctcaaggtcaaccaccatgaggccaacatcacgttcctcaag

SEQ ID NO: 444993 - DNA, 378 bp, Triticum aestivum
gggtgttctacgtggtccagaacagctggagaggtttttgcaagagaacaggggatacacttactcaggacttgaacgcgagttatcattggctgagttgaacggctgcttagttgtggttcataatatttatgacatatctatggacttgtggtttttgacagattttgagaaaggtctttgggtcaagaaatacagcttgccttcacatgttgctaggcttttttggtatccttttctcatgttggatgatgggagaattttcttcagtgggatggattgtctggaaggtatattaagtggtggagagcaaggagagggatttctgcaatgttatgatccaaggaatggcacatgtactgatgaagtaaaactgag

SEQ ID NO: 444994 - DNA, 372 bp, Triticum aestivum
gacgggatcgccaccgttggatttctcgcactacatggtgtttgagaaacggatgaccgagacacagtctttcagaagcgctagcacctttcgatggatagaccggtacacctactttcccctacatctgctagtctaccctgtaagagttcgcacgacttaatcaactataccagagcccataatggtttgtggctgcacacggaagtttctagtttgaaaaatctcatgatccctttgagcctgggtggcggtccaaaagaaaacaggcaagtcctggattacccaggtgcctagacaggcaatcctagaataaccaggtgcctcaaatccacccagatgtgtgtttaagttgccaccttaagtaaacca

SEQ ID NO: 444995 - DNA, 372 bp, Triticum aestivum
tactcattgatcttcgcttatatcttttggagtagtttgtcatttgctctagtgcttaagcacggcggtggttttattttgaagaaatagatgaactctcatgcttcacttatattatttttgagagtcttaaacaacatggtaatttgctttggttataaatttagtcctaatatgaactttcatataaagtgcattgaatactatgagaagtttgattctttatgattgttttgagatatgaagatggtgatattagagtcatgctagtggtgtagttgtgaatttgagagatacttgtgttaaagtttgtgattccggtagcatgcacgtatggtgaatcgttatgtgatgaagtcggagcatgattta

SEQ ID NO: 444996 - DNA, 389 bp, Triticum aestivum
gggtgggaaagaaaacaactgaggacagagaaacaacttcgttgagagcgaactgaggattgaacttggcaaagatgaagaggctcgagtcaagttgacgagaaatgcaccggatgaaaagggctgaggaacaacgatcggaaaaccaactgcgtgatcctaaagaaaatttttgaaggggaagagaagtaattcaaaacacctacgtcaagattcctcaccagagcgacgaaggggctgaggagtaaaaagaattcctactctccgatatactagactccaaaaatagttttcttctagactcaacaacggccaaactacacgatcaatcaagggggctcctaaggtcggtcgaggctctgttaccaacttgtcatgcccaatatcca

SEQ ID NO: 444997 - DNA, 359 bp, Triticum aestivum
ggggattaagattctctgacactcttagttatgatggcacaaattttgatgtttgggtaattcccatgcttaatccctttagggtcatggacccaaatttagagcgaattgtagatatgggtttttctcctccaaatgatccccaaagattatctctagaggatgataaaaactcttatctcaatgctcaacttctaatgtgctttttgatgctttgagcaatgtagttatatttcaactcatgtcgttctgggatgctcatgagttgtggacaaagcttcaagataaatatggtgtgttcaagatttgtggggatgattgttctccctccacctccggccgtgttgccttctcaactt

SEQ ID NO: 444998 - DNA, 237 bp, Triticum aestivum
  unsure (1)..(237): unsure at all n locations
aaaanctataatggcacaaattttgctgtttgggtaattctcaggcttaatcccattggggtcacggcaccaaatttacagcgacttgtagataggggttatttcacatccatatgatccccaaagactatctcgagaggatgataaattctcgtaactcaatgcacaacgtccaacgcgctttctgttgctttgcacaccgtagttagacctcaactcatgtgagactgggatgct

SEQ ID NO: 444999 - DNA, 393 bp, Triticum aestivum
gttcgtaaagagggaagttcaggcgcgtgtataaacaaaaatacgtcacagaagttcaacgtgagaatagcatgaagttcaactactacgttgaatgaatttcagatgaaaaacttttaaaatctttgcgagtatgaaaaagatgatcaacacgggaaagttgcgtgtttacagcagctttcgatcggatagatcacttgctcaattccggtgagtggatgtacagctaggatcagtgaatagagatatacgagaaagcaatcgcatgtgatcaacacagtgaagttcatggtttcataccgaggagttcaggtacttcacgcgatgcatttttggcgaatcagttttgcgataaacgcataacgaatgatctcgccatttttaaaaatacgt

SEQ ID NO: 445000 - DNA, 395 bp, Triticum aestivum
ccgggccgacggggcacatggaagcatgttgtgatgttgctatatccagtgagagtaaatacgagtttgctcgctgtaaatttcaacagtagcaatttgaaccttgtcatgaatgtcactatgtcagcgttgagtttcatcactgggacggtagcaactactgacatttgggaatcgtagacttggaactagtgcaaatgataaattagatggtcccgcagactttctgaatgtcgagcacgtggaatattataaggtggaatgcctaaaaaaaaaaaaaaaaaaaaaaaaaaaaaaaaaaaaaaaaaaaaacaaaagaaaaaaaaaaacaaaaaaccaagacaaccaaagaatcaaaaaaaacagcacaaaaaaaaagcggcccccctaaaggt

SEQ ID NO: 445001 - DNA, 414 bp, Triticum aestivum
cgggccgaccggcatgagtgggatgagtatggagaggagtagtatatatagtgacggtcttctgaaaggaggtgataaagccaagcttgaggaagcggtcaatcagttgatggcgatggcgatggtgacgtcgcttgctggtaagatacttgatgctccggctggagccgacagggtgcgtggagctggtgatcaaggagtcttgtgtgttgctgatgcctgacgctgtgctgtagtttttctgctcctttgaacgctgtggtccattggtctctatatagttctctctactgctttgaactctaatgttgtggttgcaggtggtagcaggttttggccccgtgggagtgcttcgatgccgatcactcagagcgtgttttggccaacttgctgcctctcttttccagtttgttg

SEQ ID NO: 445002 - DNA, 397 bp, Triticum aestivum
ggggactctcaatgttactatgtgtcgtttcctaatgatcagtagggatgcctattcggggttcgattcagggtctagtcgcttgttgggggtcttttccattttggcaccgtagtcgggccatgagtgattgtatgatgaatgttatttatgtactttgatgtgacgtggcgagtgtaagccaactatgctattattcccctttatattatatatgtacttgggttgtgttatgattcccgacttgcgacattgctttcaatgcgcctatgtctctaagtcgtgcctcaacacgtgggagacatagccgcatcgagggcgttacaaccggtgaccccgaaactttcccgttggccaaaacaacacttcctatatattattcttcacctccggacca

SEQ ID NO: 445003 - DNA, 463 bp, Triticum aestivum
aactgttactggcagtcaccggtcaagaattcccgggtcgacgagctcactagtcggcgccgctctagaggatccaagcttacgtacgcgtgcatgcgacgtcatagctcttctataggtcacctaaattcaattcactgggccgtcgttttacaacgtcgtgactgggaaaaccctgcgttacccaacttaatcgccttgcagcacatccccctttcgccagctggcgtaatagcaagaggcccgcaccgatcgcccttcccaacagttgcgcagcctgaatggcgaatgggaccgccctgtagcggcgcattaagcgcggcgggtgtggtggttacgcgcaacgtgaccgctcacttgccagcgccctaacgcccgctcctttcgctttcttcccttcctttctcgccacgtcgccggctttccccgtcaagctctaaatcgggggctccctttagggttc

SEQ ID NO: 445004 - DNA, 403 bp, Triticum aestivum
cgggtcgacgggggagccatacatgaagttcctgatggacgatggttcagatgagtcaattgacagcattctaacctgtgatgtacccaaggatgtggtcggcaacatgggcctttggacctttgatgacatgcccttgtctgctggtttctactgagggaatcgaggtcgctgggtgcctgtatatatagacaaaggaataagtattcaggacatcaacaagtgcttgtgtctggtgcctctagaattgagcagtagcgatgtcagtctatggttatgtctagcttaaatggtcaggtgactgaggtcttttgcaatagacctctgtcttgtgcccccagactatattatatctatatatgagaccagtatgtgatggggaactgcttattttgtattcatg

SEQ ID NO: 445005 - DNA, 367 bp, Triticum aestivum
gggccgacggggaacgccaggagttactgagcaggcatggatggatggatgtttggagcgcgagcatcaactgtggttgtgcataattatggttatgtcagacgtgttaattgtcgcaatttccaattggtggtactatatatatgtttgccaaataatgtgtgcaccgtgtgcaactatggaacagcgaagtggtaatcattttgtgagctttggaacagtgaagtgacacatatttgtcctaaaaaaaaaaaaaaatcaataaaaaaaaaaaacaaaaactagacggcctagacattcaaatcaaaacgaaacagagccatgagaattcataacacacactagcctggaaccaaaatacaaaacc

SEQ ID NO: 445006 - DNA, 465 bp, Triticum aestivum
  unsure (1)..(465): unsure at all n locations
tactttncccggcaggtaccggtcaagaattcccggggctctagaggatccaagcttactacgcgtgcatgcgacgtcatagctcttctatagtgtcacctaaattcaattcactggcgtcgttttacaacgtcgtgactgggaaaaccctggcgttacccaacttaatcgccttgcgcacatccccctttcgccagctggcgtaatagcgaagaggcccgcaccgatcgcccttccaacagttgcgcagcctgaatggcgaatgggacgcgccctgtagcggcgcattaagcgcgcgggtgtggtggttacgcgcagcgtgaccgctacactttgcaagcggcctaagcgcccctcctttcgctttcttcccttcctttctcgccaacgttcgccggctttccccgtcaagcctaaatcgggggctcccnttaagggttccgaattaatggctttaanggaacc

SEQ ID NO: 445007 - DNA, 384 bp, Triticum aestivum
ggggagcgggtggtgatcgagcagcaggcgcagttcggcaacaagtgggcgaggatcgccacctacctgccgggcaggacggacaacgacgtcaagaacttctggagcacccgccagaagcggctcgccaggctgctgcgcgcgcctctccgcgcccggcccagcaagaccaggagcagcaacaccaaagcgcccgcatcctctctcgagtccgccatgggttcttgccatgatcatgttccgtccgtgggcaactcctccggcggccaaagcttcccggctgcaccgcccatggagcaccaggacaccgcgcgaatctcgcatgatcagatgtgctctggattcctcagtttcgagccattgccgctgcaggcagcagcaccg

SEQ ID NO: 445008 - DNA, 408 bp, Triticum aestivum
gggccggccggggtgcctacagattcagctgtagatgagattgtgggttcaattcctcatttagctgcaggaaccaattcctcagaaggcttgcctgcctcatggcccataagtgggctggaaccaatgcttcgctgaagcaatttcacgggcccaggcgcaaaattagcacccccgggaagcccagccatgttgagacttctggcccagctgacctatgaaacgatttttaatgggttgcgtggattttcttataaatagtaccatcttgtttatatatcttaaatacaaaatcatctaagcgggacgaaactaagaatatcaccttgctttaatagtaggtatagatatagatatagatatgccattggcctttggttttgccccgtctcttggagaattagaact

SEQ ID NO: 445009 - DNA, 213 bp, Triticum aestivum
gggattcagcaacacatatacacactgtatggtctctcgggatgatatgtcgccaggtctccacaaagcaaaatattgtaacatgtaccctcacgtatacgagggcacttattcaaacagctactcctatgtaagcacagtataacttgggctctgctcaagtgttgtgatatactattcataaataaataaatatactatacagttgttcag

SEQ ID NO: 445010 - DNA, 259 bp, Triticum aestivum
agttgggttcggtcgatgaatactccaccggttcgctctggcatgacaccctcacacatggcaccttgttacatgctcgatacttcaatctctggtgggtgctcaatctgggactgatactcctatcatcgctctcgtcacgataggattcgtgatgaatgtgttcgctccatgtttccagtggatcagtctctatgtactccggcgttactccctcgatctgtattgacgcctctttcactctgtttgcacatatttc

SEQ ID NO: 445011 - DNA, 375 bp, Triticum aestivum
acctacgactcctaaggccacatatgtgacaccacaaggtaggacacgtagcaagacaggtacaaatggatcagatttcaaggttgttcgacgaacttgtcgttctacaagtgtaactctacggcatcatatctgctgtggtaaggtggttaaaagattactagcatcacactaattcagatattatgaacaggcctgtatgtatggattgtgatcgactacaccttaaggttgtatcaatatgtgatgactgagacttccctgataacgtgtgtacgttctttatggaaacatctgcaatgtctagccatgaacgttgagactgccttcactgaggttctgactcagatctatcgtgtagtcagcacgaaagcc

SEQ ID NO: 445012 - DNA, 384 bp, Triticum aestivum
ggcaatggaagatgtacgtgtgatatgtcaagtagtggacagataagccaaccactggatgtggttttgagggatttttgcactggggtttgtaaggtgctatgccgcgctgggtttgggatttgaaataaaacgaacggagatgtgccacgctcttaatcacaaaattaactattactgatataacaaagataactcataatgaaaaaaacctacactaaaaagcaagcatcacccacaagtataaccttgtcataaactggaaatgaaaataataaccattaggggccacactaagtgctttcattcaccataccatcaaaagtaaataactcaccctgaatcaggccctttaagtcgcattcaagggctgcattttaaaaa

SEQ ID NO: 445013 - DNA, 423 bp, Triticum aestivum
cgggtcgaccgggaggaggtgggatgggccgcctgctggctgggccggccagctggctgggctgcacagggaggagcccaggtaaggttctcccttttatttatttctgtttttgtaatttctgacatttgttttgatttaataaaatattaaatcatttatttaccttatgccaatttttgcaggagctagatatattattccagagctcctttataattggcataatatttggacatatattaatatatataactaatatatttccaatgcaaatatttatgcattaattccaaatgcccagaataaatacctatgagctcttaaaaatattggtttgatttttatctctgtccaatatttttagagagcaacatgagcattttcttggacccttttggagaaatttctatttgggtcatt

SEQ ID NO: 445014 - DNA, 418 bp, Triticum aestivum
gggttgtctcctcgagtgttggttggtcacagctttggtggaaaaggtttttcctgttcctttttcatcttcttatctgacatgctatgcacttccataactgtccagctacctaattgtgcttgcagtggctttgagtatggtagatcaagctgcaaaaccacttgcccgtcctgtcagggtaagcttaactaccttttccgtgttatatgagtgtggcaataatggaatgccaactattattaattatattttgagctaaatttcttatgtgtattctgttccttgaaggtatgggttcttgatgctactcctggcaaagttcgttctgggctagatggcgaagatcatcccgttgaacttattgatttcctcagaagaatgcctgtgcaggttggccttttagaactatctatgc

SEQ ID NO: 445015 - DNA, 463 bp, Triticum aestivum
  unsure (1)..(463): unsure at all n locations
ttctttnncgcggccaggtaccgagtcaagaattcccgggccgctctagaggatccaagttacgtacgcgtgcatgcgacgtcatagctcttctatagtgtcacctaaattcaattcatggccgtcgttttacaacgtcgtgactgggaaaaccctggcgttacccaacttaatcgcttgcagcacatccccctttcgccagctggcgtaatagcgaagaggcccgcaccgatcgccttcccaacagttgcgcagcctgaatggcgaatgggacgcgccctgtagcggcgcattagcgcggcgggtgtggtggttacgcgcagcgtgaccgctacacttgccagcgccctagcgccgctcctttcgctttcttcccttcctttctcgccacgttcgccggctttccccgtcaactctaaatcgggggctccctttagggttccgatttaantgctttacggca

SEQ ID NO: 445016 - DNA, 386 bp, Triticum aestivum
ggaaagctgaatgcgtgaggaatcatggatacacagtcgctcatccttggggatgccaacggcatcccattcacagattgtacggatgtcacaatcgtcgaatgctttgggatgccccggttggaaccctaatcgttcttcatcaacatcctatctgtcactatcggttgatcctaagttatgcttcctcagatgatgtttgctattcgtagctctcattttatggtgctttgcatgctgtttgtataggataccaaaactctgaaattattaaatgttagcgaatcttcacatatatgcatagctatgcgataactcattgatcttcacctatctccttctgagtactctgtcatttgctcgattgccccatttagatcttttac

SEQ ID NO: 445017 - DNA, 393 bp, Triticum aestivum
gggaacgcaatattaccacaaattctccggttgtggtaacataccgcacatattgcaataacttagtttcgttgcaataaatactaactttgttgcaatacaggcctcatattgcaacaagctgtatcggcatagcaatatggtaccagtattgcgacaaacaaattccgttgtgcgagggccgtcatttcgttgtaatagagactaggtatttcaacagaataactattcgtggcaatattcagaaagatattgcaacatcgatgtgatgttgcattagttacaaatattgttgcaaaaaagtggctaactatagcaacaaaatgcataggcgttgcaatatgatagcgatattgcaaccaacaaattccattgcgcgaagcatccgttttg

SEQ ID NO: 445018 - DNA, 391 bp, Triticum aestivum
atgcccgggccgacgccgatctcgaaatcgggctaaggtacgactgggggaagttctacgcgtccaatacgttctatgatccggcaaagaagcggcgtgtgctgtgggggtgggtcggcgagaccgactctgagcgcgccgacgtcgccaagggatgggcctcgctccagtcggcccctcgcactgtggtgctggacaccaagacaggaagcaacctccttcagtggccggtggaggaggtggagacgctccggaccaactccactgaccttggcggcgtcaccattgaccgcggctccgtctttccactcagccttcatcgcgccacccagctagacgtcgaggccacattccgcctcgatccgctagacatcgccgtcgccaacgatgc

SEQ ID NO: 445019 - DNA, 250 bp, Triticum aestivum
ctacggcagcgacgccgccgttctttggggcagctcagccaccctccatcagagcggcatcttagacgaagaaccaacctcgctaccagtaaacagactgcatctggaactctggaaagtatgagcgacatcctggcctccgagggaagccgccgccgtcaccggcccggtcgcggtagaccgtaatatactgaataaaccaagtccggctacctgtacaaaagtcaaataaattcaattcaatgaaaat

SEQ ID NO: 445020 - DNA, 419 bp, Triticum aestivum
cgggtcgacgggcacccgaggtgagcacgcctgctcctccccctcccctacctctgcctagctagggttcttcaaattttagttgcatcaaattagttagggttcatctatgggtggaaatgaatcggatacggatgcggctcagatgttttcttagatattgctcaaataggatatgtgcttgcccaagtggccggtcatgtttgcaggttacacctctgactggcctatgttttgccggagtgttgattcatttccgttccgacaaatttcaggcgctcgatatgtcctattttagcaaaggtcatgccggatttgttcgtgaattttggcatgacttgtgccagaatttgtaggaaatattgagtgccccggatttgtgtgttgagtatcctggtagttgtcttcgatcgattttc

SEQ ID NO: 445021 - DNA, 425 bp, Triticum aestivum
  unsure (1)..(425): unsure at all n locations
ggggagtctcaagtcgatacctatgtgcgtgtttttccacggaaattttcaaaactcaaagtagtacatttttgtttgccaagttttagaaagtgggtagaccgaaatcagggatcactctactacttcctctgttcacttttataaggccttgtagacatttcagacagcatgcaaagcaggtcagttgtttgaaacgaattataaaagtgaacgtagggagcggtgactgtacatctctcagtggttggaaacatggaagagcggtacgggcaagctttaaccataagtagcccacactgaggcctgatttcccagcacaaaagttgctcgcaacagagaactgggcggtatccanagacggagcacatgatgaagagtgaacaaaactggcagcggagagtgggaggagaggagaggagagg

SEQ ID NO: 445022 - DNA, 88 bp, Triticum aestivum
cgggccgacggggaatctaaaatcgggaccgacgtgcgtgtttttcgagcgaaggtttcaaggctcactttcctaaagtattgtactg

SEQ ID NO: 445023 - DNA, 120 bp, Triticum aestivum
aagagacaaatgcttgcataatcaagtaagggcgcagcttattttagtgcgctttttgttgatttgttagggttacatggcaacttgtgataatgggattatgagtctgatacgctcttc
